(19) United States
(12) Patent Application Publication
(10) Pub. No.: US 2002/0137139 A1
(43) Pub. Date: Sep. 26, 2002

(54) Nucleic acid and other molecules associated with lactation and muscle and fat deposition

(76) Inventors: John C. Byatt, Ballwin, MO (US); Nagappan Mathialagan, Ballwin, MO (US); Nengbing Tao, O'Fallon, MO (US); Wesley C. Warren, Chesterfield, MO (US)

Correspondence Address: ARNOLD & PORTER, IP DOCKETING DEPARTMENT; RM 1126(b), 555 12TH STREET, N.W., WASHINGTON, DC, 20004-1206, US

(21) Appl. No.: 09/960,352

(22) Filed: Sep. 24, 2001

Related U.S. Application Data
(63) Continuation of application No. 09/480,902, filed on Jan. 11, 2000.
(60) Provisional application No. 60/115,707, filed on Jan. 12, 1999.

(51) Int. Cl. C12P 21/02; C12N 5/06; C07H 21/04

(52) U.S. Cl. 435/69.1; 435/325; 435/320.1; 536/23.1

(57) ABSTRACT

The present invention is in the field of bovine biochemistry and genetics. More specifically the invention relates to nucleic acid sequences from cattle, in particular, nucleic acid sequences associated with lactation and muscle and fat deposition. The invention encompasses nucleic acid molecules that encode proteins and fragments of proteins. In addition, the invention also encompasses proteins and fragments of proteins so encoded and antibodies capable of binding these proteins or fragments. The invention also relates to methods of using the nucleic acid molecules, proteins and fragments of proteins, and antibodies, for example for genome mapping, gene identification and analysis, cattle breeding, preparation of constructs for use in cattle gene expression, and genetically improved cattle.

### FIELD OF THE INVENTION

[0001] The present invention is in the field of bovine biochemistry and genetics. More specifically the invention relates to nucleic acid sequences from cattle, in particular, nucleic acid sequences associated with lactation and muscle and fat deposition. The invention encompasses nucleic acid molecules that encode proteins and fragments of proteins. In addition, the invention also encompasses proteins and fragments of proteins so encoded and antibodies capable of binding these proteins or fragments. The invention also relates to methods of using the nucleic acid molecules, proteins and fragments of proteins, and antibodies, for example for genome mapping, gene identification and analysis, cattle breeding, preparation of constructs for use in cattle gene expression, and genetically improved cattle.

### BACKGROUND OF THE INVENTION

[0002] I. Bovine Genetics and Biochemistry

[0003] Various tissues comprised of numerous cell types support a homeostatic system. Homeostasis is defined as the internal environment naturally maintained by responses to support survival. These responses to metabolic demand during growth and lactation are essential for optimal productivity in bovine. More specifically, physiological states such as lactation, muscle and fat deposition require pathway interaction to ensure homeostasis.

[0004] All female mammals are able to produce milk to feed their young; it is this ability which defines the order Mammalia. Milk is produced by a specialized exocrine organ called the mammary gland. This organ differs greatly in morphology depending on the species, but in general it is comprised of the same basic cell types. The secretory cells are of epithelial origin and during lactation are typically organized in a branching ductal structure with terminal alveoli. Mammary epithelial cells form tight junctions between themselves during lactation which prevents the passive diffusion of macromolecules from the milk into blood and vice versa. The secretory cells orient themselves on a basal matrix and only secrete milk components from their apical surface, into the alveolar lumen. The epithelial cells of the alveoli and smaller ducts are surrounded on the outer surface by a network of contractile myoepithelial cells. These cells help to squeeze accumulated milk out of the alveolar lumen during suckling (or milking in dairy animals). This activity is controlled by the endocrine action of oxytocin, which is released from the posterior pituitary during the suckling/milking process. Together the epithelial and myoepithelial cells form the parenchyma. The other major cell types present in mammary gland are fibroblasts and adipocytes which form the stroma and which to varying degrees, surrounds the ducts and alveoli. Although the fibroblasts and adipocytes don't directly synthesize milk components, these cells interact with the parenchymal cells and influence the development of the mammary gland. The stroma lays down much of the matrix required for correct function of the epithelial cells as well as generating the connective tissue that supports the gland in species such as the dairy cow. It has been reported that the stromal and parenchymal components of the mammary gland regulate each other by secretion of paracrine factors. Finally, as with all tissues, there are endothelial cells which make up the vessels and capillaries which supply the gland with blood as well as blood cells themselves. Mammary secretion (and thus mammary tissue) also normally contains leukocytes (25,000 to 100,000/ml) which help to prevent bacterial infection of the gland. However, the number of leukocytes present in the tissue increases dramatically in the event of bacterial infection (mastitis). Thus, a cDNA library prepared from mammary gland will contain copies of messages expressed not only by the predominant epithelial cells, but also by fibroblastic, endothelial and hematopoietic cells.

[0005] Unlike most organs, the mammary gland is only required to function periodically. In consequence, it has a number of well defined stages of development in addition to lactation. In general, the mammary gland is rudimentary in juvenile females and displays isometric growth up until puberty. At the onset of puberty, under the influence of steroids produced by the ovaries, the parenchymal portion of the gland grows more rapidly than the rest of the body (allometric growth). Usually there is little additional growth of the mammary gland until pregnancy. The majority of mammary growth (mammogenesis) occurs during pregnancy in preparation for providing milk for the neonate(s). Differentiation of the epithelial cells into secretory cells also occurs during late gestation into the early postpartum period. This process of differentiation, during which dramatic changes in the morphology of cells occurs as they acquire the capacity to synthesize milk specific components, is often referred to as lactogenesis. During lactation or galactopoiesis, the composition of the secretion will often change to best suit the needs of the neonate. The composition of the milk, the degree of change in composition and the length of the lactation varies greatly by species. However, the milk of most species is composed primarily of water which contains sugar (galactose), proteins and fat globules. At the conclusion of lactation, when the young are weaned (or the animal is no longer milked) the gland undergoes a process of involution. During involution the epithelial cells dedifferentiate and lose their ability to make milk specific components and in some species the epithelial cells undergo programmed cell death. Thus, the messages expressed by the mammary gland vary greatly depending on the stage of development of the gland.

[0006] The function of the mammary gland is regulated by endocrine signals that ensure that it normally only secretes milk for a period following the birth of the neonate. Endocrine hormones regulate the processes of mammogenesis, lactogenesis, galactopoiesis and to some degree involution. Growth of the gland is controlled in large part by ovarian steroids (estrogen and progesterone), but is also regulated by somatotropin secreted by the pituitary and perhaps by placental lactogen produced by the feto-placental unit during pregnancy. Lactogenesis is regulated by many hormones including progesterone and corticosteroids, but in all species so far studied, pituitary prolactin is essential for initiating differentiation of the mammary gland. Pituitary hormones also control galactopoiesis, most species are dependent on the presence of prolactin for continued lactation, whereas in domestic ruminants, somatotropin appears to play a larger role in maintaining lactation.

[0007] During lactation, the amount of milk produced by the mammary gland is a function of two variables. First, the number of epithelial cells present in the gland; the greater the number of secretory cells, the greater the volume of milk that can be produced. Second, the average secretory activity of each of the epithelial cells. The number of epithelial cells is regulated by two processes; cell proliferation and cell death. Furthermore, cell death can be due to cell damage, such as damage caused by mastitic infection or by programmed cell death (apoptosis) that occurs in the mammary gland of many species at involution. These two processes have been reported to be carried out concurrently in certain species. If they are in balance, cell number will remain constant, whereas if new cells are being produced more rapidly through cell proliferation than are dying through the process of apoptosis, then total cell number in the gland will increase. The average secretory activity of secretory cells may also be affected by a number of factors. Administration of bovine somatotropin to lactating dairy cattle increases milk yield by increasing the average output per secretory cell. Histologic examination of lactating bovine mammary tissue reveals that often the tissue is not homogeneous in its degree of differentiation. While some clusters of alveoli appear to be fully differentiated and engorged with milk products, adjacent alveoli may display very little secretory morphology.

[0008] Lactation in many species, particularly dairy cattle that have been specifically bred for high milk production, requires that a significant portion of ingested energy and metabolites are directed towards milk synthesis. In high producing dairy animals, a dramatic shift in metabolism occurs during the first few weeks of lactation in order to provide sufficient metabolites for milk synthesis. In cattle, gluconeogenesis in the liver provides the majority of glucose required for mammary lactose synthesis. This organ also breaks down nonesterified fatty acids as an additional energy source if there is insufficient acetate and volatile fatty acids coming from digestion. The metabolism of muscle and adipose tissue is also modulated during lactation and by hormones such as bovine somatotropin that stimulate galactopoiesis. Thus, the responsiveness of lactating dairy cows to bovine somatotropin is determined in part by how effectively gluconeogenesis in muscle tissue is down-regulated, and also by a shift in the ratio of lipogenesis to lipolysis in adipose tissue.

[0009] Examination of growth in mammalian species has produced a large array of literature. The manipulation of livestock through the use of diet and productivity enhancers has been reviewed (Boorman et al. (eds), The Control of Fat and Lean Deposition, Butterworths, London (1992)). Literature on meat producing animals has focused on muscle growth. Skeletal muscle is needed for locomotion and as a ready reservoir of protein storage for the animal, and is considered a good source of protein for dietary consumption. A balance is maintained between protein synthesis and degradation for optimal muscle growth. For protein synthesis, the process of translation proceeds through three steps 1) formation of the initiation complex that contains two ribosome units, 2) peptide chain elongation and 3) the process of termination. These stages are controlled by the hormonal milieu present during a specific development timeline.

[0010] Muscle itself is composed of numerous cell types such as fibroblasts, adipocytes, endothelial cells, mononucleate satellite cells and muscle fibers. Of these the muscle fibers comprise the majority of muscle protein. Muscle fibers form by the fusion of mononucleate cells, which at that point make differentiation irreversible. Mature fibers range in size from a hundred microns to several centimeters in length. Within muscle fibers the existence of two distinct muscle cell populations, the fused and unfused, make the delineation of hypertrophy (cell enlargement) and hyperplasia (cell number) difficult to study.

[0011] The patterns of muscle cell development can be divided into embryonic, fetal and postnatal patterns. During embryonic development, precursor myogenic cells undergo a series of differentiation states which ultimately define their muscle cell lineage. Certain genes are temporally expressed for defined muscle cell lineage. For example, genes encoding a family of DNA binding proteins transform fibroblasts to myoblasts (Braun et al., EMBO Journal 9:821-831 (1990)). Moreover, the ski gene expressed in genetically improved mice demonstrates a hypertrophied muscle phenotype. A knockout of myostatin, a member of the TGF beta family, exhibited muscle hypertrophy. Also, this population of cells remains capable of proliferation and differentiation in response to injury.

[0012] In placental mammals, the number of muscle fibers is fixed at birth or shortly thereafter, depending on the species. These muscle satellite cells are abundant in the young animal and decrease with age. Once muscle cell growth slows in the adult animal, fat deposition accelerates. Fat accretion occurs in a non-random manner at distinct sites such as in the abdominal cavity, under the skin and between and within muscle fibers. These fat deposits serve a variety of functions in addition to their role in energy supply. For example, the mammary gland is dependent on fat for growth.

[0013] II. Sequence Comparisons

[0014] A DNA sequence can be compared with other DNA sequences to determine homology. Sequence comparisons can be undertaken by determining the similarity of the test or query sequence with sequences in publicly available or proprietary databases (“similarity analysis”) or by searching for certain motifs (“intrinsic sequence analysis”)(e.g. cis elements) (Coulson, Trends in Biotechnology 12:76-80 (1994), the entirety of which is herein incorporated by reference); Birren et al., Genome Analysis 1: Cold Spring Harbor Laboratory Press, Cold Spring Harbor, N.Y. 543-559 (1997), the entirety of which is herein incorporated by reference).

[0015] Similarity analysis includes database search and alignment. Examples of public databases include the DNA Database of Japan (DDBJ)(http://www.ddbj.nig.ac.jp/); Genebank (http://www.ncbi.nlm.nih.gov/Web/Search/Index.htlm); and the European Molecular Biology Laboratory Nucleic Acid Sequence Database (EMBL) (http://www.ebi.ac.uk/ebi_docs/embl_db/embl-db.html). Other appropriate databases include dbEST (http://www.ncbi.nlm.nih.gov/dbEST/index.html), SwissProt (http://www.ebi.ac.uk/ebi_docs/swisprot_db/swisshome.html), PIR (http://wwwnbrt.georgetown.edu pir/ and The Institute for Genome Research (http://www.tigr.org/tdb/tdb.html).

[0016] A number of different search algorithms have been developed, one example of which are the suite of programs referred to as BLAST programs. There are five implementations of BLAST, three designed for nucleotide sequences queries (BLASTN, BLASTX, and TBLASTX) and two designed for protein sequence queries (BLASTP and TBLASTN) (Coulson, Trends in Biotechnology 12:76-80 (1994); Birren et al., Genome Analysis 1: Cold Spring Harbor Laboratory Press, Cold Spring Harbor, N.Y. 543-559 (1997)).

[0017] BLASTN takes a nucleotide sequence (the query sequence) and its reverse complement and searches them against a nucleotide sequence database. BLASTN was designed for speed, not maximum sensitivity, and may not find distantly related coding sequences. BLASTX takes a nucleotide sequence, translates it in three forward reading frames and three reverse complement reading frames, and then compares the six translations against a protein sequence database. BLASTX is useful for sensitive analysis of preliminary (single-pass) sequence data and is tolerant of sequencing errors (Gish and States, Nature Genetics 3:266-272 (1993), the entirety of which is herein incorporated by reference). BLASTN and BLASTX may be used in concert for analyzing EST data (Coulson, Trends in Biotechnology 12:76-80 (1994); Birren et al., Genome Analysis 1:543-559 (1997)).

[0018] Given a coding nucleotide sequence and the protein it encodes, it is often preferable to use the protein as the query sequence to search a database because of the greatly increased sensitivity to detect more subtle relationships. This is due to the larger alphabet of proteins (20 amino acids) compared with the alphabet of nucleic acid sequences (4 bases), where it is far easier to obtain a match by chance. In addition, with nucleotide alignments, only a match (positive score) or a mismatch (negative score) is obtained, but with proteins, the presence of conservative amino acid substitutions can be taken into account. Here, a mismatch may yield a positive score if the non-identical residue has physical/chemical properties similar to the one it replaced. Various scoring matrices are used to supply the substitution scores of all possible amino acid pairs. A general purpose scoring system is the BLOSUM62 matrix (Henikoff and Henikoff, Proteins 17:49-61 (1993), the entirety of which is herein incorporated by reference), which is currently the default choice for BLAST programs. BLOSUM62 is tailored for alignments of moderately diverged sequences and thus may not yield the best results under all conditions. Altschul, J. Mol. Biol. 36:290-300 (1993), the entirety of which is herein incorporated by reference, describes a combination of three matrices to cover all contingencies. This may improve sensitivity, but at the expense of slower searches. In practice, a single BLOSUM62 matrix is often used but others (PAM40 and PAM250) may be attempted when additional analysis is necessary. Low PAM matrices are directed at detecting very strong but localized sequence similarities, whereas high PAM matrices are directed at detecting long but weak alignments between very distantly related sequences.

[0019] Homologues in other organisms are available for comparative sequence analysis. Multiple alignments are performed to study similarities and differences in a group of related sequences. CLUSTAL W is a multiple sequence alignment package that performs progressive multiple sequence alignments based on the method of Feng and Doolittle, J. Mol. Evol. 25:351-360 (1987), the entirety of which is herein incorporated by reference. Each pair of sequences is aligned and the distance between each pair is calculated; from this distance matrix, a guide tree is calculated, and all of the sequences are progressively aligned based on this tree. A feature of the program is its sensitivity to the effect of gaps on the alignment; gap penalties are varied to encourage the insertion of gaps in probable loop regions instead of in the middle of structured regions. Users can specify gap penalties, choose between a number of scoring matrices, or supply their own scoring matrix for both pairwise alignments and multiple alignments. CLUSTAL W for UNIX and VMS systems is available at: ftp.ebi.ac.uk. Another program is MACAW (Schuler et al., Proteins Struct. Func. Genet. 9:180-190 (1991), the entirety of which is herein incorporated by reference, for which both Macintosh and Microsoft Windows versions are available. MACAW uses a graphical interface, provides a choice of several alignment algorithms, and is available by anonymous ftp at: ncbi.nlm.nih.gov (directory/pub/macaw).

[0020] Sequence motifs are derived from multiple alignments and can be used to examine individual sequences or an entire database for subtle patterns. With motifs, it is sometimes possible to detect distant relationships that may not be demonstrable based on comparisons of primary sequences alone. Currently, the largest collection of sequence motifs in the world is PROSYTE (Bairoch and Bucher, Nucleic Acid Research 22:3583-3589 (1994), the entirety of which is herein incorporated by reference). PROSITE may be accessed via either the ExPASy server on the World Wide Web or anonymous ftp site. Many commercial sequence analysis packages also provide search programs that use PROSITE data.

[0021] A resource for searching protein motifs is the BLOCKS E-mail server developed by Henikoff, Trends Biochem Sci. 18:267-268 (1993), the entirety of which is herein incorporated by reference; Henikoff and Henikoff, Nucleic Acid Research 19:6565-6572 (1991), the entirety of which is herein incorporated by reference; Henikoff and Henikoff, Proteins 17:49-61 (1993). BLOCKS searches a protein or nucleotide sequence against a database of protein motifs or “blocks.” Blocks are defined as short, ungapped multiple alignments that represent highly conserved protein patterns. The blocks themselves are derived from entries in PROSITE as well as other sources. Either a protein query or a nucleotide query can be submitted to the BLOCKS server; if a nucleotide sequence is submitted, the sequence is translated in all six reading frames and motifs are sought for these conceptual translations. Once the search is completed, the server will return a ranked list of significant matches, along with an alignment of the query sequence to the matched BLOCKS entries.

[0022] Conserved protein domains can be represented by two-dimensional matrices, which measure either the frequency or probability of the occurrences of each amino acid residue and deletions or insertions in each position of the domain. This type of model, when used to search against protein databases, is sensitive and usually yields more accurate results than simple motif searches. Two popular implementations of this approach are profile searches such as GCG program ProfileSearch and Hidden Markov Models (HMMs)(Krough et al., J. Mol. Biol. 235:1501-1531, (1994); Eddy, Current Opinion in Structural Biology 6:361-365, (1996), both of which are herein incorporated by reference in their entirety). In both cases,-a large number of common protein domains have been converted into profiles, as present in the PROSITE library, or HHM models, as in the Pfam protein domain library (Sonnhammer et al., Proteins 28:405420 (1997), the entirety of which is herein incorporated by reference). Pfam contains more than 500 HMM models for enzymes, transcription factors, signal transduction molecules, and structural proteins. Protein databases can be queried with these profiles or HMM models, which will identify proteins containing the domain of interest. For example, HMMSW or HMMFS, two programs in a public domain package called HMMER (Sonnhammer et al., Proteins 28:405-420 (1997)) can be used.

[0023] PROSFIE and BLOCKS represent collected families of protein motifs. Thus, searching these databases entails submitting a single sequence to determine whether or not that sequence is similar to the members of an established family. Programs working in the opposite direction compare a collection of sequences with individual entries in the protein databases. An example of such a program is the Motif Search Tool, or MoST (Tatusov et al., Proc. Natl. Acad. Sci. (U.S.A.) 91:12091-12095 (1994), the entirety of which is herein incorporated by reference). On the basis of an aligned set of input sequences, a weight matrix is calculated by using one of four methods (selected by the user). A weight matrix is simply a representation, position by position of the probability that a particular amino acid will appear. The calculated weight matrix is then used to search the databases. To increase sensitivity, newly found sequences are added to the original data set, the weight matrix is recalculated, and the search is performed again. This procedure continues until no new sequences are found.

### SUMMARY OF THE INVENTION

[0024] The present invention provides a substantially purified nucleic acid molecule, the nucleic acid molecule capable of specifically hybridizing to a second nucleic acid molecule, the second nucleic acid having a nucleic acid sequence selected from the group consisting of SEQ ID NO: 1 through SEQ ID NO: 15,112 or complements thereof.

[0025] The present invention also provides a substantially purified nucleic acid molecule having a nucleic acid sequence selected from the group consisting of SEQ ID NO: 1 through SEQ ID NO: 15,112 or complements thereof or fragments of either.

[0026] The present invention also provides a substantially purified bovine protein or fragment thereof encoded by a nucleic acid molecule, the nucleic acid molecule capable of specifically hybridizing to a second nucleic acid molecule, the second nucleic acid molecule having a nucleic acid sequence selected from the group consisting of SEQ ID NO: 1 through SEQ ID NO: 15,112 or fragment thereof.

[0027] The present invention also provides a substantially purified antibody or fragment thereof, the antibody or fragment thereof capable of specifically binding to bovine protein or fragment thereof encoded by a nucleic acid molecule, the nucleic acid molecule capable of specifically hybridizing to a second nucleic acid molecule, the second nucleic acid molecule having a nucleic acid sequence selected from the group consisting of SEQ ID NO: 1 through SEQ ID NO: 15,112 or fragment thereof.

[0028] The present invention also provides a transformed cell having a nucleic acid molecule which comprises: (A) an exogenous promoter region which functions in the cell to cause the production of a mRNA molecule; which is linked to (B) a structural nucleic acid molecule encoding a bovine protein or fragment thereof, the structural nucleic acid molecule capable of specifically hybridizing to a second nucleic acid molecule, the second nucleic acid molecule having a nucleic acid sequence selected from the group consisting of a complement of SEQ ID NO: 1 through SEQ ID NO: 15,112; which is linked to (C) a 3′ non-translated sequence that functions in the cell to cause termination of transcription and addition of polyadenylated ribonucleotides to a 3′ end of the mRNA molecule.

[0029] The present invention also provides a bovine having an exogenous nucleic acid molecule, the exogenous nucleic acid molecule comprising: (A) an exogenous promoter region which functions in the cell to cause the production of a mRNA molecule; which is linked to (B) a structural nucleic acid molecule encoding a bovine protein or fragment thereof, the structural nucleic acid molecule capable of specifically hybridizing to a second nucleic acid molecule, the second nucleic acid molecule having a nucleic acid sequence selected from the group consisting of a complement of SEQ ID NO: 1 through SEQ ID NO: 15,112, which is linked to (C) a 3′ non-translated sequence that functions in the cell to cause termination of transcription and addition of polyadenylated ribonucleotides to a 3′ end of the mRNA molecule.

[0030] The present invention also provides a computer readable medium having recorded thereon one or more of the nucleotide sequences depicted in SEQ ID NO: 1 through SEQ ID NO: 15,112 or complements thereof.

[0031] The present invention also provides a method for determining a level or pattern of a molecule in a bovine cell or tissue comprising: (A) incubating, under conditions permitting nucleic acid hybridization, a marker nucleic acid molecule, the marker nucleic acid molecule comprising a nucleic acid sequence selected from the group consisting of SEQ ID NO: 1 through SEQ ID NO: 15,112 or complements thereof or fragment of either, with a complementary nucleic acid molecule obtained from the bovine cell or tissue, wherein nucleic acid hybridization between the marker nucleic acid molecule and the complementary nucleic acid molecule obtained from the bovine cell or tissue permits the detection of the molecule; (B) permitting hybridization between the marker nucleic acid molecule and the complementary nucleic acid molecule obtained from the bovine cell or tissue; and (C) detecting the level or pattern of the complementary nucleic acid, wherein the detection of the complementary nucleic acid is predictive of the level or pattern of molecule.

[0032] The present invention also provides a method for determining a level or pattern of a protein in a bovine cell or tissue under evaluation which comprises assaying the concentration of a molecule, whose concentration is dependent upon the expression of a gene, the gene specifically hybridizes to a nucleic acid molecule comprising a nucleic acid sequence selected from the group consisting of SEQ ID NO: 1 through SEQ ID NO: 15,112 or complements thereof, in comparison to the concentration of that molecule present in a reference bovine cell or tissue with a known level or pattern of the protein, wherein the assayed concentration of the molecule is compared to the assayed concentration of the molecule in the reference bovine cell or tissue with the known level or pattern of the protein.

[0033] The present invention also provides a method for determining a mutation in a bovine whose presence is predictive of a mutation affecting the level or pattern of a protein comprising the steps: (A) incubating, under conditions permitting nucleic acid hybridization, a marker nucleic acid molecule, the marker nucleic acid molecule comprising a nucleic acid molecule that is linked to a gene, the gene specifically hybridizes to a nucleic acid molecule comprising a nucleic acid sequence selected from the group consisting of SEQ ID NO: 1 through SEQ ID NO: 15,112 or complements thereof and a complementary nucleic acid molecule obtained from the bovine, wherein nucleic acid hybridization between the marker nucleic acid molecule and the complementary nucleic acid molecule obtained from the bovine permits the detection of a polymorphism whose presence is predictive of a mutation affecting the level or pattern of the protein in the bovine; (B) permitting hybridization between the marker nucleic acid molecule and the complementary nucleic acid molecule obtained from the bovine; and (C) detecting the presence of the polymorphism, wherein the detection of the polymorphism is predictive of the mutation.

[0034] The present invention also provides a method of determining an association between a polymorphism and a bovine trait comprising: (A) hybridizing a nucleic acid molecule specific for the polymorphism to genetic material of a bovine, wherein the nucleic acid molecule has a nucleic acid sequence selected from the group consisting of SEQ ID NO: 1 through SEQ ID NO: 15,112 or complements thereof or fragment of either; and (B) calculating the degree of association between the polymorphism and the bovine trait.

[0035] The present invention also provides a method of isolating a nucleic acid that encodes a protein or fragment thereof comprising: (A) incubating under conditions permitting nucleic acid hybridization, a first nucleic acid molecule comprising a nucleic acid sequence selected from the group consisting of SEQ ID NO: 1 through SEQ ID NO: 15,112 or complements thereof or fragment of either with a complementary second nucleic acid molecule obtained from a bovine cell or tissue; (B) permitting hybridization between the first nucleic acid molecule and the second nucleic acid molecule obtained from the bovine cell or tissue; and (C) isolating the second nucleic acid molecule.

### DETAILED DESCRIPTION OF THE INVENTION

[0036] Agents of the Present Invention

[0037] (a) Nucleic Acid Molecules

[0038] Agents of the present invention include mammalian nucleic acid molecules, and more specifically include bovine nucleic acid molecules, particularly from the cattle breed Holstein. As used herein, bovine and cattle (cow) are used synomously, and cattle includes dairy and beef cattle. A preferred embodiment is dairy cattle. Another preferred embodiment is ovine.

[0039] A subset of the nucleic acid molecules of the present invention includes nucleic acid molecules that are marker molecules. Another subset of the nucleic acid molecules of the present invention include nucleic acid molecules that encode a protein or fragment thereof. Another subset of the nucleic acid molecules of the present invention are EST molecules.

[0040] Fragment nucleic acid molecules may encode significant portion(s) of, or indeed most of, these nucleic acid molecules. Alternatively, the fragments may comprise smaller oligonucleotides (having from about 15 to about 250 nucleotide residues, and more preferably, about 15 to about 30 nucleotide residues).

[0041] As used herein, an agent, be it a naturally occurring molecule or otherwise may be “substantially purified”, if desired, referring to a molecule separated from substantially all other molecules normally associated with it in its native state. More preferably a substantially purified molecule is the predominant species present in a preparation. A substantially purified molecule may be greater than 60% free, preferably 75% free, more preferably 90% free, and most preferably 95% free from the other molecules (exclusive of solvent) present in the natural mixture. The term “substantially purified” is not intended to encompass molecules present in their native state.

[0042] The agents of the present invention will preferably be “biologically active” with respect to either a structural attribute, such as the capacity of a nucleic acid to hybridize to another nucleic acid molecule, or the ability of a protein to be bound by an antibody (or to compete with another molecule for such binding). Alternatively, such an attribute may be catalytic, and thus involve the capacity of the agent to mediate a chemical reaction or response.

[0043] The agents of the present invention may also be recombinant. As used herein, the term recombinant means any agent (e.g., DNA, peptide etc.), that is, or results, however indirect, from human manipulation of a nucleic acid molecule.

[0044] It is understood that the agents of the present invention may be labeled with reagents that facilitate detection of the agent (e.g. fluorescent labels, Prober et al., Science 238:336-340 (1987); Albarella et al., EP 144914; chemical labels, Sheldon et al., U.S. Pat. No. 4,582,789; Albarella et al., U.S. Pat. No. 4,563,417; modified bases, Miyoshi et al., EP 119448, all of which are hereby incorporated by reference in their entirety).

[0045] It is further understood, that the present invention provides recombinant bovine, bacterial, mammalian, microbial, insect, fungal, plant cell, and viral constructs comprising the agents of the present invention. (See, for example, Uses of the Agents of the Invention, Section (a) Bovine Constructs, Bovine Transformed Cells and Genetically Improved Bovines (b) Non-Bovine Mammalian Constructs, Non-Bovine Transformed Mammalian Cells and Non-Bovine Trangenics; Section (c) Insect Constructs and Transformed Insect Cells; Section (d) Bacterial Constructs and Transformed Bacterial Cells; Section (e) Fungal Constructs and Transformed Fungal Cells; and Section (f) Plant Constructs, Transformed Plant Cells and Plant Transformants).

[0046] Nucleic acid molecules or fragments thereof of the present invention are capable of specifically hybridizing to other nucleic acid molecules under certain circumstances. As used herein, two nucleic acid molecules are said to be capable of specifically hybridizing to one another if the two molecules are capable of forming an anti-parallel, double-stranded nucleic acid structure. A nucleic acid molecule is said to be the “complement” of another nucleic acid molecule if they exhibit complete complementarity. As used herein, molecules are said to exhibit “complete complementarity” when every nucleotide of one of the molecules is complementary to a nucleotide of the other. Two molecules are said to be “minimally complementary” if they can hybridize to one another with sufficient stability to permit them to remain annealed to one another under at least conventional “low-stringency” conditions. Similarly, the molecules are said to be “complementary” if they can hybridize to one another with sufficient stability to permit them to remain annealed to one another under conventional “high-stringency” conditions. Conventional stringency conditions are described by Sambrook et al., Molecular Cloning, A Laboratory Manual, 2nd Ed., Cold Spring Harbor Press, Cold Spring Harbor, N.Y. (1989), and by Haymes et al. Nucleic Acid Hybridization, A Practical Approach, IRL Press, Washington, D.C. (1985), the entirety of which is herein incorporated by reference. Departures from complete complementarity are therefore permissible, as long as such departures do not completely preclude the capacity of the molecules to form a double-stranded structure. Thus, in order for a nucleic acid molecule to serve as a primer or probe it need only be sufficiently complementary in sequence to be able to form a stable double-stranded structure under the particular solvent and salt concentrations employed.

[0047] Appropriate stringency conditions which promote DNA hybridization, for example, 6.0×sodium chloride/sodium citrate (SSC) at about 45° C., followed by a wash of 2.0×SSC at 50° C., are known to those skilled in the art or can be found in Current Protocols in Molecular Biology, John Wiley & Sons, N.Y. (1989), 6.3.1-6.3.6. For example, the salt concentration in the wash step can be selected from a low stringency of about 2.0×SSC at 50° C. to a high stringency of about 0.2×SSC at 50° C. In addition, the temperature in the wash step can be increased from low stringency conditions at room temperature, about 22° C., to high stringency conditions at about 65° C. Both temperature and salt may be varied, or either the temperature or the salt concentration may be held constant while the other variable is changed.

[0048] In a preferred embodiment, a nucleic acid of the present invention will specifically hybridize to one or more of the nucleic acid molecules set forth in SEQ ID NO: 1 through SEQ ID NO: 15,112 or complements thereof under moderately stringent conditions, for example at about 2.0×SSC and about 65° C.

[0049] In a particularly preferred embodiment, a nucleic acid of the present invention will include those nucleic acid molecules that specifically hybridize to one or more of the nucleic acid molecules set forth in SEQ ID NO: 1 through SEQ ID NO: 15,112 or complements thereof under high stringency conditions such as 0.2×SSC and about 65° C.

[0050] In one aspect of the present invention, the nucleic acid molecules of the present invention have one or more of the nucleic acid sequences set forth in SEQ ID NO: 1 through to SEQ ID NO: 15,112 or complements thereof. In another aspect of the present invention, one or more of the nucleic acid molecules of the present invention share between 100% and 90% sequence identity with one or more of the nucleic acid sequences set forth in SEQ ID NO: 1 through to SEQ ID NO: 15,112 or complements thereof. In a further aspect of the present invention, one or more of the nucleic acid molecules of the present invention share between 100% and 95% sequence identity with one or more of the nucleic acid sequences set forth in SEQ ID NO: 1 through to SEQ ID NO: 15,112 or complements thereof. In a more preferred aspect of the present invention, one or more of the nucleic acid molecules of the present invention share between 100% and 98% sequence identity with one or more of the nucleic acid sequences set forth in SEQ ID NO: 1 through to SEQ ID NO: 15,112 or complements thereof. In an even more preferred aspect of the present invention, one or more of the nucleic acid molecules of the present invention share between 100% and 99% sequence identity with one or more of the sequences set forth in SEQ ID NO: 1 through to SEQ ID NO: 15,112 or complements thereof.

[0051] In a further more preferred aspect of the present invention, one or more of the nucleic acid molecules of the present invention exhibit 100% sequence identity with a nucleic acid molecule present within the following libraries: LIB13, LIB34, LIB3058, L1B3057, LIB188, and LLIB2809 (Monsanto Company, St. Louis, Mo., U.S.A.).

[0052] (i) Nucleic Acid Molecules Encoding Proteins or Fragments Thereof

[0053] Nucleic acid molecules of the present invention can comprise sequences that encode a protein or fragment thereof. Such proteins or fragments thereof include homologues of known proteins in other organisms.

[0054] In a preferred embodiment of the present invention, a bovine protein or fragment thereof of the present invention is a homologue of another bovine protein. In another preferred embodiment of the present invention, a bovine or fragment thereof of the present invention is a homologue of a non-bovine mammalian protein. In another preferred embodiment of the present invention, a bovine protein of the present invention is a homologue of a human protein. In another preferred embodiment of the present invention, a bovine protein or fragment thereof of the present invention is a homologue of a mouse protein. In another preferred embodiment of the present invention, a bovine protein or fragment thereof of the present invention is a homologue of a rat protein. In another preferred embodiment of the present invention, a bovine protein or fragment thereof of the present invention is a homologue of a goat protein. In another preferred embodiment of the present invention, a bovine protein or fragment thereof of the present invention is a homologue of a hamster protein. In another preferred embodiment of the present invention, a bovine protein or fragment thereof of the present invention is a homologue of a pig protein. In another preferred embodiment of the present invention, a bovine protein or fragment thereof of the present invention is a homologue of a fungal protein. In another preferred embodiment of the present invention, a bovine protein or fragment thereof of the present invention is a homologue of a bacterial protein. In another preferred embodiment of the present invention, a bovine protein or fragment thereof of the present invention is a homologue of a viral protein.

[0055] In a preferred embodiment of the present invention, an ovine protein or fragment thereof of the present invention is a homologue of another ovine protein. In another preferred embodiment of the present invention, an ovine or fragment thereof of the present invention is a homologue of a non-ovine mammalian protein. In another preferred embodiment of the present invention, an ovine protein of the present invention is a homologue of a human protein. In another preferred embodiment of the present invention, an ovine protein or fragment thereof of the present invention is a homologue of a mouse protein. In another preferred embodiment of the present invention, an ovine protein or fragment thereof of the present invention is a homologue of a rat protein. In another preferred embodiment of the present invention, an ovine protein or fragment thereof of the present invention is a homologue of a goat protein. In another preferred embodiment of the present invention, an ovine protein or fragment thereof of the present invention is a homologue of a hamster protein. In another preferred embodiment of the present invention, an ovine protein or fragment thereof of the present invention is a homologue of a pig protein. In another preferred embodiment of the present invention, an ovine protein or fragment thereof of the present invention is a homologue of a fungal protein. In another preferred embodiment of the present invention, an ovine protein or fragment thereof of the present invention is a homologue of a bacterial protein. In another preferred embodiment of the present invention, an ovine protein or fragment thereof of the present invention is a homologue of a viral protein.

[0056] In a preferred embodiment of the present invention, the nucleic molecule of the present invention encodes a bovine protein or fragment thereof where a bovine protein exhibits a BLAST probability score of greater than 1E-12, preferably a BLAST probability score of between about 1E-30 and about 1E-12, even more preferably a BLAST probability score of greater than 1E-30 with its homologue.

[0057] In a preferred embodiment of the present invention, the nucleic molecule of the present invention encodes a bovine homologue protein or fragment thereof where a bovine protein exhibits a BLAST score of greater than 120, preferably a BLAST score of between about 1450 and about 120, even more preferably a BLAST score of greater than 1450 with its homologue.

[0058] In another preferred embodiment of the present invention, the nucleic acid molecule encoding a bovine protein or fragment thereof or fragment thereof exhibits a % identity with its homologue of between about 25%and about 40%, more preferably of between about 40 and about 70%, even more preferably of between about 70% and about 90%, and even more preferably between about 90% and 99%. In another preferred embodiment, of the present invention, a bovine protein or fragments thereof exhibits 100% identity with its homologue.

[0059] Nucleic acid molecules of the present invention also include non-bovine homologues. Preferred non-bovine homologues are selected from the group consisting of mammalian homologues. Even more preferred non-bovine homologues are ovine homologues.

[0060] In a preferred embodiment, nucleic acid molecules having SEQ ID NO: 1 through SEQ ID NO: 15,112 or complements and fragments of either can be utilized to obtain such homologues.

[0061] The degeneracy of the genetic code, which allows different nucleic acid sequences to code for the same protein or peptide, is known in the literature (U.S. Pat. No. 4,757,006, the entirety of which is herein incorporated by reference).

[0062] In an aspect of the present invention, one or more of the nucleic acid molecules of the present invention differ in nucleic acid sequence from those encoding bovine proteins or fragments thereof in SEQ ID NO: 1 through SEQ ID NO: 15,112 due to the degeneracy in the genetic code in that they encode the same protein but differ in nucleic acid sequence.

[0063] In another further aspect of the present invention, one or more of the nucleic acid molecules of the present invention differ in nucleic acid sequence from those encoding bovine protein or fragment thereof in SEQ ID NO: 1 through SEQ ID NO: 15,112 due to fact that the different nucleic acid sequence encodes a protein having one or more conservative amino acid residue. Examples of conservative substitutions are set forth in Table 1. It is understood that codons capable of coding for such conservative substitutions are known in the art.

TABLE 1

| Original Residue | Conservative Substitutions |
|---|---|
| Ala | Ser |
| Arg | Lys |
| Asn | Gln; His |
| Asp | Glu |
| Cys | Ser; Ala |
| Gln | Asn |
| Glu | Asp |
| Gly | Pro |
| His | Asn; Gln |
| Ile | Leu; Val |
| Leu | Ile; Val |
| Lys | Arg; Gln; Glu |
| Met | Leu; Ile |
| Phe | Met; Leu; Tyr |
| Ser | Thr |
| Thr | Ser |
| Trp | Tyr |
| Tyr | Trp; Phe |
| Val | Ile; Leu |

[0064] In a further aspect of the present invention, one or more of the nucleic acid molecules of the present invention differ in nucleic acid sequence from those encoding a bovine protein or fragment thereof set forth in SEQ ID NO: 1 through SEQ ID NO: 15,112 or fragment thereof due to the fact that one or more codons encoding an amino acid has been substituted for a codon that encodes a nonessential substitution of the amino acid originally encoded.

[0065] (ii) Nucleic Acid Molecule Markers and Probes

[0066] One aspect of the present invention concerns marker nucleic acid molecules. Such marker nucleic acid molecules preferrables include those nucleic molecules comprising SEQ ID NO: 1 through SEQ ID NO: 15,112 or complements thereof or fragments of either or other nucleic acid molecules of the present invention that can act as markers. Genetic markers of the present invention include “dominant” or “codominant” markers. “Codominant markers” reveal the presence of two or more alleles (two per diploid individual) at a locus. “Dominant markers” reveal the presence of only a single allele per locus. The presence of the dominant marker phenotype (e.g., a band of DNA) is an indication that one allele is present in either the homozygous or heterozygous condition. The absence of the dominant marker phenotype (e.g. absence of a DNA band) is merely evidence that “some other” undefined allele is present. In the case of populations where individuals are predominantly homozygous and loci are predominately dimorphic, dominant and codominant markers can be equally valuable. As populations become more heterozygous and multi-allelic, codominant markers often become more informative of the genotype than dominant markers. Marker molecules can be, for example, capable of detecting polymorphisms such as single nucleotide polymorphisms (SNPs).

[0067] SNPs are single base changes in genomic DNA sequence. They occur at greater frequency and are spaced with a greater uniformly throughout a genome than other reported forms of polymorphism. The greater frequency and uniformity of SNPs means that there is greater probability that such a polymorphism will be found near or in a genetic locus of interest than would be the case for other polymorphisms. SNPs are located in protein-coding regions and noncoding regions of a genome. Some of these SNPs may result in defective or variant protein expression (e.g., as a results of mutations or defective splicing). Analysis (genotyping) of characterized SNPs can require only a plus/minus assay rather than a lengthy measurement, permitting easier automation.

[0068] SNPs can be characterized using any of a variety of methods. Such methods include the direct or indirect sequencing of the site, the use of restriction enzymes (Botstein et al., Am. J. Hum. Genet. 32:314-331 (1980), the entirety of which is herein incorporated reference; Konieczny and Ausubel, Plant J. 4:403-410 (1993), the entirety of which is herein incorporated by reference), enzymatic and chemical mismatch assays (Myers et al., Nature 313:495-498 (1985), the entirety of which is herein incorporated by reference), allele-specific PCR (Newton et al., Nucl. Acids Res. 17:2503-2516 (1989), the entirety of which is herein incorporated by reference; Wu et al., Proc. Natl. Acad. Sci. (U.S.A.) 86:2757-2760 (1989), the entirety of which is herein incorporated by reference), ligase chain reaction (Barany, Proc. Natl. Acad. Sci. (U.S.A.) 15 88:189-193 (1991), the entirety of which is herein incorporated by reference), single-strand conformation polymorphism analysis (Labrune et al., Am. J. Hum. Genet. 48:1115-1120 (1991), the entirety of which is herein incorporated by reference), primer-directed nucleotide incorporation assays (Kuppuswami et al., Proc. Natl. Acad. Sci. USA 88:1143-1147 (1991), the entirety of which is herein incorporated by reference), dideoxy fingerprinting (Sarkar et al., Genomics 13:441-443 (1992), the entirety of which is herein incorporated by reference), solid-phase ELISA-based oligonucleotide ligation assays (Nikiforov et al., Nucl. Acids Res. 22:4167-4175 (1994), the entirety of which is herein incorporated by reference), oligonucleotide fluorescence-quenching assays (Livak et al., PCR Methods Appl. 4:357-362 (1995), the entirety of which is herein incorporated by reference), 5′-nuclease allele-specific hybridization TaqMan assay (Livak et al., Nature Genet. 9:341-342 (1995), the entirety of which is herein incorporated by reference), template-directed dye-terminator incorporation (TDI) assay (Chen and Kwok, Nucl. Acids Res. 25:347-353 (1997), the entirety of which is herein incorporated by reference), allele-specific molecular beacon assay (Tyagi et al., Nature Biotech. 16:49-53 (1998), the entirety of which is herein incorporated by reference), PinPoint assay (Haff and Smirnov, Genome Res. 7:378-388 (1997), the entirety of which is herein incorporated by reference), and dCAPS analysis (Neff et al., Plant J. 14:387-392 (1998), the entirety of which is herein incorporated by reference).

[0069] Additional markers, such as AFLP markers, RFLP markers, and RAPD markers, can be utilized (Burow and Blake, Molecular Dissection of Complex Traits, 13-29, Paterson (ed.), CRC Press, New York (1988), the entirety of which is herein incorporated by reference). DNA markers can be developed from nucleic acid molecules using restriction endonucleases, the PCR and/or DNA sequence information. RFLP markers result from single base changes or insertions/deletions. These codominant markers are highly abundant, have a medium level of polymorphism and are developed by a combination of restriction endonuclease digestion and Southern blotting hybridization. CAPS are similarly developed from restriction nuclease digestion but only of specific PCR products. These markers are also codominant, have a medium level of polymorphism and are highly abundant in the genome. The CAPS result from single base changes and insertions/deletions.

[0070] Another marker type, RAPDs, are developed from DNA amplification with random primers and result from single base changes and insertions/deletions. They are dominant markers with a medium level of polymorphisms and are highly abundant. AFLP markers require using the PCR on a subset of restriction fragments from extended adapter primers. These markers are both dominant and codominant are highly abundant in genomes and exhibit a medium level of polymorphism.

[0071] SSRs require DNA sequence information. These codominant markers result from repeat length changes, are highly polymorphic, and do not exhibit as high a degree of abundance in the genome as CAPS, AFLPs and RAPDs SNPs also require DNA sequence information. These codominant markers result from single base substitutions. They are highly abundant and exhibit a medium of polymorphism (Rafalski et al., the entirety of which is herein incorporated by reference). It is understood that a nucleic acid molecule of the present invention may be used as a marker.

[0072] A PCR primer is a nucleic acid molecule capable of initiating a polymerase activity while in a double-stranded structure to with another nucleic acid. Various methods for determining the structure of PCR primer and PCR techniques exist in the art. Computer generated searches using programs such as Primer3 (www-genome.wi.mit.edu/cgi-bin/primer/primer3.cgi), STSPipeline (www-genome.wi.mit.edu/cgi-bin/www-STS Pipeline), or GeneUp (Pesole et al., BioTechniques 25:112-123 (1998) the entirety of which is herein incorporated by reference), for example, can be used to identify potential PCR primers.

[0073] It is understood that a fragment of one or more of the nucleic acid molecules of the present invention may be a primer and specifically a PCR primer.

[0074] (b) Protein and Peptide Molecules

[0075] A class of agents comprises one or more of the protein or fragments thereof or peptide molecules encoded by SEQ ID NO: 1 through SEQ ID NO: 15,112 or one or more of the protein or fragment thereof and peptide molecules encoded by other nucleic acid agents of the present invention. As used herein, the term “protein molecule” or “peptide molecule” includes any molecule that comprises five or more amino acids. It is well known in the art that proteins may undergo modification, including post-translational modifications, such as, but not limited to, disulfide bond formation, glycosylation, phosphorylation, or oligomerization. Thus, as used herein, the term “protein molecule” or “peptide molecule” includes any protein molecule that is modified by any biological or non-biological process. The terms “amino acid” and “amino acids” refer to all naturally occurring L-amino acids. This definition is meant to include norleucine, ornithine, homocysteine, and homoserine.

[0076] Non-limiting examples of the protein or fragment molecules of the present invention are those protein or fragment thereof encoded by: SEQ ID NO: 1 through SEQ ID NO: 15,112 or fragment thereof.

[0077] One or more of the protein or fragment of peptide molecules may be produced via chemical synthesis, or more preferably, by expressing in a suitable bacterial or eukaryotic host. Suitable methods for expression are described by Sambrook et al., (In: Molecular Cloning, A Laboratory Manual, 2nd Edition, Cold Spring Harbor Press, Cold Spring Harbor, N.Y. (1989)), or similar texts. For example, the protein may be expressed in, for example, bovine, bacterial, mammalian, microbial, insect, fungal and plant cells (See, for example, Uses of the Agents of the Invention, Section (a) Bovine Constructs, Bovine Transformed Cells and Genetically Improved Bovines (b) Non-Bovine Mammalian Constructs, Non-Bovine Transformed Mammalian Cells and Non-Bovine Trangenics; Section (c) Insect Constructs and Transformed Insect Cells; Section (d) Bacterial Constructs and Transformed Bacterial Cells; Section (e) Fungal Constructs and Transformed Fungal Cells; and Section (f) Plant Constructs, Transformed Plant Cells and Plant Transformants).

[0078] A “protein fragment” is a peptide or polypeptide molecule whose amino acid sequence comprises a subset of the amino acid sequence of that protein. A protein or fragment thereof that comprises one or more additional peptide regions not derived from that protein is a “fusion” protein. Such molecules may be derivatized to contain carbohydrate or other moieties (such as keyhole limpet hemocyanin, etc.). Fusion protein or peptide molecules of the present invention are preferably produced via recombinant means.

[0079] Another class of agents comprise protein or peptide molecules or fragments or fusions thereof encoded by SEQ ID NO: 1 through SEQ ID NO: 15,112 or complements thereof in which conservative, non-essential or non-relevant amino acid residues have been added, replaced or deleted. Computerized means for designing modifications in protein structure are known in the art (Dahiyat and Mayo, Science 278:82-87 (1997), the entirety of which is herein incorporated by reference).

[0080] The protein molecules of the present invention include bovine homologue proteins. An example of such a homologue is a homologue protein of a non-bovine species, that include but not limited to sheep, human, rat, goat, mouse, hamster, and pig.

[0081] Such a homologue can be obtained by any of a variety of methods. Most preferably, as indicated above, one or more of the disclosed sequences (SEQ ID NO: 1 through SEQ ID NO: 15,112 or complements thereof) will be used to define a pair of primers that may be used to isolate the homologue-encoding nucleic acid molecules from any desired species. Such molecules can be expressed to yield homologues by recombinant means.

[0082] (c) Antibodies

[0083] One aspect of the present invention concerns antibodies, single-chain antigen binding molecules, or other proteins that specifically bind to one or more of the protein or peptide molecules of the present invention and their homologues, fusions or fragments. Such antibodies may be used to quantitatively or qualitatively detect the protein or peptide molecules of the present invention. As used herein, an antibody or peptide is said to “specifically bind” to a protein or peptide molecule of the present invention if such binding is not competitively inhibited by the presence of non-related molecules.

[0084] Nucleic acid molecules that encode all or part of the protein of the present invention can be expressed, via recombinant means, to yield protein or peptides that can in turn be used to elicit antibodies that are capable of binding the expressed protein or peptide. Such antibodies may be used in immunoassays for that protein. Such protein-encoding molecules, or their fragments may be a “fusion” molecule (i.e., a part of a larger nucleic acid molecule) such that, upon expression, a fusion protein is produced. It is understood that any of the nucleic acid molecules of the present invention may be expressed, via recombinant means, to yield proteins or peptides encoded by these nucleic acid molecules.

[0085] The antibodies that specifically bind proteins and protein fragments of the present invention may be polyclonal or monoclonal, and may comprise intact immunoglobulins, or antigen binding portions of immunoglobulins fragments (such as (F(ab′), F(ab′)₂), or single-chain immunoglobulins producible, for example, via recombinant means. It is understood that practitioners are familiar with the standard resource materials which describe specific conditions and procedures for the construction, manipulation and isolation of antibodies (see, for example, Harlow and Lane, In: Antibodies: A Laboratory Manual, Cold Spring Harbor Press, Cold Spring Harbor, N.Y. (1988), the entirety of which is herein incorporated by reference).

[0086] Murine monoclonal antibodies are particularly preferred. BALB/c mice are preferred for this purpose, however, equivalent strains may also be used. The animals are preferably immunized with approximately 25 μg of purified protein (or fragment thereof) that has been emulsified in a suitable adjuvant (such as TiterMax adjuvant (Vaxcel, Norcross, Ga.)). Immunization is preferably conducted at two intramuscular sites, one intraperitoneal site, and one subcutaneous site at the base of the tail. An additional i.v. injection of approximately 25 μg of antigen is preferably given in normal saline three weeks later. After approximately 11 days following the second injection, the mice may be bled and the blood screened for the presence of anti-protein or peptide antibodies. Preferably, a direct binding Enzyme-Linked Immunoassay (ELISA) is employed for this purpose.

[0087] More preferably, the mouse having the highest antibody titer is given a third i.v. injection of approximately 25 μg of the same protein or fragment. The splenic leukocytes from this animal may be recovered 3 days later, and then permitted to fuse, most preferably, using polyethylene glycol, with cells of a suitable myeloma cell line (such as, for example, the P3X63Ag8.653 myeloma cell line). Hybridoma cells are selected by culturing the cells under “HAT” (hypoxanthine-aminopterin-thymine) selection for about one week. The resulting clones may then be screened for their capacity to produce monoclonal antibodies (“mAbs”), preferably by direct ELISA.

[0088] In one embodiment, anti-protein or peptide monoclonal antibodies are isolated using a fusion of a protein or peptide of the present invention, or conjugate of a protein or peptide of the present invention, as immunogens. Thus, for example, a group of mice can be immunized using a fusion protein emulsified in Freund's complete adjuvant (e.g. approximately 50 μg of antigen per immunization). At three week intervals, an identical amount of antigen is emulsified in Freund's incomplete adjuvant and used to immunize the animals. Ten days following the third immunization, serum samples are taken and evaluated for the presence of antibody. If antibody titers are too low, a fourth booster can be employed. Polysera capable of binding the protein or peptide can also be obtained using this method.

[0089] In a preferred procedure for obtaining monoclonal antibodies, the spleens of the above-described immunized mice are removed, disrupted, and immune splenocytes are isolated over a ficoll gradient. The isolated splenocytes are fused, using polyethylene glycol with BALB/c-derived HGPRT (hypoxanthine guanine phosphoribosyl transferase) deficient P3x63xAg8.653 plasmacytoma cells. The fused cells are plated into 96 well microtiter plates and screened for hybridoma fusion cells by their capacity to grow in culture medium supplemented with hypothanthine, aminopterin and thymidine for approximately 2-3 weeks.

[0090] Hybridoma cells that arise from such incubation are preferably screened for their capacity to produce an immunoglobulin that binds to a protein of interest. An indirect ELISA may be used for this purpose. In brief, the supernatants of hybridomas are incubated in microtiter wells that contain immobilized protein. After washing, the titer of bound immunoglobulin can be determined using, for example, a goat anti-mouse antibody conjugated to horseradish peroxidase. After additional washing, the amount of immobilized enzyme is determined (for example through the use of a chromogenic substrate). Such screening is performed as quickly as possible after the identification of the hybridoma in order to ensure that a desired clone is not overgrown by non-secreting neighbor cells. Desirably, the fusion plates are screened several times since the rates of hybridoma growth vary. In a preferred sub-embodiment, a different antigenic form may be used to screen the hybridoma. Thus, for example, the splenocytes may be immunized with one immunogen, but the resulting hybridomas can be screened using a different immunogen. It is understood that any of the protein or peptide molecules of the present invention may be used to raise antibodies.

[0091] As discussed below, such antibody molecules or their fragments may be used for diagnostic purposes. Where the antibodies are intended for diagnostic purposes, it may be desirable to derivatize them, for example with a ligand group (such as biotin) or a detectable marker group (such as a fluorescent group, a radioisotope or an enzyme).

[0092] The ability to produce antibodies that bind the protein or peptide molecules of the present invention permits the identification of mimetic compounds of those molecules. A “mimetic compound” refers to a compound having similar functional and/or structural properties to another known compound or a particular fragment of that known compound. Mimetic compounds can be synthesized chemically. Combinatorial chemistry techniques, for example, can be used to produce libraries of peptides (see WO 9700267), polyketides (see WO 960968), peptide analogues (see WO 9635781, WO 9635122, and WO 9640732), oligonucleotides for use as mimetic compounds derived from this invention. Mimetic compounds and libraries can also be generated through recombinant DNA-derived techniques. For example, phage display libraries (see WO 9709436), DNA shuffling (see U.S. Pat. No. 5,811,238) other directed or random mutagenesis techniques can produce libraries of expressed mimetic compounds.

[0093] It is understood that any of the agents of the present invention can be substantially purified and/or be biologically active and/or recombinant.

[0094] Uses of the Agents of the Invention

[0095] Nucleic acid molecules and fragments thereof of the present invention may be employed to obtain other nucleic acid molecules from the same species (e.g., ESTs or fragment thereof from bovine may be utilized to obtain other nucleic acid molecules from bovine). Such nucleic acid molecules include the nucleic acid molecules that encode the complete coding sequence of a protein and promoters and flanking sequences of such molecules. In addition, such nucleic acid molecules include nucleic acid molecules that encode for other isozymes or gene family members. Such molecules can be readily obtained by using the above-described nucleic acid molecules or fragments thereof to screen cDNA or genomic libraries obtained from bovine. Methods for forming such libraries are well known in the art.

[0096] Nucleic acid molecules and fragments thereof of the present invention may also be employed to obtain nucleic acid homologues. Such homologues include the nucleic acid molecule of other organisms (particularly preferred other organisms are human, rat, goat, mouse, hamster and pig) including the nucleic acid molecules that encode, in whole or in part, protein homologues of other organisms, sequences of genetic elements such as promoters and transcriptional regulatory elements. Such molecules can be readily obtained by using the above-described nucleic acid molecules or fragments thereof to screen cDNA or genomic libraries obtained from such plant species. Methods for forming such libraries are well known in the art. Such homologue molecules may differ in their nucleotide sequences from those found in one or more of SEQ ID NO: 1 through SEQ ID NO: 15,112 or complements thereof because complete complementarity is not needed for stable hybridization. The nucleic acid molecules of the present invention therefore also include molecules that, although capable of specifically hybridizing with the nucleic acid molecules may lack “complete complementarity.”

[0097] Any of a variety of methods may be used to obtain one or more of the above-described nucleic acid molecules (Zamechik et al., Proc. Natl. Acad. Sci. (U.S.A.) 83:4143-4146 (1986), the entirety of which is herein incorporated by reference; Goodchild et al., Proc. Natl. Acad. Sci. (U.S.A.) 85:5507-5511 (1988), the entirety of which is herein incorporated by reference; Wickstrom et al., Proc. Natl. Acad. Sci. (U.S.A.) 85:1028-1032 (1988), the entirety of which is herein incorporated by reference; Holt et al., Molec. Cell. Biol. 8:963-973 (1988), the entirety of which is herein incorporated by reference; Gerwirtz et al., Science 242:1303-1306 (1988), the entirety of which is herein incorporated by reference; Anfossi et al., Proc. Natl. Acad. Sci. (U.S.A.) 86:3379-3383 (1989), the entirety of which is herein incorporated by reference; Becker et al., EMBO J. 8:3685-3691 (1989); the entirety of which is herein incorporated by reference). Automated nucleic acid synthesizers may be employed for this purpose. In lieu of such synthesis, the disclosed nucleic acid molecules may be used to define a pair of primers that can be used with the polymerase chain reaction (Mullis et al., Cold Spring Harbor Symp. Quant. Biol. 51:263-273 (1986); Erlich et al., European Patent 50,424; European Patent 84,796; European Patent 258,017; European Patent 237,362; Mullis, European Patent 201,184; Mullis et al., U.S. Pat. No. 4,683,202; Erlich, U.S. Pat. No. 4,582,788; and Saiki et al., U.S. Pat. No. 4,683,194, all of which are herein incorporated by reference in their entirety) to amplify and obtain any desired nucleic acid molecule or fragment.

[0098] Promoter sequence(s) and other genetic elements, including but not limited to transcriptional regulatory flanking sequences, associated with one or more of the disclosed nucleic acid sequences can also be obtained using the disclosed nucleic acid sequence provided herein. In one embodiment, such sequences are obtained by incubating EST nucleic acid molecules or preferably fragments thereof with members of genomic libraries (e.g. bovine) and recovering clones that hybridize to the EST nucleic acid molecule or fragment thereof. In a second embodiment, methods of “chromosome walking,” or inverse PCR may be used to obtain such sequences (Frohman et al., Proc. Natl. Acad. Sci. (U.S.A.) 85:8998-9002 (1988); Ohara et al., Proc. Natl. Acad. Sci. (U.S.A.) 86:5673-5677 (1989); Pang et al., Biotechniques 22:1046-1048 (1977); Huang et al., Methods Mol. Biol. 69:89-96 (1997); Huang et al., Method Mol. Biol. 67:287-294 (1997); Benkel et al., Genet. Anal. 13:123-127 (1996); Hartl et al., Methods Mol. Biol. 58:293-301 (1996), all of which are herein incorporated by reference in their entirety).

[0099] The nucleic acid molecules of the present invention may be used to isolate promoters of cell enhanced, cell specific, tissue enhanced, tissue specific, developmentally or environmentally regulated expression profiles. Isolation and functional analysis of the 5′ flanking promoter sequences of these genes from genomic libraries, for example, using genomic screening methods and PCR techniques,would result in the isolation of useful promoters and transcriptional regulatory elements. These methods are known to those of skill in the art and have been described (See, for example, Birren et al., Genome Analysis: Analyzing DNA, 1, (1997), Cold Spring Harbor Laboratory Press, Cold Spring Harbor, N.Y., the entirety of which is herein incorporated by reference). Promoters obtained utilizing the nucleic acid molecules of the present invention could also be modified to affect their control characteristics. Examples of such modifications would include but are not limited to enhanced sequences as reported in Uses of the Agents of the Invention, Section (a) Bovine Constructs, Bovine Transformed Cells and Genetically Improved Bovines. Such genetic elements could be used to enhance gene expression of new and existing traits for cattle improvements.

[0100] In one sub-aspect, such an analysis is conducted by determining the presence and/or identity of polymorphism(s) by one or more of the nucleic acid molecules of the present invention and more preferably one or more of the EST nucleic acid molecule or fragment thereof which are associated with a phenotype, or a predisposition to that phenotype.

[0101] Any of a variety of molecules can be used to identify such polymorphism(s). In one embodiment, one or more of the EST nucleic acid molecules (or a sub-fragment thereof) may be employed as a marker nucleic acid molecule to identify such polymorphism(s). Alternatively, such polymorphisms can be detected through the use of a marker nucleic acid molecule or a marker protein that is genetically linked to (i.e., a polynucleotide that co-segregates with) such polymorphism(s).

[0102] In an alternative embodiment, such polymorphisms can be detected through the use of a marker nucleic acid molecule that is physically linked to such polymorphism(s). For this purpose, marker nucleic acid molecules comprising a nucleotide sequence of a polynucleotide located within 1 mb of the polymorphism(s), and more preferably within 100 kb of the polymorphism(s), and most preferably within 10 kb of the polymorphism(s)can be employed.

[0103] The genomes of animals and plants naturally undergo spontaneous mutation in the course of their continuing evolution (Gusella, Ann. Rev. Biochem. 55:831-854 (1986)). A “polymorphism” is a variation or difference in the sequence of the gene or its flanking regions that arises in some of the members of a species. The variant sequence and the “original” sequence co-exist in the species' population. In some instances, such co-existence is in stable or quasi-stable equilibrium.

[0104] A polymorphism is thus said to be “allelic,” in that, due to the existence of the polymorphism, some members of a species may have the original sequence (i.e., the original “allele”) whereas other members may have the variant sequence (i.e., the variant “allele”). In the simplest case, only one variant sequence may exist, and the polymorphism is thus said to be di-allelic. In other cases, the species' population may contain multiple alleles, and the polymorphism is termed tri-allelic, etc. A single gene may have multiple different unrelated polymorphisms. For example, it may have a di-allelic polymorphism at one site, and a multi-allelic polymorphism at another site.

[0105] The variation that defines the polymorphism may range from a single nucleotide variation to the insertion or deletion of extended regions within a gene. In some cases, the DNA sequence variations are in regions of the genome that are characterized by short tandem repeats (STRs) that include tandem di- or tri-nucleotide repeated motifs of nucleotides. Polymorphisms characterized by such tandem repeats are referred to as “variable number tandem repeat” (“VNTR”) polymorphisms. VNTRs have been used in identity analysis (Weber, U.S. Pat. No. 5,075,217; Armour et al., FEBS Lett. 307:113-115 (1992); Jones et al., Eur. J. Haematol. 39:144-147 (1987); Horn et al., PCT Patent Application WO91/14003; Jeffreys, European Patent Application 370,719; Jeffreys, U.S. Pat. No. 5,175,082; Jeffreys et al., Amer. J. Hum. Genet. 39:11-24 (1986); Jeffreys et al., Nature 316:76-79 (1985); Gray et al., Proc. R. Acad. Soc. Lond. 243:241-253 (1991); Moore et al., Genomics 10:654-660 (1991); Jeffreys et al., Anim. Genet. 18:1-15 (1987); Hillel et al., Anim. Genet. 20:145-155 (1989); Hillel et al., Genet. 124:783-789 (1990), all of which are herein incorporated by reference in their entirety).

[0106] The detection of polymorphic sites in a sample of DNA may be facilitated through the use of nucleic acid amplification methods. Such methods specifically increase the concentration of polynucleotides that span the polymorphic site, or include that site and sequences located either distal or proximal to it. Such amplified molecules can be readily detected by gel electrophoresis or other means.

[0107] The most preferred method of achieving such amplification employs the polymerase chain reaction (“PCR”) (Mullis et al., Cold Spring Harbor Symp. Quant. Biol. 51:263-273 (1986); Erlich et al., European Patent Appln. 50,424; European Patent Appln. 84,796; European Patent Application 258,017; European Patent Appln. 237,362; Mullis, European Patent Appln. 201,184; Mullis et al., U.S. Pat. No. 4,683,202; Erlich, U.S. Pat. No. 4,582,788; and Saiki et al., U.S. Pat. No. 4,683,194), using primer pairs that are capable of hybridizing to the proximal sequences that define a polymorphism in its double-stranded form.

[0108] In lieu of PCR, alternative methods, such as the “Ligase Chain Reaction” (“LCR”) may be used (Barany, Proc. Natl. Acad. Sci. (U.S.A.) 88:189-193 (1991), the entirety of which is herein incorporated by reference). LCR uses two pairs of oligonucleotide probes to exponentially amplify a specific target. The sequences of each pair of oligonucleotides is selected to permit the pair to hybridize to abutting sequences of the same strand of the target. Such hybridization forms a substrate for a template-dependent ligase. As with PCR, the resulting products thus serve as a template in subsequent cycles, and an exponential amplification of the desired sequence is obtained.

[0109] LCR can be performed with oligonucleotides having the proximal and distal sequences of the same strand of a polymorphic site. In one embodiment, either oligonucleotide will be designed to include the actual polymorphic site of the polymorphism. In such an embodiment, the reaction conditions are selected such that the oligonucleotides can be ligated together only if the target molecule either contains or lacks the specific nucleotide that is complementary to the polymorphic site present on the oligonucleotide. Alternatively, the oligonucleotides may be selected such that they do not include the polymorphic site (see, Segev, PCT Application WO 90/01069, the entirety of which is herein incorporated by reference).

[0110] The “Oligonucleotide Ligation Assay” (“OLA”) may alternatively be employed (Landegren et al., Science 241:1077-1080 (1988), the entirety of which is herein incorporated by reference). The OLA protocol uses two oligonucleotides which are designed to be capable of hybridizing to abutting sequences of a single strand of a target. OLA, like LCR, is particularly suited for the detection of point mutations. Unlike LCR, however, OLA results in “linear” rather than exponential amplification of the target sequence.

[0111] Nickerson et al., have described a nucleic acid detection assay that combines attributes of PCR and OLA (Nickerson et al., Proc. Natl. Acad. Sci. (U.S.A.) 87:8923-8927 (1990), the entirety of which is herein incorporated by reference). In this method, PCR is used to achieve the exponential amplification of target DNA, which is then detected using OLA. In addition to requiring multiple, and separate, processing steps, one problem associated with such combinations is that they inherit all of the problems associated with PCR and OLA.

[0112] Schemes based on ligation of two (or more) oligonucleotides in the presence of nucleic acid having the sequence of the resulting “di-oligonucleotide”, thereby amplifying the di-oligonucleotide, are also known (Wu et al., Genomics 4:560-569 (1989), the entirety of which is herein incorporated by reference), and may be readily adapted to the purposes of the present invention.

[0113] Other known nucleic acid amplification procedures, such as allele-specific oligomers, branched DNA technology, transcription-based amplification systems, or isothermal amplification methods may also be used to amplify and analyze such polymorphisms (Malek et al., U.S. Pat. No. 5,130,238; Davey et al., European Patent Application 329,822; Schuster et al., U.S. Pat. No. 5,169,766; Miller et al., PCT Patent Application WO 89/06700; Kwoh et al., Proc. Natl. Acad. Sci. (U.S.A.) 86:1173-1177 (1989); Gingeras et al., PCT Patent Application WO 88/10315; Walker et al., Proc. Natl. Acad. Sci. (U.S.A.) 89:392-396 (1992), all of which are herein incorporated by reference in their entirety).

[0114] The identification of a polymorphism can be determined in a variety of ways. By correlating the presence or absence of it in a cow with the presence or absence of a phenotype, it is possible to predict the phenotype of that cow. If a polymorphism creates or destroys a restriction endonuclease cleavage site, or if it results in the loss or insertion of DNA (e.g., a VNTR polymorphism), it will alter the size or profile of the DNA fragments that are generated by digestion with that restriction endonuclease. As such, individuals that possess a variant sequence can be distinguished from those having the original sequence by restriction fragment analysis. Polymorphisms that can be identified in this manner are termed “restriction fragment length polymorphisms” (“RFLPs”). RFLPs have been widely used in human and plant genetic analyses (Glassberg, UK Patent Application 2135774; Skolnick et al., Cytogen. Cell Genet. 32:58-67 (1982); Botstein et al., Ann. J. Hum. Genet. 32:314-331 (1980); Fischer et al., (PCT Application WO90/13668); Uhlen, PCT Application WO90/11369).

[0115] Polymorphisms can also be identified by Single Strand Conformation Polymorphism (SSCP) analysis. SSCP is a method capable of identifying most sequence variations in a single strand of DNA, typically between 150 and 250 nucleotides in length (Elles, Methods in Molecular Medicine: Molecular Diagnosis of Genetic Diseases, Humana Press (1996), the entirety of which is herein incorporated by reference); Orita et al., Genomics 5:874-879 (1989), the entirety of which is herein incorporated by reference). Under denaturing conditions a single strand of DNA will adopt a conformation that is uniquely dependent on its sequence conformation. This conformation usually will be different, even if only a single base is changed. Most conformations have been reported to alter the physical configuration or size sufficiently to be detectable by electrophoresis. A number of protocols have been described for SSCP including, but not limited to, Lee et al., Anal. Biochem. 205:289-293 (1992), the entirety of which is herein incorporated by reference; Suzuki et al., Anal. Biochem. 192:82-84 (1991), the entirety of which is herein incorporated by reference; Lo et al., Nucleic Acids Research 20:1005-1009 (1992), the entirety of which is herein incorporated by reference; Sarkar et al., Genomics 13:441-443 (1992), the entirety of which is herein incorporated by reference. It is understood that one or more of the nucleic acids of the present invention, may be utilized as markers or probes to detect polymorphisms by SSCP analysis.

[0116] Polymorphisms may also be found using a DNA fingerprinting technique called amplified fragment length polymorphism (AFLP), which is based on the selective PCR amplification of restriction fragments from a total digest of genomic DNA to profile that DNA (Vos et al., Nucleic Acids Res. 23:4407-4414 (1995), the entirety of which is herein incorporated by reference). This method allows for the specific co-amplification of high numbers of restriction fragments, which can be visualized by PCR without knowledge of the nucleic acid sequence.

[0117] AFLP employs basically three steps. Initially, a sample of genomic DNA is cut with restriction enzymes and oligonucleotide adapters are ligated to the restriction fragments of the DNA. The restriction fragments are then amplified using PCR by using the adapter and restriction sequence as target sites for primer annealing. The selective amplification is achieved by the use of primers that extend into the restriction fragments, amplifying only those fragments in which the primer extensions match the nucleotide flanking the restriction sites. These amplified fragments are then visualized on a denaturing polyacrylamide gel.

[0118] AFLP analysis has been performed on Salix (Beismann et al., Mol. Ecol. 6:989-993 (1997), the entirety of which is herein incorporated by reference), Acinetobacter (Janssen et al., Int. J. Syst. Bacteriol. 47:1179-1187 (1997), the entirety of which is herein incorporated by reference), Aeromonas popoffi (Huys et al., Int. J. Syst. Bacteriol. 47:1165-1171 (1997), the entirety of which is herein incorporated by reference), rice (McCouch et al., Plant Mol. Biol. 35:89-99 (1997), the entirety of which is herein incorporated by reference; Nandi et al., Mol. Gen. Genet. 255:1-8 (1997), the entirety of which is herein incorporated by reference; Cho et al., Genome 39:373-378 (1996), the entirety of which is herein incorporated by reference), barley (Hordeum vulgare)(Simons et al., Genomics 44:61-70 (1997), the entirety of which is herein incorporated by reference; Waugh et al., Mol. Gen. Genet. 255:311-321 (1997), the entirety of which is herein incorporated by reference; Qi et al., Mol. Gen Genet. 254:330-336 (1997), the entirety of which is herein incorporated by reference; Becker et al., Mol. Gen. Genet. 249:65-73 (1995), the entirety of which is herein incorporated by reference), potato (Van der Voort et al., Mol. Gen. Genet. 255:438-447 (1997), the entirety of which is herein incorporated by reference; Meksem et al., Mol. Gen. Genet. 249:74-81 (1995), the entirety of which is herein incorporated by reference), Phytophthora infestans (Van der Lee et al., Fungal Genet. Biol. 21:278-291 (1997), the entirety of which is herein incorporated by reference), Bacillus anthracis (Keim et al., J. Bacteriol. 179:818-824 (1997), the entirety of which is herein incorporated by reference), Astragalus cremnophylax (Travis et al., Mol. Ecol. 5:735-745 (1996), the entirety of which is herein incorporated by reference), Arabidopsis (Cnops et al., Mol. Gen. Genet. 253:32-41 (1996), the entirety of which is herein incorporated by reference), Escherichia coli (Lin et al., Nucleic Acids Res. 24:3649-3650 (1996), the entirety of which is herein incorporated by reference), Aeromonas (Huys et al., Int. J. Syst. Bacteriol. 46:572-580 (1996), the entirety of which is herein incorporated by reference), nematode (Folkertsma et al., Mol. Plant Microbe Interact. 9:47-54 (1996), the entirety of which is herein incorporated by reference), tomato (Thomas et al., Plant J. 8:785-794 (1995), the entirety of which is herein incorporated by reference), cattle (Ajmone-Marsen et al., Anim. Genetics 28:418426 (1997), the entirety of which is herein incorporated by reference and human (Latorra et al., PCR Methods Appl. 3:351-358 (1994), the entirety of which is herein incorporated by reference). AFLP analysis has also been used for fingerprinting mRNA (Money et al., Nucleic Acids Res. 24:2616-2617 (1996), the entirety of which is herein incorporated by reference; Bachem et al., Plant J. 9:745-753 (1996), the entirety of which is herein incorporated by reference). It is understood that one or more of the nucleic acids of the present invention may be utilized as markers or probes to detect polymorphisms by AFLP analysis or for fingerprinting RNA.

[0119] Polymorphisms may also be found using random amplified polymorphic DNA (RAPD) (Williams et al., Nuci. Acids Res. 18:6531-6535 (1990), the entirety of which is herein incorporated by reference) and cleaveable amplified polymorphic sequences (CAPS) (Lyamichev et al., Science 260:778-783 (1993), the entirety of which is herein incorporated by reference). It is understood that one or more of the nucleic acid molecules of the present invention, may be utilized as markers or probes to detect polymorphisms by RAPD or CAPS analysis.

[0120] Through genetic mapping, a fine scale linkage map can be developed using DNA markers, and, then, a genomic DNA library of large-sized fragments can be screened with molecular markers linked to the desired trait.

[0121] Current dairy breeding programs are often centered around selection of bulls for artificial insemination. Selection of sire and dam are important steps in any such program. It is understood that one or more nucleic acid or other molecule of the present invention may be used to assist in pedigree selection of the sire or dam for the production of replacement heifers. It is also understood that the nucleic acid molecules may be used to select appropriate embryos for implantation. Such embryos can be screened using one or nucleic acid molecules of the present invention. For example, a bovine embryo can be obtained in its blastula stage of development and cells from that embryo tested to determine the presence or absence of a trait (See, for example U.S. Pat. No. 5,578,449, the entirety of which is herein incorporated by reference).

[0122] One or more of the nucleic acid molecules of the present invention may be used as genetic markers. The genetic markers of the present invention may be mapped to a genetic location on a bovine genome. In an alternative embodiment, the genetic markers of the present invention may be mapped to a genetic location on a genome that exhibits synteny with the bovine genome (Eggen and Fries, Animal Genet. 26:215-236 (1995), the entirety of which is herein incorporated by reference). A preferred group of genomes that exhibit synteny with the bovine genome are the genomes of humans, sheep and pigs.

[0123] A cattle genetic map can be found at http://sol.marc.usda.gov/genome/cattle/htmls/chromosome_list. A number of markers have been assigned to a cattle genetic map (See, for example, Ma et al., Mammalian Genome 9:545-549 (1988), the entirety of which is herein incorporated by reference; Fries et al, Animal Genet. 20:3-20 (1989), the entirety of which is herein incorporated by reference; Sonstegard et al., Anim. Genet. 29:341-347 (1998), the entirety of which is herein incorporated by reference; Barendse et al., Mammalian Genome 8:21-8 (1997), the entirety of which is herein incorporated by reference; Knappes et al., Genome Research 7:235-249 (1997), the entirety of which is herein incorporated by reference). Genomes that exhibit synteny with the bovine genome include human, mouse, rat, swine, sheep, and goat (Sonstegard et al., Anim. Genet. 29:341-347 (1998); Schmitz et al., Hereditas 128:257-263 (1998); Schlapfer et al., Anim. Genet. 29:265-272 (1998); Piumi et al., Cytogenet. Cell Genet. 81:3641 (1998); Moisio et al., Anim. Genet. 29:55-57 (1998); Gu et al., Cytogenet. Cell Genet. 79:225-227 (1997); Oblap et al., Tsitol Genet. 31:68-74 (1997); Li et al., Genomics 49:76-82 (1998); Shaper et al., J. Biol. Chem. 272:31389-31399 (1997); Gao et al., J. Hered. 88:524-527 (1997); Sontegard et al., Mamm. Genome 8:751-755 (1997); Somincini et al., Mamm. Genome 8:486-490 (1997);Gao et al., Anim. Genet. 28:146-149 (1997); Yang et al., Mamm. Genome 8:262-266 (1997); Gao et al., Mamm. Genome 8:258-261 (1997); Sun et al., Genomics 39:47-54 (1997); Barendse et al., Mamm. Genome 8:21-28 (1997) Sun et al., Anim. Genet. 27:421-422 (1996); Pennacchio et al., Genome Res. 6:1103-1109 (1996); Le Provost et al., Mamm. Genome 7:657-666 (1996); Sun et al., Mamm. Genome 7:518-519 (1996); Lanneluc et al., Cytogenet. Cell. Genet. 72:212-214 (1996); Larsen et al., Cytogenet. Cell. Genet. 73:184-186 (1996); Mezzelani et al., Mamm. Genome. 6:629-635 (1995); Yang et al., Genomics 27:293-297 (1995); Park et al., Genomics 27:113-118 (1995); Vaiman et al., Cytogenet. Cell Genet. 70:112-115 (1995); Heriz et al., Mamm. Genome 6:56 (1995); Heriz et al., Mamm. Genome 5:742 (1994); Wallis et al., J. Hered. 85:490-492 (1994); Le Provost et al., Biochem. Biophys. Res. Commun. 203:1324-1332 (1994); Vaiman et al., Mamm. Genome 5:553-556 (1994); Beever et al., Mamm. Genome 5:542-545 (1994); Ferretti et al., Anim. Genet. 25:209-214 (1994); Buxton et al., Genomics 21:510-516 (1994); Lewin et al., Anim. Genet. 25 Suppl. 1:13-18 (1994); Eggen et al., Anim. Genet. 25:183-185 (1994), all of which are herein incorporated by reference in their entirety). Maps of genomes that exhibit synteny with the bovine genome are known in the art (See, for example http://www.marc.usda.gov/genome/swine/swine.html).

[0124] In addition to, for example, in situ hybridization (see below) the genetic position of a marker can be facilitated by the use of bovine somatic cell hybrid panels such as bovine-hamster somatic cells hybrids (See, for example, Yang et al., Genomics 48:93-99 (1998), the entirety of which is herein incorporated by reference; Womack, et al., Mamm. Genome 8:854-856 (1997), the entirety of which is herein incorporated by reference; Vaiman et al., Mamm. Genome 5:553-6 (1994), the entirety of which is herein incorporated by reference; Eggen et al., Anim. Genet. 25:31-35 (1994); Modi et al., Cytogenet. Cell Genet 81:213-216 (1998); Gu et al., Cytogenet Cell Genet 79:225-227 (1997), the entirety of which is herein incorporated by reference; Martin-Burriel et al., Cytogenet Cell Genet 79:179-183 (1997), the entirety of which is herein incorporated by reference; Yang et al., Genome Res. 8:731-736 (1998), the entirety of which is herein incorporated by reference; Gao et al., J. Heredity 88:524-527 (1997), the entirety of which is herein incorporated by reference; Konfortov et al., Anim. Genet. 29:302-306 (1998), the entirety of which is herein incorporated by reference).

[0125] The genetic linkage of marker molecules can be established by a gene mapping model such as, without limitation, the flanking marker model reported by Lander and Botstein, Genetics 121:185-199 (1989), and the interval mapping, based on maximum likelihood methods described by Lander and Botstein, Genetics 121:185-199 (1989), and implemented in the software package MAPMAKER/QTL (Lincoln and Lander, Mapping Genes Controlling Quantitative Traits Using MAPMAKER/QTL, Whitehead Institute for Biomedical Research, Massachusetts, (1990)). Additional models may be used and are known in the art.

[0126] A maximum likelihood estimate (MLE) for the presence of a marker is calculated, together with an MLE assuming no QTL effect, to avoid false positives. A log₁₀ of an odds ratio (LOD) is then calculated as: LOD=log₁₀ (ME for the presence of a QTL/MLE given no linked QTL).

[0127] The LOD score essentially indicates how much more likely the data are to have arisen assuming the presence of a QTL than in its absence. The LOD threshold value for avoiding a false positive with a given confidence, say 95%, depends on the number of markers and the length of the genome. Graphs indicating LOD thresholds are set forth in Lander and Botstein, Genetics 121:185-199 (1989) the entirety of which is herein incorporated by reference.

[0128] The genetic location of Mendelian and complex traits (such as QTLs) have been reported in cattle utilizing a variety of models (Seplman and Bovenhuis, Anim. Genet. 29:77-84 (1998); Zang et al., Genetics 149:1959-1973 (1998); Mosig et al., Genetics 149:1557-15567 (1988); Coppieters et al., J. Hered. 89:193-195 (1998); Jansen et al., Genetics 148:391-399 (1988); Taylor et al., Anim. Genet. 29:194-201 (1998); Arranz et al., Anim. Genet. 29:107-115 (1998); Coppieters et al., Mamm. Genome 9:540-544 (1998); Lui et al., Genetics 148:495-505 (1998); Moody et al., J. Anim. Sci. 75:941-949 (1997); Simianer et al., Mamm. Genome 8:830-835 (1997); Spelman et., Genetics 144:1799-1808 (1996); Georges et al., Genetics 139:907-920 (1995); Mackinnon and Georges, Genetics 132:1177-85 (1992); Weller et al., J. Dairy Sci. 73:2525-2537(1990), all of which are herein incorporated by reference in their entirety). The genetic location and the association of one or more of the markers of the present invention may be established by using one of the models referenced herein or by other models known in the art.

[0129] It is understood that one or more of the nucleic acid molecules of the present invention may be used as molecular markers. It is also understood that one or more of the protein molecules of the present invention may be used as molecular markers.

[0130] In accordance with this aspect of the present invention, a sample nucleic acid is obtained from plants cells or tissues. Any source of nucleic acid may be used. Preferably, the nucleic acid is genomic DNA. The nucleic acid is subjected to restriction endonuclease digestion. For example, one or more nucleic acid molecule or fragment thereof of the present invention can be used as a probe in accordance with the above-described polymorphic methods. The polymorphism obtained in this approach can then be cloned to identify the mutation at the coding region which alters the protein's structure or regulatory region of the gene which affects its expression level.

[0131] In an aspect of the present invention, one or more of the nucleic molecules of the present invention are used to determine the level (i.e., the concentration of mRNA in a sample, etc.) in a mammal (preferably bovineor ovine, more preferably bovine) or pattern (i.e., the kinetics of expression, rate of decomposition, stability profile, etc.) of the expression of a protein encoded in part or whole by one or more of the nucleic acid molecule of the present invention (collectively, the “Expression Response” of a cell or tissue). As used herein, the Expression Response manifested by a cell or tissue is said to be “altered” if it differs from the Expression Response of cells or tissues of mammals not exhibiting the phenotype. To determine whether a Expression Response is altered, the Expression Response manifested by the cell or tissue of the mammal exhibiting the phenotype is compared with that of a similar cell or tissue sample of a mammal not exhibiting the phenotype. As will be appreciated, it is not necessary to re-determine the Expression Response of the cell or tissue sample of the mammal not exhibiting the phenotype each time such a comparison is made; rather, the Expression Response of a particular mammal may be compared with previously obtained values of normal mammals. As used herein, the phenotype of the organism is any of one or more characteristics of an organism (e.g. disease resistance, quality improvement or yield etc.). A change in genotype or phenotype may be transient or permanent. Also as used herein, a tissue sample is any sample that comprises more than one cell. In a preferred aspect, a tissue sample comprises cells that share a common characteristic (e.g. derived from muscle, liver, pituitary gland, brain, dry mammary gland, lactating mammary gland tissue etc.). As used herein, a particularly preferred mammal is bovine or ovine Further, as used herein a more particularly preferred mammal is bovine.

[0132] In one aspect of the present invention, an evaluation can be conducted to determine whether a particular mRNA molecule is present. One or more of the nucleic acid molecules of the present invention, preferably one or more of the EST nucleic acid molecules or fragments thereof of the present invention, are utilized to detect the presence or quantity of the mRNA species. Such molecules are then incubated with cell or tissue extracts of a mammal under conditions sufficient to permit nucleic acid hybridization. The detection of double-stranded probe-mRNA hybrid molecules is indicative of the presence of the mRNA; the amount of such hybrid formed is proportional to the amount of mRNA. Thus, such probes may be used to ascertain the level and extent of the mRNA production in a mammal's cell or tissue. Such nucleic acid hybridization may be conducted under quantitative conditions (thereby providing a numerical value of the amount of the mRNA present). Alternatively, the assay may be conducted as a qualitative assay that indicates either that the mRNA is present, or that Tts level exceeds a user set, predefined value.

[0133] A principle of in situ hybridization is that a labeled, single-stranded nucleic acid probe will hybridize to a complementary strand of cellular DNA or RNA and, under the appropriate conditions, these molecules will form a stable hybrid. When nucleic acid hybridization is combined with histological techniques, specific DNA or RNA sequences can be identified within a single cell. An advantage of in situ hybridization over more conventional techniques for the detection of nucleic acids is that it allows an investigator to determine the precise spatial population (Angerer et al., Dev. Biol. 101:477-484 (1984), the entirety of which is herein incorporated by reference; Angerer et al., Dev. Biol. 112:157-166 (1985), the entirety of which is herein incorporated by reference; Dixon et al., EMBO J. 10:1317-1324 (1991), the entirety of which is herein incorporated by reference). In situ hybridization may be used to measure the steady-state level of RNA accumulation. It is a sensitive technique and RNA sequences present in as few as 5-10 copies per cell can be detected (Hardin et al., J. Mol. Biol. 202:417-431 (1989), the entirety of which is herein incorporated by reference). A number of protocols have been devised for in situ hybridization, each with tissue preparation, hybridization, and washing conditions (Schimitz et al., Herditas 128:257-263 (1998), the entirety of which is herein incorporated by reference; Fries, Anim. Genet. 24:111-116 (1993), the entirety of which is herein incorporated by reference; Johnson et al., Cytogenet Cell Genet. 62:176-180 (1993), the entirety of which is herein incorporated by reference).

[0134] In situ hybridization also allows for the localization of proteins within a tissue or cell (Theis et al., Int. J. Dev. Biol. 37:101-110 (1993), the entirety of which is herein incorporated by reference; Graphodatsky et al., Mamm. Genome 4:183-184 (1993), the entirety of which is herein incorporated by reference). It is understood that one or more of the molecules of the present invention, preferably one or more of the EST nucleic acid molecules or fragments thereof of the present invention or one or more of the antibodies of the present invention, may be utilized to detect the level or pattern of a bovine enzyme pathway protein or mRNA thereof by in situ hybridization.

[0135] Fluorescent in situ hybridization allows the localization of a particular DNA sequence along a chromosome which is useful for gene mapping, following chromosomes in hybrid lines or detecting chromosomes with translocations, transversions or deletions. In situ hybridization has been used to identify chromosomes in several mammalian species (Popescu et al. Cytogenet. Cell Genet. 69:50-52 (1995), the entirety of which is herein incorporated by reference; Danielson et al., Genomics 15:146-160 (1993), herein incorporated by reference; Marino et al., Cytogenet. Cell Genet. 42:36-42 (1986), the entirety of which is herein incorporated by reference; Hayes et al., Cytogenet. Cell Genet. 64:281-285 (1993), the entirety of which is herein incorporated by reference; Solinas-Toldo et al., Cytogenet. Cell Genet. 69:1-6 (1995), the entirety of which is herein incorporated by reference; Hediger et al., Genomics 8:171-174 (1990), the entirety of which is herein incorporated by reference). It is understood that the nucleic acid molecules of the present invention may be used as probes or markers to localize sequences along a chromosome.

[0136] Another method to localize the expression of a molecule is tissue printing. Tissue printing provides a way to screen, at the same time on the same membrane, many tissue sections from different mammals or different developmental stages. Tissue-printing procedures utilize films designed to immobilize proteins and nucleic acids. In essence, a freshly cut section of a tissue is pressed gently onto nitrocellulose paper, nylon membrane or polyvinylidene difluoride membrane. Such membranes are commercially available (e.g. Millipore, Bedford, Mass. U.S.A.). The contents of the cut cell transfer onto the membrane and the contents and are immobilized to the membrane. The immobilized contents form a latent print that can be visualized with appropriate probes. When a mammalian tissue print is made on nitrocellulose paper, the tissue leaves a physical print that makes the anatomy visible without further treatment (Bhatia, Ann. N.Y. Acad. Sci. 745:187-209 (1994), the entirety of which is herein incorporated by reference).

[0137] Tissue printing on substrate films is described by Daoust, Exp. Cell Res. 12:203-211 (1957), the entirety of which is herein incorporated by reference, who detected amylase, protease, ribonuclease, and deoxyribonuclease in animal tissues using starch, gelatin, and agar films. These techniques can be applied to specific animal tissues (Drinkwater et al., Genomics 19:149-151 (1994); the entirety of which is herein incorporated by reference; Sandell et al., J. Orthop. Res. 12:1-14 (1994), the entirety of which is herein incorporated by reference). Advances in membrane technology have increased the range of applications of Daoust's tissue-printing techniques (Cassab and Varner, J. Cell. Biol. 105:2581-2588 (1987), the entirety of which is herein incorporated by reference) allowing the histochemical localization of various enzymes and deoxyribonuclease on nitrocellulose paper and nylon (Brant et al., Cell 49:57-63 (1987), the entirety of which is herein incorporated by reference; Knapp et al., J. Biol. Chem. 262:938-945 (1987), the entirety of which is herein incorporated by reference; Leube et al., Differentation 33:69-85 9 (1986), the entirety of which is herein incorporated by reference; Barendse et al., Nat. Genet. 6:227-235 (1994), the entirety of which is herein incorporated by reference; Varnett et al., J. Mol. Evol. 36:600-612 (1993); the entirety of which is herein incorporated by reference; Brett et al., Am. J. Pathol. 143:1699-1712 (1993).

[0138] It is understood that one or more of the molecules of the present invention, preferably one or more of the EST nucleic acid molecules or fragments thereof of the present invention, or one or more of the antibodies of the present invention, may be utilized to detect the presence or quantity of a protein by tissue printing.

[0139] Further it is also understood that any of the nucleic acid molecules of the present invention may be used as marker nucleic acids and/ or probes in connection with methods that require probes or marker nucleic acids. As used herein, a probe is an agent that is utilized to determine an attribute or feature (e.g. presence or absence, location, correlation, etc.) of a molecule, cell, tissue or mammal. As used herein, a marker nucleic acid is a nucleic acid molecule that is utilized to determine an attribute or feature (e.g., presence or absence, location, correlation, etc.) of a molecule, cell, tissue or mammal.

[0140] A microarray-based method for high-throughput monitoring of mammalian gene expression may be utilized to measure gene-specific hybridization targets. This ‘chip’-based approach involves using microarrays of nucleic acid molecules as gene-specific hybridization targets to quantitatively measure expression of the corresponding mammalian genes (Schena et al., Science 270:467-470 (1995), the entirety of which is herein incorporated by reference; Shalon, Ph.D. Thesis, Stanford University (1996), the entirety of which is herein incorporated by reference). Every nucleotide in a large sequence can be queried at the same time. Hybridization can be used to efficiently analyze nucleotide sequences.

[0141] Several microarray methods have been described. One method compares the sequences to be analyzed by hybridization to a set of oligonucleotides representing all possible subsequences (Bains and Smith, J. Theor. Biol. 135:303-307 (1989), the entirety of which is herein incorporated by reference). A second method hybridizes the sample to an array of oligonucleotide or cDNA molecules. An array consisting of oligonucleotides complementary to subsequences of a target sequence can be used to determine the identity of a target sequence, measure its amount, and detect differences between the target and a reference sequence. Nucleic acid molecule microarrays may also be screened with protein molecules or fragments thereof to determine nucleic acid molecules that specifically bind protein molecules or fragments thereof.

[0142] The microarray approach may be used with polypeptide targets (U.S. Pat. No. 5,445,934; U.S. Pat. No. 5,143,854; U.S. Pat. No. 5,079,600; U.S. Pat. No. 4,923,901, all of which are herein incorporated by reference in their entirety). Essentially, polypeptides are synthesized on a substrate (microarray) and these polypeptides can be screened with either protein molecules or fragments thereof or nucleic acid molecules in order to screen for either protein molecules or fragments thereof or nucleic acid molecules that specifically bind the target polypeptides. (Fodor et al., Science 251:767-773 (1991), the entirety of which is herein incorporated by reference). It is understood that one or more of the nucleic acid molecules or protein or fragments thereof of the present invention may be utilized in a microarray based method.

[0143] In a preferred embodiment of the present invention microarrays may be prepared that comprise nucleic acid molecules where preferably at least 10%, preferably at least 25%, more preferably at least 50% and even more preferably at least 75%, 80%, 85%, 90% or 95% of the nucleic acid molecules located on that array are selected from the group of nucleic acid molecules that specifically hybridize to one or more nucleic acid molecule having a nucleic acid sequence selected from the group of SEQ ID NO: 1 through SEQ ID NO: 15,112 or complement thereof or fragments of either.

[0144] In another preferred embodiment of the present invention microarrays may be prepared that comprise nucleic acid molecules where preferably at least 10%, preferably at least 25%, more preferably at least 50% and even more preferably at least 75%, 80%, 85%, 90% or 95% of the nucleic acid molecules located on that array are selected from the group of nucleic acid molecules having a nucleic acid sequence selected from the group of SEQ ID NO: 1 through SEQ ID NO: 15,112 or complements thereof.

[0145] Site-directed mutagenesis may be utilized to modify nucleic acid sequences, particularly as it is a technique that allows one or more of the amino acids encoded by a nucleic acid molecule to be altered (e.g. a threonine to be replaced by a methionine). Three basic methods for site-directed mutagenesis are often employed. These are cassette mutagenesis (Wells et al., Gene 34:315-323 (1985), the entirety of which is herein incorporated by reference), primer extension (Gilliam et al., Gene 12:129-137 (1980), the entirety of which is herein incorporated by reference; Zoller and Smith, Methods Enzymol. 100:468-500 (1983), the entirety of which is herein incorporated by reference; Dalbadie-McFarland et al., Proc. Natl. Acad. Sci. (U.S.A.) 79:6409-6413 (1982), the entirety of which is herein incorporated by reference) and methods based upon PCR (Scharf et al., Science 233:1076-1078 (1986), the entirety of which is herein incorporated by reference; Higuchi et al., Nucleic Acids Res. 16:7351-7367 (1988), the entirety of which is herein incorporated by reference). Site-directed mutagenesis approaches are also described in European Patent 0 385 962, the entirety of which is herein incorporated by reference; European Patent 0 359 472, the entirety of which is herein incorporated by reference; and PCT Patent Application WO 93/07278, the entirety of which is herein incorporated by reference.

[0146] Site-directed mutagenesis strategies have been applied both in vitro as well as in vivo (Lanz et al., J. Biol. Chem. 266:9971-9976 (1991), the entirety of which is herein incorporated by reference; Kovgan and Zhdanov, Biotekhnologiya 5:148-154, No. 207160n, Chemical Abstracts 110:225 (1989), the entirety of which is herein incorporated by reference; Ge et al., Proc. Natl. Acad. Sci. (U.S.A.) 86:4037-4041 (1989), the entirety of which is herein incorporated by reference; Zhu et al., J. Biol. Chem. 271:18494-18498 (1996), the entirety of which is herein incorporated by reference; Chu et al., Biochemistry 33:6150-6157 (1994), the entirety of which is herein incorporated by reference; Small et al., EMBO J. 11:1291-1296 (1992), the entirety of which is herein incorporated by reference; Cho et al., Mol. Biotechnol. 8:13-16 (1997), the entirety of which is herein incorporated by reference; Kita et al., J. Biol. Chem. 271:26529-26535 (1996), the entirety of which is herein incorporated by reference, Jin et al., Mol. Microbiol. 7:555-562 (1993), the entirety of which is herein incorporated by reference; Hatfield and Vierstra, J. Biol. Chem. 267:14799-14803 (1992), the entirety of which is herein incorporated by reference; Zhao et al., Biochemistry 31:5093-5099 (1992), the entirety of which is herein incorporated by reference).

[0147] Any of the nucleic acid molecules of the present invention may either be modified by site-directed mutagenesis or used as, for example, nucleic acid molecules that are used to target other nucleic acid molecules for modification. It is understood that mutants with more than one altered nucleotide can be constructed using techniques that practitioners are familiar with such as isolating restriction fragments and ligating such fragments into an expression vector (see, for example, Sambrook et al., Molecular Cloning: A Laboratory Manual, Cold Spring Harbor Press (1989)).

[0148] Sequence-specific DNA-binding proteins play a role in the regulation of transcription. The isolation of recombinant cDNAs encoding these proteins facilitates the biochemical analysis of their structural and functional properties. Genes encoding such DNA-binding proteins have been isolated using classical genetics (Vollbrecht et al., Nature 350:241-243 (1991), the entirety of which is herein incorporated by reference) and molecular biochemical approaches, including the screening of recombinant cDNA libraries with antibodies (Landschulz et al., Genes Dev. 2:786-800 (1988), the entirety of which is herein incorporated by reference) or DNA probes (Bodner et al., Cell 55:505-518 (1988), the entirety of which is herein incorporated by reference). In addition, an in situ screening procedure has been used and has facilitated the isolation of sequence-specific DNA-binding proteins De Luca et al. J. Biol. Chem. 269:19193-19196 (1994), the entirety of which is herein incorporated by reference; Schreck et al., EMBO J. 8:3011-3017 (1989), the entirety of which is herein incorporated by reference). An in situ screening protocol does not require the purification of the protein of interest (Vinson et al., Genes Dev. 2:801-806 (1988), the entirety of which is herein incorporated by reference; Singh et al., Cell 52:415-423 (1988), the entirety of which is herein incorporated by reference).

[0149] Two steps may be employed to characterize DNA-protein interactions. The first is to identify promoter fragments that interact with DNA-binding proteins, to titrate binding activity, to determine the specificity of binding, and to determine whether a given DNA-binding activity can interact with related DNA sequences (Sambrook et al., Molecular Cloning: A Laboratory Manual, 2^{nd} edition, Cold Spring Harbor Laboratory Press, Cold Spring Harbor, N.Y. (1989)). The electrophoretic mobility-shift assay is widely used. The assay provides a rapid and sensitive method for detecting DNA-binding proteins based on the observation that the mobility of a DNA fragment through a nondenaturing, low-ionic strength polyacrylamide gel is retarded upon association with a DNA-binding protein Fried and Crother, Nucleic Acids Res. 9:6505-6525 (1981), the entirety of which is herein incorporated by reference). When one or more specific binding activities have been identified, the exact sequence of the DNA bound by the protein may be determined. Several procedures for characterizing protein/DNA-binding sites are used, including methylation and ethylation interference assays (Maxam and Gilbert, Methods Enzymol. 65:499-560 (1980), the entirety of which is herein incorporated by reference; Wissman and Hillen, Methods Enzymol. 208:365-379 (1991), the entirety of which is herein incorporated by reference), footprinting techniques employing DNase I (Galas and Schmitz, Nucleic Acids Res. 5:3157-3170 (1978), the entirety of which is herein incorporated by reference), 1,10-phenanthroline-copper ion methods (Sigman et al., Methods Enzymol. 208:414-433 (1991), the entirety of which is herein incorporated by reference) and hydroxyl radicals methods (Dixon et al., Methods Enzymol. 208:414433 (1991), the entirety of which is herein incorporated by reference). It is understood that one or more of the nucleic acid molecules of the present invention may be utilized to identify a protein or fragment thereof that specifically binds to a nucleic acid molecule of the present invention. It is also understood that one or more of the protein molecules or fragments thereof of the present invention may be utilized to identify a nucleic acid molecule that specifically binds to it.

[0150] A two-hybrid system is based on the fact that many cellular functions are carried out by proteins, such as transcription factors, that interact (physically) with one another. Two-hybrid systems have been used to probe the function of new proteins (Chien et al., Proc. Natl. Acad. Sci. (U.S.A.) 88:9578-9582 (1991) the entirety of which is herein incorporated by reference; Durfee et al., Genes Dev. 7:555-569 (1993) the entirety of which is herein incorporated by reference; Choi et al., Cell 78:499-512 (1994), the entirety of which is herein incorporated by reference; Kranz et al., Genes Dev. 8:313-327 (1994), the entirety of which is herein incorporated by reference).

[0151] Interaction mating techniques have facilitated a number of two-hybrid studies of protein-protein interaction. Interaction mating has been used to examine interactions between small sets of tens of proteins (Finley and Brent, Proc. Natl. Acad. Sci. (U.S.A.) 91:12098-12984 (1994), the entirety of which is herein incorporated by reference), larger sets of hundreds of proteins (Bendixen et al., Nucl. Acids Res. 22:1778-1779 (1994), the entirety of which is herein incorporated by reference) and to comprehensively map proteins encoded by a small genome (Bartel et al., Nature Genetics 12:72-77 (1996), the entirety of which is herein incorporated by reference). This technique utilizes proteins fused to the DNA-binding domain and proteins fused to the activation domain. They are expressed in two different haploid yeast strains of opposite mating type, and the strains are mated to determine if the two proteins interact. Mating occurs when haploid yeast strains come into contact and result in the fusion of the two haploids into a diploid yeast strain. An interaction can be determined by the activation of a two-hybrid reporter gene in the diploid strain. An advantage of this technique is that it reduces the number of yeast transformations needed to test individual interactions. It is understood that the protein-protein interactions of protein or fragments thereof of the present invention may be investigated using the two-hybrid system and that any of the nucleic acid molecules of the present invention that encode such proteins or fragments thereof may be used to transform yeast in the two-hybrid system.

[0152] (a) Bovine Constructs, Bovine Transformed Cells and Genetically Improved Bovines

[0153] The present invention also relates to methods for obtaining a genetically improved bovine host cell, comprising introducing into a bovine host cell exogenous genetic material. The present invention also relates to a bovine cell comprising a bovine recombinant vector. The present invention also relates to methods for obtaining a genetically improved bovine host cell, comprising introducing into a bovine cell exogenous genetic material. The present invention also provides genetically improved bovine and methods for producing same that comprise exogenous genetic material. Exogenous genetic material is any genetic material, whether naturally occurring or otherwise, from any source that is capable of being inserted into any organism. A preferred subset of exogenous genetic material is genetic material that comprises a nucleic acid molecule of the present invention.

[0154] Vectors suitable for replication in bovine cells include viral replicons, or sequences which insure integration of the appropriate sequences into the host genome. For example, another vector used to express foreign DNA is vaccinia virus. In this case, for example, a nucleic acid molecule encoding a protein or fragment thereof is inserted into the vaccinia genome. Techniques for the insertion of foreign DNA into the vaccinia virus genome are known in the art, and may utilize, for example, homologous recombination. Such heterologous DNA is generally inserted into a gene which is non-essential to the virus, for example, the thymidine kinase gene (tk), which also provides a selectable marker. Plasmid vectors that greatly facilitate the construction of recombinant viruses have been described (see, for example, Mackett et al, J Virol. 49:857 (1984); Chakrabarti et al., Mol. Cell. Biol. 5:3403 (1985); Moss, In: Gene Transfer Vectors For Mammalian Cells (Miller and Calos, eds., Cold Spring Harbor Laboratory, N.Y., p. 10, (1987); all of which are herein incorporated by reference in their entirety). Additional vectors that can be utilized in bovine systems are also described in (b) Non-Bovine Mammalian Constructs, Non-Bovine Transformed Mammalian Cells and Non-Bovine Trangenics. Expression of the protein then occurs in cells or animals which are infected with the live recombinant vaccinia virus.

[0155] The sequence to be integrated into the bovine sequence may be introduced into the primary host by any convenient means, which includes calcium precipitated DNA, spheroplast fusion, transformation, electroporation, biolistics, lipofection, microinjection, or other convenient means. Where an amplifiable gene is being employed, the amplifiable gene may serve as the selection marker for selecting hosts into which the amplifiable gene has been introduced. Alternatively, one may include with the amplifiable gene another marker, such as a drug resistance marker, e.g. neomycin resistance (G418 in mammalian cells), hygromycin in resistance etc.

[0156] Suitable bovine cell lines available as hosts for expression are known in the art and include many immortalized cell lines available from the American Type Culture Collection (ATCC), Manassas, Va., U.S.A.), such as MDBK cells, BT cells, bovine embryonic kidney cells and a number of other cell lines. Suitable promoters for bovine cells are also known in the art and include viral promoters such as that from Simian Virus 40 (SV40) (Fiers et al., Nature 273:113 (1978), the entirety of which is herein incorporated by reference), Rous sarcoma virus (RSV), adenovirus (ADV), and bovine papilloma virus (BPV). Bovine cells may also require terminator sequences and poly-A addition sequences. Enhancer sequences which increase expression may also be included, and sequences which promote amplification of the gene may also be desirable (for example, methotrexate resistance genes).

[0157] Animal cells are often better hosts for recombinant animal genetic material than unicellular. Further, the more similar the animal species from which the exogenous genetic material is derived and the host cell, the greater the likelihood that a functional protein will be expressed and processed. An animal cell is more likely to than a bacteria or yeast cell perform post-translational processing steps that may be necessary to yield a biologically active protein. In addition, an animal cell will more likely be able to correctly translate a foreign gene having interrupted coding sequences. Finally, genetic material introduced into an animal cell will frequently be incorporated into the genome of the host cell.

[0158] Animal cells are generally inadaptable for large scale batch preparations. The tissue cells of higher organisms tend to reproduce slower and often have reached a maturation stage where they do not replicate. Animal cell division is influenced by the environs of other cells. Cell proliferation changes the environment, unfavorably resulting in a decreased replication of the cell over time. Tissue cultures are very susceptible to infection and contamination which could destroy the investment of time and effort. Because of the proliferation deficiencies of normal animal tissue, it is preferable to use altered cells that proliferate freely, such as tumor cell lines.

[0159] Some of these obstacles are overcome by the generation of genetically improved animals. The introduction of transgenes into embryonal target cells and the expression of foreign genes in mammals is well known in the art (see, for example, Leder et al., U.S. Pat. No. 4,736,866; Evans et al., U.S. Pat. No. 4,870,009; Wagner et al., U.S. Pat. No. 4,873,191; all of which are herein incorporated by reference in their entirety). Expression of exogenous genetic material allow the isolation of these proteins from tissues or fluids. If the expressed protein is a secretory protein or if the desired exogenous genetic material is linked to a secretion signal sequence to direct the secretion of the recombinate protein, then expressed protein can be harvested from the living animal from fluids such as blood or ascites fluid. If the recombinate protein is expressed in mammary secretion cells of bovines then the protein of interest can be isolated from milk. The genetically improved milk can be used as is, or it can be treated to further purify the recombinate protein.

[0160] A method of producing genetically improved bovine comprises first incorporating the exogenous genetic material into plasmid and transforming a bacterium such as E. coli. The exogenous genetic material is methylated, excised and introduced into a fertilized oocyte of the bovine to permit integration into the genome. The oocyte is cultured to form a pre-implantation embryo, thus replicating the genome of the fertilized embryo. At least one cell is removed from the pre-implantion embryo and treated to release the DNA contained therein. The released DNA is digested with a restriction endonuclease capable of cleaving the methylated transgene but not the unmethylated form. The resistance to digestion facilitates the identification of successful genetically improved bovines.

[0161] The pre-implantation embryo is divided into two hemi-embryos. One half of the embryo is analyzed for transgenesis and the other half is cloned to form a multiplicity of clonal genetically improved blastocysts, each having the same genotype. The genetically improved embryos are then transplanted into a recipient female to produce a genetically improved bovine. DeBoer et al. (U.S. Pat. Nos. 5,633,076 and 5,741,957, both of which are herein incorporated by reference in their entirety) and Rosen et al. (U.S. Pat. No. 5,565,362, the entirety of which is herein incorporated by reference) describe methods for the generation of genetically improved bovine and genetically improved embryos. These and other methods known in the art may be used to generate a genetically improved bovine comprising a nucleic acid molecule of the present invention. In a preferred embodiment, one or more of the proteins of the present invention may be overexpressed in a genetically improved bovine.

[0162] In general, if the desired secretory protein functions in a particular target cell or tissue, such as the expression of human serum albumin in the liver of a genetically improved bovine species, the expression is detectable in the bovine circulatory system. If however, the secretory protein is to be expressed in mammary secretion glands, then first a female offspring is identified by assaying for expression of the recombinate proteins in tissue or body fluids. To detect genetically improved milk, that female must be lactating at the time of screening.

[0163] When expression of the DNA of the transgene is necessary to generate a desired phenotype, the transgene typically includes at least a 5′ and preferable additional 5′ expression regulation sequences or promoters each operable linked to a recombinant or secretory-recombinant DNA. These promoters not only control transcription but also contribute to RNA stability and processing. These promoters are chosen to induce tissue-specific or cell type-specific expression of the recombinant DNA. Once the tissue or cell type is chosen then the promoter is chosen. Generally these promoters are derived from genes that are expressed primarily in the tissue or cell type chosen. It is preferred that the promoters chosen be expressed in only the tissue or cell line used. One example of a bovine promoter is the 16 kb 5′ sequence of the S1 casein gene which exhibits a tissue specificity for bovine mammary secretory cells (Deboer et al., U.S. Pat. Nos. 5,741,957 and 5,663,076). Other promoters, include but are not limited to, the 15 kb 5′ sequence of the albumin gene, the 15 kb 5′ sequence of the actin gene and the 15 kb upstream sequence of the protamine gene (Deboer et al., U.S. Pat. Nos. 5,741,957 and 5,663,076). In such processes exogenous genetic material is usually introduced into the germline of the animal at an early (usually one cell) developmental stage (Warner et al., Proc. Natl. Acad. Sci (U.S.A.) 78:5016 (1981); Miller et al., J. Endocrin. 120:481-488 (1989), both of which are herein incorporated by reference in their entirety.

[0164] The production of tissue-specific expression of exogenous DNA encoding various proteins in the mammary gland or the production of various proteins in the milk of genetically improved mice and sheep has been reported (see, for example, Simmons et al. Nature 328:530-532 (1987), the entirety of which is herein incorporated by reference). In addition a number of patents describe the production of genetically improved bovine expressing genes such that the polypeptide is detectable in milk produced by the genetically improved bovine (Deboer et al., U.S. Pat. No. 5,741,957; Deboer et al., U.S. Pat. No. 5,633,076; both of which are incorporated by reference in their entirety).

[0165] (b) Non-Bovine Mammalian Constructs, Non-Bovine Transformed Mammalian Cells, and Non-Bovine Trangenics

[0166] The present invention also relates to methods for obtaining a recombinant mammalian host cell, comprising introducing into a mammalian host cell exogenous genetic material. The present invention also relates to a mammalian cell comprising a mammalian recombinant vector. The present invention also relates to methods for obtaining a recombinant mammalian host cell, comprising introducing into a mammalian cell exogenous genetic material.

[0167] Mammalian cell lines available as hosts for expression are known in the art and include many immortalized cell lines available from the American Type Culture Collection (ATCC, Manassas, Va.), such as HeLa cells, Chinese hamster ovary (CHO) cells, baby hamster kidney (BHK) cells, and a number of other cell lines. Suitable promoters for mammalian cells are also known in the art and include viral promoters such as that from Simian Virus 40 (SV40) (Fiers et al., Nature 273:113 (1978), the entirety of which is herein incorporated by reference), Rous sarcoma virus (RSV), adenovirus (ADV), and bovine papilloma virus (BPV). Mammalian cells may also require terminator sequences and poly-A addition sequences. Enhancer sequences which increase expression may also be included, and sequences which promote amplification of the gene may also be desirable (for example, methotrexate resistance genes).

[0168] Vectors suitable for replication in mammalian cells may include viral replicons, or sequences which insure integration of the appropriate sequences encoding HCV epitopes into the host genome. For example, another vector used to express foreign DNA is vaccinia virus. In this case, for example, a nucleic acid molecule encoding a protein or fragment thereof is inserted into the vaccinia genome. Techniques for the insertion of foreign DNA into the vaccinia virus genome are known in the art, and may utilize, for example, homologous recombination. Such heterologous DNA is generally inserted into a gene which is non-essential to the virus, for example, the thymidine kinase gene (tk), which also provides a selectable marker. Plasmid vectors that greatly facilitate the construction of recombinant viruses have been described (see, for example, Mackett et al, J Virol. 49:857 (1984); Chakrabarti et al., Mol. Cell. Biol. 5:3403 (1985); Moss, In: Gene Transfer Vectors For Mammalian Cells (Miller and Calos, eds., Cold Spring Harbor Laboratory, N.Y., p. 10, (1987); all of which are herein incorporated by reference in their entirety). Expression of the HCV polypeptide then occurs in cells or animals which are infected with the live recombinant vaccinia virus.

[0169] The sequence to be integrated into the mammalian sequence may be introduced into the primary host by any convenient means, which includes calcium precipitated DNA, spheroplast fusion, transformation, electroporation, biolistics, lipofection, microinjection, or other convenient means. An amplifiable gene may be employed, and can serve as the selection marker for selecting hosts into which the amplifiable gene has been introduced. Alternatively, one may include with the amplifiable gene another marker, such as a drug resistance marker, e.g. neomycin resistance (G418 in mammalian cells), hygromycin in resistance etc., or an auxotrophy marker (HIS3, TRP1, LEU2, URA3, ADE2, LYS2, etc.) for use in yeast cells.

[0170] Depending upon the nature of the modification and associated targeting construct, various techniques may be employed for identifying targeted integration. Conveniently, the DNA may be digested with one or more restriction enzymes and the fragments probed with an appropriate DNA fragment which will identify the properly sized restriction fragment associated with integration.

[0171] One may use different promoter sequences, enhancer sequences, or other sequences which will allow for enhanced levels of expression in the expression host. Thus, one may combine an enhancer from one source, a promoter region from another source, a 5′- noncoding region upstream from the initiation methionine from the same or different source as the other sequences, and the like. One may provide for an intron in the non-coding region with appropriate splice sites or for an alternative 3′-untranslated sequence or polyadenylation site. Depending upon the particular purpose of the modification, any of these sequences may be introduced, as desired.

[0172] Where selection is intended, the sequence to be integrated will have with it a marker gene, which allows for selection. The marker gene may conveniently be downstream from the target gene and may include resistance to a cytotoxic agent, e.g. antibiotics, heavy metals, or the like, resistance or susceptibility to HAT, gancyclovir, etc., complementation to an auxotrophic host, particularly by using an auxotrophic yeast as the host for the subject manipulations, or the like. The marker gene may also be on a separate DNA molecule, particularly with primary mammalian cells. Alternatively, one may screen the various transformants, due to the high efficiency of recombination in yeast, by using hybridization analysis, PCR, sequencing, or the like.

[0173] For homologous recombination, constructs can be prepared where the amplifiable gene will be flanked, normally on both sides with DNA homologous with the DNA of the target region. Depending upon the nature of the integrating DNA and the purpose of the integration, the homologous DNA will generally be within 100 kb, usually 50 kb, preferably about 25 kb, of the transcribed region of the target gene, more preferably within 2 kb of the target gene. Where modeling of the gene is intended, homology will usually be present proximal to the site of the mutation. The homologous DNA may include the 5′-upstream region outside of the transcriptional regulatory region or comprising any enhancer sequences, transcriptional initiation sequences, adjacent sequences, or the like. The homologous region may include a portion of the coding region, where the coding region may be comprised only of an open reading frame or combination of exons and introns. The homologous region may comprise all or a portion of an intron, where all or a portion of one or more exons may also be present. Alternatively, the homologous region may comprise the 3′-region, so as to comprise all or a portion of the transcriptional termination region, or the region 3′ of this region. The homologous regions may extend over all or a portion of the target gene or be outside the target gene comprising all or a portion of the transcriptional regulatory regions and/or the structural gene.

[0174] The integrating constructs may be prepared in accordance with conventional ways, where sequences may be synthesized, isolated from natural sources, manipulated, cloned, ligated, subjected to in vitro mutagenesis, primer repair, or the like. At various stages, the joined sequences may be cloned, and analyzed by restriction analysis, sequencing, or the like. Usually during the preparation of a construct where various fragments are joined, the fragments, intermediate constructs and constructs will be carried on a cloning vector comprising a replication system functional in a prokaryotic host, e.g., E. coli, and a marker for selection, e.g., biocide resistance, complementation to an auxotrophic host, etc. Other functional sequences may also be present, such as polylinkers, for ease of introduction and excision of the construct or portions thereof, or the like. A large number of cloning vectors are available such as pBR322, the pUC series, etc. These constructs may then be used for integration into the primary mammalian host.

[0175] In the case of the primary mammalian host, a replicating vector may be used. Usually, such vector will have a viral replication system, such as SV40, bovine papilloma virus, adenovirus, or the like. The linear DNA sequence vector may also have a selectable marker for identifying transfected cells. Selectable markers include the neo gene, allowing for selection with G418, the herpes tk gene for selection with HAT medium, the gpt gene with mycophenolic acid, complementation of an auxotrophic host, etc.

[0176] The vector may or may not be capable of stable maintenance in the host. Where the vector is capable of stable maintenance, the cells will be screened for homologous integration of the vector into the genome of the host, where various techniques for curing the cells may be employed. Where the vector is not capable of stable maintenance, for example, where a temperature sensitive replication system is employed, one may change the temperature from the permissive temperature to the non-permissive temperature, so that the cells may be cured of the vector. In this case, only those cells having integration of the construct comprising the amplifiable gene and, when present, the selectable marker, will be able to survive selection.

[0177] Where a selectable marker is present, one may select for the presence of the targeting construct by means of the selectable marker. Where the selectable marker is not present, one may select for the presence of the construct by the amplifiable gene. For the neo gene or the herpes tk gene, one could employ a medium for growth of the transformants of about 0.1-1 mg/ml of G418 or may use HAT medium, respectively. Where DHFR is the amplifiable gene, the selective medium may include from about 0.01-0.5 iM of methotrexate or be deficient in glycine-hypoxanthine-thymidine and have dialysed serum (GHT media).

[0178] The DNA can be introduced into the expression host by a variety of techniques that include calcium phosphate/DNA co-precipitates, microinjection of DNA into the nucleus, electroporation, yeast protoplast fusion with intact cells, transfection, polycations, e.g., polybrene, polyomithine, etc., or the like. The DNA may be single or double stranded DNA, linear or circular. The various techniques for transforming mammalian cells are well known (see Keown et al., Methods Enzymol. (1989); Keown et al., Methods Enzymol. 185:527-537 (1990); Mansour et al., Nature 336:348-352, (1988); all of which are herein incorporated by reference in their entirety).

[0179] (c) Insect Constructs and Transformed Insect Cells

[0180] The present invention also relates to an insect recombinant vectors comprising exogenous genetic material. The present invention also relates to an insect cell comprising an insect recombinant vector. The present invention also relates to methods for obtaining a recombinant insect host cell, comprising introducing into an insect cell exogenous genetic material. One or more of the nucleic acid molecules of the present invention may be permanently or transiently introduced into an insect cell.

[0181] The insect recombinant vector may be any vector which can be conveniently subjected to recombinant DNA procedures and can bring about the expression of the nucleic acid sequence. The choice of a vector will typically depend on the compatibility of the vector with the insect host cell into which the vector is to be introduced. The vector may be a linear or a closed circular plasmid. The vector system may be a single vector or plasmid or two or more vectors or plasmids which together contain the total DNA to be introduced into the genome of the insect host. In addition, the insect vector may be an expression vector. Nucleic acid molecules can be suitably inserted into a replication vector for expression in the insect cell under a suitable promoter for insect cells. Many vectors are available for this purpose, and selection of the appropriate vector will depend mainly on the size of the nucleic acid molecule to be inserted into the vector and the particular host cell to be transformed with the vector. Each vector contains various components depending on its function (amplification of DNA or expression of DNA) and the particular host cell with which it is compatible. The vector components for insect cell transformation generally include, but are not limited to, one or more of the following: a signal sequence, origin of replication, one or more marker genes, and an inducible promoter.

[0182] The insect vector may be an autonomously replicating vector, i.e., a vector which exists as an extrachromosomal entity, the replication of which is independent of chromosomal replication, e.g., a plasmid, an extrachromosomal element, a minichromosome, or an artificial chromosome. The vector may contain any means for assuring self-replication. Alternatively, the vector may be one which, when introduced into the insect cell, is integrated into the genome and replicated together with the chromosome(s) into which it has been integrated. For integration, the vector may rely on the nucleic acid sequence of the vector for stable integration of the vector into the genome by homologous or nonhomologous recombination. Alternatively, the vector may contain additional nucleic acid sequences for directing integration by homologous recombination into the genome of the insect host. The additional nucleic acid sequences enable the vector to be integrated into the host cell genome at a precise location(s) in the chromosome(s). To increase the likelihood of integration at a precise location, there should be preferably two nucleic acid sequences which individually contain a sufficient number of nucleic acids, preferably 400 bp to 1500 bp, more preferably 800 bp to 1000 bp, which are highly homologous with the corresponding target sequence to enhance the probability of homologous recombination. These nucleic acid sequences may be any sequence that is homologous with a target sequence in the genome of the insect host cell, and, furthermore, may be non-encoding or encoding sequences.

[0183] Baculovirus expression vectors (BEVs) have become important tools for the expression of foreign genes, both for basic research and for the production of proteins with direct clinical applications in human and veterinary medicine (Doerfler, Curr. Top. Microbiol. Immunol. 131:51-68 (1968); Luckow and Summers, Bio/Technology 6:47-55 (1988a); Miller, Annual Review of Microbiol. 42:177-199 (1988); Summers, Curr. Comm. Molecular Biology, Cold Spring Harbor Press, Cold Spring Harbor, N.Y. (1988); all of which are herein incorporated by reference in their entirety). BEVs are recombinant insect viruses in which the coding sequence for a chosen foreign gene has been inserted behind a baculovirus promoter in place of the viral gene, e.g., polyhedrin (Smith and Summers, U.S. Pat. No., 4,745,051, the entirety of which is incorporated herein by reference).

[0184] The use of baculovirus vectors relies upon the host cells being derived from Lepidopteran insects such as Spodoptera frugiperda or Trichoplusia ni. The preferred Spodoptera fugiperda cell line is the cell line Sf9. The Spodoptera frugiperda Sf9 cell line was obtained from American Type Culture Collection (Manassas, Va.) and is assigned accession number ATCC CRL 1711 (Summers and Smith, A Manual of Methods for Baculovirus Vectors and Insect Cell Culture Procedures, Texas Ag. Exper. Station Bulletin No. 1555 (1988), the entirety of which is herein incorporated by reference). Other insect cell systems, such as the silkworm B. mori may also be used.

[0185] The proteins expressed by the BEVs are, therefore, synthesized, modified and transported in host cells derived from Lepidopteran insects. Most of the genes that have been inserted and produced in the baculovirus expression vector system have been derived from vertebrate species. Other baculovirus genes in addition to the polyhedrin promoter may be employed to advantage in a baculovirus expression system. These include immediate-early (alpha), delayed-early (beta), late (gamma), or very late (delta), according to the phase of the viral infection during which they are expressed. The expression of these genes occurs sequentially, probably as the result of a “cascade” mechanism of transcriptional regulation. (Guarino and Summers, J. Virol. 57:563-571 (1986); Guarino and Summers, J. Virol. 61:2091-2099 (1987); Guarino and Summers, Virol. 162:444-451 (1988); all of which are herein incorporated by reference in their entirety).

[0186] Alternatively, recombinant baculoviruses can be created using a baculovirus shuttle vector system (Luckow et al., J. Virol. 67:4566-4579 (1993), incorporated by reference in its entirety), now marketed as the Bac-To-Bac™ Expression System (Life Technologies, Inc. Rockville, Md.). Pure recombinant baculoviruses carrying the recombinant gene are used to infect cells cultured, for example, in Excell 401 serum-free medium (JRH Biosciences, Lenexa, Kans.) or Sf900-II (Life Technologies, Inc.). The recombinant proteins secreted into the medium, for example, can be recovered by standard biochemical approaches. Supernatants from mammalian or insect cells expressing the recombinant proteins can be first concentrated using any of a number of commercial concentration units.

[0187] Insect recombinant vectors are useful as intermediates for the infection or transformation of insect cell systems. For example, an insect recombinant vector containing a nucleic acid molecule encoding a baculovirus transcriptional promoter followed downstream by an insect signal DNA sequence is capable of directing the secretion of the desired biologically active protein from the insect cell. The vector may utilize a baculovirus transcriptional promoter region derived from any of the over 500 baculoviruses generally infecting insects, such as for example the Orders Lepidoptera, Diptera, Orthoptera, Coleoptera and Hymenoptera, including for example but not limited to the viral DNAs of Autographa califomnica MNPV, Bombyx mori NPV, Trichoplusia ni MNPV, Rachiplusia ou MNPV or Galleria mellonella MNPV, wherein said baculovirus transcriptional promoter is a baculovirus immediate-early gene IEl or IEN promoter; an immediate-early gene in combination with a baculovirus delayed-early gene promoter region selected from the group consisting of 39K and a HindIII-k fragment delayed-early gene; or a baculovirus late gene promoter. The immediate-early or delayed-early promoters can be enhanced with transcriptional enhancer elements. The insect signal DNA sequence may code for a signal peptide of a Lepidopteran adipokinetic hormone precursor or a signal peptide of the Manduca sexta adipokinetic hormone precursor (Summers, U.S. Pat. No. 5,155,037; the entirety of which is herein incorporated by reference). Other insect signal DNA sequences include a signal peptide of the Orthoptera Schistocerca gregaria locust adipokinetic hormone precurser and the Drosophila melanogaster cuticle genes CP1, CP2, CP3 or CP4 or for an insect signal peptide having substantially a similar chemical composition and function (Summers, U.S. Pat. No. 5,155,037).

[0188] Insect cells are distinctly different from animal cells. Insects have a unique life cycle and have distinct cellular properties such as the lack of intracellular plasminogen activators in which are present in vertebrate cells. Another difference is the high expression levels of protein products ranging from 1 to greater than 500 mg/liter and the ease at which cDNA can be cloned into cells (Frasier, In Vitro Cell. Dev. Biol. 25:225 (1989); Summers and Smith, In: A Manual of Methods for Baculovirus Vectors and Insect Cell Culture Procedures, Texas Ag. Exper. Station Bulletin No. 1555 (1988), both of which are incorporated by reference in their entirety).

[0189] Recombinant protein expression in insect cells is achieved by viral infection or stable transformation. For viral infection, the desired gene is cloned into baculovirus at the site of the wild-type polyhedrin gene (Webb and Summers, Technique 2:173 (1990); Bishop and Posse, Adv. Gene Technol. 1:55 (1990); both of which are incorporated by reference in their entirety). The polyhedrin gene is a component of a protein coat in occlusions which encapsulate virus particles. Deletion or insertion in the polyhedron gene results the failure to form occlusion bodies. Occlusion negative viruses are morphologically different from occlusion positive viruses and enable one skilled in the art to identify and purify recombinant viruses.

[0190] The vectors of present invention preferably contain one or more selectable markers which permit easy selection of transformed cells. A selectable marker is a gene the product of which provides, for example biocide or viral resistance, resistance to heavy metals, prototrophy to auxotrophs, and the like. Selection may be accomplished by co-transformation, e.g., as described in WO 91/17243, a nucleic acid sequence of the present invention may be operably linked to a suitable promoter sequence. The promoter sequence is a nucleic acid sequence which is recognized by the insect host cell for expression of the nucleic acid sequence. The promoter sequence contains transcription and translation control sequences which mediate the expression of the protein or fragment thereof. The promoter may be any nucleic acid sequence which shows transcriptional activity in the insect host cell of choice and may be obtained from genes encoding polypeptides either homologous or heterologous to the host cell.

[0191] For example, a nucleic acid molecule encoding a protein or fragment thereof may also be operably linked to a suitable leader sequence. A leader sequence is a nontranslated region of a mRNA which is important for translation by the fungal host. The leader sequence is operably linked to the 5′ terminus of the nucleic acid sequence encoding the protein or fragment thereof. The leader sequence may be native to the nucleic acid sequence encoding the protein or fragment thereof or may be obtained from foreign sources. Any leader sequence which is functional in the insect host cell of choice may be used in the present invention.

[0192] A polyadenylation sequence may also be operably linked to the 3′ terminus of the nucleic acid sequence of the present invention. The polyadenylation sequence is a sequence which when transcribed is recognized by the insect host to add polyadenosine residues to transcribed mRNA. The polyadenylation sequence may be native to the nucleic acid sequence encoding the protein or fragment thereof or may be obtained from foreign sources. Any polyadenylation sequence which is functional in the fungal host of choice may be used in the present invention.

[0193] To avoid the necessity of disrupting the cell to obtain the protein or fragment thereof, and to minimize the amount of possible degradation of the expressed polypeptide within the cell, it is preferred that expression of the polypeptide gene gives rise to a product secreted outside the cell. To this end, the protein or fragment thereof of the present invention may be linked to a signal peptide linked to the amino terminus of the protein or fragment thereof. A signal peptide is an amino acid sequence which permits the secretion of the protein or fragment thereof from the insect host into the culture medium. The signal peptide may be native to the protein or fragment thereof of the invention or may be obtained from foreign sources. The 5′ end of the coding sequence of the nucleic acid sequence of the present invention may inherently contain a signal peptide coding region naturally linked in translation reading frame with the segment of the coding region which encodes the secreted protein or fragment thereof.

[0194] At present, a mode of achieving secretion of a foreign gene product in insect cells is by way of the foreign gene's native signal peptide. Because the foreign genes are usually from non-insect organisms, their signal sequences may be poorly recognized by insect cells, and hence, levels of expression may be suboptimal. However, the efficiency of expression of foreign gene products seems to depend primarily on the characteristics of the foreign protein. On average, nuclear localized or non-structural proteins are most highly expressed, secreted proteins are intermediate, and integral membrane proteins are the least expressed. One factor generally affecting the efficiency of the production of foreign gene products in a heterologous host system is the presence of native signal sequences (also termed presequences, targeting signals, or leader sequences) associated with the foreign gene. The signal sequence is generally coded by a DNA sequence immediately following (5′ to 3′) the translation start site of the desired foreign gene.

[0195] The expression dependence on the type of signal sequence associated with a gene product can be represented by the following example: If a foreign gene is inserted at a site downstream from the translational start site of the baculovirus polyhedrin gene so as to produce a fusion protein (containing the N-terminus of the polyhedrin structural gene), the fused gene is highly expressed. But less expression is achieved when a foreign gene is inserted in a baculovirus expression vector immediately following the transcriptional start site and totally replacing the polyhedrin structural gene.

[0196] Insertions into the region -50 to -1 significantly alter (reduce) steady state transcription which, in turn, reduces translation of the foreign gene product. Use of the pVL941 vector optimizes transcription of foreign genes to the level of the polyhedrin gene transcription. Even though the transcription of a foreign gene may be optimal, optimal translation may vary because of several factors involving processing: signal peptide recognition, mRNA and ribosome binding, glycosylation, disulfide bond formation, sugar processing, oligomerization, for example.

[0197] The properties of the insect signal peptide are expected to be more optimal for the efficiency of the translation process in insect cells than those from vertebrate proteins. This phenomenon can generally be explained by the fact that proteins secreted from cells are synthesized as precursor molecules containing hydrophobic N-terminal signal peptides. The signal peptides direct transport of the select protein to its target membrane and are then cleaved by a peptidase on the membrane, such as the endoplasmic reticulum, when the protein passes through it.

[0198] Another exemplary insect signal sequence is the sequence encoding for Drosophila cuticle proteins such as CP1, CP2, CP3 or CP4 (Summers, U.S. Pat. No. 5,278,050; the entirety of which is herein incorporated by reference). Most of a 9 kb region of the Drosophila genome containing genes for the cuticle proteins has been sequenced. Four of the five cuticle genes contains a signal peptide coding sequence interrupted by a short intervening sequence (about 60 base pairs) at a conserved site. Conserved sequences occur in the 5′ mRNA untranslated region, in the adjacent 35 base pairs of upstream flanking sequence and at -200 base pairs from the mRNA start position in each of the cuticle genes.

[0199] Standard methods of insect cell culture, cotransfection and preparation of plasmids have been described (Summers and Smith, A Manual of Methods for Baculovirus Vectors and Insect Cell Culture Procedures, Texas Agricultural Experiment Station Bulletin No. 1555, Texas A&M University (1987), O'Reilly et al, Bacuovirus Expression Vectors: A Laboratory Manual, W. H. Freeman and Company, New York (1992), King and Possee, The Baculocirus Expression System: A Laboratory Guide, Chapman & Hall, London (1992)). Procedures for the cultivation of viruses and cells are described in Volkman and Summers, J. Virol 19:820-832 (1975) and Volkman et al., J. Virol 19:820-832 (1976); both of which are herein incorporated by reference in their entirety.

[0200] (d) Bacterial Constructs and Transformed Bacterial Cells

[0201] The present invention also relates to a bacterial recombinant vector comprising exogenous genetic material. The present invention also relates to a bacteria cell comprising a bacterial recombinant vector. The present invention also relates to methods for obtaining a recombinant bacteria host cell, comprising introducing into a bacterial host cell exogenous genetic material. One or more of the nucleic acid molecules of the present invention may be permanently or transiently introduced into a bacterial cell.

[0202] The bacterial recombinant vector may be any vector which can be conveniently subjected to recombinant DNA procedures. The choice of a vector will typically depend on the compatibility of the vector with the bacterial host cell into which the vector is to be introduced. The vector may be a linear or a closed circular plasmid. The vector system may be a single vector or plasmid or two or more vectors or plasmids which together contain the total DNA to be introduced into the genome of the bacterial host. In addition, the bacterial vector may be an expression vector. Nucleic acid molecules encoding protein homologues or fragments thereof can, for example, be suitably inserted into a replicable vector for expression in the bacterium under the control of a suitable promoter for bacteria. Many vectors are available for this purpose, and selection of the appropriate vector will depend mainly on the size of the nucleic acid to be inserted into the vector and the particular host cell to be transformed with the vector. Each vector contains various components depending on its function (amplification of DNA or expression of DNA) and the particular host cell with which it is compatible. The vector components for bacterial transformation generally include, but are not limited to, one or more of the following: a signal sequence, an origin of replication, one or more marker genes, and an inducible promoter.

[0203] In general, plasmid vectors containing replicon and control sequences that are derived from species compatible with the host cell are used in connection with bacterial hosts. The vector ordinarily carries a replication site, as well as marking sequences that are capable of providing phenotypic selection in transformed cells. For example, E. coli is typically transformed using pBR322, a plasmid derived from an E. coli species (see, e.g., Bolivar et al., Gene 2:95 (1977); the entirety of which is herein incorporated by reference). pBR322 contains genes for ampicillin and tetracycline resistance and thus provides easy means for identifying transformed cells. The pBR322 plasmid, or other microbial plasmid or phage, also generally contains, or is modified to contain, promoters that can be used by the microbial organism for expression of the selectable marker genes.

[0204] Nucleic acid molecules encoding protein or fragments thereof may be expressed not only directly, but also as a fusion with another polypeptide, preferably a signal sequence or other polypeptide having a specific cleavage site at the N-terminus of the mature polypeptide. In general, the signal sequence may be a component of the vector, or it may be a part of the polypeptide DNA that is inserted into the vector. The heterologous signal sequence selected should be one that is recognized and processed (i.e., cleaved by a signal peptidase) by the host cell. For bacterial host cells that do not recognize and process the native polypeptide signal sequence, the signal sequence is substituted by a bacterial signal sequence selected, for example, from the group consisting of the alkaline phosphatase, penicillinase, 1 pp, or heat-stable enterotoxin II leaders.

[0205] Both expression and cloning vectors contain a nucleic acid sequence that enables the vector to replicate in one or more selected host cells. Generally, in cloning vectors this sequence is one that enables the vector to replicate independently of the host chromosomal DNA, and includes origins of replication or autonomously replicating sequences. Such sequences are well known for a variety of bacteria. The origin of replication from the plasmid pBR322 is suitable for most Gram-negative bacteria.

[0206] Expression and cloning vectors also generally contain a selection gene, also termed a selectable marker. This gene encodes a protein necessary for the survival or growth of transformed host cells grown in a selective culture medium. Host cells not transformed with the vector containing the selection gene will not survive in the culture medium. Typical selection genes encode proteins that (a) confer resistance to antibiotics or other toxins, e.g., ampicillin, neomycin, methotrexate, or tetracycline, (b) complement auxotrophic deficiencies, or (c) supply critical nutrients not available from complex media, e.g., the gene encoding D-alanine racemase for Bacilli. One example of a selection scheme utilizes a drug to arrest growth of a host cell. Those cells that are successfully transformed with a heterologous protein homologue or fragment thereof produce a protein conferring drug resistance and thus survive the selection regimen.

[0207] The expression vector for producing a protein or fragment thereof can also contains an inducible promoter that is recognized by the host bacterial organism and is operably linked to the nucleic acid encoding, for example, the nucleic acid molecule encoding the protein homologue or fragment thereof of interest. Inducible promoters suitable for use with bacterial hosts include the beta-lactamase and lactose promoter systems (Chang et al., Nature 275:615 (1978); Goeddel et al., Nature 281:544 (1979); both of which are herein incorporated by reference in their entirety), the arabinose promoter system (Guzman et al., J. Bacteriol. 174:7716-7728 (1992); the entirety of which is herein incorporated by reference), alkaline phosphatase, a tryptophan (trp) promoter system (Goeddel, Nucleic Acids Res. 8:4057 (1980); EP 36,776; both of which are herein incorporated by reference in their entirety) and hybrid promoters such as the tac promoter (deBoer et al., Proc. Natl. Acad. Sci. (USA) 80:21-25 (1983); the entirety of which is herein incorporated by reference). However, other known bacterial inducible promoters are suitable (Siebenlist et al., Cell 20:269 (1980); the entirety of which is herein incorporated by reference).

[0208] Promoters for use in bacterial systems also generally contain a Shine-Dalgarno (S.D.) sequence operably linked to the DNA encoding the polypeptide of interest. The promoter can be removed from the bacterial source DNA by restriction enzyme digestion and inserted into the vector containing the desired DNA.

[0209] Construction of suitable vectors containing one or more of the above-listed components employs standard ligation techniques. Isolated plasmids or DNA fragments are cleaved, tailored, and re-ligated in the form desired to generate the plasmids required. Examples of available bacterial expression vectors include, but are not limited to, the multifunctional E. coli cloning and expression vectors such as Bluescrip™ (Stratagene, La Jolla, Calif.), in which, for example, encoding an A. nidulans protein homologue or fragment thereof homologue, may be ligated into the vector in frame with sequences for the amino-terminal Met and the subsequent 7 residues of beta-galactosidase so that a hybrid protein is produced; pIN vectors (Van Heeke and Schuster, J. Biol. Chem. 264:5503-5509 (1989), the entirety of which is herein incorporated by reference); and the like. pGEX vectors (Promega, Madison, Wisc. U.S.A.) may also be used to express foreign polypeptides as fusion proteins with glutathione S-transferase (GST). In general, such fusion proteins are soluble and can easily be purified from lysed cells by adsorption to glutathione-agarose beads followed by elution in the presence of free glutathione. Proteins made in such systems are designed to include heparin, thrombin or factor XA protease cleavage sites so that the cloned polypeptide of interest can be released from the GST moiety at will.

[0210] Suitable host bacteria for a bacterial vector include archaebacteria and eubacteria, especially eubacteria, and most preferably Enterobacteriaceae. Examples of useful bacteria include Escherichia, Enterobacter, Azotobacter, Erwinia, Bacillus, Pseudomonas, Klebsiella, Proteus, Salmonella, Serratia, Shigella, Rhizobia, Vitreoscilla, and Paracoccus. Suitable E. coli hosts include E. coli W3110 (American Type Culture Collection (ATCC) 27,325, Manassas, Va. U.S.A.), E. coli 294 (ATCC 31,446), E. coli B, and E. coli X1776 (ATCC 31,537). These examples are illustrative rather than limiting. Mutant cells of any of the above-mentioned bacteria may also be employed. It is, of course, necessary to select the appropriate bacteria taking into consideration replicability of the replicon in the cells of a bacterium. For example, E. coli, Serratia, or Salmonella species can be suitably used as the host when well known plasmids such as pBR322, pBR325, pACYC177, or pKN410 are used to supply the replicon. E. coli strain W3110 is a preferred host or parent host because it is a common host strain for recombinant DNA product fermentations. Preferably, the host cell should secrete minimal amounts of proteolytic enzymes.

[0211] Host cells are transfected and preferably transformed with the above-described vectors and cultured in conventional nutrient media modified as appropriate for inducing promoters, selecting transformants, or amplifying the genes encoding the desired sequences.

[0212] Numerous methods of transfection are known to the ordinarily skilled artisan, for example, calcium phosphate and electroporation. Depending on the host cell used, transformation is done using standard techniques appropriate to such cells. The calcium treatment employing calcium chloride, as described in section 1.82 of Sambrook et al., Molecular Cloning: A Laboratory Manual, New York: Cold Spring Harbor Laboratory Press, (1989), is generally used for bacterial cells that contain substantial cell-wall barriers. Another method for transformation employs polyethylene glycol/DMSO, as described in Chung and Miller (Chung and Miller, Nucleic Acids Res. 16:3580 (1988); the entirety of which is herein incorporated by reference). Yet another method is the use of the technique termed electroporation.

[0213] Bacterial cells used to produce the polypeptide of interest for purposes of this invention are cultured in suitable media in which the promoters for the nucleic acid encoding the heterologous polypeptide can be artificially induced as described generally, e.g., in Sambrook et al., Molecular Cloning: A Laboratory Manual, New York: Cold Spring Harbor Laboratory Press, (1989). Examples of suitable media are given in U.S. Pat. Nos. 5,304,472 and 5,342,763; both of which are incorporated by reference in their entirety.

[0214] In addition to the above discussed procedures, practitioners are familiar with the standard resource materials which describe specific conditions and procedures for the construction, manipulation and isolation of macromolecules (e.g., DNA molecules, plasmids, etc.), generation of recombinant organisms and the screening and isolating of clones, (see for example, Sambrook et al., Molecular Cloning: A Laboratory Manual, Cold Spring Harbor Press (1989); Mailga et al., Methods in Plant Molecular Biology, Cold Spring Harbor Press (1995), the entirety of which is herein incorporated by reference; Birren et al., Genome Analysis: Analyzing DNA, 1, Cold Spring Harbor, N.Y., the entirety of which is herein incorporated by reference).

[0215] (e) Fungal Constructs and Transformed Fungal Cells

[0216] The present invention also relates to a fungal recombinant vector comprising exogenous genetic material. The present invention also relates to a fungal cell comprising a fungal recombinant vector. The present invention also relates to methods for obtaining a recombinant fungal host cell comprising introducing into a fungal host cell exogenous genetic material.

[0217] Exogenous genetic material may be transferred into a fungal cell. In a preferred embodiment the exogenous genetic material includes a nucleic acid molecule of the present invention having a sequence selected from the group consisting of SEQ ID NO: 1 through SEQ ID NO: 15,112 or complements thereof or fragments of either. The fungal recombinant vector may be any vector which can be conveniently subjected to recombinant DNA procedures. The choice of a vector will typically depend on the compatibility of the vector with the fungal host cell into which the vector is to be introduced. The vector may be a linear or a closed circular plasmid. The vector system may be a single vector or plasmid or two or more vectors or plasmids which together contain the total DNA to be introduced into the genome of the fungal host.

[0218] The fungal vector may be an autonomously replicating vector, i.e., a vector which exists as an extrachromosomal entity, the replication of which is independent of chromosomal replication, e.g., a plasmid, an extrachromosomal element, a minichromosome, or an artificial chromosome. The vector may contain any means for assuring self-replication. Alternatively, the vector may be one which, when introduced into the fungal cell, is integrated into the genome and replicated together with the chromosome(s) into which it has been integrated. For integration, the vector may rely on the nucleic acid sequence of the vector for stable integration of the vector into the genome by homologous or nonhomologous recombination. Alternatively, the vector may contain additional nucleic acid sequences for directing integration by homologous recombination into the genome of the fungal host. The additional nucleic acid sequences enable the vector to be integrated into the host cell genome at a precise location(s) in the chromosome(s). To increase the likelihood of integration at a precise location, there should be preferably two nucleic acid sequences which individually contain a sufficient number of nucleic acids, preferably 400 bp to 1500 bp, more preferably 800 bp to 1000 bp, which are highly homologous with the corresponding target sequence to enhance the probability of homologous recombination. These nucleic acid sequences may be any sequence that is homologous with a target sequence in the genome of the fungal host cell, and, furthermore, may be non-encoding or encoding sequences.

[0219] For autonomous replication, the vector may further comprise an origin of replication enabling the vector to replicate autonomously in the host cell in question. Examples of origin of replications for use in a yeast host cell are the 2 micron origin of replication and the combination of CEN3 and ARS 1. Any origin of replication may be used which is compatible with the fungal host cell of choice.

[0220] The fungal vectors of the present invention preferably contain one or more selectable markers which permit easy selection of transformed cells. A selectable marker is a gene the product of which provides, for example biocide or viral resistance, resistance to heavy metals, prototrophy to auxotrophs, and the like. The selectable marker may be selected from the group including, but not limited to, amdS (acetamidase), argB (omithine carbamoyltransferase), bar (phosphinothricin acetyltransferase), hygB (hygromycin phosphotransferase), niaD (nitrate reductase), pyrG (orotidine-5′-phosphate decarboxylase), and sC (sulfate adenyltransferase), and trpC (anthranilate synthase). Preferred for use in an Aspergillus cell are the amdS and pyrG markers of Aspergillus nidulans or Aspergillus oryzae and the bar marker of Streptomyces hygroscopicus. Furthermore, selection may be accomplished by co-transformation, e.g., as described in WO 91/17243, the entirety of which is herein incorporated by reference. A nucleic acid sequence of the present invention may be operably linked to a suitable promoter sequence. The promoter sequence is a nucleic acid sequence which is recognized by the fungal host cell for expression of the nucleic acid sequence. The promoter sequence contains transcription and translation control sequences which mediate the expression of the protein or fragment thereof.

[0221] A promoter may be any nucleic acid sequence which shows transcriptional activity in the fungal host cell of choice and may be obtained from genes encoding polypeptides either homologous or heterologous to the host cell. Examples of suitable promoters for directing the transcription of a nucleic acid construct of the invention in a filamentous fungal host are promoters obtained from the genes encoding Aspergillus oryzae TAKA amylase, Rhizomucor miehei aspartic proteinase, Aspergillus niger neutral alpha-amylase, Aspergillus niger acid stable alpha-amylase, Aspergillus niger or Aspergillus awamori glucoamylase (glaA), Rhizomucor miehei lipase, Aspergillus oryzae alkaline protease, Aspergillus oryzae triose phosphate isomerase, Aspergillus nidulans acetamidase, and hybrids thereof. In a yeast host, a useful promoter is the Saccharomyces cerevisiae enolase (eno-1) promoter. Particularly preferred promoters are the TAKA amylase, NA2-tpi (a hybrid of the promoters from the genes encoding Aspergillus niger neutral alpha-amylase and Aspergillus oryzae triose phosphate isomerase), and glaA promoters.

[0222] A protein or fragment thereof encoding nucleic acid molecule of the present invention may also be operably linked to a terminator sequence at its 3′ terminus. The terminator sequence may be native to the nucleic acid sequence encoding the protein or fragment thereof or may be obtained from foreign sources. Any terminator which is functional in the fungal host cell of choice may be used in the present invention, but particularly preferred terminators are obtained from the genes encoding Aspergillus oryzae TAKA amylase, Aspergillus niger glucoamylase, Aspergillus nidulans anthranilate synthase, Aspergillus niger alpha-glucosidase, and Saccharomyces cerevisiae enolase.

[0223] A protein or fragment thereof encoding nucleic acid molecule of the present invention may also be operably linked to a suitable leader sequence. A leader sequence is a nontranslated region of a mRNA which is important for translation by the fungal host. The leader sequence is operably linked to the 5′ terminus of the nucleic acid sequence encoding the protein or fragment thereof. The leader sequence may be native to the nucleic acid sequence encoding the protein or fragment thereof or may be obtained from foreign sources. Any leader sequence which is functional in the fungal host cell of choice may be used in the present invention, but particularly preferred leaders are obtained from the genes encoding Aspergillus oryzae TAKA amylase and Aspergillus oryzae triose phosphate isomerase.

[0224] A polyadenylation sequence may also be operably linked to the 3′ terminus of the nucleic acid sequence of the present invention. The polyadenylation sequence is a sequence which when transcribed is recognized by the fungal host to add polyadenosine residues to transcribed mRNA. The polyadenylation sequence may be native to the nucleic acid sequence encoding the protein or fragment thereof or may be obtained from foreign sources. Any polyadenylation sequence which is functional in the fungal host of choice may be used in the present invention, but particularly preferred polyadenylation sequences are obtained from the genes encoding Aspergillus oryzae TAKA amylase, Aspergillus niger glucoamylase, Aspergillus nidulans anthranilate synthase, and Aspergillus niger alpha-glucosidase.

[0225] To avoid the necessity of disrupting the cell to obtain the protein or fragment thereof, and to minimize the amount of possible degradation of the expressed protein or fragment thereof within the cell, it is preferred that expression of the protein or fragment thereof gives rise to a product secreted outside the cell. To this end, a protein or fragment thereof of the present invention may be linked to a signal peptide linked to the amino terminus of the protein or fragment thereof. A signal peptide is an amino acid sequence which permits the secretion of the protein or fragment thereof from the fungal host into the culture medium. The signal peptide may be native to the protein or fragment thereof of the invention or may be obtained from foreign sources. The 5′ end of the coding sequence of the nucleic acid sequence of the present invention may inherently contain a signal peptide coding region naturally linked in translation reading frame with the segment of the coding region which encodes the secreted protein or fragment thereof. Alternatively, the 5′ end of the coding sequence may contain a signal peptide coding region which is foreign to that portion of the coding sequence which encodes the secreted protein or fragment thereof. The foreign signal peptide may be required where the coding sequence does not normally contain a signal peptide coding region. Alternatively, the foreign signal peptide may simply replace the natural signal peptide to obtain enhanced secretion of the desired protein or fragment thereof. The foreign signal peptide coding region may be obtained from a glucoamylase or an amylase gene from an Aspergillus species, a lipase or proteinase gene from Rhizomucor miehei, the gene for the alpha-factor from Saccharomyces cerevisiae, or the calf preprochymosin gene. An effective signal peptide for fungal host cells is the Aspergillus oryzae TAKA amylase signal, Aspergillus niger neutral amylase signal, the Rhizomucor miehei aspartic proteinase signal, the Humicola lanuginosus cellulase signal, or the Rhizomucor miehei lipase signal. However, any signal peptide capable of permitting secretion of the protein or fragment thereof in a fungal host of choice may be used in the present invention.

[0226] A protein or fragment thereof encoding nucleic acid molecule of the present invention may also be linked to a propeptide coding region. A propeptide is an amino acid sequence found at the amino terminus of aproprotein or proenzyme. Cleavage of the propeptide from the proprotein yields a mature biochemically active protein. The resulting polypeptide is known as a propolypeptide or proenzyme (or a zymogen in some cases). Propolypeptides are generally inactive and can be converted to mature active polypeptides by catalytic or autocatalytic cleavage of the propeptide from the propolypeptide or proenzyme. The propeptide coding region may be native to the protein or fragment thereof or may be obtained from foreign sources. The foreign propeptide coding region may be obtained from the Saccharomyces cerevisiae alpha-factor gene or Myceliophthora thennophila laccase gene (WO 95/33836, the entirety of which is herein incorporated by reference).

[0227] The procedures used to ligate the elements described above to construct the recombinant expression vector of the present invention are well known to one skilled in the art (see, for example, Sambrook et al., Molecular Cloning, A Laboratory Manual, 2nd ed., Cold Spring Harbor, N.Y., (1989)).

[0228] The present invention also relates to recombinant fungal host cells produced by the methods of the present invention which are advantageously used with the recombinant vector of the present invention. The cell is preferably transformed with a vector comprising a nucleic acid sequence of the invention followed by integration of the vector into the host chromosome. The choice of fungal host cells will to a large extent depend upon the gene encoding the protein or fragment thereof and its source. The fungal host cell may, for example, be a yeast cell or a filamentous fungal cell.

[0229] “Yeast” as used herein includes Ascosporogenous yeast (Endomycetales), Basidiosporogenous yeast, and yeast belonging to the Fungi Imperfecti (Blastomycetes). The Ascosporogenous yeasts are divided into the families Spennophthoraceae and Saccharomycetaceae. The latter is comprised of four subfamilies, Schizosaccharomycoideae (for example, genus Schizosaccharomyces), Nadsonioideae, Lipomycoideae, and Saccharomycoideae (for example, genera Pichia, Kluyveromyces and Saccharomyces). The Basidiosporogenous yeasts include the genera Leucosporidim, Rhodosporidium, Sporidiobolus, Filobasidium, and Filobasidiella. Yeast belonging to the Fungi Imperfecti are divided into two families, Sporobolomycetaceae (for example, genera Sorobolomyces and Bullera) and Cryptococcaceae (for example, genus Candida). Since the classification of yeast may change in the future, for the purposes of this invention, yeast shall be defined as described in Biology and Activities of Yeast (Skinner et al., Soc. App. Bacteriol. Symposium Series No. 9, (1980), the entirety of which is herein incorporated by reference). The biology of yeast and manipulation of yeast genetics are well known in the art (see, for example, Biochemistry and Genetics of Yeast, Bacil et al. (ed.), 2nd edition, 1987; The Yeasts, Rose and Harrison (eds.), 2nd ed., (1987); and The Molecular Biology of the Yeast Saccharomyces, Strathern et al. (eds.), (1981), all of which are herein incorporated by reference in their entirety).

[0230] “Fungi” as used herein includes the phyla Ascomycota, Basidiomycota, Chytridiomycota, and Zygomycota (as defined by Hawksworth et al., In: Ainsworth and Bisby's Dictionary of The Fungi, 8th edition, 1995, CAB International, University Press, Cambridge, UK; the entirety of which is herein incorporated by reference) as well as the Oomycota (as cited in Hawksworth et al., In: Ainsworth and Bisby's Dictionary of The Fungi, 8th edition, 1995, CAB International, University Press, Cambridge, UK) and all mitosporic fungi (Hawksworth et al., In: Ainsworth and Bisby's Dictionary of The Fungi, 8th edition, 1995, CAB International, University Press, Cambridge, UK). Representative groups of Ascomycota include, for example, Neurospora, Eupenicillium (=Penicillium), Emericella (=Aspergillus), Eurotiun (=Aspergillus), and the true yeasts listed above. Examples of Basidiomycota include mushrooms, rusts, and smuts. Representative groups of Chytridiomycota include, for example, Allomyces, Blastocladiella, Coelomomyces, and aquatic fungi. Representative groups of Oomycota include, for example, Saprolegniomycetous aquatic fungi (water molds) such as Achlya. Examples of mitosporic fungi include Aspergillus, Penicilliun, Candida, and Alternaria. Representative groups of Zygomycota include, for example, Rhizopus and Mucor.

[0231] “Filamentous fungi” include all filamentous forms of the subdivision Eumycota and Oomycota (as defined by Hawksworth et al., In: Ainsworth and Bisby's Dictionary of The Fungi, 8th edition, 1995, CAB International, University Press, Cambridge, UK). The filamentous fungi are characterized by a vegetative mycelium composed of chitin, cellulose, glucan, chitosan, mannan, and other complex polysaccharides. Vegetative growth is by hyphal elongation and carbon catabolism is obligately aerobic. In contrast, vegetative growth by yeasts such as Saccharomyces cerevisiae is by budding of a unicellular thallus and carbon catabolism may be fermentative.

[0232] In one embodiment, the fungal host cell is a yeast cell. In a preferred embodiment, the yeast host cell is a cell of the species of Candida, Kluyveromyces, Saccharomyces, Schizosaccharomyces, Pichia, and Yarrowia. In a preferred embodiment, the yeast host cell is a Saccharomyces cerevisiae cell, a Saccharomyces carlsbergensis, Saccharomyces diastaticus cell, a Saccharomyces douglasii cell, a Saccharomyces kluyveri cell, a Saccharomyces norbensis cell, or a Saccharomyces ovifonnis cell. In another preferred embodiment, the yeast host cell is a Kluyveromyces lactis cell. In another preferred embodiment, the yeast host cell is a Yarrowia lipolytica cell.

[0233] In another embodiment, the fungal host cell is a filamentous fungal cell. In a preferred embodiment, the filamentous fungal host cell is a cell of the species of, but not limited to, Acremonium, Aspergillus, Fusarium, Humicola, Myceliophthora, Mucor, Neurospora, Penicillium, Thielavia, Tolypocladium, and Trichoderna. In a preferred embodiment, the filamentous fungal host cell is an Aspergillus cell. In another preferred embodiment, the filamentous fungal host cell is an Acremonium cell. In another preferred embodiment, the filamentous fungal host cell is a Fusarium cell. In another preferred embodiment, the filamentous fungal host cell is a Humicola cell. In another preferred embodiment, the filamentous fungal host cell is a Myceliophthora cell. In another even preferred embodiment, the filamentous fungal host cell is a Mucor cell. In another preferred embodiment, the filamentous fungal host cell is a Neurospora cell. In another preferred embodiment, the filamentous fungal host cell is a Penicillium cell. In another preferred embodiment, the filamentous fungal host cell is a Thielavia cell. In another preferred embodiment, the filamentous fungal host cell is a Tolypocladiun cell. In another preferred embodiment, the filamentous fungal host cell is a Trichoderma cell. In a preferred embodiment, the filamentous fungal host cell is an Aspergillus oryzae cell, an Aspergillus niger cell, an Aspergillus foetidus cell, or an Aspergillus japonicus cell. In another preferred embodiment, the filamentous fungal host cell is a Fusarium oxysporum cell or a Fusarium graminearum cell. In another preferred embodiment, the filamentous fungal host cell is a Humicola insolens cell or a Humicola lanuginosus cell. In another preferred embodiment, the filamentous fungal host cell is a Myceliophthora thermophila cell. In a most preferred embodiment, the filamentous fungal host cell is a Mucor miehei cell. In a most preferred embodiment, the filamentous fungal host cell is a Neurospora crassa cell. In a most preferred embodiment, the filamentous fungal host cell is a Penicillium purpurogenum cell. In another most preferred embodiment, the filamentous fungal host cell is a Thielavia terrestris cell. In another most preferred embodiment, the Trichodenna cell is a Trichodenna reesei cell, a Trichodemna viride cell, a Trichoderma longibrachiatum cell, a Trichoderma harzianum cell, or a Trichoderna koningii cell. In a preferred embodiment, the fungal host cell is selected from an A. nidulans cell, an A. niger cell, an A. oryzae cell and an A. sojae cell. In a further preferred embodiment, the fungal host cell is an A. nidulans cell.

[0234] The recombinant fungal host cells of the present invention may further comprise one or more sequences which encode one or more factors that are advantageous in the expression of the protein or fragment thereof, for example, an activator (e.g., a trans-acting factor), a chaperone, and a processing protease. The nucleic acids encoding one or more of these factors are preferably not operably linked to the nucleic acid encoding the protein or fragment thereof. An activator is a protein which activates transcription of a nucleic acid sequence encoding a polypeptide (Kudla et al., EMBO 9:1355-1364(1990); Jarai and Buxton, Current Genetics 26:2238-244(1994); Verdier, Yeast 6:271-297(1990), all of which are herein incorporated by reference in their entirety). The nucleic acid sequence encoding an activator may be obtained from the genes encoding Saccharomyces cerevisiae heme activator protein 1 (hap 1), Saccharomyces cerevisiae galactose metabolizing protein 4 (gal4), and Aspergillus nidulans ammonia regulation protein (areA). For further examples, see Verdier, Yeast 6:271-297 (1990); MacKenzie et al., Journal of Gen. Microbiol. 139:2295-2307 (1993), both of which are herein incorporated by reference in their entirety). A chaperone is a protein which assists another protein in folding properly (Hartl et al., TIBS 19:20-25 (1994); Bergeron et al., TIBS 19:124-128 (1994); Demolder et al., J. Biotechnology 32:179-189 (1994); Craig, Science 260:1902-1903(1993); Gething and Sambrook, Nature 355:33-45 (1992); Puig and Gilbert, J Biol. Chem. 269:7764-7771 (1994); Wang and Tsou, FASEB Journal 7:1515-11157 (1993); Robinson et al., Bio/Technology 1:381-384 (1994), all of which are herein incorporated by reference in their entirety). The nucleic acid sequence encoding a chaperone may be obtained from the genes encoding Aspergillus oryzae protein disulphide isomerase, Saccharomyces cerevisiae calnexin, Saccharomyces cerevisiae BiP/GRP78, and Saccharomyces cerevisiae Hsp70. For further examples, see Gething and Sambrook, Nature 355:3345 (1992); Hartl et al., TIBS 19:20-25 (1994). A processing protease is a protease that cleaves a propeptide to generate a mature biochemically active polypeptide (Enderlin and Ogrydziak, Yeast 10:67-79 (1994); Fuller et al., Proc. Natl. Acad. Sci. (U.S.A.) 86:1434-1438 (1989); Julius et al., Cell 37:1075-1089 (1984); Julius et al., Cell 32:839-852 (1983), all of which are incorporated by reference in their entirety). The nucleic acid sequence encoding a processing protease may be obtained from the genes encoding Aspergillus niger Kex2, Saccharomyces cerevisiae dipeptidylaminopeptidase, Saccharomyces cerevisiae Kex2, and Yarrowia lipolytica dibasic processing endoprotease (xpr6). Any factor that is functional in the fungal host cell of choice may be used in the present invention.

[0235] Fungal cells may be transformed by a process involving protoplast formation, transformation of the protoplasts, and regeneration of the cell wall in a manner known per se. Suitable procedures for transformation of Aspergillus host cells are described in EP 238 023 and Yelton et al., Proc. Natl. Acad. Sci. (U.S.A.) 81:1470-1474 (1984), both of which are herein incorporated by reference in their entirety. A suitable method of transforming Fusarium species is described by Malardier et al., Gene 78:147-156 (1989), the entirety of which is herein incorporated by reference. Yeast may be transformed using the procedures described by Becker and Guarente, In: Abelson and Simon, (eds.), Guide to Yeast Genetics and Molecular Biology, Methods Enzymol. Volume 194, pp 182-187, Academic Press, Inc., New York; Ito et al., J. Bacteriology 153:163 (1983); Hinnen et al., Proc. Natl. Acad. Sci. (U.S.A.) 75:1920 (1978), all of which are herein incorporated by reference in their entirety.

[0236] The present invention also relates to methods of producing the protein or fragment thereof comprising culturing the recombinant fungal host cells under conditions conducive for expression of the protein or fragment thereof. The fungal cells of the present invention are cultivated in a nutrient medium suitable for production of the protein or fragment thereof using methods known in the art. For example, the cell may be cultivated by shake flask cultivation, small-scale or large-scale fermentation (including continuous, batch, fed-batch, or solid state fermentations) in laboratory or industrial fermentors performed in a suitable medium and under conditions allowing the protein or fragment thereof to be expressed and/or isolated. The cultivation takes place in a suitable nutrient medium comprising carbon and nitrogen sources and inorganic salts, using procedures known in the art (see, e.g., Bennett, and LaSure (eds.), More Gene Manipulations in Fungi, Academic Press, CA, (1991), the entirety of which is herein incorporated by reference). Suitable media are available from commercial suppliers or may be prepared according to published compositions (e.g., in catalogues of the American Type Culture Collection, Manassas, Va.). If the protein or fragment thereof is secreted into the nutrient medium, a protein or fragment thereof can be recovered directly from the medium. If the protein or fragment thereof is not secreted, it is recovered from cell lysates.

[0237] The expressed protein or fragment thereof may be detected using methods known in the art that are specific for the particular protein or fragment. These detection methods may include the use of specific antibodies, formation of an enzyme product, or disappearance of an enzyme substrate. For example, if the protein or fragment thereof has enzymatic activity, an enzyme assay may be used. Alternatively, if polyclonal or monoclonal antibodies specific to the protein or fragment thereof are available, immunoassays may be employed using the antibodies to the protein or fragment thereof. The techniques of enzyme assay and immunoassay are well known to those skilled in the art.

[0238] The resulting protein or fragment thereof may be recovered by methods known in the arts. For example, the protein or fragment thereof may be recovered from the nutrient medium by conventional procedures including, but not limited to, centrifugation, filtration, extraction, spray-drying, evaporation, or precipitation. The recovered protein or fragment thereof may then be further purified by a variety of chromatographic procedures, e.g., ion exchange chromatography, gel filtration chromatography, affinity chromatography, or the like.

[0239] (f) Plant Constructs, Transformed Plant Cells and Plant Transformants

[0240] One or more of the nucleic acid molecules of the present invention may be used in plant transformation or transfection. Exogenous genetic material may be transferred into a plant cell and the plant cell regenerated into a whole, fertile or sterile plant. Such genetic material may be transferred into either monocotyledons and dicotyledons including, but not limited to maize (pp 63-69), soybean (pp 50-60), Arabidopsis (p 45), phaseolus (pp 47-49), peanut (pp 49-50), alfalfa (p 60), wheat (pp 69-71), rice (pp 72-79), oat (pp 80-81), sorghum (p 83), rye (p 84), tritordeum (p 84), millet (p85), fescue (p 85), perennial ryegrass (p 86), sugarcane (p87), cranberry (p101), papaya (pp 101-102), banana (p 103), banana (p 103), muskmelon (p 104), apple (p 104), cucumber (p 105), dendrobium (p 109), gladiolus (p 110), chrysanthemum (p 110), liliacea (p 111), cotton (pp113-114), eucalyptus (p 115), sunflower (p 118), canola (p 118), turfgrass (p121), sugarbeet (p 122), coffee (p 122), and dioscorea (p 122), (Christou, In: Particle Bombardment for Genetic Engineering of Plants, Biotechnology Intelligence Unit. Academic Press, San Diego, Calif. (1996), the entirety of which is herein incorporated by reference).

[0241] Transfer of a nucleic acid that encodes for a protein can result in overexpression of that protein in a transformed cell or genetically improved plant. One or more of the proteins or fragments thereof encoded by nucleic acid molecules of the present invention may be overexpressed in a transformed cell or transformed plant. Particularly, any of the proteins or fragments thereof of the present invention may be overexpressed in a transformed cell or genetically improved plant. Such overexpression may be the result of transient or stable transfer of the exogenous genetic material.

[0242] Exogenous genetic material may be transferred into a plant cell and the plant cell by the use of a DNA vector or construct designed for such a purpose. Design of such a vector is generally within the skill of the art (See, Plant Molecular Biology: A Laboratory Manual, Clark (ed.), Springier, N.Y. (1997), the entirety of which is herein incorporated by reference).

[0243] A construct or vector may include a plant promoter to express the protein or protein fragment of choice. A number of promoters which are active in plant cells have been described in the literature. These include the nopaline synthase (NOS) promoter (Ebert et al., Proc. Natl. Acad. Sci. (U.S.A.) 84:5745-5749 (1987), the entirety of which is herein incorporated by reference), the octopine synthase (OCS) promoter (which are carried on tumor-inducing plasmids of Agrobacterium timefaciens), the caulimovirus promoters such as the cauliflower mosaic virus (CaMV) 19S promoter (Lawton et al., Plant Mol. Biol. 9:315-324 (1987), the entirety of which is herein incorporated by reference) and the CAMV 35S promoter (Odell et al., Nature 313:810-812 (1985), the entirety of which is herein incorporated by reference), the figwort mosaic virus 35S-promoter, the light-inducible promoter from the small subunit of ribulose-1,5-bis-phosphate carboxylase (ssRUBISCO), the Adh promoter (Walker et al., Proc. Natl. Acad. Sci. (U.S.A.) 84:6624-6628 (1987), the entirety of which is herein incorporated by reference), the sucrose synthase promoter (Yang et al., Proc. Natl. Acad. Sci. (U.S.A.) 87:4144-4148 (1990), the entirety of which is herein incorporated by reference), the R gene complex promoter (Chandler et al., The Plant Cell 1:1175-1183 (1989), the entirety of which is herein incorporated by reference), and the chlorophyll a/b binding protein gene promoter, etc. These promoters have been used to create DNA constructs which have been expressed in plants; see, e.g., PCT publication WO 84/02913, herein incorporated by reference in its entirety.

[0244] Promoters which are known or are found to cause transcription of DNA in plant cells can be used in the present invention. Such promoters may be obtained from a variety of sources such as plants and plant viruses. It is preferred that the particular promoter selected should be capable of causing sufficient expression to result in the production of an effective amount of the protein of the present invention to cause the desired phenotype. In addition to promoters that are known to cause transcription of DNA in plant cells, other promoters may be identified for use in the current invention by screening a plant cDNA library for genes which are selectively or preferably expressed in the target tissues or cells.

[0245] For the purpose of expression in source tissues of the plant, such as the leaf, seed, root or stem, it is preferred that the promoters utilized in the present invention have relatively high expression in these specific tissues. For this purpose, one may choose from a number of promoters for genes with tissue- or cell-specific or -enhanced expression. Examples of such promoters reported in the literature include the chloroplast glutamine synthetase GS2 promoter from pea (Edwards et al., Proc. Natl. Acad. Sci. (U.S.A.) 87:3459-3463 (1990), herein incorporated by reference in its entirety), the chloroplast fructose-1,6-biphosphatase (FBPase) promoter from wheat (Lloyd et al., Mol. Gen. Genet. 225:209-216 (1991), herein incorporated by reference in its entirety), the nuclear photosynthetic ST-LS 1 promoter from potato (Stockhaus et al., EMBO J. 8:2445-2451 (1989), herein incorporated by reference in its entirety), the serine/threonine kinase (PAL) promoter and the glucoamylase (CHS) promoter from Arabidopsis thaliana. Also reported to be active in photosynthetically active tissues are the ribulose-1,5-bisphosphate carboxylase (RbcS) promoter from eastern larch (Larix laricina), the promoter for the cab gene, cab6, from pine (Yamamoto et al., Plant Cell Physiol. 35:773-778 (1994), herein incorporated by reference in its entirety), the promoter for the Cab-1 gene from wheat (Fejes et al., Plant Mol. Biol. 15:921-932 (1990), herein incorporated by reference in its entirety), the promoter for the CAB-1 gene from spinach (Lubberstedt et al., Plant Physiol. 104:997-1006 (1994), herein incorporated by reference in its entirety), the promoter for the cab1R gene from rice (Luan et al., Plant Cell. 4:971-981 (1992), the entirety of which is herein incorporated by reference), the pyruvate, orthophosphate dikinase (PPDK) promoter from maize (Matsuoka et al., Proc. Natl. Acad. Sci. (U.S.A.) 90:9586-9590 (1993), herein incorporated by reference in its entirety), the promoter for the tobacco Lhcb1*2 gene (Cerdan et al., Plant Mol. Biol. 33:245-255 (1997), herein incorporated by reference in its entirety), the Arabidopsis thaliana SUC2 sucrose-H+ symporter promoter (Truemit et al., Planta. 196:564-570 (1995), herein incorporated by reference in its entirety), and the promoter for the thylakoid membrane proteins from spinach (psaD, psaF, psaE, PC, FNR, atpC, atpD, cab, rbcS). Other promoters for the chlorophyll a/b-binding proteins may also be utilized in the present invention, such as the promoters for LhcB gene and PsbP gene from white mustard (Sinapis alba; Kretsch et al., Plant Mol. Biol. 28:219-229 (1995), the entirety of which is herein incorporated by reference).

[0246] For the purpose of expression in sink tissues of the plant, such as the tuber of the potato plant, the fruit of tomato, or the seed of maize, wheat, rice, and barley, it is preferred that the promoters utilized in the present invention have relatively high expression in these specific tissues. A number of promoters for genes with tuber-specific or -enhanced expression are known, including the class I patatin promoter (Bevan et al., EMBO J. 8:1899-1906 (1986); Jefferson et al., Plant Mol. Biol. 14:995-1006 (1990), both of which are herein incorporated by reference in its entirety), the promoter for the potato tuber ADPGPP genes, both the large and small subunits, the sucrose synthase promoter (Salanoubat and Belliard, Gene. 60:47-56 (1987), Salanoubat and Belliard, Gene. 84:181-185 (1989), both of which are incorporated by reference in their entirety), the promoter for the major tuber proteins including the 22 kd protein complexes and proteinase inhibitors (Hannapel, Plant Physiol. 101:703-704 (1993), herein incorporated by reference in its entirety), the promoter for the granule bound starch synthase gene (GBSS) (Visser et al., Plant Mol. Biol. 17:691-699 (1991), herein incorporated by reference in its entirety), and other class I and II patatins promoters (Koster-Topfer et al., Mol Gen Genet. 219:390-396 (1989); Mignery et al., Gene. 62:2744 (1988), both of which are herein incorporated by reference in their entirety).

[0247] Other promoters can also be used to express a protein or fragment thereof of the present invention in specific tissues, such as seeds or fruits. The promoter for β-conglycinin (Chen et al., Dev. Genet. 10:112-122 (1989), herein incorporated by reference in its entirety) or other seed-specific promoters such as the napin and phaseolin promoters, can be used. The zeins are a group of storage proteins found in maize endosperm. Genomic clones for zein genes have been isolated (Pedersen et al., Cell 29:1015-1026 (1982), herein incorporated by reference in its entirety), and the promoters from these clones, including the 15 kD, 16 kD), 19 kD, 22 kD, 27 kD, and gamma genes, could also be used. Other promoters known to function, for example, in maize include the promoters for the following genes: waxy, Brittle, Shrunken 2, Branching enzymes I and II, starch synthases, debranching enzymes, oleosins, glutelins, and sucrose synthases. A particularly preferred promoter for maize endosperm expression is the promoter for the glutelin gene from rice, more particularly the Osgt-1 promoter (Zheng et al., Mol. Cell Biol. 13:5829-5842 (1993), herein incorporated by reference in its entirety). Examples of promoters suitable for expression in wheat include those promoters for the ADPglucose pyrosynthase (ADPGPP) subunits, the granule bound and other starch synthase, the branching and debranching enzymes, the embryogenesis-abundant proteins, the gliadins, and the glutenins. Examples of such promoters in rice include those promoters for the ADPGPP subunits, the granule bound and other starch synthase, the branching enzymes, the debranching enzymes, sucrose synthases, and the glutelins. A particularly preferred promoter is the promoter for rice glutelin, Osgt-1. Examples of such promoters for barley include those for the ADPGPP subunits, the granule bound and other starch synthase, the branching enzymes, the debranching enzymes, sucrose synthases, the hordeins, the embryo globulins, and the aleurone specific proteins.

[0248] Root specific promoters may also be used. An example of such a promoter is the promoter for the acid chitinase gene (Samac et al., Plant Mol. Biol. 25:587-596 (1994), the entirety of which is herein incorporated by reference). Expression in root tissue could also be accomplished by utilizing the root specific subdomains of the CaMV35S promoter that have been identified (Lam et al., Proc. Natl. Acad. Sci. (U.S.A.) 86:7890-7894 (1989), herein incorporated by reference in its entirety). Other root cell specific promoters include those reported by Conkling et al. (Conkling et al., Plant Physiol. 93:1203-1211 (1990), the entirety of which is herein incorporated by reference).

[0249] Additional promoters that may be utilized are described, for example, in U.S. Pat. Nos. 5,378,619; 5,391,725; 5,428,147; 5,447,858; 5,608,144; 5,608,144; 5,614,399; 5,633,441; 5,633,435; and 4,633,436, all of which are herein incorporated in their entirety. In addition, a tissue specific enhancer may be used (Fromm et al., The Plant Cell 1:977-984 (1989), the entirety of which is herein incorporated by reference).

[0250] Constructs or vectors may also include with the coding region of interest a nucleic acid sequence that acts, in whole or in part, to terminate transcription of that region. For example, such sequences have been isolated including the Tr7 3′ sequence and the NOS 3′ sequence (Ingelbrecht et al., The Plant Cell 1:671-680 (1989), the entirety of which is herein incorporated by reference; Bevan et al., Nucleic Acids Res. 11:369-385 (1983), the entirety of which is herein incorporated by reference), or the like.

[0251] A vector or construct may also include regulatory elements. Examples of such include the Adh intron 1 (Callis et al., Genes and Develop. 1:1183-1200 (1987), the entirety of which is herein incorporated by reference), the sucrose synthase intron (Vasil et al., Plant Physiol. 91:1575-1579 (1989), the entirety of which is herein incorporated by reference) and the TMV omega element (Gallie et al., The Plant Cell 1:301-311 (1989), the entirety of which is herein incorporated by reference). These and other regulatory elements may be included when appropriate.

[0252] A vector or construct may also include a selectable marker. Selectable markers may also be used to select for plants or plant cells that contain the exogenous genetic material. Examples of such include, but are not limited to, a neo gene (Potrykus et al., Mol. Gen. Genet. 199:183-188 (1985), the entirety of which is herein incorporated by reference) which codes for kanamycin resistance and can be selected for using kanamycin, G418, etc.; a bar gene which codes for bialaphos resistance; a mutant EPSP synthase gene (Hinchee et al., Bio/Technology 6:915-922 (1988), the entirety of which is herein incorporated by reference) which encodes glyphosate resistance; a nitrilase gene which confers resistance to bromoxynil (Stalker et al., J. Biol. Chem. 263:6310-6314 (1988), the entirety of which is herein incorporated by reference); a mutant acetolactate synthase gene (ALS) which confers imidazolinone or sulphonylurea resistance (European Patent Application 154,204 (Sept. 11, 1985), the entirety of which is herein incorporated by reference); and a methotrexate resistant DHFR gene (Thillet et al., J. Biol. Chem. 263:12500-12508 (1988), the entirety of which is herein incorporated by reference).

[0253] A vector or construct may also include a transit peptide. Incorporation of a suitable chloroplast transit peptide may also be employed (European Patent Application Publication Number 0218571, the entirety of which is herein incorporated by reference). Translational enhancers may also be incorporated as part of the vector DNA. DNA constructs could contain one or more 5′ non-translated leader sequences which may serve to enhance expression of the gene products from the resulting mRNA transcripts. Such sequences may be derived from the promoter selected to express the gene or can be specifically modified to increase translation of the mRNA. Such regions may also be obtained from viral RNAs, from suitable eukaryotic genes, or from a synthetic gene sequence. For a review of optimizing expression of transgenes, see Koziel et al., Plant Mol. Biol. 32:393-405 (1996), the entirety of which is herein incorporated by reference.

[0254] A vector or construct may also include a screenable marker. Screenable markers may be used to monitor expression. Exemplary screenable markers include a β-glucuronidase or uidA gene (GUS) which encodes an enzyme for which various chromogenic substrates are known (Jefferson, Plant Mol. Biol, Rep. 5:387-405 (1987), the entirety of which is herein incorporated by reference; Jefferson et al., EMBO J. 6:3901-3907 (1987), the entirety of which is herein incorporated by reference); an R-locus gene, which encodes a product that regulates the production of anthocyanin pigments (red color) in plant tissues (Dellaporta et al., Stadler Symposium 11:263-282 (1988), the entirety of which is herein incorporated by reference); a β-lactamase gene (Sutcliffe et al., Proc. Natl. Acad. Sci. (U.S.A.) 75:3737-3741 (1978), the entirety of which is herein incorporated by reference), a gene which encodes an enzyme for which various chromogenic substrates are known (e.g., PADAC, a chromogenic cephalosporin); a luciferase gene (Ow et al., Science 234:856-859 (1986), the entirety of which is herein incorporated by reference); a xylE gene (Zukowsky et al., Proc. Natl. Acad. Sci. (U.S.A.) 80:1101-1105 (1983), the entirety of which is herein incorporated by reference) which encodes a catechol diozygenase that can convert chromogenic catechols; an α-amylase gene (Ikatu et al., Bio/Technol. 8:241-242 (1990), the entirety of which is herein incorporated by reference); a tyrosinase gene (Katz et al., J. Gen. Microbiol. 129:2703-2714 (1983), the entirety of which is herein incorporated by reference) which encodes an enzyme capable of oxidizing tyrosine to DOPA and dopaquinone which in turn condenses to melanin; an α-galactosidase, which will turn a chromogenic α-galactose substrate.

[0255] Included within the terms “selectable or screenable marker genes” are also genes which encode a secretable marker whose secretion can be detected as a means of identifying or selecting for transformed cells. Examples include markers which encode a secretable antigen that can be identified by antibody interaction, or even secretable enzymes which can be detected catalytically. Secretable proteins fall into a number of classes, including small, diffusible proteins which are detectable, (e.g., by ELISA), small active enzymes which are detectable in extracellular solution (e.g., (α-amylase, β-lactamase, phosphinothricin transferase), or proteins which are inserted or trapped in the cell wall (such as proteins which include a leader sequence such as that found in the expression unit of extension or tobacco PR-S). Other possible selectable and/or screenable marker genes will be apparent to those of skill in the art.

[0256] There are many methods for introducing transforming nucleic acid molecules into plant cells. Suitable methods are believed to include virtually any method by which nucleic acid molecules may be introduced into a cell, such as by Agrobactetium infection or direct delivery of nucleic acid molecules such as, for example, by PEG-mediated transformation, by electroporation or by acceleration of DNA coated particles, etc (Potrykus, Ann. Rev. Plant Physiol. Plant Mol. Biol. 42:205-225 (1991), the entirety of which is herein incorporated by reference; Vasil, Plant Mol. Biol. 25:925-937 (1994), the entirety of which is herein incorporated by reference). For example, electroporation has been used to transform maize protoplasts (Fromm et al., Nature 312:791-793 (1986), the entirety of which is herein incorporated by reference).

[0257] Other vector systems suitable for introducing transforming DNA into a host plant cell include but are not limited to binary artificial chromosome (BIBAC) vectors (Hamilton et al., Gene 200:107-116 (1997), the entirety of which is herein incorporated by reference); and transfection with RNA viral vectors (Della-Cioppa et al., Ann. N.Y. Acad. Sci. (1996), 792 (Engineering Plants for Commercial Products and Applications), 57-61, the entirety of which is herein incorporated by reference). Additional vector systems also include plant selectable YAC vectors such as those described in Mullen et al., Molecular Breeding 4:449-457 (1988), the entireity of which is herein incorporated by reference).

[0258] Technology for introduction of DNA into cells is well known to those of skill in the art. Four general methods for delivering a gene into cells have been described: (1) chemical methods (Graham and van der Eb, Virology 54:536-539 (1973), the entirety of which is herein incorporated by reference); (2) physical methods such as microinjection (Capecchi, Cell 22:479-488 (1980), the entirety of which is herein incorporated by reference), electroporation (Wong and Neumann, Biochem. Biophys. Res. Commun. 107:584-587 (1982); Fromm et al., Proc. Natl. Acad. Sci. (U.S.A.) 82:5824-5828 (1985); U.S. Pat. No. 5,384,253, all of which are herein incorporated in their entirety); and the gene gun (Johnston and Tang, Methods Cell Biol. 43:353-365 (1994), the entirety of which is herein incorporated by reference); (3) viral vectors (Clapp, Clin. Perinatol. 20:155-168 (1993); Lu et al., J. Exp. Med. 178:2089-2096 (1993); Eglitis and Anderson, Biotechniques 6:608-614 (1988), all of which are herein incorporated in their entirety); and (4) receptor-mediated mechanisms (Curiel et al., Hum. Gen. Ther. 3:147-154 (1992), Wagner et al., Proc. Natl. Acad. Sci. (USA) 89:6099-6103 (1992), both of which are incorporated by reference in their entirety).

[0259] Acceleration methods that may be used include, for example, microprojectile bombardment and the like. One example of a method for delivering transforming nucleic acid molecules to plant cells is microprojectile bombardment. This method has been reviewed by Yang and Christou (eds.), Particle Bombardment Technology for Gene Transfer, Oxford Press, Oxford, England (1994), the entirety of which is herein incorporated by reference). Non-biological particles (microprojectiles) that may be coated with nucleic acids and delivered into cells by a propelling force. Exemplary particles include those comprised of tungsten, gold, platinum, and the like.

[0260] A particular advantage of microprojectile bombardment, in addition to it being an effective means of reproducibly transforming monocots, is that neither the isolation of protoplasts (Cristou et al., Plant Physiol. 87:671-674 (1988), the entirety of which is herein incorporated by reference) nor the susceptibility of Agrobacterium infectionr are required. An illustrative embodiment of a method for delivering DNA into maize cells by acceleration is a biolistics α-particle delivery system, which can be used to propel particles coated with DNA through a screen, such as a stainless steel or Nytex screen, onto a filter surface covered with corn cells cultured in suspension. Gordon-Kanim et al., describes the basic procedure for coating tungsten particles with DNA (Gordon-Kamm et al., Plant Cell 2:603-618 (1990), the entirety of which is herein incorporated by reference). The screen disperses the tungsten nucleic acid particles so that they are not delivered to the recipient cells in large aggregates. A particle delivery system suitable for use with the present invention is the helium acceleration PDS-1000/He gun is available from Bio-Rad Laboratories (Bio-Rad, Hercules, Calif.)(Sanford et al., Technique 3:3-16 (1991), the entirety of which is herein incorporated by reference).

[0261] For the bombardment, cells in suspension may be concentrated on filters. Filters containing the cells to be bombarded are positioned at an appropriate distance below the microprojectile stopping plate. If desired, one or more screens are also positioned between the gun and the cells to be bombarded.

[0262] Alternatively, immature embryos or other target cells may be arranged on solid culture medium. The cells to be bombarded are positioned at an appropriate distance below the microprojectile stopping plate. If desired, one or more screens are also positioned between the acceleration device and the cells to be bombarded. Through the use of techniques set forth herein one may obtain up to 1000 or more foci of cells transiently expressing a marker gene. The number of cells in a focus which express the exogenous gene product 48 hours post-bombardment often range from one to ten and average one to three.

[0263] In bombardment transformation, one may optimize the pre-bombardment culturing conditions and the bombardment parameters to yield the maximum numbers of stable transformants. Both the physical and biological parameters for bombardment are important in this technology. Physical factors are those that involve manipulating the DNA/microprojectile precipitate or those that affect the flight and velocity of either the macro- or microprojectiles. Biological factors include all steps involved in manipulation of cells before and immediately after bombardment, the osmotic adjustment of target cells to help alleviate the trauma associated with bombardment, and also the nature of the transforming DNA, such as linearized DNA or intact supercoiled plasmids. It is believed that pre-bombardment manipulations are especially important for successful transformation of immature embryos.

[0264] In another alternative embodiment, plastids can be stably transformed. Methods disclosed for plastid transformation in higher plants include the particle gun delivery of DNA containing a selectable marker and targeting of the DNA to the plastid genome through homologous recombination (Svab et al., Proc. Natl. Acad. Sci. (U.S.A.) 87:8526-8530 (1990); Svab and Maliga, Proc. Natl. Acad. Sci. (U.S.A.) 90:913-917 (1993); Staub and Maliga, EMBO J. 12:601-606 (1993); U.S. Pat. Nos. 5, 451,513 and 5,545,818, all of which are herein incorporated by reference in their entirety).

[0265] Accordingly, it is contemplated that one may wish to adjust various aspects of the bombardment parameters in small scale studies to fully optimize the conditions. One may particularly wish to adjust physical parameters such as gap distance, flight distance, tissue distance, and helium pressure. One may also minimize the trauma reduction factors by modifying conditions which influence the physiological state of the recipient cells and which may therefore influence transformation and integration efficiencies. For example, the osmotic state, tissue hydration and the subculture stage or cell cycle of the recipient cells may be adjusted for optimum transformation. The execution of other routine adjustments will be known to those of skill in the art in light of the present disclosure.

[0266] Agrobacterium-mediated transfer is a widely applicable system for introducing genes into plant cells because the DNA can be introduced into whole plant tissues, thereby bypassing the need for regeneration of an intact plant from a protoplast. The use of Agrobacterium-mediated plant integrating vectors to introduce DNA into plant cells is well known in the art. See, for example the methods described by Fraley et al., Bio/Technology 3:629-635 (1985) and Rogers et al., Methods Enzymol. 153:253-277 (1987), both of which are herein incorporated by reference in their entirety. Further, the integration of the Ti-DNA is a relatively precise process resulting in few rearrangements. The region of DNA to be transferred is defined by the border sequences, and intervening DNA is usually inserted into the plant genome as described (Spielmann et al., Mol. Gen. Genet. 205:34 (1986), the entirety of which is herein incorporated by reference).

[0267] Modem Agrobacterium transformation vectors are capable of replication in E. coli as well as Agrobacterium, allowing for convenient manipulations as described (Klee et al., In: Plant DNA Infectious Agents, Hohn and Schell (eds.), Springer-Verlag, New York, pp. 179-203 (1985), the entirety of which is herein incorporated by reference. Moreover, technological advances in vectors for Agrobacterium-mediated gene transfer have improved the arrangement of genes and restriction sites in the vectors to facilitate construction of vectors capable of expressing various polypeptide coding genes. The vectors described have convenient multi-linker regions flanked by a promoter and a polyadenylation site for direct expression of inserted polypeptide coding genes and are suitable for present purposes (Rogers et al., Methods Enzymol. 153:253-277 (1987)). In addition, Agrobacterium containing both armed and disarmed Ti genes can be used for the transformations. In those plant strains where Agrobacterium-mediated transformation is efficient, it is the method of choice because of the facile and defined nature of the gene transfer.

[0268] A genetically improved plant formed using Agrobacterium transformation methods typically contains a single gene on one chromosome. Such genetically improved plants can be referred to as being heterozygous for the added gene. More preferred is a genetically improved plant that is homozygous for the added structural gene; i.e., a genetically improved plant that contains two added genes, one gene at the same locus on each chromosome of a chromosome pair. A homozygous genetically improved plant can be obtained by sexually mating (selfing) an independent segregant genetically improved plant that contains a single added gene, germinating some of the seed produced and analyzing the resulting plants produced for the gene of interest.

[0269] It is also to be understood that two different genetically improved plants can also be mated to produce offspring that contain two independently segregating added, exogenous genes. Selfing of appropriate progeny can produce plants that are homozygous for both added, exogenous genes that encode a polypeptide of interest. Back-crossing to a parental plant and out-crossing with a non-genetically improved plant are also contemplated, as is vegetative propagation.

[0270] Transformation of plant protoplasts can be achieved using methods based on calcium phosphate precipitation, polyethylene glycol treatment, electroporation, and combinations of these treatments (See, for example, Potrykus et al., Mol. Gen. Genet. 205:193-200 (1986); Lorz et al., Mol. Gen. Genet. 199:178 (1985); Promm et al., Nature 319:791 (1986); Uchimiya et al., Mol. Gen. Genet. 204:204 (1986); Marcotte et al., Nature 335:454-457 (1988), all of which are herein incorporated by reference in their entirety).

[0271] Application of these systems to different plant strains depends upon the ability to regenerate that particular plant strain from protoplasts. Illustrative methods for the regeneration of cereals from protoplasts are described (Fujimura et al., Plant Tissue Culture Letters 2:74 (1985); Toriyama et al., Theor Appl. Genet. 205:34 (1986); Yamada et al., Plant Cell Rep. 4:85 (1986); Abdullah et al., Biotechnolog 4:1087 (1986), all of which are herein incorporated by reference in their entirety).

[0272] To transform plant strains that cannot be successfully regenerated from protoplasts, other ways to introduce DNA into intact cells or tissues can be utilized. For example, regeneration of cereals from immature embryos or explants can be effected as described (Vasil, Biotechnology 6:397 (1988), the entirety of which is herein incorporated by reference). In addition, “particle gun” or high-velocity microprojectile technology can be utilized (Vasil et al., Bio/Technology 10:667 (1992), the entirety of which is herein incorporated by reference).

[0273] Using the latter technology, DNA is carried through the cell wall and into the cytoplasm on the surface of small metal particles as described (Klein et al., Nature 328:70 (1987); Klein et al., Proc. Natl. Acad. Sci. (U.S.A.) 85:8502-8505 (1988); McCabe et al., Bio/Technology 6:923 (1988), all of which are herein incorporated by reference in their entirety). The metal particles penetrate through several layers of cells and thus allow the transformation of cells within tissue explants.

[0274] Other methods of cell transformation can also be used and include but are not limited to introduction of DNA into plants by direct DNA transfer into pollen (Zhou et al., Methods Enzymol. 101:433 (1983); Hess et al., Intern Rev. Cytol. 107:367 (1987); Luo et al., Plant Mol Biol. Reporter 6:165 (1988), all of which are herein incorporated by reference in their entirety), by direct injection of DNA into reproductive organs of a plant (Pena et al., Nature 325:274 (1987), the entirety of which is herein incorporated by reference), or by direct injection of DNA into the cells of immature embryos followed by the rehydration of desiccated embryos (Neuhaus et al., Theor. Appl. Genet. 75:30 (1987), the entirety of which is herein incorporated by reference).

[0275] The regeneration, development, and cultivation of plants from single plant protoplast transformants or from various transformed explants is well known in the art (Weissbach and Weissbach, In: Methods for Plant Molecular Biology, Academic Press, San Diego, Calif. (1988), the entirety of which is herein incorporated by reference). This regeneration and growth process typically includes the steps of selection of transformed cells, culturing those individualized cells through the usual stages of embryonic development through the rooted plantlet stage. Genetically improved embryos and seeds are similarly regenerated. The resulting genetically improved rooted shoots are thereafter planted in an appropriate plant growth medium such as soil.

[0276] The development or regeneration of plants containing the foreign, exogenous gene that encodes a protein of interest is well known in the art. Preferably, the regenerated plants are self-pollinated to provide homozygous genetically improved plants. Otherwise, pollen obtained from the regenerated plants is crossed to seed-grown plants of agronomically important lines. Conversely, pollen from plants of these important lines is used to pollinate regenerated plants. A genetically improved plant of the present invention containing a desired polypeptide is cultivated using methods well known to one skilled in the art.

[0277] There are a variety of methods for the regeneration of plants from plant tissue. The particular method of regeneration will depend on the starting plant tissue and the particular plant species to be regenerated.

[0278] Methods for transforming dicots, primarily by use of Agrobacterium tumefaciens, and obtaining genetically improved plants have been published for cotton (U.S. Pat. No. 5,004,863; U.S. Pat. No. 5,159,135; U.S. Pat. No. 5,518,908, all of which are herein incorporated by reference in their entirety); soybean (U.S. Pat. No. 5,569,834; U.S. Pat. No. 5,416,011; McCabe et. al., Biotechnology 6:923 (1988); Christou et al., Plant Physiol. 87:671-674 (1988); all of which are herein incorporated by reference in their entirety); Brassica (U.S. Pat. No. 5,463,174, the entirety of which is herein incorporated by reference); peanut (Cheng et al., Plant Cell Rep. 15:653-657 (1996), McKently et al., Plant Cell Rep. 14:699-703 (1995), all of which are herein incorporated by reference in their entirety); papaya; and pea (Grant et al., Plant Cell Rep. 15:254-258 (1995), the entirety of which is herein incorporated by reference).

[0279] Transformation of monocotyledons using electroporation, particle bombardment, and Agrobacterium have also been reported. Transformation and plant regeneration have been achieved in asparagus (Bytebier et al., Proc. Natl. Acad. Sci. (USA) 84:5354 (1987), the entirety of which is herein incorporated by reference); barley (Wan and Lemaux, Plant Physiol 104:37 (1994), the entirety of which is herein incorporated by reference); maize (Rhodes et al., Science 240:204 (1988); Gordon-Kamm et al., Plant Cell 2:603-618 (1990); Fromm et al., Bio/Technology 8:833 (1990); Koziel et al., Bio/Technology 11:194 (1993); Armstrong et al., Crop Science 35:550-557 (1995); all of which are herein incorporated by reference in their entirety); oat (Somers et al., Bio/Technology 10:1589 (1992), the entirety of which is herein incorporated by reference); orchard grass (Horn et al., Plant Cell Rep. 7:469 (1988), the entirety of which is herein incorporated by reference); rice (Toriyama et al., Theor Appl. Genet. 205:34 (1986); Part et al., Plant Mol. Biol. 32:1135-1148 (1996); Abedinia et al., Aust. J. Plant Physiol. 24:133-141 (1997); Zhang and Wu, Theor. Appl. Genet. 76:835 (1988); Zhang et al., Plant Cell Rep. 7:379 (1988); Battraw and Hall, Plant Sci. 86:191-202 (1992); Christou et al., Bio/Technology 9:957 (1991), all of which are herein incorporated by reference in their entirety); rye (De la Pena et al., Nature 325:274 (1987), the entirety of which is herein incorporated by reference); sugarcane (Bower and Birch, Plant J. 2:409 (1992), the entirety of which is herein incorporated by reference); tall fescue (Wang et al., Bio/Technology 10:691 (1992), the entirety of which is herein incorporated by reference), and wheat (Vasil et al., Bio/Technology 10:667 (1992), the entirety of which is herein incorporated by reference; U.S. Pat. No. 5,631,152, the entirety of which is herein incorporated by reference.)

[0280] Assays for gene expression based on the transient expression of cloned nucleic acid constructs have been developed by introducing the nucleic acid molecules into plant cells by polyethylene glycol treatment, electroporation, or particle bombardment (Marcotte et al., Nature 335:454457 (1988), the entirety of which is herein incorporated by reference; Marcotte et al., Plant Cell 1:523-532 (1989), the entirety of which is herein incorporated by reference; McCarty et al., Cell 66:895-905 (1991), the entirety of which is herein incorporated by reference; Hattori et al., Genes Dev. 6:609-618 (1992), the entirety of which is herein incorporated by reference; Goff et al., EMBO J. 9:2517-2522 (1990), the entirety of which is herein incorporated by reference). Transient expression systems may be used to functionally dissect gene constructs (see generally, Mailga et al., Methods in Plant Molecular Biology, Cold Spring Harbor Press (1995)).

[0281] Any of the nucleic acid molecules of the present invention may be introduced into a plant cell in a permanent or transient manner in combination with other genetic elements such as vectors, promoters, enhancers etc. Further, any of the nucleic acid molecules of the present invention may be introduced into a plant cell in a manner that allows for overexpression of the protein or fragment thereof encoded by the nucleic acid molecule.

[0282] (g) Computer Readable Media

[0283] The nucleotide sequence provided in SEQ ID NO: 1 through SEQ ID NO: 15,112 or fragment thereof, or complement thereof, or a nucleotide sequence at least 90% identical, preferably 95%, identical even more preferably 99% or 100% identical to the sequence provided in SEQ ID NO: 1 through SEQ ID NO: 15,112 or fragment thereof, or complement thereof, can be “provided” in a variety of mediums to facilitate use. Such a medium can also provide a subset thereof in a form that allows a skilled artisan to examine the sequences.

[0284] In one application of this embodiment, a nucleotide sequence of the present invention can be recorded on computer readable media. As used herein, “computer readable media” refers to any medium that can be read and accessed directly by a computer. Such media include, but are not limited to: magnetic storage media, such as floppy discs, hard disc, storage medium, and magnetic tape: optical storage media such as CD-ROM; electrical storage media such as RAM and ROM; and hybrids of these categories such as magnetic/optical storage media. A skilled artisan can readily appreciate how any of the presently known computer readable mediums can be used to create a manufacture comprising computer readable medium having recorded thereon a nucleotide sequence of the present invention.

[0285] As used herein, “recorded” refers to a process for storing information on computer readable medium. A skilled artisan can readily adopt any of the presently known methods for recording information on computer readable medium to generate media comprising the nucleotide sequence information of the present invention. A variety of data storage structures are available to a skilled artisan for creating a computer readable medium having recorded thereon a nucleotide sequence of the present invention. The choice of the data storage structure will generally be based on the means chosen to access the stored information. In addition, a variety of data processor programs and formats can be used to store the nucleotide sequence information of the present invention on computer readable medium. The sequence information can be represented in a word processing text file, formatted in commercially-available software such as WordPerfect and Microsoft Word, or represented in the form of an ASCII file, stored in a database application, such as DB2, Sybase, Oracle, or the like. A skilled artisan can readily adapt any number of data processor structuring formats (e.g. text file or database) in order to obtain computer readable medium having recorded thereon the nucleotide sequence information of the present invention.

[0286] By providing one or more of nucleotide sequences of the present invention, a skilled artisan can routinely access the sequence information for a variety of purposes. Computer software is publicly available which allows a skilled artisan to access sequence information provided in a computer readable medium. The examples which follow demonstrate how software which implements the BLAST (Altschul et al., J. Mol. Biol. 215:403-410 (1990), the entirety of which is herein incorporated by reference) and BLAZE (Brutlag et al., Comp. Chem. 17:203-207 (1993), the entirety of which is herein incorporated by reference) search algorithms on a Sybase system can be used to identify open reading frames (ORFs) within the genome that contain homology to ORFs or proteins from other organisms. Such ORFs are protein-encoding fragments within the sequences of the present invention and are useful in producing commercially important proteins such as enzymes used in amino acid biosynthesis, metabolism, transcription, translation, RNA processing, nucleic acid and a protein degradation, protein modification, and DNA replication, restriction, modification, recombination, and repair.

[0287] The present invention further provides systems, particularly computer-based systems, which contain the sequence information described herein. Such systems are designed to identify commercially important fragments of the nucleic acid molecule of the present invention. As used herein, “a computer-based system” refers to the hardware means, software means, and data storage means used to analyze the nucleotide sequence information of the present invention. The minimum hardware means of the computer-based systems of the present invention comprises a central processing unit (CPU), input means, output means, and data storage means. A skilled artisan can readily appreciate that any one of the currently available computer-based system are suitable for use in the present invention.

[0288] As indicated above, the computer-based systems of the present invention comprise a data storage means having stored therein a nucleotide sequence of the present invention and the necessary hardware means and software means for supporting and implementing a search means. As used herein, “data storage means” refers to memory that can store nucleotide sequence information of the present invention, or a memory access means which can access manufactures having recorded thereon the nucleotide sequence information of the present invention. As used herein, “search means” refers to one or more programs which are implemented on the computer-based system to compare a target sequence or target structural motif with the sequence information stored within the data storage means. Search means are used to identify fragments or regions of the sequence of the present invention that match a particular target sequence or target motif. A variety of known algorithms are disclosed publicly and a variety of commercially available software for conducting search means are available can be used in the computer-based systems of the present invention. Examples of such software include, but are not limited to, MacPattern (EMBL), BLASTIN and BLASTIX (NCBIA). One of the available algorithms or implementing software packages for conducting homology searches can beadapted for use in the present computer-based systems.

[0289] The most preferred sequence length of a target sequence is from about 10 to 100 amino acids or from about 30 to 300 nucleotide residues. However, it is well recognized that during searches for commercially important fragments of the nucleic acid molecules of the present invention, such as sequence fragments involved in gene expression and protein processing, may be of shorter length.

[0290] As used herein, “a target structural motif,” or “target motif,” refers to any rationally selected sequence or combination of sequences in which the sequences the sequence(s) are chosen based on a three-dimensional configuration which is formed upon the folding of the target motif. There are a variety of target motifs known in the art. Protein target motifs include, but are not limited to, enzymatic active sites and signal sequences. Nucleic acid target motifs include, but are not limited to, promoter sequences, cis elements, hairpin structures and inducible expression elements (protein binding sequences).

[0291] Thus, the present invention further provides an input means for receiving a target sequence, a data storage means for storing the target sequences of the present invention sequence identified using a search means as described above, and an output means for outputting the identified homologous sequences. A variety of structural formats for the input and output means can be used to input and output information in the computer-based systems of the present invention. A preferred format for an output means ranks fragments of the sequence of the present invention by varying degrees of homology to the target sequence or target motif. Such presentation provides a skilled artisan with a ranking of sequences which contain various amounts of the target sequence or target motif and identifies the degree of homology contained in the identified fragment.

[0292] A variety of comparing means can be used to compare a target sequence or target motif with the data storage means to identify sequence fragments sequence of the present invention. For example, implementing software which implement the BLAST and BLAZE algorithms (Altschul et al., J. Mol. Biol. 215:403-410 (1990)) can be used to identify open frames within the nucleic acid molecules of the present invention. A skilled artisan can readily recognize that any one of the publicly available homology search programs can be used as the search means for the computer-based systems of the present invention.

[0293] Having now generally described the invention, the same will be more readily understood through reference to the following examples which are provided by way of illustration, and are not intended to be limiting of the present invention, unless specified.

### EXAMPLE 1

[0294] The LIB13, LIB34, LIB3057, LIB3058, LIB188 and LIB2809 cDNA libraries are generated from Bos taurus muscle, liver, pituitary gland, brain, dry mammary gland and lactating mammary gland tissue respectively. Total RNA is obtained from each of the tissue types. Ten ml of TRIzol reagent (Life Technologies, Gaithersburg, Md. U.S.A.) is used to homogenize 1 g of tissue, followed by centrifugation to remove the tissue homogenate. The polyA+ selected mRNA for the LIB 13, LIB34, LIB3057 and LIB3058 libraries is prepared using standard protocol provided by the manufacturer (Life Technologies, Gaithersburg, Md. U.S.A.). The protocol yields, on average, 1 mg of total RNA per gram of tissue. One mg of total RNA is used in the polyA+ selection procedure. Mini-oligo dT cellulose spin columns (Pharmacia Biotech, Kalamazoo, Mich. U.S.A.) are used to isolate the poly A+ mRNA. The standard kit protocol specified by the manufacturer is followed, except poly A+ mRNA is twice selected by repeat passage on the oligo dT cellulose column. Yields range from 6.44 μg polyA+ to 34 μg polyA+ for all tissues.

[0295] The LIB 13, LIB34, LIB3057 and LIB3058 cDNA libraries are constructed from the polyA+ mRNA using SuperScript Plasmid System for cDNA synthesis and plasmid cloning (Life Technologies). For each library 4.0 μg of polyA+ is used. The library is prepared essentially according to the manufacturer's protocol. The resulting cDNA is size fractionated on a 0.8% agarose gel in the 1.5-8 kb range. The collection of cloned cDNAs is collectively referred to as a library. The library is transformed into E. coli and individual colonies are randomly selected for sequencing. For the LIB188 and LIB2809 libraries a subtraction library approach is used. Total mammary gland RNA is used to create subtraction libraries according to the manufacturers recommendations (Clontech, Palo Alto, Calif. U.S.A.).

### EXAMPLE 2

[0296] The resulting libraries are submitted for high throughput EST sequencing. Plasmid DNA is prepared from selected colonies and the inserts are sequenced using standard high throughput DNA sequencing methodologies. Two basic methods can be used for DNA sequencing, the chain termination method of Sanger et al., Proc. Natl. Acad. Sci. (U.S.A.) 74:5463-5467 (1977), the entirety of which is herein incorporated by reference and the chemical degradation method of Maxam and Gilbert, Proc. Nati. Acad. Sci. (U.S.A.) 74:560-564 (1977), the entirety of which is herein incorporated by reference. Automation and advances in technology such as the replacement of radioisotopes with fluorescence-based sequencing have reduced the effort required to sequence DNA (Craxton, Method, 2:20-26 (1991), the entirety of which is herein incorporated by reference; Ju et al., Proc. Natl. Acad. Sci. (U.S.A.) 92:4347-4351 (1995), the entirety of which is herein incorporated by reference; Tabor and Richardson, Proc. Natl. Acad. Sci. (U.S.A.) 92:6339-6343 (1995), the entirety of which is herein incorporated by reference). Automated sequencers are available from, for example, Pharmacia Biotech, Inc., Piscataway, N.J. (Pharmacia ALF), LI-COR, Inc., Lincoln, Neb. (LI-COR 4,000) and Millipore, Bedford, Mass. (Millipore BaseStation).

[0297] In addition, advances in capillary gel electrophoresis have also reduced the effort required to sequence DNA and such advances provide a rapid high resolution approach for sequencing DNA samples (Swerdlow and Gesteland, Nucleic Acids Res. 18:1415-1419 (1990); Smith, Nature 349:812-813 (1991); Luckey et al., Methods Enzymol. 218:154-172 (1993); Lu et al., J. Chromatog. A. 680:497-501 (1994); Carson et al., Anal. Chem. 65:3219-3226 (1993); Huang et al., Anal. Chem. 64:2149-2154 (1992); Kheterpal et al., Electrophoresis 17:1852-1859 (1996); Quesada and Zhang, Electrophoresis 17:1841-1851 (1996); Baba, Yakugaku Zasshi 117:265-281 (1997), all of which are herein incorporated by reference in their entirety).

[0298] A number of sequencing techniques are known in the art, including fluorescence-based sequencing methodologies. These methods have the detection, automation and instrumentation capability necessary for the analysis of large volumes of sequence data. Currently, the 377 DNA Sequencer (Perkin-Elmer Corp., Applied Biosystems Div., Foster City, Calif.) allows the most rapid electrophoresis and data collection. With these types of automated systems, fluorescent dye-labeled sequence reaction products are detected and data entered directly into the computer, producing a chromatogram that is subsequently viewed, stored, and analyzed using the corresponding software programs. These methods are known to those of skill in the art and have been described and reviewed (Birren et al., Genome Analysis: Analyzing DNA, 1, Cold Spring Harbor, N.Y., the entirety of which is herein incorporated by reference).

[0299] Sequences are processed by Block I analysis generating usable EST sequences. The usable ESTs comprise short nucleotide sequences, 50-350 nucleotides in length which represent sequences of genes expressed in these tissues. The ESTs are compared to nonredundant amino acid and nucleic acid databases (Table A*).

We claim:

1. A substantially purified nucleic acid molecule, said nucleic acid molecule capable of specifically hybridizing to a second nucleic acid molecule, said second nucleic acid having a nucleic acid sequence selected from the group consisting of SEQ ID NO: 1 through SEQ ID NO: 15,112 or complements thereof.

2. The substantially purified nucleic acid molecule according to claim 1, said nucleic acid molecule having a nucleic acid sequence selected from the group consisting of SEQ ID NO: 1 through SEQ ID NO: 15,112 or complements thereof or fragments of either.

3. A transformed cell having a nucleic acid molecule which comprises:
(A) an exogenous promoter region which functions in said cell to cause the production of a mRNA molecule; which is linked to
(B) a structural nucleic acid molecule encoding a bovine protein or fragment thereof, said structural nucleic acid molecule capable of specifically hybridizing to a second nucleic acid molecule, said second nucleic acid molecule having a nucleic acid sequence selected from the group consisting of a complement of SEQ ID NO: 1 through SEQ ID NO: 15,112; which is linked to
(C) a 3′ non-translated sequence that functions in said cell to cause termination of transcription and addition of polyadenylated ribonucleotides to a 3′ end of said mRNA molecule.

4. The transformed cell having a nucleic acid molecule according to claim 3, wherein said bovine protein or fragment thereof is encoded by a nucleic acid sequence selected from the group consisting of SEQ ID NO: 1 through SEQ ID NO: 15,112 or fragment thereof.

5. The transformed cell according to claim 4, wherein said cell is selected from the group consisting of a plant cell, a mammalian cell, a bacterial cell, an insect cell and a fungal cell.

6. The transformed cell according to claim 4, wherein said cell is a bovine cell.

7. A method for determining a level or pattern of a molecule in a bovine cell or tissue comprising:
(A) incubating, under conditions permitting nucleic acid hybridization, a marker nucleic acid molecule, said marker nucleic acid molecule comprising a nucleic acid sequence selected from the group consisting of SEQ ID NO: 1 through SEQ ID NO: 15,112 or complements thereof or fragment of either, with a complementary nucleic acid molecule obtained from said bovine cell or tissue, wherein nucleic acid hybridization between said marker nucleic acid molecule and said complementary nucleic acid molecule obtained from said bovine cell or tissue permits the detection of said molecule;
(B) permitting hybridization between said marker nucleic acid molecule and said complementary nucleic acid molecule obtained from said bovine cell or tissue; and
(C) detecting the level or pattern of said complementary nucleic acid, wherein the detection of said complementary nucleic acid is predictive of the level or pattern of molecule.

8. The method of claim 7, wherein said level is predictive of said molecule.

9. The method of claim 7, wherein said pattern is predictive of said molecule.

10. The method of claim 7, wherein said molecule is an mRNA molecule

11. The method of claim 10, wherein said level or pattern is detected by in situ hybridization.

12. The method of claim 10, wherein said level or pattern is detected by tissue printing.

The application's sequence listing, which the Patent Office published only in electronic form, follows.

SEQUENCE LISTING (15112 sequences)

SEQ ID NO: 1 - DNA, 213 bp, Bos taurus
  Clone ID: 01-BOVMS1-002-Q1-E1-A1
aataacgaacttcaattcgaccaggtcgtactcctcttgttacactccaacaatgtatttctcaaactggatcaattgaattaacctttcactattgcatacatcggtaaggcattgaacttatacttatatctctgattctattttcttgaataaccaatcttactgcggctattacccattcaatctgaccaactacacaacttacattat

SEQ ID NO: 2 - DNA, 393 bp, Bos taurus
  unsure (1)...(376): unsure at all n locations; Clone ID: 01-BOVMS1-003-Q1-E1-A9
ccttgaaggcgacgtcaaacctctccaaaagggtcacctaaattcaattcacgggccgtcgttttacaacgtcgtgactgggaaaaccctggcgttacccaacttaatcgccttgcagcacatccccctttcgccagctggcgtaatagcgaagaggcccgcaccgatcgcccttcccaacagttgcgcagcctgaatggcgaatgggacgcgccctgtagcggcgcattaagcgcggcgggtgtggtggttacgcgcagcgtgaccgctacacttgccagcgccctagcgcccgctcctttcgctttcttcccttcctttctcgccacgttcgccggctttccccgtcaagctctaaatcgggggctccctttanggttccgatttagtgct

SEQ ID NO: 3 - DNA, 324 bp, Bos taurus
  Clone ID: 01-BOVMS1-004-Q1-E1-A1
aaaggccaccgacgctgaagccgacgtagcttctctgaacagacgcatctagctggttgaagaatagttggatcgtgcccacgagcgtctggcaacagctctgcagaagctggacgaggccgagaatgcagcagatgacagtgagagatgcatgaaagtcattgagagccgagcccataacgatgaggataagatggagattcaggagatccagctgatagaggccaagcacatcgctgatgatgccgaccgcaagtatgaatatgtggcccgtaagctggtcatcattgagagtgacctgcagcgtgcagaggatctggctga

SEQ ID NO: 4 - DNA, 268 bp, Bos taurus
  Clone ID: 01-BOVMS1-005-Q1-E1-A9
atgcgacgtcatagctcttctatagtgtcacctaaattcaattcactggccgtcgttttacaacgtcgtgactgggaaaaccctggcgttacccaacttaatcgccttgcagcacatccccctttcgccagctggcgtaatagcgaagaggcccgcaccgatcgcccttcccaacagttgcgcagcctgaatggcgaatgggacgcgccctgtagcggcgcattaagcgcggcgggtgtggtggttacgcgcagcgtgaccgctacac

SEQ ID NO: 5 - DNA, 451 bp, Bos taurus
  unsure (1)...(431): unsure at all n locations; Clone ID: 01-BOVMS1-007-Q1-E1-A9
ccacgcgtccgtgaaatttgcatgcaaaatttgaaattgtaacattggcatctaagatctacttggaatatttgtaatatttcaaaatttacattgaaacataagttcttggaaaacaaaccaaacttaatcggttttccattttgccaactggaatgctttttattagtttgtttttcactctacattcctcatttttcattgatttaacctgccgattatttaatttttttttattgtaaagtagtttttagtctttcctttttttactttgatcccttttcaaattggcatgtctttaaagtatttttctcccttgattaaaaatgtgtgtatgtatgtatgtttttaaatcatattaactttaccaagtgaaatcaagccatactgtttttgagccaattaagaaaattgcgatttttaaagtgtantgtttcaagggtgtggacac

SEQ ID NO: 6 - DNA, 390 bp, Bos taurus
  Clone ID: 01-BOVMS1-008-Q1-E1-A1
gcaacttcgaaccagtttccaggatcatgccgtgtggaaacctttaatgaaggttttacaaaatgcaccagatgaaatcctagtagtagcatcgtccatgctatgtaatctccttcttgaattttctccaagcaaagagccaattttagaatcaggagctgtagagctactttgtggactaacccaaagtgaaaatcctgctttacgagtgaatggaatttgggctttaatgaatatggcatttcaggctgaacaaaaaataaaagcagatattttgcgaagcttgagtactgaacagctcttccggttattatcagattcagatttgaatgtgccgatgaagacattgggacttcttaaaaaactactctctactcggcctcacataga

SEQ ID NO: 7 - DNA, 281 bp, Bos taurus
  Clone ID: 01-BOVMS1-009-Q1-E1-A1
gatctgagagccatctcatgtattggagtggcattttctacttctggacatgcatacactgatacagggaaagcatcaggcaacctagagaccatgtgcaagatctgtaactatggactgaccttcacgcaggagtggaacacagacaatactcttgggacagaaatctcttgggagaataagttggctgaagggttgaaactgactcttggtaccatatttgtgccgagcacacgaaagaagagtgggagattgaaggcctcatataaacgggattgttt

SEQ ID NO: 8 - DNA, 293 bp, Bos taurus
  Clone ID: 01-BOVMS1-009-Q1-E1-A9
caagaagctgaagaaaatggagcagaacaagacagcagctactatgtaccgccagaagatgagggcggaacatgaggccctcactggtgaatgtaaagagctagaaaaaaagaatgaggctctgaaagagaatgcagattccttggccaaggagatccagtatcttaaagatctgatataagaggttcgcaaagcaagggagaagaaaagggtcctctagttagggtagtcaggagtatgtgcgcttgtatatagaaggctgaagctgtgttttaataaattattttgtagtg

SEQ ID NO: 9 - DNA, 309 bp, Bos taurus
  Clone ID: 01-BOVMS1-010-Q1-E1-A1
atgcgacgtcatagctcttctatagtgtcacctaaattcaattcactggccgtcgttttacaacgtcgtgactgggaaaaccctggcgttacccaacttaatcgccttgcagcacatccccctttcgccagctggcgtaatagcgaagaggcccgcaccgatcgcccttcccaacagttgcgcagcctgaatggcgaatgggacgcgccctgtagcggcgcattaagcgcggcgggtgtggtggttacgcgcagcgttgacgctacacttgccagcgccctagcgcccgctcctttcgctttcctccct

SEQ ID NO: 10 - DNA, 306 bp, Bos taurus
  unsure (249),(275): unsure at all n locations; Clone ID: 01-BOVMS1-011-Q1-E1-A9
ccacccactaataaaaattgtaaacaatgcattcatcgaccttccagccccatcaaacatttcatcatgatgaaatttcggttccctcctgggaatctgcctaatcctacaaatcctcacaggcctattcctagcaatacactacacatccgacacaacaacagcattctcctctgttacccatatctgccgagacgtgaactacggctgaatcatccgatacatacacgcaaacggagcttcaatgtnttttatctgcttatatatgcacgtangacgaggcttatattacgggtcttacacttt

SEQ ID NO: 11 - DNA, 366 bp, Bos taurus
  Clone ID: 01-BOVMS1-012-Q1-E1-A1
atgcgacgtcatagctcttctatagtgtcacctaaattcaattcactggccgtcgttttacaacgtcgtgactgggaaaaccctggcgttacccaacttaatcgccttgcagcacatccccctttcgccagctggcgtaatagcgaagaggcgcgcaccgatcgcccttcccaacagttgcgcagcctgaatggcgaatgggacgcgccctgtagcggcgcattaagcgcagcgggtgtggtggttacgcgcagcgtgaccgctacacttgccagcgccctagcgcccgctcctttcgctttcttcccgtcctttctcgccaagttcgccggctttccccgtcaagctctaaatcgggggctccct

SEQ ID NO: 12 - DNA, 437 bp, Bos taurus
  Clone ID: 01-BOVMS1-013-Q1-E1-A1
atacaactaggattccaagatgcaacatcaccaatcatagaagaactacttcactttcatgaccacacgctaataattgtcttcttaattagctcattagtactttacattatttcactaatactaacgacaaagctgacccatacaagcacgatagatgcacaagaagtagagacaatctgaaccattctgcccgccatcatcttaattctaattgctcttccttctttacgaattctatacataatagatgaaatcaataacccatctcttacagtaaaaaccataggacatcagtgatactgaagctatgagtatacagattatgaggacttaagcttcgactcctacataattccaacatcagaattaaagccaggggagctacgactattagaagtcgataatcgagttgttctaccaatagaaataacaat

SEQ ID NO: 13 - DNA, 381 bp, Bos taurus
  unsure (2): unsure at all n locations; Clone ID: 01-BOVMS1-016-Q1-E1-A1
gnggattgacgtgtgggagcatgcttattaccttcagtataaaaatgtcaggcccgattatctgaaggccatttggaatgtgatcaactgggagaatgtaactgcacgatacacggcttgcagcaagtaaaccgtcagccttacactgagtacaccaagctctttctgactatttttgtagtagtgcagagaaccagataaaccagtacgctgctctgttgtagtgtttctgagtgtggcttgttcaaaaatttgataaaaataatccactgctatggataatctcttttaaaagtttgttattaggcaactgtttgaaaacgttaagtgctttgtatgatttagctttttgattgaacattttcttcggagagctaaact

SEQ ID NO: 14 - DNA, 441 bp, Bos taurus
  unsure (373): unsure at all n locations; Clone ID: 01-BOVMS1-016-Q1-E1-A9
gtttggcgacaacagccttaatttttcactactatttttctccgactccctatccactccactactaattttaaccatatggctcctccctctaatactaatagctagccaacatcatctatcaaaagaaaacctaacccgaaaaaaactatttattactatgctgatctcactacaactattcctaattataacctttaccgccatggaactaatcttattttatattctatttgaagcaacactagtcccaacactcattattattacccgatgaggaaaccaaacagaacgcctaaacgccggactctatttcctattctatacactagctggctccctacccctattagtcgcactaatttatatccanaacacagtaggatccctaaatttcctaatattacagtactgagtacaacctgttcataactcttgatc

SEQ ID NO: 15 - DNA, 409 bp, Bos taurus
  unsure (302): unsure at all n locations; Clone ID: 01-BOVMS1-017-Q1-E1-A1
cttcatccggaccagccgcccagaaaatgccatcatctacaacaacaatgaagatttccaaatcggacaagccaaggtggtcctgaagaacaaggatgaccaggtgactgtgattggtgccggggtgaccctgcacgaggctttggcagctgctgacctgctgaagagagagaagatcaacattcgcgtattggaccctttcaccatcaagcccctggataagaagctcattcttgacagtgcccgtgctaccaagggcaggatcctcactgtggaggaccactactatgaaggtggcatangtgaggcagtggcctctgcagttgtgggagagcctggcgtcactgtcacccgcctggcagtcagccaggtgcccagaagtgggaaaccagcggagctgctgaagatg

SEQ ID NO: 16 - DNA, 320 bp, Bos taurus
  Clone ID: 01-BOVMS1-018-Q1-E1-A1
tatctgcacctcaaaaaaaaaaaaaaaaaaaaaaaaaaaaaaaaaaagggggggcgccccaaaaggttcaaacttaacttacccgtggaatgcaaggtcagaactcttcaagaactgccacctaacattcaattcactgcgacgtcgttttacaacgtcatgaccgggaaaaccctgctcttacgcaacttaatcgccttgcagcaaatgccactttcgccagctggcgtaatagcgaacaggcccgcaccgatcgcccttctcaacagttgcgcatcctgaataggcaatgggacatgccctgtaacggagcattaaac

SEQ ID NO: 17 - DNA, 312 bp, Bos taurus
  Clone ID: 01-BOVMS1-019-Q1-E1-A1
atgcgacgtcatagctcttctatagtgtcacctaaattcaattcactggccgtcgttttacaacgtcgtgactgggaaaaccctggcgttacccaacttaatcgccttgcagcacatccccctttcgccagctggcgtaatagcgaagaggcccgcaccgatcgcccttcccaacagttgcgcagcctgaatggcgaatgggacgcgccctgtaacggcgcattaagcgcggcgggtgtggtggttacgcgcagcgtgaccgctacacttgccagcgccctaactcccgctcatttcgcattcatcccttcc

SEQ ID NO: 18 - DNA, 383 bp, Bos taurus
  unsure (359): unsure at all n locations; Clone ID: 01-BOVMS1-019-Q1-E1-A9
ggccgcacgagggttttactgtctcttacttccaatcagtgaaattgaccttcccgtgaagaggcgggaatgcacaaataagacgagaagaccctatggagctttaactaaccaacccaaagagaatagatttaaccattaaggaataacaacaatctccatgagttggtagtttcggttggggtgacctcggagaataaaaaatcctccgagcgattttaaagactagacccacaagtcaaatcactctatcgctcattgatccaaaaacttgatcaacggaacaagttaccctagggataacagcgcaatcctattcaagagtccatatcgacaatagggtttacgacctcgatganaaaaaaaaaaaaaagggcggccgc

SEQ ID NO: 19 - DNA, 408 bp, Bos taurus
  Clone ID: 01-BOVMS1-020-Q1-E1-A1
gtttgacgacgttgccctgctcacttcagcctccggcccgccatctccttgagccctaccaccatgccttcaattaagttgcagagctctgatggagagatattcgaagttgatgttgaaattgcaaaacaatctgtgaccatcaagactatgttggaagatttgggaatggatgatgaaggagatgatgatccagtccccttgccaaatgttaatgcagcaatattgaaaaaggtcattcagtggtgcactcaccacaaggatgatcctcctcctcctgaagatgatgagaacaaagaaaaacgaacagatgatatacctgtttgggatcaagaattcctgaaagttgaccaaaggacactctttgaacttatattggcagcaaactatttagacatcaaaggtttg

SEQ ID NO: 20 - DNA, 453 bp, Bos taurus
  unsure (441)...(442): unsure at all n locations; Clone ID: 01-BOVMS1-022-Q1-E1-A1
caaccaagccttcgggaaaaatggacttcaaagtgagtggactaccagctcctgatgtgtcatggtatctaaatggacgaccagttcaatcagatgattttcacaaaatgatagtgtctgagaagggttttcattcactcatctttgaagtggtcagagcttcagatgcaggggcttatgcatgtgttgccaagaacagagcaagagaagccacctttactgtgcagctggacgtcctggcaaaagaacacagaagagcaccaatgttcatctacaaaccacagagtaaaaaagtgtttgagggagaatcagtgaagctagaatgccagatctcggctgtacctccaccaaagcttttctggaaaagaaataatgaaatggtacaattcaacactgatcgaataagtttatatcatgataactctggaagagttactttanntgataaagatg

SEQ ID NO: 21 - DNA, 281 bp, Bos taurus
  Clone ID: 01-BOVMS1-023-Q1-E1-A1
atgcgacgtcatagctcttctatagtgtcacctaaattcaattcactggccgtcgttttacaacgtcgtgactgggaaaaccctggcgttacccaacttaatcgccttgcagcacatccccctttcgccagctggcgtaatagcgaagaggcccgcaccgatcgcccttcccaacagttgcgcagcctgaatggcgaatgggacgcgccctgtagcggcgcattaagcgcggcgggtgtggtggttacgcgcagcgtgaccgctacacttgcaagcgccct

SEQ ID NO: 22 - DNA, 190 bp, Bos taurus
  Clone ID: 01-LIB188-001-Q1-E1-A1
accaacaaagtcgcttcccagaaaggaatgagtgtgtatgggcttgggcggcaagtgtatgatcccaaatactgtgctgctcccacagaacctgtcattcacaacggaagccaaggaacaggaaccaatgggtcagaaatcagtgatagtgattatcaggcagaataccccgatgaatatcatggcgagt

SEQ ID NO: 23 - DNA, 422 bp, Bos taurus
  Clone ID: 01-LIB188-002-Q1-E1-A1
acttatgatcggccagcccaccgggcactttgacaagcttgttgttgttcaaatgaagttccctcaaatgaggagtgttggccaaagagccattgtcaaccgcagagatgctgttgaaactcagtcccaacttagccaaattattcagtcctttcaggctagctgcatcaactttggtgattttgttgccatcgagatgtaattcagtaagggaaggaggaagaccttgagggatggtagttatatttgtgtcagcaatgcggatgtaggagagcttcttcattccctgaaaggctccattttcaatgcctgagctcttcagcgggttggtgccaagttctacgacgatcatctgggtcaatccaatgaacacagactttcgcactttggtgatctcgttctcatggacacgcagctcctga

SEQ ID NO: 24 - DNA, 414 bp, Bos taurus
  Clone ID: 01-LIB188-003-Q1-E1-A1
accatgccaaactcaaaggcaaagtctcctgcaaaaagttcgacctccgggtttccatacgcccagcccccgaaacagtcaagaagcctcaggacgccaaaggttccatgatccttgacatctgttcgagcggccgcccgggcaggtcgtgtctgtcaaagatgtccgtcgtggcaatgtggctggtgacagcaaaaatgatccacccatggaagctgctggcttcacagctcaggtgattattttgaaccatccaggccaaatcagtgctggatatgcacctgtgctggattgtcacacagctcacattgcttgcaagtttgctgagctgaaggagaagattgatcgtcgttctgggaaaaagctggaagatggccctaaattcttgaaatctggtgacgctgccatcgttga

SEQ ID NO: 25 - DNA, 390 bp, Bos taurus
  Clone ID: 01-LIB188-003-Q1-E1-A9
acctatgatagggcagccaatcgggcaatttggtaagcttgttgccgttcagatgcagttccctcatatgaggactgttgacaaacgagccattgtcagccgcatagatgctgttgatatacactcccaaattacccaaattattcagtcctttcaggggaaatgcatcaagtttggtgattttgttgacatcgagatgtaattcagtaaaggaaggaggaagaccttgacggatggtagttatatgagtgtcagcactgctgctgtcagacagcttcttcagtccctgagtggctccattttcaatacctggattcttaagcgggtaggtgacagattcaacgacgatgatctggctccatccattgattacagaatttcggactttgg

SEQ ID NO: 26 - DNA, 337 bp, Bos taurus
  Clone ID: 01-LIB188-004-Q1-E1-A1
atggcggccggataccgtgcctagtttttgacactctcctggtcgtcatacgcaaccactggatgcccctggtggcataggggacctgctggtcacggaatctgtgggtggtggctccgtggaggaagtcacagatgtcataatacgcaaggatccctttctccttggtgaactggactggaattcctggccctgacatggaggctcccacatctgtcttggaagaggccagagtgtagctcctcacaaaagtggggatacccatcaccagcttattggctggagcccccagcctcagcatgtagctcacagcgtagtcagcgttactgaatctgtc

SEQ ID NO: 27 - DNA, 367 bp, Bos taurus
  Clone ID: 01-LIB188-005-Q1-E1-A1
accttgaccattgtcctcagtctagacagaaggtctagtccctaccatagggaagctgaggggtagcaggagacccactgagacccaatcccaacactgaaacctgccaggctcccctttactcctcctcaggtccttccagcgggaggacctgcaagggcaagcccaccttggcttgattgcctggcaactgagaccctgctctggggaagggaagaggtcagaggaagccctgcagagggctggggaggtggggcccatctctgagcaatcagagtaggaggaaagaatgtatgtgcctgatggagaaagggatcggcatgctgggaggtgagggacttatctggggttcgagcggccgcccggg

SEQ ID NO: 28 - DNA, 416 bp, Bos taurus
  Clone ID: 01-LIB188-005-Q1-E1-A9
accgtcgtaggctgtcctacaatacagcctctaacaaaaccaggctgtcccggacccctggtaacagaattgtttacctttataccaagaaggttgggaaagcaccaaaatctgcatgtggtgtgtgcccaggccgactgagaggcgttcgtgctgtgagaccaaaagttctcatgaggttgtctaaaacgaagaaacacgtcagccgagcctatggtggttccatgtgtgctaaatgtgtccgcgacaggatcaagcgcgctttccttattgaagagcagaagatcgttgtgaaagtattgaaagcacaagcacagagtcagaaagctaaataaaaaatgaaccgtttttgagtaacaaaaaaaaaaaaaaaaaaaaaaaaacctgcccgggggccgctccaactttccaaaaag

SEQ ID NO: 29 - DNA, 364 bp, Bos taurus
  Clone ID: 01-LIB188-006-Q1-E1-A1
actagagagcctccctgggaggtggcggtggcggcaaggtccgcatcaacgttgaggagtctgtggacgggaaggtggtttcttccagaaagagagaaatctaacagcccagtgcaggggagatgcccctgccacccctgccctccccaggctgagcagaaagctggccagagggaccggaaaagcaaattccaggctctgctttcagagggtctggtccaaggggtccttcgtttcttagttgggtgcttcccgtgctctcccctgctccctccagctttcctgcctctgatagagcagggaggtgcaagaaacagctgtattgtgtaacaagttcatggtctgttcgagcggccgcccgggc

SEQ ID NO: 30 - DNA, 376 bp, Bos taurus
  Clone ID: 01-LIB188-008-Q1-E1-A1
acgagagcaggagctgctctatgcccgggcccatctggagctggaaatgtgcaacgcccaccaactggctgaagtggaggtgagaaattgcaagccgacgataaaggacctggggcccatcaccatcagatacatcgctgtggcacggccggaaatccaagtaaaagtgccgcagaacctgcgcatatcatccagcctcatcaccaagggttccactcccaacaggctcttcaacacagccctgggtttgctggggctcggggctgaggcccaggccccagccattaagcccaccgggggacccatcgtccaagacggcttgcttcccatctccagctgctgccccccaaaatcttgtgaagaatcaggttgtgcc

SEQ ID NO: 31 - DNA, 429 bp, Bos taurus
  Clone ID: 01-LIB188-009-Q1-E1-A1
gcatgctccgacgccataggggcgggatactgccggatgcagaagtgcttcgaagtgggcatgtccaaggagtctgtgagaaatgaccggtgcaaggtaaagaaggaggtgcccaagcccgagtgctccgagagctacacgttgacgccggaggtgggagagctcatcgataaggtgcgcaaagcgcatcaggagaccttccctgctctctgccaactgggcaaatacactacgaacaacagctcagaacagcgtgtctctctggacattgacctctgggacaagttcagtgaactctccaccaagtgcatcattaagactgtggagttcgccaagcaactgcccggcttcaccaccctcaccattgcggaccagatcaccctcctcaaggctgcctgcctggatatcctgatcctgcggatctgcacg

SEQ ID NO: 32 - DNA, 323 bp, Bos taurus
  Clone ID: 01-LIB188-010-Q1-E1-A1
catgctcccggtacgcatggcggcgggatactgggggtatcccttgaggtcgtaagtggccccatccagacccatgatcagatattctttcccaggttccaactgaaggcggcaacaggctcggaccaagaagtttctggtctgatcaacggtggccctgacatccttggtgaaatgcatgacttgggtgatacgggtctcaaagaggcggaaagcagcccggctgtcttctcggagaaccttaacctggaagccgtagtcgactcggggagagtaccacgcgaatttcatccggtaaccctccaagtcctgctgcccacgct

SEQ ID NO: 33 - DNA, 421 bp, Bos taurus
  Clone ID: 01-LIB188-013-Q1-E1-A9
actttggcacaccactgtttcgaatcccttggatcatggaggcatggttcccagcgtcagagtaaatctcacagcctggcatcatcttagccagagtgaagagggtcgagtcattggccacaaagcacgaggagaacaagagtgcagcatctattccatggaggtcagccagctcctgctccaggtccacgtggaatttactagttccagaaatatttctagtacaaaaaggacataaaattgtatatacagtagaataacaactatgtaaacacaccaaaaatctatatgcacagaaatgtctagaagaacacttaacaccaaaagattagcagtggtaacatttgggtggtaaactgattctttttaaaattcccaggtttttcttaataagcattaattatgactgcaagttacattt

SEQ ID NO: 34 - DNA, 361 bp, Bos taurus
  Clone ID: 01-LIB188-014-Q1-E1-A1
acaaaaatgctccagcgaaacggtctaaaaaattttccaaaaggggtaaaacaaaatttcctggaaaacccaattcaagcccttcaagaaatccaacggggaaccattttgcctctccaattcaaaaaaatagagacaactttgaatccagggtttggagctgccccgcgtctgtctttcctatgcactctgagttaaaacgggactcgcgggaccgttggcggcgtgctccggcccctcagcaccttctgtgggtttggcgcctccggcctctttgtctccttcggaagtctccagggcctccggggggcttgtgcagttagcatccggcttagctttgtccacctcgttatcaatctca

SEQ ID NO: 35 - DNA, 406 bp, Bos taurus
  Clone ID: 01-LIB188-015-Q1-E1-A9
acagaccagagacaaagcaagagaagaagcagaggctgctggcccgagctgagaagaaagccgcgggcaaaggcgatgtccccaccaagaggccacctgtccttcgagcaggggtcaacacggtcaccaccctggtggagaacaagaaggctcagctggtggtgatcgctcacgacgtggatcccattgagctcgtggtcttcctgcctgccctgtgccgcaagatgggggttccctactgcatcatcaagggcaaggcccggctggggcgcctggtgcacaggaagacgtgcaccaccgtagccttcacacaagtcaactcggaggacaagagtgccctggctaagctggtggaagccatcaggaccaattacaacgacagatacgatgagatccgtcgtcactg

SEQ ID NO: 36 - DNA, 444 bp, Bos taurus
  Clone ID: 01-LIB188-016-Q1-E1-A1
acaggtcgtagctgggcagctgctcctctttctgaccgatacagaacttgcccaggtccaggttccggacgggaaactccaccaggtcgttgatcttgtcacgccagatgaagctgccgaaggagaagcgcttgagctgcacgatgagcacgttgggcaagcgccacagcagcagctgcttggaggcctcgcggtgctgtttgcactgccggcagtaccaaggggggaggaaagagtgctctccttcaggggagcaatcacaaagcctccactacaagggctggcaaccactgagcgctgtgtggggtatgagacacagcctcgctccacaggacactgtcaacaagaagctcctttctttggagtcacagcaggacaatgatgggagaagattgggcctgtccaatgagagaaactctccttcagagccctgctgagcaacaa

SEQ ID NO: 37 - DNA, 384 bp, Bos taurus
  unsure (239),(285)...(286),(302): unsure at all n locations; Clone ID: 01-LIB188-017-Q1-E1-A1
tggctcaattcaaccaacaagattcttgcccccaaattccaaattcttaagccaaggacccttggaacaacaaaccaattaccggtaagaactaaacaaaaggcctttaattaagtccccaacaaccaatgttttaaagggctttccttcaatgaagtcccaaaaaaataacctaaccatccttgcctccaaaagcacagaaggattcatctggagagacggtcacagtgttcaggtancctgtgtggccgatgtgttggtctcagctacaattgcaagtccatnnacttgacagcttgtcncagccacaggaaacaataatgggattgctgctgttgggcgagaagcggacacaagacacccactctgaatggctttcatcct

SEQ ID NO: 38 - DNA, 416 bp, Bos taurus
  Clone ID: 01-LIB188-017-Q1-E1-A9
acaccaattacgttcggcggcgggaccaaggtggaaatcaatcggtctgatgctgagccatccgtcttcctcttcaaaccatctgatgagcagctgaagaccggaactgtctctgtcgtgtgcttggtgaatgatttctaccccaaatatatcaatgtcaagtggaaagtggatggggttactcagagcagcagcaacttccaaaacagtttcacagaccaggacagcaagaaaagcacctacagcctcagcagcatcctgacactgcccagctcagagtacagcgccgaatctaccttcgaggggatcctcaaaaacccaagagcaaagtctttgaacagcaggtccctctggccgggtggagagccaaagagctggaagctccgagacttgttttttccaaatttctcctgcgc

SEQ ID NO: 39 - DNA, 360 bp, Bos taurus
  Clone ID: 01-LIB188-018-Q1-E1-A1
acaggcaggacgcctacgacggcagagattacatcgccctgaacgaggacctgcgctcctggaccgcggcggacacggcggctcagatcaccaagcgcaagtgggaggcggcagattatgctgagtctttgaggaactacctggagggcacgtgcgtggagtggctccgcagatacctggagaacgggaaggacacgctgctgcgcgcagaccctccaaaggcacatgtgacccatcaccccagctctgagcgtgaggtcaccctgaggtgctgggccctgggcttctaccctgaggagatctcactgacctggcagcgcagtggagaggaccagacccaggacatggagcttgtggaga

SEQ ID NO: 40 - DNA, 377 bp, Bos taurus
  Clone ID: 01-LIB188-019-Q1-E1-A1
acttcgcgctgttggcatccttcgggttgtaggggcaagatacggtcacagagcctcccctcacacctttcaccacggaggggcttgcggggattgccgtctcttcattgacgaagagttgccaggcctgcacaggccagccgtcctggggctcaccctcaggctgggccccgcacacgtagcgccctgcgtcctctttcctcaggctggtaatgtgcacactgaagacaccattgtccttgggcacggacacgatcctgccctggaagtcctgagccttcttccccaacgtgttgatgaccacattgcaagctcccccattcttcttctggcacagaaatttgggcacatttgccacctcggggcccaaggaacag

SEQ ID NO: 41 - DNA, 388 bp, Bos taurus
  Clone ID: 01-LIB188-019-Q1-E1-A9
accggtcttctaccagcaaccaaattaggtagcctgtttatcttgagctgacttcctgctccagggctggcttcctaatccagtcatattgctgaagtgtggctgaggtgagcccaggcctctctctgcgggtgagggttgctcctcacttaggttgtggggagaaccccccccacagtaaatggaagcagttgcctgcctgcctctggagtcccttttgcaacactcctttctttccctgggctgaagccaggacctggtggtgttccttacaggatagtcagtgacgatgccgggcacagctttccagagtgaaggccattgggcccgagcaccctttcacttggctccccccaccctctctaggaatcacattatgactgaatgc

SEQ ID NO: 42 - DNA, 297 bp, Bos taurus
  Clone ID: 01-LIB188-020-Q1-E1-A1
gcaatgggcccgggacacttggagacggtcccgcccagcatcagctcgcccccgggctgggctttcgggtccctgttcaggaagaaggagaagacgttcttgtccaccaacttctgctgcatcaggttgtcgaagacaggcagcacgttgttgacggagatgcgggggtaggccatgcccagaatgccgccgaacttggccgcgatgaagaccacaccgggctgcttgatggcctccccgaaggtctgcctctgcaccgtgacgccacccgggctggatgatgatgggttacagggt

SEQ ID NO: 43 - DNA, 415 bp, Bos taurus
  unsure (59),(66),(154): unsure at all n locations; Clone ID: 01-LIB188-021-Q1-E1-A1
gccatgggcgcgggataccaaaagaccttcctcctgatactgcgctgctggacctgcanaaaacanaatactgagatcaagatgggacttaagaacctgaagaacttcatacactgattctcatcaacaacaaaattagcaaaatcagccctgnggcatttgctcctttggtgaaattggaacgactttatctttccaagaatcaactgaaggaattgccagagaaaatgcccaaaactcttcaggagctgcgtgtccatgagaacgagatcaccaaagtgcgaaagtctgtgttcaatggattgaaccagatgatcgtcgtagaacttggcaccaaaccgctgaagagctcaagcattgaaaatggagcctttcaaggaatgaagaagctctcctacaatcgcattgctgacac

SEQ ID NO: 44 - DNA, 425 bp, Bos taurus
  unsure (381): unsure at all n locations; Clone ID: 01-LIB188-021-Q1-E1-A9
acaagctgaagtgcgggatgctcttctctatccgctcttttgtcagcaagatgtccccgctagacatgaaggacggcttcctggccttccaaactagccgttacaaactccattactacgagacgcccactgggatcaaggttgtcatgaatacagacttgggcgtggggcccatccgagatgtgctgcaccacatctacagtgcgctgtatgtggagctggtggtgaagaatcccctgtgcccgcttggccagactgtgcaaagtgagctcttccgctcccgactggactcctacgtccgctctctgcccttcttctctgcccgggctggctgaaggaagcactctacctcacccctcagaagaatcgctgtctgcctgnggcccaacctaacctgccctaccgccccagtcccccagcctcat

SEQ ID NO: 45 - DNA, 329 bp, Bos taurus
  Clone ID: 01-LIB188-023-Q1-E1-A1
atggccgcgcgatacctttcaaaaactttccggaggtggcaaagccccggcacggtcaaaatcctaatcaacttgggaacatcattcccttcctcctccaaacaagcacactaaaaatcccggcaatcctggtcaatcattccataaccaaggacagacccatcctcggcactccgaccctttgcgagggcaacaatcaccttgcggaagtcgcaaaaagtgtcggaaacaatgtccttctcaaaatcggtcttgtacttgtcctccgactaagtctgccagtttctctgccactccacggctacatcttctgggtagaaaccggtgac

SEQ ID NO: 46 - DNA, 371 bp, Bos taurus
  Clone ID: 01-LIB188-024-Q1-E1-A1
acttgtcctccgactcagtctgccggtctctctgccactccacgtctacatcttctgggtagaagccgatgaccatgcaggtgacgctgaccgtgcttttgctgagctcttccttgggtgggtccaggacatacacctgcggctcccgggccggccctttgctcctggagatgatcctcacgatggaggccgagaggcctttgatgttgaccttgcacttgaactcctttcctccagtccagtcctggtgctggatgggcagggcgctgaccacgcggtacgctcccagctggaggagggtgaccgcacgggctccagctctgtggcccccctcctccctttgcccaaccctcgtccgcaggtcctctgtg

SEQ ID NO: 47 - DNA, 421 bp, Bos taurus
  Clone ID: 01-LIB188-025-Q1-E1-A9
acggccaaatcatcaaggacgtggtgctgcagtggggagagatgcccacctctgtggcctacatctgctccaaccagatcatgggctggggagagaaagccattgagatccgctccgtggagacgggccacctggatggggtcttcatgcacaaacgagcccagaggctcaagttcctgtgtgagcggaacgacaaggtatttttcgcctcggtccgctccgggggcagcagccaagtttacttcatgaccttgaaccgtaactgcatcatgaactggtgacggggccctgggctgggctggcctctgtggaccagctcaccccccacagccagactccccggccgcccttctcttccctccctgggcttttgcttttactggtttgattcactggagcctgctgggaacgtgacctctga

SEQ ID NO: 48 - DNA, 347 bp, Bos taurus
  Clone ID: 01-LIB188-026-Q1-E1-A1
accagaaaagcctccctgggaggtggcggtggcggcaaggtccgcatcaacgttgaggactctgtggacgggaaggtggtttcttccagaaagagagaaatctaacagcccagtgcaggggagatgcccctgccacccctgccctccccaggctgagcagaaagctggccagagggaccggaaaagcaaattccaggctctgctttcagagggtctggtccaaggggtccttcgtttcttagttgggtgcttcccgtgctctcccctgctccctccagctttcctgcctctgatagagcagggaggtgcaagaaacagctgtattgtgtaacaagttcatggtctgt

SEQ ID NO: 49 - DNA, 373 bp, Bos taurus
  Clone ID: 01-LIB188-027-Q1-E1-A1
actccctaacctcaccttcctttgctaacaccctttcagcgagtgttttcttcctctgcaaaggaaaaacaaattggatttgaaaaatattctcaagtttcatagctgaaatttggggcaaatgtgtccagaccagctagcattctctataaatatcaacaaaagcaggcttggggattctgtgctttgggtccaaggatcctggcaagaaacacatgttgagattcctctagttcagaatttccagggggtggaggtagagccacctcaactgtcttcagcctcagctggctcaattgccaagcttagtgggaactgcccctaacatctcgaagccaatttttcaaatttgcccccggcggtgcccccttgc

SEQ ID NO: 50 - DNA, 363 bp, Bos taurus
  Clone ID: 01-LIB188-028-Q1-E1-A1
acacggaaggcggtttcatggcgacatctttgggcttggagacggtgttcttttctgggaagggcaggtccgagtgggccactgtgcacgtgaactcctctccggactcccagtcctccgagcagaccgaggcctcaccccgggcgctgaaggtgtcgttgaggtgtcgctcaaaatacgtgtgggtctccggggccttgccgttctgacgggaccagctgatgttcaggccatcataggaggccaggtttgtgaccagacaggacagtttggctgacttcgtgaggaagatgtcggcgaaggatggggggatggtgaagatcccgatgggagatggtggtgcaacatcacatgaggaggaca

SEQ ID NO: 51 - DNA, 243 bp, Bos taurus
  Clone ID: 01-LIB188-028-Q1-E1-A9
gcttccctggaggctgccatcgctgacgctgagcagcgtggtgagatggctgttaaggatgctcaggccaagctggccgagctggaggccgctctgaggaacgccaagcaggacatggcgcggcagctgcgcgagtacgtgaataaagaaattcacaatgcccgaaagggacatatcccacgcctggaccgcagcactctggctctcaggagtgtcagtagtcaacgcatggtgagaagctgc

SEQ ID NO: 52 - DNA, 339 bp, Bos taurus
  Clone ID: 01-LIB2809-002-Q1-E1-A1
acaaaacaatgacagcacagaatatggactcttctagataaataataaaatttggtgcaaagacgaccagaaccctcactcaagcaacatctgtaacatctcctgtgacaagttcctggatgatgatcttactgatgacattatgtgtgtcaagaagattctggataaagtaggaattaactactggttggcccataaagcactctgttctgagaagctggatcagtggctctgtgagaagttgtgaacacctgctgtctttgctgcttccgtcctcgttctgttcctggaactcctctgccacgtggctacctcgttttgcctctttgtatcactagt

SEQ ID NO: 53 - DNA, 420 bp, Bos taurus
  unsure (286): unsure at all n locations; Clone ID: 01-LIB2809-002-Q1-E1-A9
acaatgaagaaagctgtctgggaaagggagaaccatagccttggctcagagccttgaggcacagtctgaagacttcctacttaacatctaggaaggctgctttagtgtttttctaggccacgggtctgtctggaatggagagccaatggcctcctatagataccaatgtgtcatctagaaaggatatgctggattcagtttgccacatctcactaggccgactttgtaaccttgtttgtcacctgtctacactgcttaagcatttgatattgaatgaataatgtanagttgatgaaaactttaaaattaaacatgttttcagtcacatgttatttctttgaaactgaggactctgaattttcaacttattgaatctctaataaacactgtaactccaatattttggccacctcatgcgaa

SEQ ID NO: 54 - DNA, 399 bp, Bos taurus
  Clone ID: 01-LIB2809-003-Q1-E1-A1
atgagccgcgggatactaaacaagattcagttttagaatcaactacatttgtgtgtccatcacagtaataagtccctaactgttatatttagaatgtaaatctttaataaactccaaaatatcattttgcaatctattgatcgtgaactgcaaacggaggctggggcccccgtggtgtgatctgcaggctgcgtgtcacctcagtgcccagcgatcacagatcacggaggggagaaggcacttgtcttccaggaggtcgcgtcaggacaggtcaggcccgaccacacggtggcgccgtccactctcgtgccacaggcggggcctacaaggaaccgttcccgctcccttcatttgcaagaggtgcccaaatttacctacagcaccacaaatctcagaata

SEQ ID NO: 55 - DNA, 491 bp, Bos taurus
  Clone ID: 01-LIB2809-003-Q1-E1-A9
catggccagggcgatacccagctggaaattgttcccaatagtgctgaggaacgacttcacagtatgaaagagggaatccatgcccaacagaaagaacctatgataggagtgaatcaggaactggcctacttctaccctgagcttttcagacaattctaccagctggatgcctatccatctggtgcctggtattacgttccactaggcacacaatacactgatgccccatcattctctgacatccctaatcccattggctctgagaacagtgaaaagactactatgccactgtggtgaagagtcaagtgaattctgagggactccacagttatggtctttgatggttctgaaaattccatgctctacatgtcttttcatctatcatgtcaaaccattctatccaaaggcttcaactgctgttttagaatagggcaatctcaaattgaaggcactctttcttcttgagttctctactgtattttaaatagtgt

SEQ ID NO: 56 - DNA, 397 bp, Bos taurus
  Clone ID: 01-LIB2809-005-Q1-E1-A1
cggatacaagcttttattttttttttttttttttttttagtgccttaaaatgtaatttattgaaaagaagaaagacaaaatctcagttaatgcacacaattatttgatatgatggcacttacaggagaagtgattcaaaggcttttaaaacattttccatacagaaatttaatgaagactttaattccctttgactcagtggcctttataccagcatgatactactggaatttaggtaacaagctgttaggacaatttcacttaaggatgttacactatctaaaatacagtagagaactcaagaagaaagagtgccttcaatttgagattgccctattctaaaacagcagttgaagcctttggatagaatggtttgacatgatagatgaaaagacat

SEQ ID NO: 57 - DNA, 438 bp, Bos taurus
  Clone ID: 01-LIB2809-005-Q1-E1-A9
acaagaatcaaacttgacaagccaatcattcacattgtaggactcgtggaacacctggaataagagcttaaacttctcactggtggtttcacagccgccattctcaggcttctcaagcttatgggattcctggggagttaccagccagtcagaaagatccatctcatcttgatcaagaggctctagatctccaaccttttcaatttccatggagtaagaactggtagtagaacagctgttagacttttggaaacttggtttttcagaaacttcttgttgctgactcttgtggagccagttttccaaaccctttaggttgccccagactttattcaagaaactgcaggctctagcagaggtctgactgttctccaaggtctgcttgtggttgagccagtcctggagattggtgctgggtaggtaaggagcctggtgacc

SEQ ID NO: 58 - DNA, 155 bp, Bos taurus
  Clone ID: 01-LIB2809-008-Q1-E1-A1
gggataccccttaaagctaactcgtctctgagccctgggccctgtagtgacaatggacatgtaaggactaatctccaggggtgcatgaatggcgctctggacttttgacccttgctcgatgtccctgatggcgcttttaatgtaacagtatcact

SEQ ID NO: 59 - DNA, 397 bp, Bos taurus
  Clone ID: 01-LIB2809-008-Q1-E1-A9
gccatgggcccgggatacagcagaaaggcctgaatgggcatatctctctggggatagggcactgctttctggggaacaggcaggactttggactgagaaagggacagcacggactgaggaggaaacatgacagttggaggaagaggctggtgaggctggtgcatccaagactggagcagaggcagaggaaggtgcagattttcaacatcagtgagagtcaggctctggctttcagtaaagggctcaactggatatttagggaagggcatttctttgtgcttaggagccatagcctccttcactttggagactcccattacttcaggctgaaggaaaggcggcaccaccacaggggtttgagtaagaggagggatgttttgtgggaggctgttatgga

SEQ ID NO: 60 - DNA, 313 bp, Bos taurus
  Clone ID: 01-LIB2809-009-Q1-E1-A1
acatcagaaaggcctgaatgggcatatctctctggggatagggcactgctttctggggaacaagcatgactttggactgacatatggacagcacggactgaagaggattcatcacatttggaggaacatgcaggttacgctggtgcatccaagactggagcataagcatcagaaggtgcagattttcataatcagtcacagtcaggctctggctttcattcaagggctcacctggatatttacggaagggcatttcattgtacttacgatccagagctcccttcagattccatactcccattacttcaggcta

SEQ ID NO: 61 - DNA, 225 bp, Bos taurus
  Clone ID: 01-LIB2809-015-Q1-E1-A1
ttatttgatatgatggcacttacaagagaagtgattcatcggctgttaaaacattttccacacagcaatttattgaagactttatttccccttgacgcagtggtctttataccagcatgatactactggaatttatgtagcaagctgttatgacgatttcacctcaggatgttacactaccaacaatacagtagtgaactcctcaagaaggagtgcctccagctt

SEQ ID NO: 62 - DNA, 466 bp, Bos taurus
  unsure (420): unsure at all n locations; Clone ID: 01-LIB2809-017-Q1-E1-A1
tgctcctaccgccatgggcccgggatacttgtaaatgtgtaggtgggggttgtctactgagtaaggaatactgtttttaaggttctaaagctaaattcaaatgatgcattaatgacccaaaaactcagatctgatggtgtctgaatttctaacagtccttgctttgtgggtatgctgacaacttatctggatgccttacatcttttctaaacagtgttgcctctgaacgtgctctgctccctccctgctccctctttggagcccctttgcaccccagagcctgcagaagtggctggtataaaagggggcctggctagagaatgatcagtgtagctgtttgcaggattcctttctgggcttcattttggaaactttgcttagggctatttttcttaattgcccacatttgatggagggtanaaggaaattttgatgtatttgattaataataatatttttttttttt

SEQ ID NO: 63 - DNA, 389 bp, Bos taurus
  Clone ID: 01-LIB2809-017-Q1-E1-A9
gcctgggatactgacgaaggcggccgtgggagaggagttgggcaccgtgttagtgctcgtctcgctgatatagatcttagagatggggatcttcagagctttgctggccacctgcaccatcttggtgtgaaggccttggcccatctctgtgcccccgtggctcaccagcacggagccatctgtgtatacgtggatcagggctcctgcctgatttagaaaaggaactgtgaagcttattccaaatttggtaggaattatgcacaatcctctctttttccaacaattctccttgttgaacttgtcgacctcactcctccgagcgtaatactgagagctcttcaggcactcatcccagcacctgggcacgctgaacccctcaagcctctggt

SEQ ID NO: 64 - DNA, 364 bp, Bos taurus
  unsure (41),(102): unsure at all n locations; Clone ID: 01-LIB2809-024-Q1-E1-A1
acagcaaaaaggcctgaatgggcatatctctctggggatanggcactgctttctggggaacaggcaggactttggactgaaaaagggacagcacggactgangaggaaacatgacagttggaggaagaagctggtgaggctggtgcatccaagactggagcagaggcagaggaaggtgcagattttcaacatcagtgagagtcaggctctggctttcagtaaagggctcaactggatatttagggaagggcatttctttgtgcttaggagccatagcctccttcactttggagactcccattacttcaggctgaaggaaaagcggcaacaccacaggggtttgagtaagaggagggatgttttg

SEQ ID NO: 65 - DNA, 420 bp, Bos taurus
  unsure (378): unsure at all n locations; Clone ID: 01-LIB2809-025-Q1-E1-A9
acagcagaaaggcctgaatgggcacatctctctggggatagggcactgctttctggggaacaggcaggactttggactgagaaagggacagcacggactgaggaggaaacatgacagttggaggaagaggctggtgaggctggtgcatccaagactggagcagaggcagaggaaggtgcagattttcaacatcagtgagagtcaggctctggctttcagtaaagggctcaactggatatttagggaagggcatttctttgtgcttaggagccatagcctccttcactttggagactcccattacttcaggctgaaggaaaggcggcaccaccacaggggtttgagtaagaggagggatgttttgtgggaagctgttanggatgggcccagggaaaggatagactagagactgtgtctggg

SEQ ID NO: 66 - DNA, 379 bp, Bos taurus
  unsure (58),(84),(333),(353): unsure at all n locations; Clone ID: 01-LIB2809-027-Q1-E1-A1
cgccatgggcgcgggatacagcaaaaaggcctgaatgggcatatctctctggggatanggcactgctttctggggaacaggcangactttggactgagaaagggacagcacggactgaggaggaaacatgacagttggaggaagaggctggtgaggctggtgcatccaagactggagcagaggcagaggaaggtgcagattttcaacatcagtgagagtcaggctctggctttcagtaaagggctcaactggatatttagggaagggcatttctttgtgcttaggagccatagcctccttcactttggagactcccattacttcacgctgaangaaacgcggcaccaccacangggtttgagtaagacgaaggatgttt

SEQ ID NO: 67 - DNA, 439 bp, Bos taurus
  Clone ID: 01-LIB2809-027-Q1-E1-A9
catgtctccttaccgccatgggcccgggatacctggaaatggaaagcagtgggcatcggaatgaagtcagacttcactaccgctccggcagccaccaccctcacacagaagtgtttccttacattttggctgatgagaagtggcacaagctcgccttacccatcagtgcctcccacttgattttacatatcgactgtgatacactatatgacagagttgtggaaaagccttccacggacttgcccctgagcacttcattttggctgggacatataaataatgcacatggatattttaagggtataatgcaagatgtgcaattacttgtcatgccccaaggatttattgctcactgcccagatcttaatcgcacctgtccaacatgcaatgactttcacggactcgtgcacaagatcatggaactgcatgacattttaac

SEQ ID NO: 68 - DNA, 302 bp, Bos taurus
  Clone ID: 01-LIB2809-028-Q1-E1-A1
tgtacgtgggggttgtcgactgagtacggacgactgtttttaacggtctcaagctcgcgtcagctgaggcagtaatgacccagagactcacgatctgatggtgtccgaatttcgaacagtccgtgccgtgtgggtatgctgacaacctatctggaggccctactcttttctaaacagtgttgcctctgaacgtgctctgctccctccctgctccctcgttggagcccctttgcaccccagaacctgcagaaatggctggtataaaagggggcctggctagagaaagatcagtgtaaccgttt

SEQ ID NO: 69 - DNA, 438 bp, Bos taurus
  unsure (5): unsure at all n locations; Clone ID: 01-LIB2809-032-Q1-E1-A1
gcatngctcctaccgccaagggcgcgggatacttcatcatcaggaacagctgcccaaatcaacgtgattccaccatctccgtggaagagaatggggtgtcagcagaaagccggttctcagttcagatgttcaagtttgctggaaattatgacctagttttcctgcattgtgaggtttctctctgtgatttcattaaagaagagtgccaaccgtcttgctcaagaagtcaactccgcagtgaaggggtggctattgatccagcccgagttctagatctgggacccatcactcgcaaaggtgcccagtctcttggtgtcatgagtggaacacccaacactgcagggttcctggtggcctggcccctggttctcctgcctgtcctcctggctgggctgttctgagagctcagctgggcatctggccttgaagcttgtgttc

SEQ ID NO: 70 - DNA, 265 bp, Bos taurus
  Clone ID: 01-LIB3057-001-Q1-K1-A1
cgtccggaattgccgagtcacgcgaccggtagttatagatggactagcggagccattgacctcggaaccggcagcactcggtctgaaccacccacccaccagtctcggaaccatggcggcagtggcggcagcgtcagctgaattgctcatcatcggctggtacattttccgcgtgctgctgcaggtgttcaggtactccctgcagaagctggcatacacggtgtcgagaaccggacggcacgtgctgtgagagcgccggcagcgg

SEQ ID NO: 71 - DNA, 349 bp, Bos taurus
  Clone ID: 01-LIB3057-002-Q1-K1-A9
cggacgcgtgggcgcgggcgctggcgcacctgctggaggccgagcggcaggagcgggcgcgggctgaggcgcaggaggccgaggatcagcaggcgcgcgtcctggcgcagctccggcgcatctggggcgcaccccgcaccagtgacccagccctgggcctggagaacgaccccgacgcgcccgccgcgcagctcgcccgcgccctgctccgcgcccgcctggacccggcggccctggcagcccagcttgtccccgcccctgcccccgccgcggcgctcagactccggcccccagtctacgacgatggccccacgggccccgatggcgaagacgccggcgacgagacgcc

SEQ ID NO: 72 - DNA, 363 bp, Bos taurus
  Clone ID: 01-LIB3057-003-Q1-K1-A1
gggtgcgcgggtcgcctctctgagttatccagttccatccttgtcgctgcggcgacacccgcattctccgtcgccatgactgaacagatgacccttcgtggcaccctcaagggccacaacggctgggtgacccagatcgctaccactccccagttcccggacatgatattgtccgcctctcgagataagaccatcattatgtggaagctgaccagagatgagaccaactatggtatcccacagcgtgctcttcggggtcactcccactttgttagtgatgtggtcatttcctcagatggccaatttgccctctcaggctcctgggatggaacccttcggcctttgggatctcaacaacggggc

SEQ ID NO: 73 - DNA, 279 bp, Bos taurus
  Clone ID: 01-LIB3057-004-Q1-K1-A1
gtgggaagaaggttatattgacgcctacaacactttctaggactatctggcatgccgggacgatactccgactacccagatgcatacacaatatgaaatactatctcatcaataggctcattcatttccctaacagcagttatactaatagttttcatcatctgagaagcatttgcatctaaacgagaagtcttgactgtagacttaaccacgacaaatctagaatgattaaacggatgccctcctgcgtcttgcacatttgaagaacccacctatttt

SEQ ID NO: 74 - DNA, 363 bp, Bos taurus
  unsure (68),(284): unsure at all n locations; Clone ID: 01-LIB3057-004-Q1-K1-A9
gtcggcttttggtacctgctccgggtggccgtgagggagcgcgggccggggacgaccgctaagagcangagaagcgagaggagcaggtctgcgagtcgaagtgttgcagcggcgcacttgcagcaagaatcggaaggagcaggagacagcaaggataggcccaggagcaatggcttccaaagaggaacgagcaatagaaagtttcaacatggaagatgcccaacaggaaaacgaacgaggagaccaggcctctttgaagactggagaggaatcacgcgacttgngagggggcaaagtccagaagtctggaggaaatatcagactgggatgggttagacgacttgtccctaattttcgaagggc

SEQ ID NO: 75 - DNA, 141 bp, Bos taurus
  Clone ID: 01-LIB3057-005-Q1-K1-A1
cccacattcatcctatccatttctgagatggttcttaatgatccattccctggcaaacttctctgagctttatagctttgtaatgcatgcttggctctaatgggtttcatcttaaataaaaacagactctgtagcgatgtc

SEQ ID NO: 76 - DNA, 202 bp, Bos taurus
  Clone ID: 01-LIB3057-006-Q1-K1-A1
ttcatgatggtgcaacgtctgactgtaccgtcgtaggctgtcctacaatacatgctctaacaaaaccaggctgtcccggacccctggtaacagaattgtttacctttataccaagaaggttgggaaagcaccaaaatctgcatgtggtgtgtgcccaggccgactgataagcgttcgtgctgtgaaaccaaaagtttttatg

SEQ ID NO: 77 - DNA, 380 bp, Bos taurus
  Clone ID: 01-LIB3057-007-Q1-K1-A1
gtcggcgctaggaccgggcggatgcgggctgggccacccagcagagcctaacccgggcttggcagcctgagtcacccgccccgccctgcggagccggacgcagccggaggccccagagctacaccgacgagcggacccgtggacgcgcgaacgaggcggaatcagccatgttcctggttaactcgttcttgaagggtggcggaggcggcggaggaggcgggggcctgtgcggtggtctagggaatgtgcttggaggccttatcagcggggctggaggcagctgcggatgccgcggcggctgctgcagtggcagcggctgaaccgccatgcgcattctgtgcggggtcattagcgccatcagtgaggcggctgcgcagtac

SEQ ID NO: 78 - DNA, 427 bp, Bos taurus
  Clone ID: 01-LIB3057-008-Q1-K1-A1
atcgcgagcggccgcccttttttttttttttttttttttttttttttttttttttttggggggggacacgcgggttttaatggcattaacacccaggagtcacgcgtcggttctgggggcagcatcttccggggactggggctgctgcctcgctggctgtgaccttccagtctgctctgcagccttagggactcagcactagaaccacccgacccccaaccccgcgaaagacacaattgcactgactgacatacagaccccgggcccggctcccaaaacaagccctgggtctgtcgcacggcttaccaaggctttggcgtttggttgcttgggggccaaggcccggcccagggcaaaagggtttttcaatgggaccaagggtctttttggaccaaccggggctggaaaaactacctttggggcttaa

SEQ ID NO: 79 - DNA, 409 bp, Bos taurus
  Clone ID: 01-LIB3057-009-Q1-K1-A1
aacaaactctggagttagaggatatagaaaaaataaaaatacattgttacaaataaagagtgcagacttggaaagaaagccacaacccaaacaaaccaaaatttaaatactcagaattggcagcacaaaagaaaagttccctcctgacgtgtattgtggtagtctgaacgcccccagaaaattgtgccaaagagtttagaaaacagactaaaaacaaaacacatacaaacagcaaacttcaggtaactattttggattgcaaacaaggataaatttaatgtttataaacaatctgataaaataaccatttggaaactgcttggccttctgttctcatttatttgattgattataatgaggtattggtctcttgctgcacattaaaaccaagtgatcaaaagaatacata

SEQ ID NO: 80 - DNA, 329 bp, Bos taurus
  Clone ID: 01-LIB3057-011-Q1-K1-A1
ggattttgtgtcttcagtaagggcgaccccaggagcactgatcagtccttgaattctagaactatggcccacggacgcaagggtttggtgaccttctcggatgtggccatcgacttctctcaggaggagtgggcatgtctggactccaggcagagggacttgtactgggatgtgatgctggagaactacagtaacctggtctcacttgatttggaatcaccatatgagaccaagagtttaccttcacaaaagaacacttatgggatgaatttttccaaacggacctcaaatagaaaaagtgaatcccgtggccttgactggacatgtga

SEQ ID NO: 81 - DNA, 326 bp, Bos taurus
  Clone ID: 01-LIB3057-014-Q1-K1-A1
agttaccacaaacatcttcttttgattctctttgtgcctggtttctctgtagtgtggtgtgtgttggcagtaagccgcagtggaggtgctatgctggcatcttagaggtgtggagggaagaactctgacgtccaacatcaacatcttggtcaagtaaagtcttcagggtgttttgcgcacaaattgtagtcagatagctatgcatgtttagagtaaatctccaatttgtaattttccttagaattttgcaaaatgttgtgacagatatttgtcagaattattggaaatatgttatggtggatggcattttttcatataaaattata

SEQ ID NO: 82 - DNA, 401 bp, Bos taurus
  unsure (118): unsure at all n locations; Clone ID: 01-LIB3057-014-Q1-K1-A9
cggacccgtgggggactggagccgttggacggacgcgatccgaaggatcggggagcgcggaacgcgagtgcggacctcggttttcggagcgtggctagcagctggcacgatgggcggngagcaggaggaggatcggttcgacggcatgttgctggccatggcgcagcagcacgagggcggcgtgcaggagctggtgaacactttcttcagcttccttcgacgcaaaacagacttctttgttggaggagaagaaggcatggcagaaaagcttatcacacagaccttcaaccaccacaaccagctggcacagaaggcccggcgggagaagcgagctcggcaggagactgagcggcgggagaaggcagagcgggcagccaggttggccaaggaggccaagtcag

SEQ ID NO: 83 - DNA, 304 bp, Bos taurus
  Clone ID: 01-LIB3057-015-Q1-K1-A1
gcgttcgcttaggcgcagacgggcaaacagagccagcatgccggtcgcccggagctgggtttgtcgcaaaacctatgtgaccccgcggagacccttcgagaagtcccgcctcgaccaagagctgaagctgatcggcgagtatgggctccggaacaaacgtgaggtctggagggtcaaattcaccctggccaagatccgaaaggctgcccgggagctgctgacgctggatgagaaagacccgcggcgtctgttcgaaggtaatgccctgttgctgcagctcgtccgtatcggagtgctggatgag

SEQ ID NO: 84 - DNA, 426 bp, Bos taurus
  Clone ID: 01-LIB3057-016-Q1-K1-A1
cgccgggttgagaggagcgtggccttctcctctccccgccatggcgtgtgctcgtccagtgatatcagtgtactccgaaaagggggagtcctctggcaaaaatgtcactttgcctgctgtgttcaaggctcccattcgacccgatattgttaactttgttcacaccaacttgcgcaaaaacaacagacagccctatgctgtcagtgaattagcaggtcatcaaaccagtgctgagtcttggggtaccggcagagctgtggctcgaattcccagggttcgaggtggcgggactcaccgttccggtcagggcgcttttggaaacatgtgtcgtgggggccgcatgtttgcgccaactaagacctggcgacgttggcaccgcagagtgaatacgacgcataagcgatacgccatctgctctgcactggc

SEQ ID NO: 85 - DNA, 403 bp, Bos taurus
  Clone ID: 01-LIB3057-017-Q1-K1-A9
tcggacgcactgataggagcggtacactctcattcatcgaccttgcatgcgcatgtacatgagatatgataatactaaggtgcgtagtctaatctgcctattcataaaattgcacaggcatatttctaacttacactacaatgcaactcatctccacattcttgtgcgttacccatatatggcgagacgctgactacggatgaatcattcattacatacacgctgactgatcttgaacggtcattacctgctgatataatcacgtatgacgaggcttatattactgatcttacacttatgtagacacatggaaacatggagtaatccgtccgctcacaggaatagccacagcatttataggatacgtactaccatgaggaccaatatcattctgaggagcaac

SEQ ID NO: 86 - DNA, 301 bp, Bos taurus
  Clone ID: 01-LIB3057-018-Q1-K1-A1
gagcgaccaaatctacaacgtagttgtatccgcacacgcatttgtaataatcttcttcgtagtagtaccaatcataattggaggattcggtaactgacttgttcccctaataattggtgctcccgatagcatttccccgaataaataatataatcttttgactccttctttcctcattcctactactcctcgcatcctcattattttaagcttttgcagtaacaggctttaccttttaccttctctttatttgtctactttttctattctgtactctttattttttttactatgtttttct

SEQ ID NO: 87 - DNA, 371 bp, Bos taurus
  Clone ID: 01-LIB3057-018-Q1-K1-A9
gattcccggtcgacccagcatccgcggacgcgtgggtcgcgatcatcaccactatttgcagcaaagggtcgtcgcagaaaaagtgcacccggttactgctgctggtggtgtcaaatctactcttgtgccacagtgtggtctccacccccgtctgttccaatgtgcctcgcaacttccaagtattcctttcagacctgttttacctcgcagtcatggtgtcccactacattcattacctcttctccgaaatgttcaacgaattttataaaccgtatgtcccaagcaaaaggttcattaccatggccctcaacaactgccataccttcttcctttctacccctgaagattaagaacaaacccaacaaacccac

SEQ ID NO: 88 - DNA, 315 bp, Bos taurus
  Clone ID: 01-LIB3057-020-Q1-K1-A1
catctatcaaaagaaaacctaacccgaaaaaaactatttattactatgctgatctcacgacaactattcctaattataacctttaccgccatggaactaatcttattttatattctatttgaagcaacactagtcccaacactcattattattacccgatgaggaaaccaaacagaacgcctaaacgccggactctatttcctattctatacactagctggctccctacccctattagtcgcactaatttatatccaaaacacagtaggatccctaaatttcctaatattacagtactgagtacaacctgttcat

SEQ ID NO: 89 - DNA, 386 bp, Bos taurus
  Clone ID: 01-LIB3057-022-Q1-K1-A1
tcccgttgctctttgccggagcggtgtgaaggttttttggaatctctgcttagccctggggacagaccctgtggtgaaggctgcaggatcttccatatcaagcatcagcagctgtggttaagtccacaggtgcccacctgacctcgggttcctgggaagagcagagttgtcagcaagagaacctgtgggtaaagcccagcagaaagatgccaggcaatcggagtgctgctgggccgtctccgaccctgagtacagggggatgtgacaattcctgtgaggtgtcagtgtcctttgaggacatgaccgtggacttcagaagagaggagtggcagcacctggactctgctcagaggttcctgtaccaggacatgacgctgaaaactaca

SEQ ID NO: 90 - DNA, 298 bp, Bos taurus
  Clone ID: 01-LIB3057-024-Q1-K1-A9
atagcgagcagcatagaccttggacccttaccttttccaagaaaccgatccacgcgggggtcaaggctgctgtttgttcttacccacctccaaggaaagaaggccaagggtaagaacgtgtccccggcccctgccgtcgtgaacaagcacgaggccaagaacgtggtcaaccccctgttcgagaagaggcccaagaattttggcattggacaagacattcaacccaagaaggaccttacccgctttgtcaaatggccccgctacattcggctgtatcggcaaaaggctattctctata

SEQ ID NO: 91 - DNA, 412 bp, Bos taurus
  Clone ID: 01-LIB3057-025-Q1-K1-A1
gtgcaagggatcgctgatcattacgatttaaagaaactagtgaaggcgtttaagaagggggtcgcctgcaatggtacatgcatagatcatccagaatatggagaagtaattcagctacagggtgaccagcgcaagaacatatgccagttcctggtagagattggactggctaaagacgaccagctcaaagttcatgggttctaagtgctattggctcactgaagcttaagtgaggatctacttagcgatgagtacaattgcccttctgtcccttgtcacaagtttaaaaacctcacagattggataatgtaaccatcattagtctgcttttaacttggactaatgtaactccttcatgcaataaacttgagagagctatgctgtctagtcttgaagtccctcatttaaacag

SEQ ID NO: 92 - DNA, 157 bp, Bos taurus
  Clone ID: 01-LIB3058-002-Q1-K1-A1
cggacgcgtgggtgggaatgcagcccaaattgggcggtaaactccgtccaaggctaaatacaggcgagagaccgatagcgaacaagtaccgcgagggaaagatgaaaaggactttgaaaagagagttaaagagtgcttgaaattgccgggagggaag

SEQ ID NO: 93 - DNA, 418 bp, Bos taurus
  Clone ID: 01-LIB3058-002-Q1-K1-A9
tgccgacttcccttgcctacattgttccattggccagaggctgttcaccttggagacctgatgcggttatgagtacgaccgggcgtggacggtattcggtcctccggattttcaagggccgccgggggcgcaccggacaccgcgcgatgtgcggtgctcttccggccgctggaccctacctccggctgaaccgattccagggttggcgggccgttaagcagaaaagataactcttcccgaggcccccgccggcgtctccggacttcctaacgtcgccgtctgccgccacgtcccggctcgggaaatcttaacccgattccctttcgggtgacgcgcgtgatcgcgctatctgccgggtttcccccgtcccttaggatcggcttacccatgtgcaagtgccgttcacatggaacctttc

SEQ ID NO: 94 - DNA, 392 bp, Bos taurus
  Clone ID: 01-LIB3058-004-Q1-K1-A1
atcgcgagcggccgccctttttttttttttttttttttttttctctgctctgctccatgagcttttattcctggtgtagcgtttgggaccggatgtcggggagaggactcaaattccccggtcccaggaggggttgtggtcaaggtgggggtctagactgcccagtgcacgcagggaccagtggggctggtggaggcagtgagggaagtgtggaaggggcccaggctggtctccaagtgcggaaggtcaacgcatgagtcccgaagcccccgtgagaggcctggggggcagagggcagtactctgctctcagcggccctgggcctggagcctttgcatctgcagaatctgactcagaattcgctgcacgttttcatccatctgaccctgaat

SEQ ID NO: 95 - DNA, 427 bp, Bos taurus
  Clone ID: 01-LIB3058-004-Q1-K1-A9
aaaacactgaagacatccatcttagcaagcctgcacaaaccgcttggcccttttctcctcatctggtatttatactaccagtagcaaagcaaaagagtaattcatttttgtgtcgagttagctttatagagcatctcagattgaaactgttttctacacaagcatatagctagggattttgtaaacaaattgacacctactgaattaaaatatataaggtcatttaaatataatccagtgtatggtgaataacattgcactaatatggaaatcactgtcagagataatccatgatcttttgatttgatattacttaggcacatatcctacatgatcccagttgggaattacttaatagaaagaattggaaatgcatatggccatgcttaaatatagctttaatctgaattatgtcttcattgatgga

SEQ ID NO: 96 - DNA, 368 bp, Bos taurus
  Clone ID: 01-LIB3058-006-Q1-K1-A9
gaggccgtgtaccgcgccatcaccatcgccaggcaggccagctgccccctgtatgtcaccaaggtcatgagcaaggccgcggccgatgtgatcgcccgggccaagcggcgaggggtggtggtgttcggggagcccatcaccgtcggcctgggcgcggacggctcacactactggagcaagaactgggccaaggccgccgtcttcgtcacgtcaccccccatcagcccagatcccagcaccgcggaccacctcaccgccctgctgtccagcggggacctccaggtgactggcagcgcccactgcaccttcaccactgtccagaaagccgttggcagggacaactttacgctcatccccgagggtaccaa

SEQ ID NO: 97 - DNA, 411 bp, Bos taurus
  Clone ID: 01-LIB3058-007-Q1-K1-A1
ttcagtttggccaagccttgacatctataaatacaatattgtgggcatccttttctgtttacataaacatctactaaaatgagatagtgggaggaaagcaagatttgattaaataaactgttctctacattgctcttttcactgtcttatgtactaggttttcttatttttcctcagcacacttcccaaccttttggatattcattttaaatagggaaagctccctacattataaagaatattggcaccatttattttatacaaaggctaaaggttaacttttagaaatgatgaactactttcctatatgtgtttacttgtgcttcatgatatttctggatcattccagtcataaagacttattacatgtaatatttcctgctacctgtgaaaagatatattttaaagaat

SEQ ID NO: 98 - DNA, 362 bp, Bos taurus
  Clone ID: 01-LIB3058-009-Q1-K1-A1
tcgcgagcggccgccctttttttattgttttttttgtttttttttttttttttcattagaggggtattactttattgcaatactcaagaacagggcatactttccttgaaacccggggtcacagttttaatggttgggtggggccacaaatggaggttactcaattacaaccagtttaatgacccattgtgtgtgtcgagcaatttggagattttgtttctgaaattttcttttttgttcttaacctctcatcattgaggctatgttctaatagacatttttgtaaacccacgcgaaatattcagaattagaaggggattaaagagccacttttgggcttgtcgtgtgctattcctgatttt

SEQ ID NO: 99 - DNA, 395 bp, Bos taurus
  Clone ID: 01-LIB3058-009-Q1-K1-A9
cgcgagcggccgcccttttttttttttttttttttttttttttttttttttttttttgtttttttttttttttttttttttttccaacttttactttattaatattactatgcttaagttacatggaaaagacacccaagcagttttgccccattttaggaaaagtttccaatcaaccccaattttggggggacaaataactaggaatggggacatttttgggtcaaaactgacaaggaaaaatgggctttgatgctacggttaatttccaacaaaaatttggcccaatggccagcacaagcatttctaacactgaacctttagcgctggtcacaaattcggatcttttttttgaagctagcaaatcaagggaaaaaaccgggtttttttaaaaa

SEQ ID NO: 100 - DNA, 299 bp, Bos taurus
  Clone ID: 01-LIB3058-010-Q1-K1-A9
agggctttcagcaccatcggatgaccatcggggccatgaatgtggagatcgggaattggacctatgagatgtatgaaggcggtgtgcctgatgatgtaaggggtctactggatgcggactttaacctggaacctgacaaggctaccaacttcaccaaccccgtgtatgccacactgtacatgggcggtcactgaattcgccactgcctggccagcacggatgataagcgagaactactgggccggggccctgtagacgagatatgggaccccttggcatatggtcctacaccatcggac

SEQ ID NO: 101 - DNA, 231 bp, Bos taurus
  Clone ID: 01-LIB3058-012-Q1-K1-A1
agccggtgtacatgtccatgtgcaataagtaaaagggccacatgaacctggtcatcgccaagactgacgccacgggctacgacgtcaccagcgaccgatcaaatgcgaggtcttccccaccatttacttcgcccccagtggggacataaagaacccaattatgcttgaggaccgaaacagacacctgtagcatctgagcaagtttatagaagaacatgccacagaactgag

SEQ ID NO: 102 - DNA, 276 bp, Bos taurus
  Clone ID: 01-LIB3058-013-Q1-K1-A9
ctgggctgggcgtcggcgggcaatggggttgccggcgttgctgctccttgcgctgtgcgccgcaagcgcccgggggctttatttccacatcggcgagaccgaaaagcgctgcttcatcgaagaaatccccgacgagaccatggtcatcgggaactaccgcacccaaatgtgggataagcagaaggaggtcttcctgccctcgacccccggcctgggcatgcacgtggaggtgaaggaccctgaaggcaaggtggtgctctcccggcagtacggctc

SEQ ID NO: 103 - DNA, 301 bp, Bos taurus
  Clone ID: 01-LIB3058-015-Q1-K1-A9
gcagcaggagtcagggtagctgtcccttcatctgctagttaatttccccagaattgaggtcccacccaatccagttgctcctcttcctgctccatctctatgccagcttgccaccctaggctccagcagcattaagcctgtcagacagcacccaccctacacccagcaacactaacagggcactcaccccaaagggtggcctggaggggcatggccagcagcttgggctagaattgggagggaggagagaaagcaaggagggcagagagacctcataaatcaccctgccctccatatcccg

SEQ ID NO: 104 - DNA, 339 bp, Bos taurus
  Clone ID: 01-LIB3058-018-Q1-K1-A9
caagtttcttactatttctgactttgaattatacagaaatttaaattgccttaaatgacatagaaaattggggatacaataatttcacttagatactatgagcctgttcatataattctgattgactactaactttggtttatgtatctattaaaaagctgatactgtagtttgttgtgagatgtttatttttctaacagagcttataacagttatgacaaggcatttaattaatgcatcattttgtttaaaagtaggtgttaaccgatatggaattctatgttttaataaaaatgtgaagatcttagaatgcacacaaggcatggagcttgcaggaga

SEQ ID NO: 105 - DNA, 329 bp, Bos taurus
  Clone ID: 01-LIB3058-019-Q1-K1-A9
gccaagcgccggagcatcgaggtgaaagcccaccaggcctaccacaccaactacctgctgatgaagggctactgcgtccccggcatcgtcagcaaccgcaacctcaaccccaacgacaacatcgtcgtgaactcctgcctggtcaagttccgcctgcgctgcacccccaagcccaccaggctcgcgctcacagacccttctctggaggagctgacggtggggcccttctgcctgcctgacaccttcacgaggctgataaacagcccggaggacacctgcagcttggaggagttcgatcaccatgtggcgctgtctgggtaccagcccgg

SEQ ID NO: 106 - DNA, 389 bp, Bos taurus
  Clone ID: 01-LIB3058-023-Q1-K1-A1
gaaattgttaaggaagtcagcacctatattaagaaaattggctacaaccccgacacagtagcatttgtgccaatttctggctggaatggtgacaacatgctagaaccaagtgctaatatgccatggttcaagggatggaaagtcacccgtaaggacggcaatgccagtggaaccaccctgcttgaagctctggattgcattctgccaccaactcgcccaactgacaaacccttgcgtttgcctctccaggatgtctataaaattggtggtattggtactgtccctgtgggtcgtgtggaaactggtgttctcaaacctggcatggtggtcacctttggtccagtcaatgtaacaactgaagtgaagtctgtagaaaatgccacccaatt

SEQ ID NO: 107 - DNA, 411 bp, Bos taurus
  Clone ID: 01-LIB3058-023-Q1-K1-A9
aaatattggagtttcagcttcagcatcagtccttccaatgaatatttgggactgatttcctttaagattgactggttggatctccttgcagtcctagggaccctaacagttcaaaagcatcgattctttggtccgctttctttatagcccaactctcacatccatacatgactactggaaaaactgtagctttgactagatggacctttgttgataaagtaatgtctctgctttttaatatgctgtctaagatggtcatagcttttctttccaaggagcaagcgtcttttaatttcatggctacagtcaccatctgtagtgattttgaagcccaagaaaatagtctctccccgtttccattgtttccccatctatttgtcatgaagtaatggaccggatgcccatgatcta

SEQ ID NO: 108 - DNA, 355 bp, Bos taurus
  Clone ID: 01-LIB3058-027-Q1-K1-A9
gttctagatcgcgagcggccgccctttttttttttttttgactatctacaaaaatttgttgtctatttacagaagaaaagcatgcgtatcattaaaacaaataaaatgtgttttctcacagcgcagtacatttttgtttaaaaaaatttttttaagctgtatcacagaaacaagacacaaggattttttaaaagagctaaacactcatcattcgaggtgcaatactcatggacatgagttcctgaaacaacagtttgcacgcataaggcattcgaaccaaagagatctgggttttatttcggcagcccctgcattcgtatgtatgggtcctggtgttcgcatttgccattattcc

SEQ ID NO: 109 - DNA, 174 bp, Bos taurus
  Clone ID: 01-LIB3058-029-Q1-K1-A9
atcgcgagcggccgcccttttttttttttttttttttttttttttttttttttttttggttttttttttttttttttattttttttttttttttttatttttttttttttttttttttttttttttttttttttttttttttctgtactaatacaaatacatgattatccattg

SEQ ID NO: 110 - DNA, 381 bp, Bos taurus
  Clone ID: 01-LIB3058-030-Q1-K1-A1
gcggggctcaggcaaggatggacaccatgcggccagaaccacccactatggctccctgccccagaaggcgcagcacggccggccccaagacgaaaaccccgtagtgcacttcttcaagaacatcgtgacaccccgcacacctcctccatcgcatggaaaggggcgaggactgtccctcagcagatttagctggggggctgatggccagaagccaggattcggctatggaggcagagcgtctgactacaaatcggctcacaagggactcaaggggcacgacgcccagtgcacgctttccaaaatcttcaagctgggaggacgagactgccgttccgggtccccgatggcaagacgctgaagcccagctgccctcccagaacc

SEQ ID NO: 111 - DNA, 364 bp, Bos taurus
  Clone ID: 01-LIB3058-032-Q1-K1-A1
aagggattgtggaccagtcacagcaagcataccaagaagcttttgaaatcagcaaaaaggaaatgcaaccaacacatcctatcagactgggtctggcccttaacttctctgtgttctattatgagattctgaactcccctgagaaagcctgctctcttgcaaagacagcatttgatgaagccattgctgaacttgatacattaagtgaagagtcatacaaagacagcacgctaataatgcagttactgagagataacttgacattgtggacatcggatacccaaggagacgaatctgaagcaggagaaggaggggaaaattaacctgcctttcaacttttgtctgcctcattctaaaatttaca

SEQ ID NO: 112 - DNA, 435 bp, Bos taurus
  unsure (394): unsure at all n locations; Clone ID: 01-LIB3058-035-Q1-K1-A9
gaaaagtggattttatatgacaaccagttatgatcagcttggtagctggactaagaagctccaaggcacttcccaaagccaaacttgcaccgaaagatcacggtcattgcttggtggtctgctgcccatcttatccactatagctttctgaatcctggcaaaatcattacatctgagaagtctgctcaacaaattgatgagaagcactgaaaactgcaacccctgccaccagcattggtcaaaagaaggggtccaattcttctccatgacaacacccgactgcacactgcacgaccaacacttcaaaagttgaactatgaagttttgcttcatctgccacattcgcctgacctcttgccaccaaataccacttcttcaagcatcttgacaactnttttgtagggaaaacgcttccacaatcagcaggaagaagaa

SEQ ID NO: 113 - DNA, 374 bp, Bos taurus
  unsure (29): unsure at all n locations; Clone ID: 01-LIB3058-037-Q1-K1-A1
gagacgggtcacctcagccactcgcctcncctatgtctcctcctcagagatggtggtgcgggggccgacgcctgggtcccggcacccgcctgttcctggctcgaatgccgcctccactcccagcccgggtggacttctccctggctggggcactcaactccggcttcaaggagacccgggccagcgagagggcagagatgatggagctcaatgaccgcttcgccagctacattgagaaggtgcgcttcctggagcagcagaacaaggcgctggctgccgagctcaaccagctgcgggccaaggaacccaccaagctggctgacgtctaccaggcggagctgcgcgagctgcgcctgcggctcgatcaactcact

SEQ ID NO: 114 - DNA, 157 bp, Bos taurus
  Clone ID: 01-LIB3058-037-Q1-K1-A9
taaaatccttaatgaagcctgattccaacttgatatggattgtaattatgatggttctcactcagtttgttgcattttacttagtaaaggacttagactggaaatgggtcctgttttgggcatatgccttttgcagctgcgttaatcattcaatgac

SEQ ID NO: 115 - DNA, 430 bp, Bos taurus
  unsure (30): unsure at all n locations; Clone ID: 01-LIB3058-040-Q1-K1-A9
gggtttcttttcttgtactttgtctggtantagtattagcataattctggtatcacaggatgagttaggaggtatttcctctagttctattttctgaaagtgactgtagagacttggtgtgatttcttcctaaaatgtctggtataattcaccagtaaacacatctgggcctgatgctttctgctctcaaaggttattaattattgactcaatttctttaacaggcagagccttttcatattatttacttcttcttagtctagttatggcagcttgtgtctttcaaggagttggtccatttccactaggttatcaaatttgtaggcaaataattaattgtccatagtatttctttattagcattttaatgtacatgggttgcacagtgatgtcctgctgtttcatttctgatattaatgtcttctctctc

SEQ ID NO: 116 - DNA, 272 bp, Bos taurus
  Clone ID: 01-LIB3058-041-Q1-K1-A1
acccacttcatcgaccgaaactatattgttattcacctgaatagcggtttcagagccagggtagcatgcctggctatttgtaaatccagtatgctacttccgttaatgagaacagaaacgtaaactataacctaggggtttctgttggatggatggcaactaacaatgcaggaagaacaacaaagacatgttctccactttcttatttctcaaaacactgttatcttcgtctctctaatcttacgctactaacagattaaacctttaaagca

SEQ ID NO: 117 - DNA, 300 bp, Bos taurus
  Clone ID: 01-LIB3058-043-Q1-K1-A1
cgacccacgcgtccgcgggcgcgtgggggcttgcgggctgccttgcatttccgctctggagcccggggccggggcggcgcggcacggcgcggcggccaaggccgaagcggggcccgacaggcaccaagcgcgccagcctggcagcggggagagccggcggggcgcagcgcggcctggccgcggcaccgtgcgctcccatgacggcagccgtgctccgggagggcgtgctggaaaagcgcagcggcgggctgctgcaagcagggaaacgcaagccctgcgtgcttaacgagcgcgggctac

SEQ ID NO: 118 - DNA, 393 bp, Bos taurus
  Clone ID: 01-LIB3058-043-Q1-K1-A9
gttcagcaaatttatcccactcattcctctacctgaacgaacaacaaaaccatatcctgctgatattgtagttcagttcaaggatgtatatgcattgatgggccaaaacgtgactttagagtgttttgcacttggcaatcctgttcctgatatccgatggcgaaaagtcctagaaccaatgccaagcacagctgagatcagcacctctggagctgtcctcaagatcttcaatattcagctagaagatgaaggcatatatgaatgcgaggctgagaacaatagaggaaaggataaacaccaggcaagaatttatgttcaagcatttcctgagtgggtggaacacatcaatgacacagaagtggatataggcagtgatctctactggccttgtgt

SEQ ID NO: 119 - DNA, 424 bp, Bos taurus
  Clone ID: 01-LIB3058-044-Q1-K1-A1
tcatgattcaccttacctgaagctgcttttctttgggaccccagtttaagtggaggcagtttattagaatttctacccttgttatgttgcaagtctcacattttgcttcctggccccagaaatttgtcaaaagtgcagctcagttttgcagctatttctttaggacttccaaatgctctgagagaaaaatcagatttgaatatcagtcttgttctccgggttcttttcttcttgattttgactttaaactcctcactattttgtcaacattttgatgcttttaagaaaatgtttttatatttcatacggttttaaggtttctttaatggggagggttgacccaaattcccttgtcatcaattacagggagtaaaagttatatattgttttatttatcagatgcaagaaaaatgttcaggcttct

SEQ ID NO: 120 - DNA, 448 bp, Bos taurus
  unsure (424): unsure at all n locations; Clone ID: 01-LIB3058-045-Q1-K1-A9
cggacgcgtgggcggacgcgtgggcgatctacgtccccctcgcccccctcacctgtctcacgcttctcgtttattctcccacagcgctccggacaaccccagtccgcagggctctcggtgtaccagccccgcctcctgtaaagcctatctacattcgctgtcttccttcctcaccttccgtttcccctccaacccaccgcttcgtggtctcctctggtccgttgaactccaccagctctcaggagccccggcggccccggatcgtgaacgcctggacagaggaggtggaggagctgccctggagcagcacgtcttccgcagggtcacctggcgtcttgcgcctgccccgagctgcgacgctgctgcctggcttgggccgaagccatcatctggaatcctccgtggtccaggacctcgaacccgncaccccagcaccctctgggcccac

SEQ ID NO: 121 - DNA, 420 bp, Bos taurus
  unsure (317),(330): unsure at all n locations; Clone ID: 01-LIB3058-049-Q1-K1-A1
gagacagttaatgtaatgtttctctgttttatattaaaccttttgttttttgtctttacacatctgatatgttaggggaagaggttaacagattgaaatcatatgggtagagcatcactagaagaaaaggtttaatatattacagagaaacagttaatgtaatgttttttaaaatggcttttttgttctctgtgtggaaggcaaggcaggttgccagtgctaaatgatttaataatattgtaattctgtatttctttgtggggggaagacgttttcttgttttctgtttttttgttttgttttgttttgtcttgaanacaatagacattngtagaatatggagactaactcctaggagttgttttactctgtcaggtgactgaagtcactgggattcactaattttctctgagagaaccg

SEQ ID NO: 122 - DNA, 443 bp, Bos taurus
  Clone ID: 01-LIB3058-052-Q1-K1-A9
ctcgactttgtctttgctgtgaaaaatgaaaaccgattctatctgaaggaggtgaatgtcagcatgattttggttaatggctctgtttacagcatttcaaataccaatctcagctactgggatgctcccctgggaagttcttatatgtgcaacaaagagcagaccgtttccgtgtctggagcatttcagataaatacctttgatctaagggttcagcctttcagtgtgacagaaggaaagtattctactgctcaagactgcagtgcagatgacgacaacttccttgtgcccatagcggtgggagcagccttggcaggagtgcttattctagtgttgctggcttactttattggtctcaagcgccatcatgctggatatgagcaattttagaaacctgcattctgattgattatataaaaatacatgcacataacaagattttc

SEQ ID NO: 123 - DNA, 151 bp, Bos taurus
  unsure (18): unsure at all n locations; Clone ID: 01-LIB3058-053-Q1-K1-A1
cggacgcgtggggcctgngcatcgccctggggggcccccctactcccaccccgagtctctggtgcccccagcctgcaggaggccctgccgctgccccagctgtcctcctggtgggccctagcttaataaagatttctcaagcttcatggcc

SEQ ID NO: 124 - DNA, 270 bp, Bos taurus
  Clone ID: 01-LIB3058-053-Q1-K1-A9
tcgcggacgcgtgggaaaaaaaaaaaaaatttaaaaaggaagcaaaaaaaaataaaaacaaggcataaaaaaaaaataaataaagaacaaaaaaaaataaataaaaaaaaacaaaaatgagaaaaaataaaaaaagaaaaacacacaaatcaacatgagaaaatatacacaggaaaacaaataaataagaaaaaaacaaatacaaaatataacaaaaaaatgtaaaaaacaaaagagcaagaaccaaatagatttaaaaacagggataac

SEQ ID NO: 125 - DNA, 356 bp, Bos taurus
  Clone ID: 01-LIB3058-054-Q1-K1-A1
caagaagctgattgagcgcaaacaggctcagatccgaaaggtctaccccgggctcagctgcttcaaggagggtgtgcgccagatccctgtggagagcgtccctggcattcgagagacaggctggaagccactggggaaggaaaaagggaaggagttgaaggaccctgaccagctctacacaaccctcaaaaacctgctggcccagatcaagtcccaccccagtgcctggcctttcatggagcccgtgaagaagtcggaggccccagactactatgaggttatccgcttccccatcgacctgaagaccatgacagagaggctgcgcagccgctactatgtgacccggaagcctcttg

SEQ ID NO: 126 - DNA, 430 bp, Bos taurus
  Clone ID: 01-LIB3058-057-Q1-K1-A9
gttgcagaacacctcctgtcagagggttcaccacccaccttctcctgtgcctcacctccagcattgctctggaagcttctaaccattctttgtgtgtctccgcttgttcccacagtccccagggaaaagcctttcgctctaaagtggagttgattgcgtacttcgaaaaggtaggcgacacctccctggaccctaatgattttgacttcacggtaaccgggagagggagcccctcccggcgagaacagaaaccacctaagaagcccaaatctcccaaagctccaggaactggcagaggtcggggacgccccaaagggagtggcaccacgagacccaaggcagctgcgtcagaaggtgtgcaagtgaaaagggttctggagaaaagtcctggaaagctactcgtcaagatgcctttcaagctgcgccgggc

SEQ ID NO: 127 - DNA, 327 bp, Bos taurus
  Clone ID: 01-LIB3058-058-Q1-K1-A1
gttaatctccatgtatatatatatgcactcttccatataagtgcatacacagcacacacacattcatatgagtttggatatgagtttcttaattggcaatgacccaaatctcttccacaagacttaaaaccaaattcaacatagagaagaaaacggtcaaacatatagattatatggaaattaaattgtgtcaaaattctaagaaacagttgacagattttgatgcaagttgaggtagattgaaaacttagaatatggttttgatgtgtattttgcaagatcaaaaactggattttaagtattttaagcttgttttaatggtaagaa

SEQ ID NO: 128 - DNA, 420 bp, Bos taurus
  unsure (266),(396),(409): unsure at all n locations; Clone ID: 01-LIB34-001-Q1-E1-A1
cccaacaaaactttggcacaatgaagtgggtgacttttatttctcttctccttctcttcagctctgcttattccaggggtgtgtttcgtcgagatacacacaagagtgagattgctcatcggtttaaagatttgggagaagaacattttaaaggcctggtactgattgccttttctcagtatctccagcagtgtccatttgatgagcatgtaaaattagtgaacgaactaactgagtttgcaaaaacatgtgttgctgatgagtcncatgccggctgtgaaaagtcacttcacactctctttggagatgaattgtgtaaagttgcatcccttcgtgaaacctatggtgacatggctgactgctgtgagaaacaagagcctgaaagaaatgaatgcntcctgagccacanagatgatagcc

SEQ ID NO: 129 - DNA, 431 bp, Bos taurus
  Clone ID: 01-LIB34-002-Q1-E1-A1
acccacgcgtccagaattcaaggacctggatgagaagagccgacaagccaagctggaggagttagtgtgggcgatcagaaagctaactgacatagcccgccacatccgagccaagcgagacagctgcggtgccctggagctggaaggagtggaggttcgcatccagctcgatgagaaaaagaacattcacgacctcatccccaagcagcccctggaagtccacgagaccgtggctgaatgcatgatcctggccaaccactgggtagccaagaagatctgggagagcttccctcatcaagccttgctgcgccgacaccctcctccacatcaggagtttttctccgaactccgagagtgtgctaaagcaaagggcttcttcatagatacacggtccaataaagcactggctgattctctggataatgcaaatg

SEQ ID NO: 130 - DNA, 342 bp, Bos taurus
  Clone ID: 01-LIB34-002-Q1-E1-A9
acaaggattctgaagctgccgtaaagcttatcaatgaatatgtgaagaataaaacgcatggaaaaattgagaagctcttaaatgatcttgacgtgctcacaaatttaatcttgttgaattatatcttctttaaagcccagtggaagacgccatttaatcctaaccatacttacgaatcagagttccacgtgagcaagaacgagagggtgaaggtacccatgatgacccttcgcctggaaaccccttacttccgggacgaggagctgggctgcacgctggtggagctcacgtacaccagcaatgacagcgccctcttcatcctccccgatgagggcaaaatgc

SEQ ID NO: 131 - DNA, 360 bp, Bos taurus
  Clone ID: 01-LIB34-003-Q1-E1-A9
gaacattttaaaggcctggtactgattgccttttctcagtatctccagcagtgtccatttgatgagcatgtaaaattagtgaacgaactaactgagtttgcaaaaacatgtgttgctgatgagtcccatgccggctgtgaaaagtcacttcacactctctttggagatgaattgtgtaaagttgcatcccttcgtgaaacctatggtgacatggctgactgctgtgagaaacaagagcctgaaagaaatgaatgcttcctgagccacaaagatgatagcccagacctccctaaattgaaaccagaccccaatactttgtgtgatgaatttaagggagatgaaaagaagttttggggaaaa

SEQ ID NO: 132 - DNA, 417 bp, Bos taurus
  Clone ID: 01-LIB34-004-Q1-E1-A1
cggacgcgtgggcgagcagcggcggcggcgcggagaagcgcagcggaggttttgctggtttcggaccccagcggccggatggtgaaatcctccctgcagcggatcctcaacagccactgcttcgccagagagaaggaaggggataaacccagcgccaccgtccacgccacccgcaccatgccgctccttagcctgcacagccgcggaggccgcagcagtgagagttccagggtctccatcaactgctgtagtaacctgggtccagggcctcggtggtgctcctgatgtccctcacccacccctgaagatcccaggtgggcgagggaatagtcagagggatcacaatctttcagctaatttagtttactctgataatcggctgaatgttacagaggaactaacgtctaataacaagac

SEQ ID NO: 133 - DNA, 383 bp, Bos taurus
  Clone ID: 01-LIB34-005-Q1-E1-A1
gtgaattcatgggactcatcaaaggtcactatgaggcaaagcaaggtggatttctgccagggggaggcagcctgcacagcccaatgactccccatgggcctgatgccaactgctttgagaaggccagcaaagccaagctggcacctgagaggattgctgatggcaccatggcatttatgtttgagtcttctctaaatatcgccgtcaccaagtgggggctgaagacctctaattgtctggatgagaactactacaaatgctgggaacctctcaagagccgcttcacccccaattccaggaaccctgcagaaactaactaatatcggagcatgatgccatagttgagaatggatttgtgtaatttccttcagaatctcatgccc

SEQ ID NO: 134 - DNA, 383 bp, Bos taurus
  Clone ID: 01-LIB34-006-Q1-E1-A1
gataatcaagatacaatctccagtaaactgaaggaatgctgtgataagcctttgttggaaaaatcccactgcattgctgaggtagaaaaagatgccatacctgaaaacctgcccccattaactgctgactttgctgaagataaggatgtttgcaaaaactatcaggaagcaaaagatgccttcctgggctcgtttttgtatgaatattcaagaaggcatcctgaatatgctgtctcagtgctattgagacttgccaaggaatatgaagccacactggaggaatgctgtgccaaagatgatccacatgcatgctattccacagtgtttgacaaacttaagcatcttgtggatgagcctcagaatttaatcaaccaaaactgtga

SEQ ID NO: 135 - DNA, 320 bp, Bos taurus
  unsure (303): unsure at all n locations; Clone ID: 01-LIB34-006-Q1-E1-A9
gtgtcccctcatccccttcctgtttcctcgtagtgcctcagacagccccactgttcttctgaacactttctggtccaggaaaccaagctgtgtgtgtctgtcccataaaacgccatgtggctgtacctgatggtcctcgtgggcctgtactacctcctacgctggtaccgggagaggcaggtggtgagccacctccgggacaagttcgtcatcatcacaggctgtgactcgggcttcgggaacctgctggccaagcagctggacctgagaggcttgagggtcctgtctgcatgtctgacaganatgggggctgagcaact

SEQ ID NO: 136 - DNA, 407 bp, Bos taurus
  Clone ID: 01-LIB34-007-Q1-E1-A1
acagctcaccatggctcgggcattgagagtgccagttgcactgtggctgttgggcttgtgctggtctttggctaaagcccaccctctggctagagctcctgagcttgggcacggagttgaaggtgggaatgtggccaagccggatccagaagtgacggaacgctgctcggatggctggggctttgatgctaccaccctggatgagcatgggaacatgctgtttttaaaaggggagtttgtgtggaagggtcatgcctgggcccggcagttgatctcagagaggtggaaggatgcccccagtcccgtggatgctgcattccgctatgatcgtaacagtgtccttctgatcaagggggacaaattctgggtatatcctcctgaaaaaggggaggaatatcaaaagttgc

SEQ ID NO: 137 - DNA, 382 bp, Bos taurus
  unsure (360),(371): unsure at all n locations; Clone ID: 01-LIB34-008-Q1-E1-A1
tgattgtctccaacatgaagcttggtcatgtcatcctcttacttttgtgcttctacttaagtttttgtgaggataattttagaaaacgaggaaagtcaaaggcagtgaagaaatcagaggctcaccatgcccctgaagcaagtctgagcaaggagacagaagcttcatctgaagtgaagcccacttcaacacaagacacatctcaaaaagatttcgtggataaaaagtgcttaactgaaaaacacacacatctctcctgcaacaaagtcttctgccaaccgtggcagaaatgcatcgatgggacgtgtctttgtaaacttccttatcagtgcccgaagaatggtaccagggtgtgttcanctaatgggaanagctactcaac

SEQ ID NO: 138 - DNA, 413 bp, Bos taurus
  unsure (382): unsure at all n locations; Clone ID: 01-LIB34-008-Q1-E1-A9
agcggaggcgtggggcttttaggttctgtagctggtcgcaatggcaagcaaaggagggtacatcgtgcttgggctcctgttcctggctgtcctctgccaactcggtcacagcctgcagtgctacagctgtattaaccaagttaactgcacttcaatcgtcaattgttcacataatcaagatgcttgtctcttcgttaaggctgtgccgctaaaattttaccaccagtgttggaagtacgaagaatgcagttttgagttcattgcaaaagccttaggggagaaggagctccactatgactgctgccagaagaacctgtgtaacaaaagtggcgggaggagcgtatccgagaagatactgctgctgctcaacctgctgctgganggagtctgccacttttatcgctaaatctatg

SEQ ID NO: 139 - DNA, 131 bp, Bos taurus
  Clone ID: 01-LIB34-009-Q1-E1-A1
aaaataagacaaatgaaaactcagagcttattcatctgttttccttttctgttggtgttaaaccaacactctcactaaagaacgtaaatttctttaaatattttgcttcttttgtttgtgctacaattaat

SEQ ID NO: 140 - DNA, 399 bp, Bos taurus
  unsure (377): unsure at all n locations; Clone ID: 01-LIB34-009-Q1-E1-A9
ctggcacttagttctacccctgaacgagtcccttctctttcctcacagccccaggccactaaatctggggctgaggggaccgatattgacgcagaatcccttcacaattacggtgggggcggcagttcacaaagcctgaagttgagaactcgagagactaccctgacttggcaaaggaagcagatggcagtccaccaggctccaccgtccctgggattctccagacaagaacactggagtgggttgccatttccttctccaatgcatgaaagtgaaaagtgaaagtgaagtcgctcagtcgtgtccgaccctcagcgaccccatggactgtagcccaccaggtccctccgtccatgggattttccaggactcctcanaaagaaatgaagacccaagaat

SEQ ID NO: 141 - DNA, 365 bp, Bos taurus
  unsure (280): unsure at all n locations; Clone ID: 01-LIB34-010-Q1-E2-A1
gaagagcttcttaaatcagagagaaactttgagagaaacttccaaggcaaatttcccaaagaaaatgggcaccaagggaaaaattattaaatgcaaagcagctatcgcctgggaagcaaacaagcccctcagcattgaagaggttgaggtagctccccccaaggatcatgaagttcgaatccagataattgccactgctctgtgccattctgatgcccatattctccatcctcaatttgggggggggttttcccagtgattcttggccatgaggctgcangaattgtggaaagtattgggccaggagtgagcaacttcaaaccaggtgacaaagtaattccactcgacgcacctcaatgtggaaa

SEQ ID NO: 142 - DNA, 402 bp, Bos taurus
  Clone ID: 01-LIB34-010-Q1-E2-A9
gctggctcgaatgtcatgcagaccttcaccttctatgccagtgaagacaagctggagaacagggggaactatgttgcagagaaaatatccgggcagaaagtcaatgaagccgcttgtgacattgcccggcaagtggctgatgaaggagatgctttggtagcagggggtgtgagccagacaccttcgtaccttagctgcaagagcgaaactgaagtcaaaaaagtctttcagcaacagttagaggtcttcgtaaagaagaacgtggacttcttgatcgcagagtattttgaacatgttgaagaggctgtatgggcagttgaagccttgaaagcatcagggaaaccagtggcagcaactatgtgcatcggcccagagggagacttgcacagcgtgacccctggc

SEQ ID NO: 143 - DNA, 414 bp, Bos taurus
  Clone ID: 01-LIB34-011-Q1-E1-A1
attccaggctcggagccccgggcccgccgacaccatgagttggtcctcgcaccctccgagtgtaatcttctacattctttcattgctttcttcagcatgcctggcatatgttgctacccgagacaactgctgcatcttagatgaaagatttggtagttattgcccaactacctgtggaattgcagatttcctgaataattaccaaaccagtgtagacaaagatctacgaactttggaaggcatcttatatcaggttgagaacaaaacatcagaagccagagagctggtcaaagcaatccaaatcagctataaccctgatcaaccatcaaagccaaataacatagagagtgctaccaagaattccaagagtatgatggaagaaattatgaaatatgaaacactgatatcaacaca

SEQ ID NO: 144 - DNA, 394 bp, Bos taurus
  Clone ID: 01-LIB34-011-Q1-E1-A9
aacattccaggctcggagccccgggcccgccgacaccatgagttggtcctcgcaccctccgagtgtaatcttctacattctttcattgctttcttcagcatgcctggcatatgttgctacccgagacaactgctgcatcttagatgaaagatttggtagttattgcccaactacctgtggaattgcagatttcctgaataattaccaaaccagtgtagacaaagatctacgaactttggaaggcatcttatatcaggttgagaacaaaacatcagaagccagagagctggtcaaagcaatccaaatcagctataaccctgatcaaccatcaaagccaaataacatagagagtgctaccaagaattccaagagtatgatggaaagaaatatgaaa

SEQ ID NO: 145 - DNA, 352 bp, Bos taurus
  unsure (251): unsure at all n locations; Clone ID: 01-LIB34-013-Q1-E1-A1
atcgcttcgtggccttggtccttctcgggctgctgtcgctgtctggactggacgccatccagcgtcctccaaagattcaagtgtactcaagacacccaccagaagatggaaagccaaattacctgaactgctatgtgtatgggttccatccaccccagattgaaatcgatttgctgaagaatggggagaagattaaatcggagcagtcagacctgtctttcagcaaggactggtctttctacctgctgtcncacgctgagttcactcccaacagcaaggatcagtacagctgccgagtgaaacacgttactttggaacaaccccggatagttaagtgggatcgagacctgta

SEQ ID NO: 146 - DNA, 326 bp, Bos taurus
  Clone ID: 01-LIB34-014-Q1-E1-A1
aggacgcgtgggccaggatctgctccgctgccgtgtcctgacttctggaatctttgagaccaagttccaggtggacaaagtcaacttccacatgtttgacgtgggcggccagcgcgatgaacgccgcaaatggatccaatgcttcaatgatgtgactgccatcatcttcgtggttgccagcagcagctacaacatggtcattcgggaggacaaccagaccaaccgcctgcaggaggctctgaacctcttcaagagcatctggaataacagatggctgcgcaccatctctgtgattctgttcctcaacaagcaagatctgctggctg

SEQ ID NO: 147 - DNA, 413 bp, Bos taurus
  Clone ID: 01-LIB34-015-Q1-E1-A1
ttctagtcttaggaaacaaaatatttattgaaatggtatgtagataaattatcaccggcataaaactgttagtggagttctcaacatgggttctttttacttttaaagtgaagtgaggctttgcaagtccattgtcccataggaaaaatattatctttttcttttcagataaagttctttaaaaaagtaaatcacttttgaaatggtcttttatacgtctccagcctgtttggctccccccagttggtgctgctgtccttctccgatggcaagtctgttaagtgggattatcttcatggtggttttcttcatggaataccaccgggatttccatgtggcccaaataatgccattatcataaccattaggagtagatgtttttgagtaagtgccaccttgataataaactccat

SEQ ID NO: 148 - DNA, 402 bp, Bos taurus
  Clone ID: 01-LIB34-015-Q1-E1-A9
agtcaccagccctgacctaggacagtgaatcgataatggcactctccatcacgcggggccttctgctgctggcagccctgtgctgcctggcccccatctccctggctggagttctccaaggacacgctgtccaagagacagatgatacatcccaccaggaagcagcatgccacaagattgcccccaacctggccaactttgccttcagcatataccaccatttggctcatcagtccaacaccagcaacatcttcttctcccccgtgagcatcgcttcagcctttgcgatgctctccctgggagccaagggcaacactcacactgagatcctgaagggcctgggtttcaacctcactgagctcgcagaggctgagatccacaaaggctttcagcatcttctcc

SEQ ID NO: 149 - DNA, 417 bp, Bos taurus
  Clone ID: 01-LIB34-016-Q1-E1-A1
cttttaatttcatggctgcagtcactgtctgcagtgattttggagcccaagaaataaaatttgccactgtttccattttctccccatctatttgccatgaagtgatgagatcagttgccaggatctcagttttgtgaattttgagttttatgccagctttttcactttcctctttcaccttcatcaaatagctctttagttcctctttgctttctgccattaaggtggtattatctacatatctgagattgttgatatgtctcctggcaatcttgactccagcttgtggttcatccactccggcattttgcctgatgtactcaagttaaataagctaaggtgacaatatacagccttggtgtactcctttcccaattttgaaccagtccattgaagacttaactggtagtaaaatat

SEQ ID NO: 150 - DNA, 400 bp, Bos taurus
  Clone ID: 01-LIB34-017-Q1-E1-A1
atcaaatacatccaaattaagtttgttcgtggcagtaccttcaaagaaatccccataactgtctacaagccaattattaaaaaatacaccaagatcattgatggagtgcctgtggagataactgaaaaagaaacaagggaagaacgaatcattacaggtcctgaaataaaatacactaggatttcaactacaggtggagaaacagaagaaactctgaagaaattgttgcaagaagacacacctgtgagaaagatacaagccaacaaaagagttcaagcatctagaagacgatccagggaagatcgtcctcaatgaaaatccagacaccagacctcaaagtttatacaaccctaaaccaacaacctggtcttacaggaaaaatatgaaagccactttgatg

SEQ ID NO: 151 - DNA, 405 bp, Bos taurus
  unsure (374): unsure at all n locations; Clone ID: 01-LIB34-018-Q1-E1-A1
aggttcaacatgtgtgggaaatacagcacccttatcagaagcagttttaaatgcagtaaaacagggtgatttggttacttgtggggttttatctggaaataaaaattttgaaggtcgtctttgtgattgtgttcgtgccaattatcttgcctctccacccttagtggtagcttatgccatagcaggcacagtgaatatagatttccagacagagcctttaggtactgaccctactggcaagaacatttacctgcatgatatttggcctagtcgagaagaagttcatcagatagaggaagaacatgttgtattatccatgtttaaagcattaaaagagaagatagagatgggaaataagcggtggaattctttanaagcaccagattcagttttgtttccatggga

SEQ ID NO: 152 - DNA, 393 bp, Bos taurus
  Clone ID: 01-LIB34-018-Q1-E1-A9
agaagacttctacacatatggctcttctgtcacctacagctgaccgtgacttctcaatgttaggcaaagcctccatttcttgcagagtggaaaataagacaataggtgtttggagtccaagccctccttcttgtaaaaaagtcatttgtgttcaaccagtggttaaagatggaaaaataacctctgggtttggacccatctatacttatcaacagtctattgtatatgcctgtaataaaggttttcggcttgaaggcgatagtttaatccattgtgaagctgataatagctggaatcctcctcctcccacttgtgaactcaatggttgtcttggcttaccacacatccctcatgccttgtgggaaagatatgaccaccagacacaaacagaac

SEQ ID NO: 153 - DNA, 392 bp, Bos taurus
  Clone ID: 01-LIB34-019-Q1-E1-A1
gacatatgcttacttcattggtggagatgctggagatgcatttgatggctacgattttggcgatgattctagtgacaagtttttcacatcccataatggcatgcagttcagtacttgggacagtgacaatgataagtatgatggcaactgtgctgaacaggatggatctggttggtggatgaacaaatgtcacgctggccacctcaatggagtttattatcaaggtggcacttactcaaaaacatctactcctaatggttatgataatggcattatttgggccacatggaaatcccggtggtattccaagaagaaaaccaccatgaagataatcccacttaacagacttgccatcggagaaggacagcagcaccaactgggggggagcaaac

SEQ ID NO: 154 - DNA, 379 bp, Bos taurus
  Clone ID: 01-LIB34-020-Q1-E1-A9
agcggacgcgtgggggccggagaaagagattcccaactgacaaagcatacttcattgctaaagaagtctccaccactgagaggacatatctgaaggatcttgaagtcatcacttcgtggtttcagagcacagtgagcaaagaggactccatgcccgaaaccttgaagagtctcatattcccgaattttgaacctttgcacaaatttcacacaaattttctcaaggaaattgagcaacgacttgccctgtgggaaggccgctcgaatgcccacatcagaggagattaccagagaatcggagatgtaatgctgaagaagattcaggggatgaagcaactggccgcccacttgtggaagcacagcgaggcgctggaggcgct

SEQ ID NO: 155 - DNA, 410 bp, Bos taurus
  Clone ID: 01-LIB34-020-Q1-E2-A1
aaggccccgagggcgacagtaccgaaagcacagtaatcactggtgtcgatattgtcatgaaccatcacttgcaggagaccagcttcacaaatgaagcctacatgaagtatatcaaagattacatgaactcaatcatagggaagcttgagtaacacacaccagagatagtaaaaccctttacgacatgggctgcacagcacagcaagcatatccttgccaaattcacaaactatcagttctttagtggtgaacacatgaatccagatggcatggttgctctgctggactaccgttaggatggtataaccccatatatgactttcattatggatggtttatagatgcaaaacagttcacagagttggcagttacttcggactaatcacctgtcgtcataactggctggctac

SEQ ID NO: 156 - DNA, 400 bp, Bos taurus
  Clone ID: 01-LIB34-020-Q1-E2-A9
aggacgcgtgggggccggagaaagagattcccaactgacaaagcatacttcattgctaaagaagtctccaccactgagaggacatatctgaaggatcttgaagtcatcacttcgtggtttcagagcacagtgagcaaagaggactccatgcccgaaaccttgagaagtctcatattcccgaattttgaacctttgcacaaatttcacacatattttctcaaggacattgagcaacgacttgccctgtgggaaggccgctcgaatgcccacatcagaggagattaccatagaatcggagatgtagtgctgaagaacattcacgggatgaagcaactgagctgctcacttgtggaagcacagctaggccctggaggcgctggacatcggcatcctgggcccc

SEQ ID NO: 157 - DNA, 371 bp, Bos taurus
  unsure (176),(254),(349): unsure at all n locations; Clone ID: 01-LIB34-021-Q1-E1-A1
gaggacattaagttttccacacgtaaatttctggatggcaatgaaatgacactagctgactgcaacctgctgcccaagctgcacattgtcaaggtggtggcaaaaaaataccgcaacttcgatattccaaaaggaatgactggcatctggagatacctaactaatgcctacagtanggatgagttcaccaacacctgccccagtgataaggaggttgaaatagcatacagtgatgtagccaagagacttaccanataaaagagcacttatgagagaagcgtcttcacatcttcccctgactaagaacatactttccctaacagactgctcctcttcctagaaagtaganactttatttggcacgaacatgc

SEQ ID NO: 158 - DNA, 355 bp, Bos taurus
  Clone ID: 01-LIB34-021-Q1-E1-A9
gattggaccagccgcctttggggctgactccctcctttgcagtcatttcctgcctcatttcctgtaagatctagaaagaattcatatcctgtccattggaattttttatcacatatattcagactcttatgggccacgatttgattcctgcactacacacacttcattaaggggctattactaaccggctaaaaatctgtgattttttgtttgcttctttttaacagactcccctagccaaagtcctcttttctgcttattacggagaccacaacatcttcactaaatgtttaaatggacacctctactacattcttaaaatagaaatttagtaccctcattccttaagcatttt

SEQ ID NO: 159 - DNA, 197 bp, Bos taurus
  unsure (42): unsure at all n locations; Clone ID: 01-LIB34-024-Q1-E1-A1
tcatagtacatcacaatactctagagtgagtcgtattattangctaatgctgtttgagttgaaaagagaaatgaaaactcagagcttattcatctgttttccttttctgttggtgttaaaccaacactctcactaaagaacgtaaatttctttaaatattttgcttcttttgtttgtgctacaattaatagagaatg

SEQ ID NO: 160 - DNA, 396 bp, Bos taurus
  Clone ID: 01-LIB34-026-Q1-E1-A1
cttctcccgactcgacgtcgtcgttacagggaagaagaagcgggtgagaaaaacttctgtttccaccgttttgcccatttctgcagatttgttccgaggccgaggcatctccaaggcagtgatggctctccagaggacccaggcctttcttctgctcttgctgctgaccctgctggggctagggctggtacagccctcctatggccaggatcgcatgtaccaacgattcctgaggcaacatgtggaccctgatgagacaggaggcaatgacagctactgcaatttgatgatgcagagacggaagatgacttcacatcagtgcaagcgcttcaacactttcattcatgaagatctttgggacatccgtagtatctgcagcaccaccaacattcagtg

SEQ ID NO: 161 - DNA, 303 bp, Bos taurus
  Clone ID: 01-LIB34-027-Q1-E1-A1
ttactttgatatctaagtgtaatagatatcaccgttccggacgcttcagacttctcgagtcaacagcgaccgggtcttgcaagtgtcccagattgctcaagatcgaggcctggaaaaccagccaccagagattgcacaactaccgatctcaataaaggggtaaagaatgtctccatagtgatccacactcgcccgatcacgccagcctatggccccgtggttacagcccagtatgactgccttggcgtgtgtgcatcccacatctaccaagagccccgacctggagcctgttctgagatatgc

SEQ ID NO: 162 - DNA, 273 bp, Bos taurus
  Clone ID: 01-LIB34-027-Q1-E1-A9
agcctccacccggggcaggatgactgtcccggcgcagaagggaaaggggcccctaggagagtgacaataggacttgcggaggcctcgcgcctggcagacggcaggccaggtctggctggtactcctgtatgggcacaagcgtctcagctatcagacggtgttcctggcgctctgtctgctctgggctgccctgcgtaccaccctgttctctttctactttcgagacacaccccgagccaaccacctggggggccctgccctttttggcttctc

SEQ ID NO: 163 - DNA, 403 bp, Bos taurus
  Clone ID: 01-LIB34-029-Q1-E1-A1
gaagaatttgctgctgcgcaagagttgctggggtgcatgggctcaaatgtggtgtattgtggagctgttgggacagggcaggctgcgaagatctgcaacaacttgctgttagctattagtatgattggaactgctgaaactatgaatctgggaatcaggttagggcttgacccaaaactcttggctaaaatcctaaatatgagctcaggacgatgttggtcaagtgacacttataatcctgtacctggggtgatggatggagttccctcggctaataactatcacggcggattcggaacaacactcatggcgaaggatctgggattaacacaagactctgccaccagcacgaagagcccaatccttctgggcagtcaagcgcatcagatctacagggtgatgt

SEQ ID NO: 164 - DNA, 379 bp, Bos taurus
  Clone ID: 01-LIB34-029-Q1-E1-A9
agacagcacagccatgctggaggcactgggctccctggtggctgccctctggaccacgctccgtcctggcattgtcctactgggggcctttgtctttctcctctttgctgatttcctcaaaaggcagcacccaaagaactacccaccagggcccctgcgcctgcccttcataggcaatttcttccacctggacttggggaaagggatcttggttcctcagcaggttgtgaagaaatatgggaacattattaggctagattttggtgtaattcatttcatcgttataactggattgccctatatcaaagaagcccttgtcaaacaggaacaaaactttgtaaaccgccccatgatacctcttcagaaacatatcctttac

SEQ ID NO: 165 - DNA, 358 bp, Bos taurus
  Clone ID: 01-LIB34-031-Q1-E1-A1
cttcgtgaaacctatggtgacatggctgactgctgtgagaaacaagagcctgaaagaaatgaatgcttcctgagccacaaagatgatagcccagacctccctaaattgaaaccagaccccaatactttgtgtgatgagtttaaggcagatgaaaagaagttttggggaaaatacctatacgaaattgctagaagacatccctacttttatgcaccagaactcctttactatgctaataaatataatggagtttttcaagaatgctgccaagctgaagataaaggtgcctgcctgctaccaaagattgaaactatgagagaaaaagtactgacttcatctgccagacagagactcaggt

SEQ ID NO: 166 - DNA, 383 bp, Bos taurus
  Clone ID: 01-LIB34-033-Q1-E1-A9
ggtgaccattcagtaccgcctgggcatctggggattcttcaccacaggggacgaacacagtccggggaactggggccacttggaccaagtggccgcgctgcactgggtccaggagaacattgccacctttggaggggatccacgctctgtgaccatctttggagactcagcaggagcagaaagtgtctccattcatgtgtgagcccccctggccaggaaactcttccaccgggccatctctgagagcggcgtggccctcatttccaccctggtcaatacggactcgaaggctgcagcttagcaaattgctgtcactgctggctgtaaaaccaccacctcagcagtccttgttcactgcctgcgccacacgacacaggacgaac

SEQ ID NO: 167 - DNA, 430 bp, Bos taurus
  Clone ID: 01-LIB34-035-Q1-E1-A9
aatcgtgcgctggctcaacgagcagagatactatggaggtggttatggctccacgcaggccactttcatggtgttccaagccttggcccaataccagaaggatgttcctgatcacaaggagctgaacctggatgtgtccatccaactgcccagccgcaactctgcggtcaggcatcgtatcctctgggaatctgccagcctcctgcgctcagaagagactaaggaaaatgagcgtttcacagtaaaagctgaagggaaaggacaaggcaccttgtcggtactgaccgtgtaccatgccaagctcaaaggcaaagtctcctgcaaaaagttcgacctccgggtttccatacgcccagcccccgaaacagtcaagaagcctcatgacgccaaaggttccatgatccttgacatctgttccaagtacctggga

SEQ ID NO: 168 - DNA, 413 bp, Bos taurus
  Clone ID: 01-LIB34-036-Q1-E1-A1
atttgaaagtaacaagaatctccttttctcagtatattcatctgtggccagaagaacacagagaaaatcagcatgagtactaccgggaaagttatcaggtgcaaagcagccatagtctggaagcctggtggatcattttccattgaggaggtagaagtggctccaccaaaggcaaaagaagttcgcataaagatggtggccacggcgctctgtgggactgagatgaaaatgttgaaggataaaaatcttcagcaccaacactaccctatcattatgggccatgaaggagctggaatagtcgagagtgtgggagaaggagtgagcacagtgaaagcaggagataaagttatcgcactctttctaccacagtgtggtgaatgcacctcttgccttaattctgcagacaatttttg

SEQ ID NO: 169 - DNA, 255 bp, Bos taurus
  Clone ID: 01-LIB34-038-Q1-E1-A1
aggacgcgtggggggtgctcctcttgagtcagccctatccacggcagagatgttttccgtgagggacctctgcctggtcctgagtttggtgggtgcaattaggacagaagatggtagtgatcctcccagtggtgacttttgacctgaaggacgaggggtgcgtggcccaagacttgtggaatgacagcaatctgcctgcagagagacaggctggcccttctgctctgatgaagactggaatacagactgcccttc

SEQ ID NO: 170 - DNA, 299 bp, Bos taurus
  Clone ID: 01-LIB34-039-Q1-E1-A1
gatgactttgggacgatgacatgggtaactttgacttctcttcaccatctcgtcatctcagcatactccgctggtgtgatgcgccaagatacatacaggagttagatcagccacccgtgcacatagttgggacacgatcaatttacaggcctgatacaggttcccttttctcaatatcaccagcagtgtccacttgcagtacgtgtaaaatcagtgaactcactaactgagtttgcaaacccatgtgttgctcagaaatctcatgcaggctgttaaaactcacatcacactctctttgg

SEQ ID NO: 171 - DNA, 354 bp, Bos taurus
  Clone ID: 01-LIB34-039-Q1-E1-A9
gttctagatcgcgagcggccgccctttttttttttttttgcaatagatgaaggccgtctttatttctgagttttatcacaaagtaaatcaagtcccctgaaactgtgggacacagctccttgaagaacaaagcccaggtccttaggggaagtcaagctccacttatggtctcatctctgagcacaaccttcagaacaatgggtttttccggtcttaaaagtccttgactttttattttcaaggggatctgtgtttctttacaaggtttgaaggagaagttctgcaggactctgacaacagcaagtttcatgttcatgatagcaaacctcatgccaatgcaatttctgggtccag

SEQ ID NO: 172 - DNA, 430 bp, Bos taurus
  Clone ID: 01-LIB34-040-Q1-E1-A1
acaagacagcacagccatgctggaggcactgggctccctggtggctgccctctggaccacgctccgtcctggcattgtcctactgggggcctttgtctttctcctctttgctgatttcctcaaaaggcagcacccaaagaactacccaccagggcccctgcgcctgcccttcataggcaatttcttccacctggacttggggaaagggatcttggttcctcagcaggttgtgaagaaatatgggaacattattaggctagattttggtgtaattcatttcatcgttataactggattgccctatatcaaagaagcccttgtcaaccaggaacaaaactttgtaaaccgccccatgatacctcttcagaaacatatctttaacaataaaggcttggtcaggtccaatggccaggtatggaaagagcaaaga

SEQ ID NO: 173 - DNA, 409 bp, Bos taurus
  Clone ID: 01-LIB34-041-Q1-E1-A1
cggacgcttgggtgcgccggaggagacgcacgctgctgactttgtcttcgtgcagcccttatcactctctggagaactttctctcccctgggcacaatggcaactcttaaggaaaaattgattgcaccagttgcagaagaagagacaaggatcccaaacaataagatcactgtagtgggtgttggacaagttggtatggcatgtgccatcagcattctgggaaagtctctgactgacgagcttgctcttgtggatgttttggaagataaactcaaaggagaaatgatggacctgcagcacgggagcttattccttcagacaccaaaaattgtggcagacaaagattactctgtcactgccaattccaagattgtggtggtaactgcacgagttcgccagcaagaagggg

SEQ ID NO: 174 - DNA, 317 bp, Bos taurus
  Clone ID: 01-LIB34-043-Q1-E1-A9
gtcaccggtctaggatacactggccgatccacgcgtccactaatccgtggggtcccttctgttgctgtcttggatttaaaaagctcagagcatctactgcagtaaaaattcagctataacagagactctgcccgcagttcactgcagactttgctcgtgcacatggatatttgcccagaccgacaagaagcaacagatgctattctcaggacccattatgttgaaggcatctacagagcatccgtaatactacatctggttgacattccaatgtgtaatggtgaatcatcatcaatacgaggaaacgtgtttttcat

SEQ ID NO: 175 - DNA, 435 bp, Bos taurus
  unsure (386): unsure at all n locations; Clone ID: 01-LIB34-045-Q1-E1-A1
gggtcgagtcacgcgtccgcggacacgtgggcgctccgcgcactgctgtctcgctcaaacgctgggactcgccgctccctattgaaggcaactcaacgccctgcacaccggccatgtcgtcctccagctgcgtggcgctggtcaccggggccaacaatggcatcggcttcgtcatcgtgcgtgacctgtgccggcggttctcgggcgacgtggtgctcacggcgcgggacgaggcgcggggtctggcggccgtgcagcatctgcaagctgagggcctgagcccccttttccaccagctggacatcgacgaccggcagagcatccgcgccctgcgtgacttcctgcgcaacgagtacgggggcctctatgtgctggtcaacaacgcnggcatcaccttcaagactgctgacaccacaccatttcacattcaagcag

SEQ ID NO: 176 - DNA, 377 bp, Bos taurus
  unsure (337): unsure at all n locations; Clone ID: 01-LIB34-045-Q1-E1-A9
cacggtttctggaggcgaagaacgcggttggccaatcgcaagccagaagatgaaggttctgtgggttgccgtggtggtcgcgcttctggcaggatgccaggcggatatggagggagagctggggcccgaggagcccctgactacgcagcagccccgggggaaggacagccagccttgggagcaggcgctgggccgcttctgggattacctgcgctgggtgcagaccctgtctgaccaggtgcaggaggagctgctcaacacccaggtcattcaggaactgacggcgctgatggaggagaccatgaaggatgtgaaggcctacaaggaggagctgganggacagctaggccccatggcccaagagacacaggcccgcg

SEQ ID NO: 177 - DNA, 384 bp, Bos taurus
  Clone ID: 01-LIB34-047-Q1-E1-A1
ggaatactgccgcaccccgtgtactgttacttgcaatattcctgtggtgtctggcaaagaatgtgaggaaatcatcaggaatggaggtgaaacatctgaaatgtacctcattcagcctgaggattctagcaaaccatatagagtatactgtgatatgaaaacggaaaaaggaggatggacagtaattcagaaccgtcaagatggtagtgttgactttggcaggaaatgggatccatataaacaaggatttggaaatattgcaaccaatgcagaagggaagaaatactgtggtgtaccaggtgagtattggctcggaaatgacagaattagccagcttaccagtatgggacccaaaaagcttttgattgaaatggaggactggaa

SEQ ID NO: 178 - DNA, 248 bp, Bos taurus
  Clone ID: 01-LIB34-047-Q1-E1-A9
aagatatttaacttgtgtgtagtgttagcgactttgatttaactatgtggggctgggaagaagtttaaatctattgaaataactgttggaaattatcagctaatgttttattaaatcaatgtcttctgggtttcaaaacagaaaaacattatgctttataaaagacttcagaagtaacatatgaggataataactcatgaatttggatactgttgtcgtggataatctgagttcttcagctgttaaca

SEQ ID NO: 179 - DNA, 404 bp, Bos taurus
  Clone ID: 01-LIB34-048-Q1-E1-A1
cgctgactattctcaaccaaccataaagatattggtaccctttatctactatttggtgcttgggccggtatagtaggaacagctctaagccttctaattcgcgctgaattaggccaacccggaactctgctcggagacgaccaaatctacaacgtagttgtaaccgcacacgcatttgtaataatcttcttcatagtaataccaatcataattggaggattcggtaactgacttgttcccctaataattggtgctcccgatatagcatttccccgaataaataatataagcttctgactcctccctccctcattcctactactcctcgcatcctctatagttgaagctggggcaggaacaggctgaaccgtgtaccctcccttagcaggcaacctagcccatgc

SEQ ID NO: 180 - DNA, 418 bp, Bos taurus
  Clone ID: 01-LIB34-049-Q1-E1-A1
acagccctgacctaggacagtgaatcgataatggcactctccatcacgcggggccttctgctgctggcagccctgtgctgcctggcccccatctccctggctggagttctccaaggacaccctgtccaagagacagatgatacatcccaccaggaagcagcgtgccacaagattgcccccaacctggccaactttgccttcagcatataccaccatttggctcatcagtccaacaccagcaacatcttcttctcccccgtgagcattgcttcagcctttgctatgctctccctgggagccaagggcaacactcacactgagatcctgaacggcctgggtttcaacctcactgagctcgcagaggctgagatccacaaatgctttcagcatcttctccagaccctgaaccagccaaagc

SEQ ID NO: 181 - DNA, 435 bp, Bos taurus
  Clone ID: 01-LIB34-050-Q1-E1-A1
aatacatttaaacaaatatcagaagatctgagaagcagaattgagatcctgaggcgcaaagtcatagaacaagtacaacgtatcaacgttctgcagaaaaatgtcagggatcaactggtatatatgaaacgattggaggtggacattgatattaagatccgatcttgcaaagggtcatgcagtagagctttagaacataaggtagatctggaggactataaaaatcagcagaagcaacttgaacaggttattgccataaacctacttccctctagagacattcaatacttaccattgataaaaatgagtacaattacaggccctgttcccagagagttcaagagccagctccaagaggcccctctagaatggaatgcactgctggaaatgcagcagacgataatggtgttggcaactttcggtggcgatggacat

SEQ ID NO: 182 - DNA, 239 bp, Bos taurus
  Clone ID: 01-LIB34-051-Q1-E1-A1
aaggacgcggtttctggaggcgaagaacgcggttggccaatcgcaagccagaagatgaaggttctgtgggttgccgtggtggtcgcgcttctggcaggatgccaggcggatatggagggagagctggggcccgaggagcccctgactacgcagcagccccgggggaaggacagccagccttgggagcaggcgctgggccgcttctgggattacctgcgctgggtgcagaccctgtctga

SEQ ID NO: 183 - DNA, 247 bp, Bos taurus
  Clone ID: 01-LIB34-051-Q1-E1-A9
tctcaaccaaccataaagatattggtaccctttatctactatttggtgcttgggccggtatagtaggaacagctctaagccttctaattcgcgctgaattaggccaacccggaactctgctcggagacgaccaaatctacaacgtagttgtaaccgcacacgcatttgtaataatcttcttcatagtaataccaatcataattggaggattcggtaactgacttgttcccctaataattggtgctcc

SEQ ID NO: 184 - DNA, 244 bp, Bos taurus
  Clone ID: 01-LIB34-052-Q1-E1-H8
ggcagaggaagtggttaccaaggagataagatcatgcacgcaatcaacagaagattgggaacatttgaagttgaagatcaaattgaagcaaccagacagttttcaaaaatgggatttgtggacgacaaacggattgcaatttggggctggtcatacggagggtacgtaacctcaatggtgctgggagcaggaagtggtgtgttcaagtgtggaatagccgtggcgcctgtatccaagtgggagt

SEQ ID NO: 185 - DNA, 246 bp, Bos taurus
  Clone ID: 01-LIB34-054-Q1-E1-A1
cggacgcgtggggcgagaatgaagaccattctcagcaaccagactgtcgacatcccagaaaatgtcgacattaacttgaagggacggacagttattgtgaagggccccagaggcaccctgcggagggacttcaatcacatcaatgtagaacttagtctccttgggaagaaaaagaagaggctccgtgttgacaaatggtggggaaacagaaaggaactggccactgttcgcacaatctgtagtcac

SEQ ID NO: 186 - DNA, 358 bp, Bos taurus
  Clone ID: 01-LIB34-055-Q1-E1-A1
ctgtggaattgcagatttcctgaataattaccaaaccagtgtagacaaagatctacgaactttggaaggcatcttatatcaggttgagaacaaaacatcagaagccagagagctggtcaaagcaatccaaatcagctataaccctgatcaaccatcaaagccaaataacatagagagtgctaccaagaattccaagagtatgatggaagaaattatgaaatatgaaacactgataacaacacatgaatcaacaattcgatttttgcaagaaatatataactcaaatagtcaaaaaatcgttaacctaagagataaagtggtccagcttgaagcaaactgtcaagagccttgtcaagat

SEQ ID NO: 187 - DNA, 319 bp, Bos taurus
  Clone ID: 01-LIB34-055-Q1-E1-A9
atactgattccatgtaaaggttctccgagaagacagcagggctgctttccgcctctttgagacccgtatcaaccaagtcctgcatttcaccaatgatgccagagccaccgctgatcagaccacaaacttcctggtccgagcctcttgccgccttcagttggtacctgggaaagaatatctgatcatgggtctggatggggccacttacgacctcaggggagacccccagtacttgctggactcgaatagctggattgaggagatgccctctgagcgcatgtgccatagcactcgccatcggacaccctgtgcccagctc

SEQ ID NO: 188 - DNA, 366 bp, Bos taurus
  unsure (335): unsure at all n locations; Clone ID: 01-LIB34-056-Q1-E1-A1
tagcgcgggtagcggtaaccgaggcgtgctgggattccagaagtggagaaggaggcaagatgaagactctactgctgttgatggggctgctgctcagctgggagagtggctgggcaatctcggacaaagagctccaggaaatgtccaccgaggggagtaagtacgtgaataaagaaattaaaaatgccctcaaggaggtgaaacagataaagacccaaatagaacaaaccaatgaagagcgcaaattactgctcagctccctagaggaagccaagaagaagaaagaggacgccctgaatgacaccagggattctgaaaacaagctgaaggcgtcncaaggggtgtgcaatgagaccatgacagccc

SEQ ID NO: 189 - DNA, 224 bp, Bos taurus
  Clone ID: 01-LIB34-057-Q1-E1-A1
ggcagatcccccaagggcaccatggccgccctgggcatcacggtcgccctgctggtgtggatggccaccctgctgttcatctccatctggaagcacatctacagcagctggaaactgccccctggccctttcccactgcccatcatcgggaatcttttacagctggatattaagaacattcccaaatccttcaccaggctggcggagaggtacgggccggtgtt

SEQ ID NO: 190 - DNA, 230 bp, Bos taurus
  Clone ID: 01-LIB34-057-Q1-E1-A9
cccacccactaataaaaattgtaaacaatgcattcatcgaccttccagccccatcaaacatttcatcatgatgaaatttcggttccctcctgggaatctgcctaatcctacaaatcctcacaggcctattcctagcaatacactacacatccgacacaacaacagcattctcctctgttacccatatctgccgagacgtgaactacggctgaatcatccgatacatacac

SEQ ID NO: 191 - DNA, 229 bp, Bos taurus
  Clone ID: 01-LIB34-058-Q1-E1-A1
ggaggcggtgcgggaggccgaggagctcacgcccggaccagtccagcgtcccgggccgctagccccgatcctgccgcgcacgagaggcgagaccggccggatgggccgctgagcccggaccggggaccgtgtggagctccctggagctgaaatcaggatgtttcgcttcatgagggacgtggagcccgaggaccccatgttcctgatggacccctttgccattcaccgt

SEQ ID NO: 192 - DNA, 205 bp, Bos taurus
  Clone ID: 01-LIB34-059-Q1-E1-A1
cttgcaacgtccccatccaagacataaccaagcgtttcctagacagtaccaggactgctccactatgcaaaggctgatgaagtttcgggtcctctggggcatccacatgtcctgccctggcttccaccatgcccctcagcacctgcgctgccgatctttatcaggagctggaaccctaagatggaatgactatgacagcacctga

SEQ ID NO: 193 - DNA, 242 bp, Bos taurus
  Clone ID: 01-LIB34-060-Q1-E1-A1
gctcatctttcagagtctccaaaaccagacacaccagatacccctgagaatccccctccttcaggtcttcatcaccaccaccacaggcacaagggtccccaaagacagggtcactcagataactgtgatacaccagtaggaagtgaaagtttacaaccttctcttccacaaaagaagctctgacgaaagagatgcataaatcagttactctgacagtttcccaaagattcagaatctgcttt

SEQ ID NO: 194 - DNA, 315 bp, Bos taurus
  Clone ID: 01-LIB34-060-Q1-E1-A9
aattattcccatcctattggccgtagcattccttacgttagtggaacgaaaagttctaggctatatacaactccgaaaaggtccaaatgtcgtaggtccatatggcctacttcaacccatcgccgatgcaatcaaacttttcattaaagaaccactacgacccgctacatcttcagcctcaatatttatcctagcacctatcatagctttaggcctagccttaaccatgtgaattcccctaccaataccctatcctcttatcaacataaacctaggagtcctatttatactagccatatcaagcctagccgtata

SEQ ID NO: 195 - DNA, 401 bp, Bos taurus
  Clone ID: 01-LIB34-061-Q1-E1-A9
gcatcgagcagggagctggtggctcttccatccccagaccagccaagcctgtgagtgacaccccagacagaggaaccagagccatgcggagtctcagcggactgctgttgttactgactgcctgcctggcggtaaacgccagctccgtgcccacattgcccgatgacattcaagtgcaggagaacttcgacctgtctaggatctatgggaagtggttcaatgtggccgtgggctccacctgcccatggctgaagaggttcaaggagaagatgaccatgagcacagtggtgttgaaagcggggccgacgagcaaggagatcagcgtcaccaacactcacaggcggaaaggtgtctgtgaatcgatctctggtacttatgagaaaacaagcactgatgggaag

SEQ ID NO: 196 - DNA, 211 bp, Bos taurus
  unsure (23): unsure at all n locations; Clone ID: 01-LIB34-062-Q1-E1-A1
cgggcagccaaagcgtccgcaanctctgtcatctgtgtgcggggaaagggacagacaatgtgcctgctccaaccacgaaccatacttcggctactcaggggcctttaaatgtctgatggagggcgctggggatgtggcctttgtcaagcactcaacggtattcgacaacctgcctaacccagaatacaggaaaaactatgagctgctctgc

SEQ ID NO: 197 - DNA, 223 bp, Bos taurus
  Clone ID: 01-LIB34-062-Q1-E1-A9
aacatccggaagcagccactccaggaaccaaggcgccatgcagccccggctgctccttcttgctgccttcctggcgctcctggtcttgcctgaagctaccaaggccgaggagggatcccttctggacaagatgcagggctatgtgaaggaggccaccaagaccgccaaggatgccctgagcagcgttcaggagtcccaggtggcccagcaggccagagactgg

SEQ ID NO: 198 - DNA, 335 bp, Bos taurus
  unsure (47),(292): unsure at all n locations; Clone ID: 01-LIB34-063-Q1-E1-A1
catctacacagtgtttttagttttattcaactataagcaaacagcanaattaacacaatattcaccaactccagaacagttttcttttttaaaccaaagtgtgattaatttaacaagcacagactttcagattctgataacctcttacccaacccagccctgctgctcatctagatggccaggctttaacagcaaagcaatttcttctatggagctttttccagtattgctctttaaaggagccacagtgggacactgacacgcagtaaccagcctgagacgttgggggtcncctggttgtcttggtgagacaaagccgtgaaaacacatgccag

SEQ ID NO: 199 - DNA, 249 bp, Bos taurus
  Clone ID: 01-LIB34-066-Q1-E1-A1
agtagctcgcctgagccagaaatttcccaaggctgagtttgtagaagttaccaagctagtgacagatctcacaaaagtccacaaggaatgctgccatggtgaccaacttgaatgcccagatgacagggcagatcttgccaagtacatatgtgataaccaagatacaacctccagtaaactgaaggaatgctgtgataagcctttgttggaaaaatcccactgcattgctgaggtagaaaaagatgccat

SEQ ID NO: 200 - DNA, 202 bp, Bos taurus
  Clone ID: 01-LIB34-066-Q1-E1-A9
cttatcttgaagagagaagtttctgaaagaataaacaagttgaatagagagaacactgatttaggcattttagtggtctttttaatgttttctgctgtgaaacatttcaagatttattgattttttttttcattttccccatcacactcacacacgcacgctcacactttttatttgccataatgaaccgtccagcccctgt

SEQ ID NO: 201 - DNA, 242 bp, Bos taurus
  Clone ID: 01-LIB34-067-Q1-E1-A1
gtcacatgatctattatagaattctcaatatgatatatatactcagaccccaatattaacaaattcttcaaatatctactcctattcctcattactatgctcatccttgtaaccgcaaacaacctcttccagctattcattggctgagaaggcgtcggaatcatatcatttctactcatcggatgatgatacggacgagcagatgcaaacacagcagccctacaagcaatcttatataaccg

SEQ ID NO: 202 - DNA, 208 bp, Bos taurus
  Clone ID: 01-LIB34-068-Q1-E1-A9
cctgaggccgttgtggtggcgtcgtcaatttagctccgcgggggccctggggtggggggtggtgctgtgcggacatggcggactttgacccccgctacccctgctcttctatcgaggacgacttcaactatggcagctgcgtggcctccgccagcgtgcacatccgaatggcctttctaagaaaagtctacagcatcctttctctcca

SEQ ID NO: 203 - DNA, 218 bp, Bos taurus
  Clone ID: 01-LIB34-069-Q1-E1-A1
acgggtttgccgccgggacacaggtgtcgtgaaaaccaccgttaaacctaagccaaaatgggaaaggagaagacccacatcaacatcgttgtcattgggcacgtagattcagggaagtctaccacgactggccatctgatctataaatgtggcgggatcgacaagagaacaattgaaaagttcgagaaggaggctgccgagatgggaaagggctcctt

SEQ ID NO: 204 - DNA, 232 bp, Bos taurus
  Clone ID: 01-LIB34-070-Q1-E1-A1
gtttcatgcatttggtttaaacccagatttaatttgatcaagtgttaaccatgaagactgtgaaagtcttctgcatccttttcatgttgcatctatgtctccttgactctggaaggacaggcaaagttcttgtatggcctgcggattttagtcactggattaatttacaagttattctagaagagcttcaccttcgtgggcatgagataactgtcctggtaccttcacaaag

SEQ ID NO: 205 - DNA, 237 bp, Bos taurus
  unsure (200): unsure at all n locations; Clone ID: 01-LIB34-070-Q1-E1-A9
ctgaaggcgggcatccctaagggcgtggtcaacgtcctgccaggatccggctcactggtcggccagagactgtcagatcacccggacgtgcggaagattgggttcacagggtccaccgaggtcggcaagcacattatgaaaagctgcgccctgagcaatgtgaagaaggtctccctggagctgggtgggaagtcaccccntcctcatcttcgcggactgtgaccatgggcaagggcc

SEQ ID NO: 206 - DNA, 407 bp, Bos taurus
  Clone ID: 01-LIB34-071-Q1-E1-A1
agggtcttggacaaacttaaagctgaacgtgagcgtggtatcaccattgatatctccctgtggaaatttgagaccagcaagtactatgttaccatcattgatgccccaggacacagagacttcatcaaaaacatgattacaggcacatcccaggctgactgtgctgtcctgatcgttgctgctggtgttggtgaatttgaagccggtatctccaagaacgggcagacccgtgagcatgcccttttggcttacaccctgggtgtgaaacaactaattgttggcgttaacaaaatggattccactgagccaccctatagccagaagagatacgaagaaattgttaatgaagtcagcacctatattaagaaaattggctacaaccccgacacagtagcatttgtgccaat

SEQ ID NO: 207 - DNA, 399 bp, Bos taurus
  unsure (359): unsure at all n locations; Clone ID: 01-LIB34-072-Q1-E1-A1
agcaggtgtctcctggtcttagcatggcactgctttgggctctcgctgtcctgagcctccttcccctgctggatgcccagagccccgagtgtgccaacctgatgacagtggcgcccattaccaatgccaccatggacttgctctctggcaagtggttttatattggctccgctttccgaaaccccgagtacaataagtcggctagagcaatccaggcggctttcttttaccttgagcccaggcacgcagaggacaagctgatcaccagagagtaccagaccattgaggacaagtgcgtctacaactgcagcttcataaaaatctatcgtcagaatgggaccttgtctaaagttgagtcngacagagaacacttttgttacctgctgctcagcaagcact

SEQ ID NO: 208 - DNA, 356 bp, Bos taurus
  Clone ID: 01-LIB34-072-Q1-E1-A9
acgacagatagccgtaacttctgtgctgtgccagccgcatccctgagacaagatggtgaaggtcggagtgaacggattcggccgcatcgggcgcctggtcaccagggctgcttttaattctggcaaagtggacatcgtcgccatcaatgacccctttattgaccttcactacatggtctacatgttccagtatgattccacccacggcaagttcaacggcacagtcaaggcagagaacgggaagctcgtcatcaatggaaaggccatcaccatcttccaggagcgagatcctgccaacatcaagtggggtgatgctggtgctgagtatgtggtggagtccactggggtcttcacta

SEQ ID NO: 209 - DNA, 429 bp, Bos taurus
  Clone ID: 01-LIB34-073-Q1-E1-A1
actagtataagacttaacaaaatgaattttagctaagcagcccgaaaccagacgagctactcacaaacagtttaccaagaactaactcatctatgtggcaaaatagtgagaagatttgtaagtagaggtgacatgcctaacgagcctggtgatagctggttgtccagaaaatgaatctaagttcagctttaaagataccaaaaattcaaataaaccccactgtagctttaaaagttagtctaaaaaggtacagccttttagaaacggatacaaccttgactagagagtaaaatttaacactaccatagtaggcctaaaagcagccatcaattaagaaagcgttaaagctcaacaacaaaaattaaatagattccaacaacaaatgatttactccctagcccaatactgggctaatctattatagaatag

SEQ ID NO: 210 - DNA, 211 bp, Bos taurus
  unsure (124),(164): unsure at all n locations; Clone ID: 01-LIB34-074-Q1-E1-A1
cctttcccagctgggtatcaagaaaatcttcaccagcgatgcggacttctcaagaatcacagatgaccacaagctggcagtttcccacgtgatccacaaggctgtgctcgacgtgggcgaaganggcacggaaggagctgctgtcacggctgtcgtaatggctnactcatcactcttgcacacgctaactgtcaatttcaacaagcccttt

SEQ ID NO: 211 - DNA, 384 bp, Bos taurus
  Clone ID: 01-LIB34-075-Q1-E1-A1
acaactccccaatatgaattctaataaggtgcaaaccaccaatatccggaaaccctgggggttaatttccaattgcggaggtaaaattggttcaaccaaaggcaaaggaatttcgcaaaccaaatgggggcaacggcgccctttggaactggaatgaaaaggttcaaggataaaaatcttcacaaccagcactacccaaacattatgggccatgaaggacctggaatagtccatagtgtgggagaaggattgagcacagtgaaaccaggacataaagttatcgcactctttctaccacaatgtggtgaatgcacctcttgccttaaatctgcagacaatttttgtataaaactctaacaggcaggaaaccacctgatgtctgat

SEQ ID NO: 212 - DNA, 463 bp, Bos taurus
  Clone ID: 01-LIB34-076-Q1-E1-A1
aagactctacagagactcgtattatccgggtccatccccgtgtttccacgcagagcagagcagatgagagacgccatcaccaggaaatcagagctactattcgcaggatctgatgtgagagcgcttggcctctgtgataacaccttgcctataaaagtagcatttctagtaaggtttcaaagaagaagaagaagcagggtgaggagagtaaagacagggaaaaagtgcctcctgggcaccttttctgtgtcatcttaaatttcacagaacttccgtttaccctttttctatgatgcgttatccatcctaaagaaatactgagtacttctaaacgttggcgtaaaagagtctgcaaattctggtgcagaaattaaagtgactgttaacatcaagaatggggatgattatgccttttaaaccttaaataaaccaattagaagtgcatcatttattaacatttaaa

SEQ ID NO: 213 - DNA, 456 bp, Bos taurus
  Clone ID: 01-LIB34-077-Q1-E1-A9
caagactctacactgagtcgatgtagtacaccacctcggccacattgaggatgatgcagatgcctgaggcggccagcatgaagaccgtggcgatgaagagcaagatgaaaatgaacaatctgaagccagtgggactgatgatgagtgatcactacggacatttttttcttggaagaatggaactccttcttcccctctctcgtctctacccagtgagttcatttctcttatgggcactgggtcgtttctatatcattatcatctataaactagctttagaatagtgccagacaaacatatgatatcatggtgtaaaaaaacacacacgcatacacaaacctttgtaacatattgtgaccaaatgggcctcaaagattaaaacaaacaaaaaagcttttgatggaaaaaatgtgggtggatggtatatttctatgggtgggtctaatttgggaacag

SEQ ID NO: 214 - DNA, 399 bp, Bos taurus
  Clone ID: 01-LIB34-080-Q1-E1-A1
ctcgcccgctggacaccttcatggaaaattacttcaccagccatcgagacaacatcttccgtaatgtcgaggttctgacttatgtgttcgacgtggagagccgtgaactggaaaaggacatgcattattaccagtcgtgtctggaggccatcctccagaactctcctgatgccacaatcttctgcttggtgcacaagatggatctggctcaggaagatcagcgtgacctgatttttagagagcgagaggaagacctgatgcgtttgtctcgcccgctggagtgtgcttgttttcgaacatccatttgggatgaaacgctctacaaaacctggtccagtattgtctatcatctgagtccaaatgtccagcagctggaaattaatctcaggaattttgccc

SEQ ID NO: 215 - DNA, 382 bp, Bos taurus
  Clone ID: 01-LIB34-080-Q1-E1-A9
aggctgactattctcaaccaaccataaagatattggtaccctttatctactatttggtgcttgggccggtatagtaggaacagctctaagccttctaattcgcgctgaattaggccaacccggaactctgctcggagacgaccaaatctacaacgtagttgtaaccgcacacgcatttgtaataatcttcttcatagtaataccaatcataattggaggattcggtaactgacttgttcccctaataattggtgctcccgatatagcatttccccgaataaataatataagcttctgactcctccctccctcattcctactactcctcgcatcctctatagttgaagctggggcaagaacaggctgaaccgtgtaccctccc

SEQ ID NO: 216 - DNA, 366 bp, Bos taurus
  Clone ID: 01-LIB34-081-Q1-E1-A1
aaggcggcggctctggatccactgcccacaccccgctctcgcatgcagacatgaggacagagagaatgtcccccctcctggctctggggatcctggtggctgggctctgctccagggtccactgcctcccagagaatgtgaccccagaagaacagcacaaagtgacatctgtggatggccactcattagcctccagcaacactgacttcgccttcagcctctacaagcagttggctttgaaggaccccaataagaacgtcatcttctcccctctgagcatctccatagccttggccttcgtgtccctgggggctcatggccccactgtgacagagatcctggaaggtctcaagttcaacctcacag

SEQ ID NO: 217 - DNA, 433 bp, Bos taurus
  Clone ID: 01-LIB34-081-Q1-E1-A9
agtcccaactggctcccaattcctggtgaaactcctaaagggagactgttaaatcatgaaattaatcaccatccttttcctttgttccaggctgctaccaagtttaacccaagagtcttctcaagaaatcgactgcaacaaccaggatgtatttaaagctgtggacgctgctctgacaaaatacaacagtgaaaacaagagtggcaaccagtttgtattgtaccgcataaccgaggttgccagaatggataatcctgacacattttattccttgaagtaccaaatcaaggagggcgactgtccttttcaaagtaacaaaacttggcaggactgtgactacaaggactctgcacaagctgccacaggagagtgcacagcgaccgtggccaagagagggaatatgaagttctccgtggctatcagacctgcctga

SEQ ID NO: 218 - DNA, 386 bp, Bos taurus
  Clone ID: 01-LIB34-082-Q1-E1-A1
acgccggcgtgacgcagccgccatgctcccgccagcgctcgtcttgctgttggcgtttctcctgcacgttgctatcgcatgacgaagctgacccaagccagatgagctaccgttttccacagtggttccactgaaacggacctatgagcccggcgagcagataatcttctcctgccagccgggctacgtgtcccggggagggatccggcggtttacatgcccgctcacacgactctggcccatcaacacgctgaaatgcatgcccagagtatgtccttttgctgggatcttagaatacggaacggtacgctatgcaacgtttgagtatcccaacaccatctgcttttcttgccacacggggttttatctgaaaggatctagttctg

SEQ ID NO: 219 - DNA, 367 bp, Bos taurus
  Clone ID: 01-LIB34-084-Q1-E1-A1
accagaacccctgctgctttggcagctctgagtctcacgggttctggcacagctccaactgctgcaaactatccgtccagctccagagcaccccaggctccagcccctgcaaacctggtgggtcctaggtctgcacatgccacagcacctgtgaatatcgccagctcaagaacccctccagccttggcccctgcaaacctcactagtgctagaatggctccagccttgtctggtgcaaacctcaccagccccagggtgcccctctctgcctatgagcgtgttagtgggagaacctcaccaccactccttgaccgaaccaagtccaagaaccccacaggggggcccaggcttcagaacccccgccatc

SEQ ID NO: 220 - DNA, 389 bp, Bos taurus
  unsure (277),(335): unsure at all n locations; Clone ID: 01-LIB34-084-Q1-E1-A9
cccacgcgtccagtacaatgcccagagagacttacaggaggacactggggtcttcacatgcagggtgccaggaaattaccatttcctctttgatgtggatctccatcactgcaaggtgactgttcagctgatgagggacaaaagttctgtcttagaaaagcatcaggtctccaccaaagagcccaggagtctctctggcatgttgaccctgccgctgcacgtaggcgagaaggtgtggctggaagcaaaagtggaaactgagaagccggagcaagcncgagttacaatttatttctctggtttcctgacatagttctggcctctttctgtagcanaagcaaatcccttatgattctgctgtcaaaagcaaacaaataaatatgcactat

SEQ ID NO: 221 - DNA, 442 bp, Bos taurus
  Clone ID: 01-LIB34-086-Q1-E1-A1
cggaagctccttgtcgcccgaaccggagcgcgcaggcccgtcccggtggtcgggggcgggcgggtgggggcgccatgtggttcatgtacgtgctgagctggctgtcgctcttcatccaggtggccttcatcacactggccgtcgccgccggactttattacctggccgaattgatagaagaatacacagttgcaaccagcaggatcataaaatacatgatctggttctccacagctgtgctgattggcctctacgtttttgagcgcttccccacctacatgattggcgttggcctcttcaccaaccttgtctactttggcctcctccagaccttccccttcatcatgctgacctcgcctaacttcatcctgtcgtgcgggctagtggtggtgaatcattacctagcatttcagttttttgcagaggaatattatcctttctc

SEQ ID NO: 222 - DNA, 396 bp, Bos taurus
  Clone ID: 01-LIB34-086-Q1-E1-A9
gttctagatcgcgagcggccgcccttttttttttttttttttttttttttttttttttttgaaaagagaaaagcatgggggaatgcatttggccattataatgctaatgaagtttgtgtatattaacatatatatggcagtaacactgaatattccttttacattctatatacacagaatgacatcaaggttttacagtcaacagaatattccaatttcagtctcaatgctgctttgtagtgacttcagaattcacataggggctttccctaaaaataattcaagtctatgtaagtgaaataaggcacaattaatattgatttgatctaggggaaggaaagggataaaaactagtttcaaatgatcttgctgttggggaattaactttgacctaaa

SEQ ID NO: 223 - DNA, 387 bp, Bos taurus
  Clone ID: 02-BOVMS1-002-Q1-E1-A5
gggaaatttagttccagctcgtcctgctcctccgcctccacctcctttatatagttccctcacttgatttttttttttagcctttcattttgcagacatcttcagggaactgagctaatacttttttttttcctgatattttcttgaaaagcctttcttcctgctgcaattatgaatgaaaaacaaaataccacaatacagactttattaatacagaaaaacagaacttgagtagtgggaaatgagaaatagaagaaatgcagtaaagccagggaattcagaataacattttcatttccattactgaatacattttattcagtcatctgtgaggttaatgtacctgacatgaattatgttattttgaacatgttattataatgattt

SEQ ID NO: 224 - DNA, 442 bp, Bos taurus
  Clone ID: 02-BOVMS1-003-Q1-E1-A5
ccacgcgtccgcaccatcctctttctcgactccatcttcgcggtagtggcagctgtgtccgcgatctagtcgccaacatgcagctttttgttcgcgcccaggagctacacactctcgaggtgaccggccaggagacggtcgcccaaatcaaggctcatgtagcttcgttggagggcatcgctccagaagatcaagtcctgctcctggctggcacgcccctagaggatgaggctactctgggccagtgtggggtggaggctctgagcactctggaagtagccggccgcatgcttggaggtaaagtccatggttccctggcccgtgctgggaaagtgagaggtcagactcccaaggtggccaagcaagagaagaagaagaagaagacgggcaaggccaagaggcgtatgcagtacaaccggcgccttgtcaatgttgtgcccac

SEQ ID NO: 225 - DNA, 324 bp, Bos taurus
  Clone ID: 02-BOVMS1-004-Q1-E1-A5
atgcgacgtcatagctcttctatagtgtcacctaaattcaattcactggccgtcgttttacaacgtcgtgactgggaaaaccctggcgttacccaacttaatcgccttgcagcacatccccctttcgccagctggcgtaatagcgaagaggcccgcaccgatcgcccttcccaacagttgcgcagcctgaatggcgaatgggacgcgccctgtagcggcgcattaagcgcggcgggtgtggtggttacgcgcagcgtgaccgctacacttgccagcgccctagcgcccgctcctttcgctttcttcccttcctttctcgccacg

SEQ ID NO: 226 - DNA, 431 bp, Bos taurus
  unsure (7)...(8): unsure at all n locations; Clone ID: 02-BOVMS1-004-Q1-E1-A9
ccttcanngagaacgtgccacatgaaaggaagagtagccttaattttgaaagactagaagcccaacttaaggcatgctactgcaggatcatattttctaaagcaaagccatctgtgttggcattgtctatcatcgcattggagatccaagcacagaagtatatagagttaacagaaggagtagaacgtcttcagaaacattccaagatcagtggcagagatttgactttctggcaggagcttgtatccaagtgtttagctgaatattcatcgaacaagtgtgccaaaccaaatgttcagaagttgaaatggattgtttctgggcgtactgcacggcaactgaggcatagttactacaggataacccaccttccaacaattcccgaaacagtcccttaattggatgattacagcaacaaaaaacttctgaag

SEQ ID NO: 227 - DNA, 390 bp, Bos taurus
  unsure (307): unsure at all n locations; Clone ID: 02-BOVMS1-005-Q1-E1-A5
atgcgacgtcatagctcttctatagtgtcacctaaattcaattcactggccgtcgttttacaacgtcgtgactgggaaaaccctggcgttacccaacttaatcgccttgcagcacatccccctttcgccagctggcgtaatagcgaagaggcccgcaccgatcgcccttcccaacagttgcgcagcctgaatggcgaatgggacgcgccctgtagcggcgcattaagcgcggcgggtgtggtggttacgcgcagcgtgaccgctacacttgccagcgccctagcgcccgctcctttcgctttcttcncttcctttctcgccacgttcgccggctttccccgtcaagctctaaatcgggggctcccttttaggttccgatttagtgcttta

SEQ ID NO: 228 - DNA, 464 bp, Bos taurus
  Clone ID: 02-BOVMS1-006-Q1-E1-A5
ccgggtccgcccacgcgtccgtaaaaataacgctcttgcacaggacacggaagaattagaaaaagagattagagaagagcttccagtgaatacctctaaagtccgtccaaaacaggaaaaagctttttctttgaagaccataagcactagtgatccagctgatgcactaatcaaaaatagccagcctatcaagactcttccacctgctatttctaccgagccatctgttattttatcaaaaaatgattctgacaaaagctcttcccaagtgccaccgatgctacaacagcaaagcagccaatagagacagacaagaaaaatgaaaagtcaaagaaaaataagaagaaatcaaagtcagatgctaaagcagtgcaaaacagttcacgccatgatggaaaggaagttgatgaaggagcctgggaaactaaaattagtcacagagagaaacgacagcagcgtaaacg

SEQ ID NO: 229 - DNA, 397 bp, Bos taurus
  Clone ID: 02-BOVMS1-006-Q1-E1-A9
gtcgtccacgcgtccgaaaaaaaataaaaaaaaaaaaaaaaaaaaaaaaaaaaaaaaaaaaaggaaaaaaaaaaaaaaaaaaaagaaataaattaaaaaagaataaatgaataattaaacaaacaataaagaataataaatcgtctaaaaatgataaatcaaattcatttcataggaaagtggggtggccccctcagggttttaaactttcctgtggtttgccagcttattttccttcctttaagtgtcccttttgttttcctttcggggttccttttttgaacgctccggtgggggttatcccgggtttttccccctttttggccattgggaaacaccccctttttgcgcatttggtgttatgggtgtgggggctactctgttcgtttttgcaaaa

SEQ ID NO: 230 - DNA, 392 bp, Bos taurus
  Clone ID: 02-BOVMS1-007-Q1-E1-A5
atgcgacgtcatagctcttctatagtgtcacctaaattcaattcactggccgtcgttttacaacgtcgtgactgggaaaaccctggcgttacccaacttaatcgccttgcagcacatccccctttcgccagctggcgtaatagcgaagaggcccgcaccgatcgcccttcccaacagttgcgcagcctgaatggcgaatgggacgcgccctgtagcggcgcattaagcgcggcgggtgtggtggttacgcgcagcgtgaccgctacacttgccagcgccctagcgcccgctcctttcgctttcttcccttcctttctcgccacgttcgccggctttccccgtcaagccctaaatcgggggctccctttagggttccgatttagtgctttaac

SEQ ID NO: 231 - DNA, 432 bp, Bos taurus
  Clone ID: 02-BOVMS1-008-Q1-E1-A5
ccacgcgtccacacatccccggcgcggcgggcgagacgggccggtggtgcgccctcggcggactgggagaggcctcgggatcccacctcggccgccggcgagggcggccttcaccttcattgcgccacggcggctttcgtgcgagcccctgactcgcgcacgtgttagactccttggtccgtgtttcaagacgggtcgggtgggtggccgacatcgccgcggaccccgtgcgctcgcttcgtggcgaccgaggcgcgaccccccgggcccgacggcgcgacccgcccggggcgcactggggacagtccgccccgccccgacccaccccggtgacgaggccggccggggtgggagagcggtcgcgccgtgggacgggcgggccgggcccccccgagacaacggcgcgcgcccccccgggaacgcccccctcgc

SEQ ID NO: 232 - DNA, 283 bp, Bos taurus
  Clone ID: 02-BOVMS1-008-Q1-E1-A9
acgcgtccatatacacaacaaataattaaaaaaaaaaataaaaaaaaaaaaataaaaaaaaaaataaaaaaaaaaaaaaaaaaaaaaaaataaaaaaaatcataaaaaaaaataaaaaaaggtctgccgctcaagaggttaaacctttgttatgcttgggggggccgccttaatttttctgttgtgtgtcgatgttcatttcattgagcttctttttacatggtcctcatttgtcattcccggggctttcttttctcaaggccgttttgggaaatcccctttt

SEQ ID NO: 233 - DNA, 391 bp, Bos taurus
  Clone ID: 02-BOVMS1-009-Q1-E1-A5
gacccacgcgtccaggcatggtcaaaatagatctgagaaccaagtcatgtagtggagtggaattttctacttctggtcatgcttacactgatacagggaaagcatcaggcaacctagagaccaaatacaagatctgtaactatggactgaccttcacgcagaagtggaacacagacaatactcttgggacagaaatctcttgggagaataagttggctgaagggttgaaactgactcttgataccatatttgtaccgaacacaggaaagaagagtgggaaattgaaggcctcatataaacgggattgtttcagtcttggcagtaatgttgatatagatttttcaggaccaaccatctatggctgggctgtgtttggcctttaaaggttggc

SEQ ID NO: 234 - DNA, 234 bp, Bos taurus
  Clone ID: 02-BOVMS1-010-Q1-E1-A5
cagagttccacgcaatgctcacctgagtcacaggatcccctattactgtattctagctacaatgttatattacatagtataatgagacgatatcaagagtacacatgtaatgatgatgcatattaacattctcataggagtggttagagaagccgatgcctcatttctacattttgtcattagcagtgatcatctaacggttccgtgtatccttacagaaataaagcagcatat

SEQ ID NO: 235 - DNA, 373 bp, Bos taurus
  Clone ID: 02-BOVMS1-010-Q1-E1-A9
gtaaaattcccacagagttacctgggcttatgaaattgttgaacatgttaaatgctcagtgatatggatcacttagccatttcctcagtgattgaaggagaaagggggaaaaaaaatcatcatacaactaccagactttctaacaaaacagaaagccaaggaaaaaacaatcgttctatattttaaaaaccgacgaagttcttttcagacatgcccaaacttaaagtgagaatttcttcaaccatctaaatgctctagaaattttgttctctctgttcacaaccagttgtataacagaaatactcgatgctcttttcctccctgtgtgtgaagtaatgaatcattgattatgtgacttgttatgtattctatt

SEQ ID NO: 236 - DNA, 380 bp, Bos taurus
  Clone ID: 02-BOVMS1-012-Q1-E1-A5
gaattctagttctactgagttttgtgccgtgtatgggttcatgcctgccaaagcgacagttttcaacctgaagtgtgatcccgtgtttgactttggaactggccctcgtaatgcagcctactacagccctcatggacatatattagtactagctggatttgggaatctgaggggacaaatggaagtgtgggatgttaaaaagtacaaacttatctctaaaccagtggcctctgattctacatattttgcttggtgcccagatggtgagcatattttaacagccacatgtgccccacggttacgtgttaataatgggtacaagatttggcattatacaggctctgtcttgcacaagtatgatgtaccatcaaatgcagaat

SEQ ID NO: 237 - DNA, 391 bp, Bos taurus
  Clone ID: 02-BOVMS1-012-Q1-E1-A9
caagtttctcttcatttaaaaatatcttccaactactcatagaacaatagaagcaaaaactggtcatttaaaaatttcttcaaacaactcataaaacagaagcaaaagctggtttggaaaatacattcacaaaaatttggtacattgacttagtttaaaattaagtctaaaacagtttacacctatattacacaattcaacaatttttactacagttaaagacatactaccaatatagtaattattaaaggaatagacataatttactataaaatttgccaaaatatggtaaaaaaaaacattggaaaagtcaatcttgactatggcttgtaacacaaatgctactaacaaaatagtgaaagaaatattactgttttttttttaatccctg

SEQ ID NO: 238 - DNA, 403 bp, Bos taurus
  Clone ID: 02-BOVMS1-013-Q1-E1-A5
atgcgacgtcatagctcttctatagtgtcacctaaattcaattcactggccgtcgttttacaacgtcgtgactgggaaaaccctggcgttacccaacttagtcgccttgcagcacatccccctttcgccagctggcgtaatagcgaagaggcccgcatcgatcgctcttcctaccagttgcgcatcctgaatggcgaatgggacgcgccctgtagcggcgcattaagcgcggctggtgtggtggttacacgcatcgtgaccgctatacttgccagcgcactatcgcgcgctcctttcgctttcatccattcctttctcgccacgttcgacggctttcgacggtaagctctaaatcggtggctcactttaaggttccaaattagcgctttacagcaccttgacc

SEQ ID NO: 239 - DNA, 460 bp, Bos taurus
  unsure (317): unsure at all n locations; Clone ID: 02-BOVMS1-014-Q1-E1-A5
ctagagttcattttctctaacaaacatgggcagagaggaggtcttggctttcattgcatttaatttatagtactaaatttaaagacgtcgtccaaacaatatcatatcatcatcttgagatgatataaattctgtgcatcagataacattgtgatgatttaaggactaactgatcacaaaaatctattatataattttaacacatgcagaaaaacaaacacgccaaaaaagcaaatgactaattcgggtacatttataattgcatccagataatttttatcctaatatcttcataaagtactggagtataatatgtntgttacctccaacagaactaaatgttctatggttatgaaaatttatttatttgaaacattgcttttattttgaaaagcttcttaattaatttggttaacaaatatgctaatttgggggaagctagggaagatcattgttgaac

SEQ ID NO: 240 - DNA, 413 bp, Bos taurus
  Clone ID: 02-BOVMS1-017-Q1-E1-A9
aggctgctcaccctgttctgtgagcagaaagaacttactgaaatgcatggtttaaataacttcctcatcaaaaccttccttctgttttttgtgctttcaaataactaatccgaatttccaaaaaattaacatttgaatttagctgtaattctcaactgacctttttccctgtactaacgtttggtttccctgtgtggcgtgttttctgagcgttcctactttcaagcatggaacgtgcaggtgatttggaaagtgtaggcagatctgagaaaacgagcctgttacagaagaacgtcatcacagcgaatacttttggaagcttaacaaaactaacccagctgtccttttatctttttttttaattaataattcgcttgttttaattaatagcagcatagtttatgggtttggag

SEQ ID NO: 241 - DNA, 426 bp, Bos taurus
  Clone ID: 02-BOVMS1-019-Q1-E1-A5
tttaaatttgacctaagtctctgtagccaagataaggttgggacattgcaatcatttttcgaaggagaatttactatggcttcaagatctttaaggtcaagtttagcctaagaccaggaactggaaatttaacacagcactatcccatagaaacttcagtaaaaatggaaatctctatctatattgtcttgtatggtaaccactagccagctacatctggtgactgagaacttgaaatatggcaagtgtgactgcagaactgaatttttcattgtatctcattttaattaattaaaatagccctatgtgactcatgaatacatactgaacggatcagctctcagtacacattcatatttgggttgttacatcaggaaataaaatgtgtttttaaaaattacaaaagtcagtatgttgagaagtcag

SEQ ID NO: 242 - DNA, 439 bp, Bos taurus
  Clone ID: 02-BOVMS1-021-Q1-E1-A5
agcatgtagttacccagatctggacaatttcacattgttaaatcagaaccttgactagttcaaacccaaatttaaacttctttgtccattatgtttaaattcttttaacattaaattcaagcattgttcagagcctctaaaaaagaaggttgcagtcatctgtttttatgctatgcatggggtctgatctcagatacactaaatacggggcgtaggaactaaaacctgatgtatgaaactgctttcacttatggttcattggtttttgtacaaatatttttttatacacttcagtgcaagtcttgtcagttaaccttactttatgagtaaactaagtaacccaaattacatttctttaagcctattttactactgtggctctttgaaaaatggttagtaaccaacttcttaactggcaaaaagttccatgtgctggagc

SEQ ID NO: 243 - DNA, 424 bp, Bos taurus
  Clone ID: 02-BOVMS1-022-Q1-E1-A9
tacataatagatgaaatcaataacccatctcttacagtaaaaaccataggacatcagtgatactgaagctatgagtatacagattatgaggacttaagcttcgactcctacataattccaacatcagaattaaagccaggggagctacgactattagaagtcgataatcgagttgtactaccaatacacataacaatccgaatgttagtctcctctgaagacgtattacactcatgagctgtgccctctctaggactaaaaacagacgcaatcccaggccgtctaaaccaagcaacccttatatcgtcccgtccaggcttatattacggtcaatgctcagaaatttgcgggtcataccacagtttcatacccagtgtccttgagttagtcccactaaagtactttgaaaaatgatctgcgtcaa

SEQ ID NO: 244 - DNA, 405 bp, Bos taurus
  Clone ID: 02-BOVMS1-023-Q1-E1-A5
atgcgacgtcatagctcttctatagtgtcacctaaattcaattcactggccgtcgttttacaacgtcgtgactgggaaaaccctggcgttacccaacttaatcgccttgcagcacatccccctttcgccagctggcgtaatagcgaagaggcccgcaccgatcgcccttcccaacagttgcgcagcctgaatggcgaatgggacgcgccctgtagcggcgcattaagcgcggcgggtgtggtggttacgcgcagcgtgaccgctacacttgccagcgccctagcgcccgctcctttcgctttcttcccttcctttctcgccacgttcgccggctttccccgtcaagctctaaatcgggggctccctttagggttccgatttagtgctttacggcacctcgaaccc

SEQ ID NO: 245 - DNA, 385 bp, Bos taurus
  Clone ID: 02-BOVMS1-023-Q1-E1-A9
atgcgacgtcatagctcttctatagtgtcacctaaattcaattcactggccgtcgttttacaacgtcgtgactgggaaaaccctggcgttacccaacttaatcgccttgcagcacatccccctttcgccagctggcgtaatagcgaagaggcccgcaccgatcgcccttcccaacagttgcgcagcctgaatggcgaatgggacgcgccctgtagcggcgcattaagcgcggcgggtgtggtggttacgcgcagcgtgaccgctacacttgccagcgccctagcgcccgctcctttcgctttcttcccttcctttctcgccacgttcgccggctttccccgtcaagctctaaatcgggggctccctttaaggttccgatttagtg

SEQ ID NO: 246 - DNA, 352 bp, Bos taurus
  Clone ID: 02-LIB188-001-Q1-E1-A9
gccgcgggatacttgtcctccgactcagtctgccggtctctctgccactccacgtctacatcttctgggtagaagccgatgaccatgcaggtgacgctgaccgtgcttttgctgagctcttccttgggtgggtccaggacatacacctgcggctcccgggccggccctttgctcctggagatgatcctcacgatggaggccgagaggcctttgatgttgaccttgcacttgaactcctttcctccagtccagtcctggtgctggatgggcagggcgctgaccacgcggttcgagcggccgcccgggcaggtacaaaaaccttacataaattaaaaggatgaataaatttaca

SEQ ID NO: 247 - DNA, 435 bp, Bos taurus
  Clone ID: 02-LIB188-002-Q1-E1-A5
gcgggatacaatacatgacaaaaaaaagcagggccttagaagttttggttcttttttcctcccctgttgcaaattcacgttgtggttttggttgggtggtggagagcgctgtcgtctgtgggtggcgctgcccgccaggggcgggcgggcgggactctctactcgaaggtgaccacgtttatagattctgagacgggaagtggagggtgaataggtcacggtggccttttttttttaagtttaacttttccttttttgctgtctagtcatcttcatcagtcttctgcttcttggtatccacatcgtcatcctcgtcatcttcagctgcccgtttgcccgtagctgcctcggcctcctcatcttcatctccgtcctccttcctcaccgtacctgtgtggtggggatgactgaagccccgcgacagcccaagcatcg

SEQ ID NO: 248 - DNA, 104 bp, Bos taurus
  Clone ID: 02-LIB188-002-Q1-E1-A9
cggcccgggatacttgcgcacagggggcgcgatgatcttgatcttcattgtgctgggtgccatggcagtgatctctttctgcatcctgtccgcgatgccggggt

SEQ ID NO: 249 - DNA, 383 bp, Bos taurus
  Clone ID: 02-LIB188-003-Q1-E1-A5
tcctcaaggtggtctcataattctggaatggcaggtcccgctgatacaaaatgaagacagacaacacaacgtttactctgtagagacatcctaactcctactatgcatgcatggtgatcttgaatgcaactcgtcctaaaaacttgtcacggtcattctgggtttttaggttgggtgatccatcgatcttgcactcaaccattacttctcttacgtcagcatcactaccaaagccgacctggacggcaactagtggctgcaggtagttcccatgcagttttttcccataatatggaaaatattttaaatctatcgttccattggaaggataagttgatagaaatgctgtgctttcgctctttccagtacagccactgccactg

SEQ ID NO: 250 - DNA, 398 bp, Bos taurus
  Clone ID: 02-LIB188-004-Q1-E1-A5
tttcacatcatcaattcgacctccatcatcgttcgaatatacaattctttgcatgtacatatggactattcgggtgagccacatgatgctctagatactgatcctaacacttcaacgggtgtaggcgtgcagcgctaatgtcatcctcaccggggacatggctcaagtgctgttatgcgctggctgactgcgcgcacatgttagtctggaacacgtgtcacccttgttcgatgcttgggcagtcgcagggcttgaatcatcggggctcaaaaggtattcccagtgaggccgcatgtcggtcgacaatacagtagagctctcagcacgttggatgaacagcatgatcatgctattgagtcacccacgtaccttggcataagcatggtcatatatgtttc

SEQ ID NO: 251 - DNA, 415 bp, Bos taurus
  unsure (374): unsure at all n locations; Clone ID: 02-LIB188-005-Q1-E1-A5
gatactcactgaattttcccacggggaaactgttgaagggacaggagggcagggctgggcagggggagccatggcttggttttcctccatccagtgaaggaagtgacagaggagggacataactaaagagagtgaccaaggggaccatcactacgtggactgagatgcatcgtgcagtgacttcagacaacctgagtccttccgtccggaaatgcaatgtcatagtggaaaagtaaaaaaacaaaaagatccaaagaaaagaacaaagtgcatacaaagcaaactgctaatgtagggatagttctaaggcagccagcagggagaagaccaaatgtctggggtggtcacctgacggtgccccactcccactgtcncatgccagaccaggctgtcgggccaccggtgccctctcgac

SEQ ID NO: 252 - DNA, 433 bp, Bos taurus
  unsure (369): unsure at all n locations; Clone ID: 02-LIB188-008-Q1-E1-A5
gccatggcagccggatacgtgggcaagggccctcgcatggtccgggacgtgttccgcctggccaaggagaacgcacctgccatcatcttcatagatgagattgatgccatcgccaccaagagatttgatgcccagacaggggctgacagggaggttcagagaatcctactggagctactgaatcaaatggatggattcgaccagaatgtcaacgtcaaggtgatcatggccacaaacagagcagacaccctggatcctgccctgctgcggccgggacgccttgaccgtaaaattgaatttccactccctgaccgccgccagaagagactgattttctctactatcaccagcaagatgaatctctctgangaggttgacttggaagattatgtggctagaccagataagatttcaggagctgatatcaactcca

SEQ ID NO: 253 - DNA, 370 bp, Bos taurus
  Clone ID: 02-LIB188-008-Q1-E1-A9
cccacttggcatctgtttgctttctttttttttttttttttttttttttatttttttttttttttttttttttttttttttttttttttttttttccggggaaaaagtttaatccaaaagaattttccccggggggttttcaaaacaggaaagttgggggttaaattttaagttaggggtttaaaaacaatttttccaaaaagcaaaaagggttaccccaaaaaaaaaggggccaaaaaaagggaaaccctaaaggggctaaaaaacgcaagttcagggccaaacggggaatttgggccagaacccggaaccccaggggcggtaacccaaaaagccccccagaaaacccaggggaatccccagagaaaaa

SEQ ID NO: 254 - DNA, 422 bp, Bos taurus
  unsure (279): unsure at all n locations; Clone ID: 02-LIB188-009-Q1-E1-A5
gggcgcgggaacctcttgtagagttgtggctgagaactataagagtccaatttgtccagccttatcaggaaaaggggctccagacccccaaactcaagatgccggaatcccagtggagaaactgccccggtgtgaagaggcaggatgtgggggcctgctgcgacctcacgtggtgtggtttggagaaaacctggaccctgccatcctggaggaggtggacaaagagctggccctctgtgacctgtgtctagtggtggggacttcctccgtggtctatcncgcggccatgtttgccccccaagtgtcagcccgcggcgtgccagtggccgaattcaacatggaaaccaccccggccaccgaaagattcaggtttcatttccaggggccgtgtgggacgactcttcctgaagccctcgctcctc

SEQ ID NO: 255 - DNA, 364 bp, Bos taurus
  Clone ID: 02-LIB188-010-Q1-E1-A5
ccatggcggcgggatacataatttattagatttagttacaacagaggtgatttcaatgggaatttcttatactgtcctacttattaaaaaaatttttatcatttgctcccaaatctgttatatcaaaatgtatttttgaattatacatttaattatgtcactttcagctaatttatttcataaatattagagatctcattttaaattattttatgaatatttccaaaacatgttttccaattattatttttatagtgaagacaaataattgacctatatttatatataaatattctctgcacagtaatatttttttaaagagaataatacggaaagtgcaaaagctcaggctctctaggggaaa

SEQ ID NO: 256 - DNA, 414 bp, Bos taurus
  Clone ID: 02-LIB188-010-Q1-E1-A9
gccatgcgcggcgggatacctgcagggaagattgctattgacagaggctatgacatcgcccagatatcccgacacctggacttcatcagccttttgacctatgactttcacggagcctggcgccagacagtcggacaccacagccccctgtttcgaggccaggaagatgcaagttctgacagattcagtaacgctgactacgctgtgagctacatgctgaggctgggggctccagccaataagctggtgatgggtatccccacttttgggaggagctacactctggcctcttccaagacagatgtgggagtccccatctcagggccaggaattccaggccagttcaccaaggagaaaggggatcttgcctattatgagatctgtgactttctccacggagccaccaaccacaga

SEQ ID NO: 257 - DNA, 443 bp, Bos taurus
  Clone ID: 02-LIB188-011-Q1-E1-A5
gccacgggaccgggatagatgaacacgcaccccggccgcctgctgctctgcctcacgcttggcctctggctcaccaccgcctgggtgctgtcggtagccgagaggcaggccgtgaatgccactgggcacctttcagacacactgtggctgatccccatcacattcctgaccattggctatggtgatgtggtgccaggcaccatgtggggcaagattgtctgcctctgcactggcgtcatgggggtctgctgcacagccctgctggtggccgtggtggcccggaagctggagtttaataaggcagagaagcatgtgcacaacttcatgatggatattcagtatgccaaagagatgagggagtcagctgcccgagtgctgcaggagtcctggatgttgtacaggcaggacgcctacgacggcagagattacatccgcctgaacga

SEQ ID NO: 258 - DNA, 430 bp, Bos taurus
  Clone ID: 02-LIB188-012-Q1-E1-A5
gccatgggcgcgggatacatgattactggcggcagctacgggacagagtgtgactcagacggctaacactgaaacctcatggcttggaagtgccagacaaacattccttggcctttgttgtccgcattgaaaggattaatggggtgagttcactggtgcaaaggaccattgccagacttcgcctgaataagattttcagtggtgtctttgtgaaggtgacccctgaaaccataaagacgcttcgtatcgtggaaccttatgtgacctggggatttccaaatctgaagtctgttcgggaactcatcgtgaaacgtggacaaacgaaggtcacgaacaaggtcatgcctctgacagacaacacagttattgaggaacacctggggaagtttgatgtcatttgcttggaagacctcattcatgaaattgcctt

SEQ ID NO: 259 - DNA, 407 bp, Bos taurus
  Clone ID: 02-LIB188-012-Q1-E1-A9
cattgtgccgacgctgcatgctgccgcagcgccatggaaggccggatacgtcagtaaacaaatcaatgttttgctaataatgatctcaaactttctaagttaaattttaaaaaacctgatcgtttgccatatggggtgggtttgctcttagaaccgcatgctgtataaatgctcacagtgcatataggactcagtccttagatgttccttttcttttaagaaataacctctttgaagttgtgacgtcgcgctctgtccacttcgcgtcgcccctctgtgcacacgcatcgcattggaggccgtgcagttagcggctctacacgctcgcctggctagatgtcactgttttctttctttaaagaaacaagtcctgttccaaaatcgttgttggatcgggtggggggtgt

SEQ ID NO: 260 - DNA, 392 bp, Bos taurus
  Clone ID: 02-LIB188-016-Q1-E1-A9
cacaccgaaaacagcgacacagagacctgcacactcttcaccacggggacatttaatggcatctcccaacactccgttgtcttgggaagacagctccaccgaaaaacgtaaaaagtgcagcacagcaagaaggcaattagcctcaaagaagcaacaagtgtaagtttatcagatggcacgagcaagggagacaggtcgcgggtcctctctctccatgacagaggcgttagctcgctgtcaaccgcaagagaggccgtctgccacgtcaggctgacgagacaagtcttcttcctgagcccctacgttcgtggagtgagattaactaatatttcctgcagaaacgtcatgcaacttaaagcgaaaaacaaatcaagcctgtgaatactgctgtg

SEQ ID NO: 261 - DNA, 402 bp, Bos taurus
  Clone ID: 02-LIB188-017-Q1-E1-A5
gatacttgtcctccgactcacgctgcccgtttctctgccactccacggcgatgtactctgggtagaagctggtgaccatgcaggtgaggctgaccgtgcttttgctgagctcttcctggggtggggccaggacatacacctgcggctcccgggccggccctttggtcctggagatggtcctcacgatgggggccgggaggccttcgttgtggaccttgcacttgaactcctttcctccagtccagtcctggtgctggatgcgcatggcgctgaccacgcggtaggtgctgttgaactgctcctctctctgcttcgtcgtggctgtgtttacctccacgtcgtccacgaaccacgagaacttcacctctgggtcatcgtggcccacgtctaccaacacacacg

SEQ ID NO: 262 - DNA, 422 bp, Bos taurus
  Clone ID: 02-LIB188-018-Q1-E1-A5
gccatggacgcgggatacggtagttacttggtaaatccagaatcaggatacaatgtctctttgctatacgaccttgaaaatctgcctgcatccaaggattccatcgtgcatcaggctggcatgttgaaacgaaactgttttgcctctgtctttgagaaatacttccagttccaagaagagggcaaggaaggagagaacagggcagttatccattatagggatgatgagaccatgtatgttgagtcaaaaaaagacagagtcacagtagtcttcagcacagtgtttaaggatgacgacgatgtggtcattggaaaggtgttcatgcaggagttcaaagaaggacgcagagccagccacacagccccacaggtcctcttcagccacagggaacctcccttagagctgaaagataccgatgccgc

SEQ ID NO: 263 - DNA, 431 bp, Bos taurus
  unsure (150),(367): unsure at all n locations; Clone ID: 02-LIB188-018-Q1-E1-A9
gaaacatgagtcatggcggcagctacgggacagagtgcgactcagacggctaacagtgaaacctcatggcttggaagtgccagacaaacattccttggcctttgttgtccgcattgaaaggattaatggggtgagttcactggtgcaaanggacaattgcagacttcgcctgaataagatttcagtggtgtctttgtgaaggtgacccctgaaaccataaagacgcttcgtatcgtggaaccttatgtgacctggggatttccaaatctgaagtctgttcgggaactcatcttgaaacgtggacaagcgaaggtcaagaacaaggtcatccctctgacagacaacacagttattgaggaacacctgnggaagtttgatgtcatttgcttggaagacctcattcatgaaattgccttcccggggaagaattt

SEQ ID NO: 264 - DNA, 394 bp, Bos taurus
  Clone ID: 02-LIB188-019-Q1-E1-A5
gccatgggcgcgggatacctcagtcaacagcctggtcccacccgtcccggcctcacgcggccccgtttcacatcagtccaacccagaccactctagctcgcatcatgccggtcaaaggaggcaccaagtgcatcaaatacctgctcttcggatttaacttcatcttctggcttgccgggatcgcggtcctttctgttggactatggctccgattcgactcgcagaccaagagcatcttcgagcaagaaaataatgattccagcttctacacaggcgtctatattctgatcggagccggtgcgctcatgatgctggtgggcttcctgggctgctgcggagccgtgcaggagtcccagtgcatgctgggattgttcttcagcttcctcttggtgat

SEQ ID NO: 265 - DNA, 399 bp, Bos taurus
  Clone ID: 02-LIB188-020-Q1-E1-A5
gggatactgctgcactgagcagaatctgctctgtgcctgcttgggcttcccttacaaactcagccttcatttccttgaccagagtggtgagatgccgcttgtctctccacccggggtagagccatgctaggtccagtccatcaaagccatgggtccgcagaaatggtggcaccgacttgatgaaagtcctgcgactctgggtcttggaagctatcttggaaaatctttgagaaccgaagttccatcctccaacagataggagggtcttcaggttggggttcctgttcttgagtgtgttcagtgtgtcatagagcgtcacgtcattccactcccaggtgtcgatctcattgttgcttatgttggcaaagctgtagatgacatgggtgcacaggaaggggt

SEQ ID NO: 266 - DNA, 406 bp, Bos taurus
  Clone ID: 02-LIB188-020-Q1-E1-A9
gccatggccccggaatacaagcatcatgggttaccaaatgagggattcctttggttcccacaaatatctttctaactttgcacaatttaaacttggcctcctcaggtgtaaaacgatgaacagcaaagcgacccttggtgtcatagatcaaacgaaagttctctccagtcttatcaatgctgatgacatccataaaaccagcagggtaggttatatctgtgcggactttgccatcgatcttaatgaaacgctgcatgcaaatcttctttacttcatctccagttacggcatacttaagtctattccttaggaaaatgattacggggagacactcccttatcttgtggggagcggtacatggacgaagggcaaacacgccggtcagtttatccagcatccaatgttt

SEQ ID NO: 267 - DNA, 284 bp, Bos taurus
  Clone ID: 02-LIB188-021-Q1-E1-A5
gggataccacgtgatcagcgccctgcccatccagcaccatgactggactggacgaaaggagttcaagtgcaaggtcaacaccaaaggcctctcggcccccatcgtgaggatcatcactacgagcatagggccggcccgggagccgcaggtgtatgtcctggacccagccaatgaagagctcagcaaaagcacgctcagcgtcacctgcatggtcaccggcttctacccagaagatgtatccgtggagtggcagagaaaccggcagactgagtctgaggacaagt

SEQ ID NO: 268 - DNA, 397 bp, Bos taurus
  Clone ID: 02-LIB188-022-Q1-E1-A5
ctgctggacctgcaaaacaacaaaataactgagatcaaagatggagactttaagaacctgaagaaccttcatacactgattctcatcaaggggaaaattagcaaaatcagccctggggcatttgctcctttggtgaaattggaacgactttatctttccaagaatcaactgaaggaattgccagacaaaatgcccaaaactcttcaggagctgcgtgtccatgagaacgagatcaccaaagtgcgaaagtctgtgttcaatggattgaaccagatgatcgtcgtagaacttggcaccaacccgctgaagagctcaggcattgaaaatggagcctttcagggaatgaagaagctctcctacatccgcattgctgacacaaatacaactaccatccctc

SEQ ID NO: 269 - DNA, 370 bp, Bos taurus
  Clone ID: 02-LIB188-022-Q1-E1-A9
gcgggatacccaggtcagccatcccggttggaacgagagcttaaacagctttacttagaacgagtattgaagggtgatgtggaaaaactttctaaattcaagatccgcattgaagacccgccccgcaggaagcacatggttttcctgggaggtgcagttctagcggacatcatgaaggacaaagacaacttctggatgacccgacaggaataccaagaaaagggtgttcgtgtgctggagaaactcggggtgacggttcgataaactgtgaagctggttcccatcacgccctaacgtgctttctttttttccattactgccagtctttgaactcattcaactccaggacctggaagaggcctgtcggtcc

SEQ ID NO: 270 - DNA, 448 bp, Bos taurus
  Clone ID: 02-LIB188-023-Q1-E1-A5
gtcctcttaaatgagccttctgcagacgccccaacctctcgctaccagaccattgaggaaaatatcaagatctttgaggaagacgatgttgaattcatcagcgtgcctgtcccagagtttgcagatagtgaccctgccaatatcgttcatgacttcaacaaggtgagccaggtgccctgaactgtaaaaagaatgcaggtcccttgatggatgcttttgtagttttaattttaatattggctaatttattctatttacggtttactgtttgaaaagaaagtttttaaaaaggccttgggttttttctgccctacaagaaaaactccaacatttgatgggctctttgtctgaggccaaccctcagggaacctactttttcatcccctttccttgtctgtcttaatgcacaccagatgctgttccttctctgctgttaaattgcttttaa

SEQ ID NO: 271 - DNA, 339 bp, Bos taurus
  unsure (247): unsure at all n locations; Clone ID: 02-LIB188-023-Q1-E1-A9
cggatacaactgccaagtgaaacacgttactttggaacaaccccggatagttaagtgggatcgagacctgtaagcagcaccatcgaggtttgaagatgcctcatttgggttggactaattccaaattctgttttcttgctttttaacactgatagactttgatgctttgtgcacataaataagaaactgtattgatgttaccacaaacatcttcttttgattctctttgtgcctggtttctctgtantgtggtctgtgttggcagtaagccacagtggaggtgctatgctggcatcttagaggtgtggagggaagaactctgacgtccaacatcaacat

SEQ ID NO: 272 - DNA, 396 bp, Bos taurus
  Clone ID: 02-LIB188-024-Q1-E1-A5
gatacagtgccaaacctaccttcgaggggatactcaaaaacccaagagcatcgtctttgaacagcaggtccctctggtcgggtggagagccatagagctggcatctccgaaacttgttttttccaaatttcacctgcgccttgctgtacaagcttccagatcaagtctaccttgccagccacacttcgggccaagacatcattagaagggacctgggccatgtggcactccttgaacgcatccactggcgcccgactgttgttcaggcagagaagctcatactggtccctgtcagccatctcatggcaagttctcaaacactgtcgtctctttaacaacagccacgtctcaatccccgtcctgcagatacttgaatgcatcacaataaccgcagta

SEQ ID NO: 273 - DNA, 406 bp, Bos taurus
  Clone ID: 02-LIB188-025-Q1-E1-A5
gatacacatgtaatcaccagcgtggacgcaggggccgcgctcattcaggaggaccacatcaggtcatccttcctgcaggacagccagagcagccgcagtgccgtgaccgcgtccgctggaatcaccttcctgaacatcgtgaacttcaaatttgaggagaactacacctcgcagaacaccttcaccaagagctacctctcaaaccgaactaactccagagttcagagctttggaggacttccattttacccaggcatcaccctccaggcctggcagcagggcgtcagcaaccacctggtggccatggaccgagctggcctgcctctgtatttcttcatcaaccccgaacgactgcctgacctgccgggacccttggtgagaaagctgtcgaagacggtggaagctg

SEQ ID NO: 274 - DNA, 417 bp, Bos taurus
  Clone ID: 02-LIB188-026-Q1-E1-A5
ccatggcagcgggatacttgaactggacagagtcactcgagcccctccagggagctgtggctaaattcttctctgccagctgtgttccctgcattgatagacaagcataccccaacctgtgtcaactgtgcaagggggagggggagaaccagtgtgcctgctcctcccgggaaccatacttcggttattctggtgccttcaagtgtctgcaggacggggctggagacgtggcttttgttaaagagacgacagtgtttgagaacttgccagagaaggctgacagggaccagtatgagcttctctgcctgaacaacagtcgggcgccagtggatgcgttcaaggagtgccacctggcccaggtcccttctcatgctgtcgtggccccgagtgtggatggcaagggagacttgatctgga

SEQ ID NO: 275 - DNA, 403 bp, Bos taurus
  Clone ID: 02-LIB188-027-Q1-E1-A9
accaaatcaagtatgaggagctgcagacactggctgggaagcacggggatgaccttcgtcgcacgaagacggagatttctgagatgaaccggaacatcaaccgtctccaggctgagatcgagggtctcaaaggccagagggcttccctggaggctgccatcgctgacgctgagcagcgtggtgagatggctgttaaggatgctcaggccaagctggccgagctggaggccgctctgaggaacgccaagcaggacatggcgcggcagctgcgcgagtacgtgaataaagaaattaaaaatgccctcaaggaggtgaaacagataaagacccaaatagaacaaaccaatgaagagcgcaaattactgctcagctccctagaggaagccaagaagaagaaagagga

SEQ ID NO: 276 - DNA, 214 bp, Bos taurus
  Clone ID: 02-LIB188-028-Q1-E1-A5
tacctgcaaggaacattgctattgacagaggctaagacatcgcccacatatcccgacacctggacttcatcagccttttgacctatgactttcacggagcctggcgccagacagtcggacaccacagccccctgtttcgaggccaggaagatgcaggttctgacagattcagtaacgctgactacgctgtgagctacatgctgaggctgggggc

SEQ ID NO: 277 - DNA, 248 bp, Bos taurus
  Clone ID: 02-LIB2809-001-Q1-E1-A5
cttataccagcctctcttcgacaagagaagggaattcatcactggtgacgttgagcccacagacgcagagtctgagtggcacagtgagactgaagaggaggacaagttggccggagatatgaaaaataaagcagtcatagcagaaaaagaagcagcagcagcagaagagcccgcccccagaggcattccggagttctggttcaccattttcagaaacgtggacatgctgagcgagctggtgcaggagt

SEQ ID NO: 278 - DNA, 151 bp, Bos taurus
  Clone ID: 02-LIB2809-002-Q1-E1-A5
actgttgcattaaaagcgccatcagggacatcgagcaagggtcaaaagtccagagcgccattcatgcacccctggagattagtccttacatgtccattgtcactacagggcccagggctcagagacgagttagcttcaagggggtacaagt

SEQ ID NO: 279 - DNA, 414 bp, Bos taurus
  unsure (398): unsure at all n locations; Clone ID: 02-LIB2809-004-Q1-E1-A5
gcacgatagccggataagactctgattcttagatcatgcgttcaatgtcttccttgctcaagcggcccttgtcattagtgatggtaatcttgttctcttttcctgtgctcttatccacagcagaaacattgaggatgccattggcatcaatatcaaaagtgacttcaatctgaggaacaccacggggggcaggaggtatgcccgtgagttcaaacttgccaagcaggttgttatccttggtcatggcatgctcaccttcataaacctgaatgagcacaccatgctggttgtcagagtatgtggtgaaagtctgcgtctgcttggtaggaatggtagtattgcgcttgatgaggaacagtcatgactccagcagcagtttcaattgcaaggggaaagangagtgacatccaacag

SEQ ID NO: 280 - DNA, 424 bp, Bos taurus
  Clone ID: 02-LIB2809-004-Q1-E1-A9
ataatggtgagaatgtggaaagcctttcaagcagtgaggtaagatagtgttcattcagaggcaatttcccaaatttagagcaataaaatgctgtattatctttttgggttgccattgccatctccaaagatccttataggagggtatgtatttcttataattcattagaagcctaaacataaccagggaactaagaatgattaacaagttcatgcgtggttattattatatattttcaatgactattattcttttagaaccagatgaaaatattagagatcatttgttgtcctaaggagagaacaggatgattgagagacatgtatgcatgcaaagttgcttcagccctttccaactctgtatgaccctatggaccgtaacctgccaggtttctctgtctatgggattctccaggcaagaatac

SEQ ID NO: 281 - DNA, 411 bp, Bos taurus
  Clone ID: 02-LIB2809-005-Q1-E1-A5
taaagcatgaaagcctgaatgggcatatctctctggggatagggcactgctttctggggaacaggcaggactttggactgacaaagggacatcacggactgaggaggaaacatgacagttggaggaagaggctggtgaggctggtgcatccaagactggagcagaggcacaggaaggtgcacattttcaacatcagtgagagtcaggctctggctttcagtaaagggctcaactggatatttacggaagggcatttctttgtgcttaggagccatagcctccttcactttggagactcccattacttcaggctgaaggaaaggcggcaccaccacaggggtttgagtaagaggagggatgttttgtgggaggctgttagggatgggcccagggaagggatagactagaaac

SEQ ID NO: 282 - DNA, 421 bp, Bos taurus
  Clone ID: 02-LIB2809-007-Q1-E1-A5
tacatcagaaaggcctgaatgggcatatctctctggggatagggcactgctttctggggaacaggcaggactttggactgagaaagggacagcacggactgaggaggaaacatgacagttggaggaagaggctggtgaggctggtgcatccaagactggagcagaggcagaggaaggttcaaaatttcaacatccgttaaaatccagctccggccttcaattaaaggcctcacctgaatattaaggaaaggccattcctttgtgcttaggacccatagcctccttcactttggagactcccattacttcaggctgaaggaagggcggcaccaccacaggggtttgagtaagaggagggatgttttgtgggaggctgttatggatgggcccagggaagggatagactagagactgtgtctga

SEQ ID NO: 283 - DNA, 432 bp, Bos taurus
  Clone ID: 02-LIB2809-009-Q1-E1-A5
gatacaacagaaaggcctgaatgggcatatctctctggggatagggcactgctttctggggaacaggcaggactttggactgagaaagggacagcacggactgaggaggaaacatgacagttggaggaagaggctggtgaggctggtgcatccaagactggagcagaggcagaggaaggtgcagattttcaacatcagtgagagtcgggctctggctttcagtaaagggctcaactggatatttagggaagggcatttctttgtgcttaggagccatagcctccttcactttggagactcccattacttcaggctgaaggaaaggcggcaccaccacaggggtttgagtaagagggaggatgttttgtgggaagctgttaggggatggcccagggaagggatagactagagactgtttctgggcaaaggggt

SEQ ID NO: 284 - DNA, 379 bp, Bos taurus
  Clone ID: 02-LIB2809-009-Q1-E1-A9
gggatacagcaaaaaggcctgaatgggcatatctctctggggatagggcactgctttctggggaacaggcaggactttggactgagaaagggacagcacggactgaggaggaaacatgacagttggaggaagaggctggtgaggctggtgcatccaagactggagcagaggcagaggaaggtgcagattttcaacatcagtgagagtcaggctctggctttcagtaaagggcccaactggatatttagggaagggcatttctttgtgcttaggagccatagcctccttcactttggagactcccattacttcaggctgaaggaaaggcggcaccaccacaggggtttgagtaagaggagggatgttttgtgggaagctg

SEQ ID NO: 285 - DNA, 150 bp, Bos taurus
  Clone ID: 02-LIB2809-012-Q1-E1-A5
ataaatcatgaaggccttaatgggcatatcgctctggggatcgggcactgctttcttgggaacaagcacgactttggactgagaatcggacggcactgacttctgaggaaacatgacagttgcacgaataggctggtgaatctggtgcat

SEQ ID NO: 286 - DNA, 334 bp, Bos taurus
  Clone ID: 02-LIB2809-013-Q1-E1-A5
ggatacaaaacaaagacaacacagaatatggactcttccagataaataataaaatttggtgcaaagacgaccagaaccctcactcaagcaacatctgtaacatctcctgtgacaagttcctggatgatgatcttactgatgacattatgtgtgtcaagaagattctggataaagtaggaattaactactggttggcccataaagcactctgttctgagaagctggatcagtggctctgtgagaagttgtgaacacctgctgtctttgctgcttctgtcctctttctgttcctggaactcctctgccccgtggctacctcgttttgcttctttgt

SEQ ID NO: 287 - DNA, 433 bp, Bos taurus
  Clone ID: 02-LIB2809-014-Q1-E1-A5
gatacacctaccaccgaagcagtagagagcactgtagctactctagaagattctccagaagttattgagagcccacctgagatcaacacagtccaagttacttcaactgcagtctaaaaactctaaggagacatcaaagaagacaacgcaggtctagctgaaaccaaatgactacttcaaactttcctttggccagttgtctgccttcggtgaacagagaatatgattttcacagatctggctccttcctcgtctcctcttacattttacttttatgccagatttaattttttgattcctgcataataaagccaatcaaatgcaaaagaaaaaacaaaagaaaaaaaaaaaaaagaaaaaaaaaaacacagaaaaacaaaattggccaattatacccaaattaattaggtgcggattaggtacccaagttagg

SEQ ID NO: 288 - DNA, 439 bp, Bos taurus
  unsure (406): unsure at all n locations; Clone ID: 02-LIB2809-014-Q1-E1-A9
gaacccctatcaacaagatagaacttgtgccgtctcattccactgcgacactgattgaggagcccaccgaagtggaagacccctgggacctgcccgagcttaaggacacggggctcaagtggtcagagagagacaccaaagggaagattctctgcgtcttccaagggattgggaaatttattttacttctggtttttctctacttcttcgtgtgctccttggatgtcctgagcagtgccttccagctggttggaggaaaggtagctgggaaattcttcaacaacaactccatcatgtctaatcccgtggcggggatggtgattggggtgctggtgacggtcctggtgcagagttccagcacctccacgtccatcgtcgtcagcatggtggcctcctcactgctgcncgtgcatgctgccatccccattatcatgggagc

SEQ ID NO: 289 - DNA, 289 bp, Bos taurus
  Clone ID: 02-LIB2809-015-Q1-E1-A5
gggatacacgcttattttttttttttttttttttttttggcaccaaatgtagtttattgatgagaagaaagacaacatctccgtaattgcacacaattatttgatatgatggcacttacaggagaagtgattcatcggctgttaaaacattttccacccagcaatttattgaagacttcatttcccctcgacgcagtagtcgtcataccagcatgatactactggagtttatgtagcaagctgttatgacaatttcaccaaaggatgttacactatcaacaatacagta

SEQ ID NO: 290 - DNA, 284 bp, Bos taurus
  Clone ID: 02-LIB2809-016-Q1-E1-A5
gccatgggcccgggatactgttgaattaaaagcgccatcagggacatcgagcaagggtcaaaagtccagagcgccattcatgcacccctggagattagtccttacatgtcctttgtctctctgctcctggtaggcatcctattccatgccacccaggctgaacagttaacaaaatgtgaggtgttccgggagctgaaagacttgaagggctacggaggtgtcagtttgcctgaatgggtctgtaccacgtttcataccagtggttatgacacacaagccatagt

SEQ ID NO: 291 - DNA, 379 bp, Bos taurus
  Clone ID: 02-LIB2809-018-Q1-E1-A9
atacagcaaaaaggcctgactgggcatatctctctggggatagggcactgctttctggggaacaggcatgactttggacggataaagggacagcacggactgatgaggaaacatgacagttggacgaatatgctggtgatgctggtgcatccaagactggagcagaggcagaggaaggtgcagattttcaagcttttttttttattttttttttttttttaatagtgccttaaaatgtaatttattgacatgaagatcgacaaaatctcacttaatgcacacaattatttgatatgatggcacttacaggagaagtgattcaaaggcttttacaacattttccatacagaaatttactgaacactttaattccccttga

SEQ ID NO: 292 - DNA, 308 bp, Bos taurus
  Clone ID: 02-LIB2809-019-Q1-E1-A9
gccttaaaatgtaatttattgaaaagaagaaagacaaaatctcagttaatgcacacaattatttgatatgatggcacttacaggagaagtgattcaaaggcttttaaaacattttccatacagaaatttaatgaagactttaattccctttgactcagtggcctttataccagcatgatactactggaatttaggtaacaagctgttaggacaatttcacttaaggatgttacactatctaaaatacagtagagaactcaagaagaaagagtgccttcaatttgagattgccctattctaaaacagca

SEQ ID NO: 293 - DNA, 368 bp, Bos taurus
  Clone ID: 02-LIB2809-020-Q1-E1-A5
gggaaacggctatgagcccagtctggccagccgtctccggaacctcagcagcccgctgggcctcatggctgtcaaccaagaagcctgggaccacgggctggcctacctgccctttaacaacaagaagccgagcccctgtgagttcatcaacaccaccgcccgcgtgccctgtttcctggcgggagattttcgagcctcagagcagattctgctggccactgcccacaccctccttctccgggagcacaaccggctggccagagaactaaagaaactcaaccctcactggaatggagagaagctctaccaggaagcccggaaaatcctgggagccttcatacagatcagcacctttgaggactacctac

SEQ ID NO: 294 - DNA, 424 bp, Bos taurus
  Clone ID: 02-LIB2809-021-Q1-E1-A5
actgaacctactgccaagcaagagctgacggtcacaaggaaaggtgcaatgatgaagagctttttcctagttgtgactatcctggcattaaccctgccatttttgggtgcccaggagcaaaaccaagaacaaccaatacgctgtgagaaagatgaaagattcttcagtgacaaaatagccaaatatatcccaattcagtatgtgctgagtaggtatcctagttatggactcaattactaccaacagaaaccagttgcactaattaataatcaatttctgccatacccatattatgcaaagccagctgcagttaggtcacctgcccaaattcttcaatggcaagttttgtcaaatactgtgcctgccaagtcctgccaagcccagccaactaccatggcacgtcacccacacccacatttatcag

SEQ ID NO: 295 - DNA, 378 bp, Bos taurus
  Clone ID: 02-LIB2809-021-Q1-E1-A9
gggaaacctggagagattgtggaaagcctttcaagcagtgaggaatctattacacgcatcaataagaaaattgagaagtttcagagtgaggaacagcagcaaacagaggatgaactccaggataaaatccacccctttgcccagacacagtctctagtctatcccttccctgggcccatccctaacagcctcccacaaaacatccctcctcttactcaaacccctgtggtggtgccgcctttccttcagcctgaagtaatgggagtctccaaagtgaaggaggctatggctcctaagcacaaagaaatgcccttccctaaatatccagttgagccctttactgaaagccagagcctgactctcactgatgttgaaaat

SEQ ID NO: 296 - DNA, 444 bp, Bos taurus
  Clone ID: 02-LIB2809-022-Q1-E1-A5
gccatgggcccgggatactttgaatgttcatcttatctaaattacccaggaatttgtggctaaaatcagtttaccacagataagctatgatgtgtctggttaattagcatttttatcttgaatgtaaattaatgtcataaaactaacaatacatgttttttattttttaaggaaattgttcccaatagtgttgaggtgagatatatctactaaatttaaaatatattaacatcatccaggatatcttaaaatttaattaaactttttattttttgaattttttagcagaagcacattcaaaaggaagatgtgccctctgagcgttacctgggttatctggtaaaattttattaaaagttaatcaaagaccaatgtatcagggaatgagcaagaatgttgtattgataaattatctctccttttcaatatctgctaaacttaaag

SEQ ID NO: 297 - DNA, 405 bp, Bos taurus
  Clone ID: 02-LIB2809-024-Q1-E1-A5
gggatactattgactttattcaatcgaataaacattttatttatataaaagacaaacaatgcatagaatgaaaataagtgcttgacacatttgatataaaaagagtatacagcattcacattcctattttaatacatgagtattgctgagatgttccataaaagaatacaactttccctttacgtagtgaaaaaagtcagtatttttaggaactacagaatgttattccttggtcattttcttgaataaggaagagacacacataacacaagccacagtatcatctacattccagtttatgctgatgatgacccagaagtgataaagctcttttgaatcttggcagttcccataatggaccagtattctagaaattcaccactagacgtcaatgagcaacagcta

SEQ ID NO: 298 - DNA, 337 bp, Bos taurus
  Clone ID: 02-LIB2809-026-Q1-E1-A9
gggataccttgaatgttcatcttagctagtttaccagagaatttgtggctaaaatcattttaccacagataagctaagacgtgtctggctaattaacatttttatcttgaatgtacattaatgtcatcaaactaacaatacatgtcttttaatttttaaggaaattgttcccaatagtgttgaggtgatatatatctactatgctttaaaatatatcaacatcatccatgatatcttacactttaagtaaactttttattctttgaattttttatcacaagcacattcaagaggaagatatgccctctgaacattacctgtgctaactggtaaaact

SEQ ID NO: 299 - DNA, 397 bp, Bos taurus
  Clone ID: 02-LIB2809-028-Q1-E1-A9
tcccatggacagaggatcctggtaggctgcagtccatgaggtcgctaagagtcgggcacgactgattcacttttcactttcatgcactggagaaggaaatggcaacccactcctgccgggagccggcatattgcatattgagtgcagcactttccacagcatcatctttcaggatctggaatagctcaactggaattctatcactgccaggagccagcgtgaggaactccgcgcatgacaaaggtcatgaggaaggaggctcggcatacgcaaaggcgggattgagcctcaggagtcccccatctacccccaaaaccagagtctgcctactttctgctttgtgccttcacctgcacctctgactttgcggggggctgtcccccactacctctctggg

SEQ ID NO: 300 - DNA, 378 bp, Bos taurus
  Clone ID: 02-LIB2809-029-Q1-E1-A5
gggataccaacacattagtgttcagcgttgtcatcaaccgagtcaagctcagtgatgctgggatgtatgtctgccaggctggggacgatgccaaagccgataaaatcaacattgacctccaggtgctggagcctgagcctgagctggtttatggagacttgaggagctcggtgacctttgactgttccctgggccccgaggtggcaaatgtgcccaaatttctgtgccagaagaagaatgggggagcttgcaatgtggtcatcaacacgttggggaagaaggctcaggacttccagggcaggatcgtgtccgtgcccaaggacaatggtgtcttcagtgtgcacattaccagcctgaggaaagaggacgcagggcgct

SEQ ID NO: 301 - DNA, 359 bp, Bos taurus
  Clone ID: 02-LIB2809-029-Q1-E1-A9
acttggggcacagagagggtttcagaggatccttgtgaaacactagttaaaagatgacgagtggggagaagtgcgaggaaagaaggaaattagtctgactggctttctgtcctgcaccattgattcaatggagactggcgggaggaaatggaagactagggttggagatgggatgggtggggcaagggatggaaaggaaaaggcagacaactaatgcgttccatttataacaagtaatatatatcaaagacttaaaggagattaaagaccaatcagaataatttggcaactttaattcttaggaagatcaaagttccctccaaacctaatttgatgttttattactaaaagcaaagacc

SEQ ID NO: 302 - DNA, 425 bp, Bos taurus
  Clone ID: 02-LIB2809-031-Q1-E1-A5
gccatgggcgcgggataccttcaacgatgatattcaagggacggctgcggtggctctggccggtctgcttgccgcgcaaaaagtcattgggaaaccgatctcagatcatagaatcttatttcttggagcaggagaggctgctcttggaattgcaaatctgatagttatggctatggttgaaaatggcctctcagaagaagaggcacgaaagaaaatttggatggttgacaagtttggtttattatttaaggggcggaaagctaaaatagaaagtcatcaggaagcatttgctcactcagctccagagagcctacctgatacttttgaagaggcagtaaatatacttaagccttcagctataattggagttgcaggagctggccgacttttcactcctggtgtaatcaaagcaatggctgaaatca

SEQ ID NO: 303 - DNA, 411 bp, Bos taurus
  Clone ID: 02-LIB2809-031-Q1-E1-A9
accccagatggaaattgttcccaatagtgctgaggaacgacttcacagtatgaaagagggaatccatgcccaacagaaagaacctatgataggagtgaatcaggaactggcctacttctaccctgagcttttcagacaattctaccagctggatgcctatccatctggtgcctggtattacgttccactaggcacacaatacactgatgccccatcattctctgacatccctaatcccattggctctgagaacagtgaaaagactactatgccactgtggtgaagagtcaagtgaattctgagggactccacagttatggtctttgatggttctgaaaattccatgctctacatgtcttttcatctatcatgtcaaaccattctatccaaaggcttcaactgctgttttag

SEQ ID NO: 304 - DNA, 432 bp, Bos taurus
  Clone ID: 02-LIB2809-032-Q1-E1-A5
ccatgggcccgggatactttgtaatttttcagtctgagaagctgttccagataacccaggtaacgctcagagggcacatcttccttttgaatgtgcttctgctcaacactattgggaacaatttcctcacttgacgaaatgctttcagcttccatttgcttaatatcttccatggcttgatcctcagttgattcactcccaatatccttgctcagttcattgaccttctcctttccaaacacttctggaaaaggtgccacaaaaaacctgagtaaattttcattgaggacttcttgagggagtccttggtgcttgataggatgtttaggcctggcaagagcaacagccacaagacaggtaaggatgagaagtttcatggttgtcaagatcttgaacccaagactgggaagaagcagcaagctggactttttg

SEQ ID NO: 305 - DNA, 305 bp, Bos taurus
  unsure (218): unsure at all n locations; Clone ID: 02-LIB3057-001-Q1-K1-A5
ccagagcaggaacttgagattcctgttttacctgaagacatctcagaggttgacttagaccatccagatctgttccaaaataagatgctctccaagaatggctaccccaaagcacctggtcatgctgtggcagaggccctaccggaggggctcagtgtggaggacattctaaatcttttagggatggagagtgctgcaaatccaaagcctccatattntcccaatcagtataaccgagagaaagttctgtcaagactgccctatggtcctgggaagatctaaagctaaccagcttccccaaagct

SEQ ID NO: 306 - DNA, 221 bp, Bos taurus
  Clone ID: 02-LIB3057-003-Q1-K1-A5
ggccgttgaacatactagccctggcgcagcgggagccgcccgacgcagttgccccgtgacagagcctcagcctgtctggaagatgccgagactgtgcagcagtcgatcgtgcgctctgctgctggccttgctgcttcaggcctccatggaagtgcgaggttggtgcctggagagcatccagagtcatgacctcactacggaacgtaccctgctggcgtgca

SEQ ID NO: 307 - DNA, 317 bp, Bos taurus
  Clone ID: 02-LIB3057-003-Q1-K1-A9
gcattgagaacgctctaagaaaccatcaccaacatcgacagcaaagatacggcacggaaagattcacacctactcttgcatcagcaggtgccaaatctaccacagatccacggtatgtccaccacccccgtcagcactaatggacccttcaactttcaaaaatacctttaagacctatttcaacagatcgtcatggccttgaactacatccatcaccacacctcagatatgtcaaaccaacttgatcaacggtatgcccaggccaaagcgttcataatcatgaccctaaactactaccatacctccaaacttcctaa

SEQ ID NO: 308 - DNA, 424 bp, Bos taurus
  Clone ID: 02-LIB3057-004-Q1-K1-A5
cagcaacttgcctgaaagagaccactcgacctggacgaaccctttggcagcttcaggccgtccttgaggaggatgactgagacactatgggccacgcgctttgcatctgctctcggggaactctcaccattgaccataagcgctatctcttcatccataaactgggggagggtgggttcagctttgtggacctagtggaggggttacatgatggacagttctacgccctgaagcgaatcctgtgtcatgagcagcaggaccaggaggaggcccaacgagaagcagacatgcatcgcctcttccatcaccccaacatccttcgcctcgttgcttattgtctgagagagcgaggcactaaacatgaggcctggctgctgctacccttcttcaagagaggtacgctgtggaatgagataggaaagct

SEQ ID NO: 309 - DNA, 456 bp, Bos taurus
  Clone ID: 02-LIB3057-005-Q1-K1-A5
aaatgactgaagctttaggggtgcatagaagccaccgtaatttgtatgacattttgaagtgaatgaaatatttttgaacatgcttcttcgacagccagtgttatatttttcagatcaacacaaagcacaatggttactctaaactcaatattttcaaattcacatatttaaaagtcatgcgcaagctgcaacttccctgtctaaattactggctgccaaatttatacctgtttcttcagctgtaccttttgatatttagaatttttaaatttctgtaaagtagattttgtagaatgtaatgtgttcactggctttgtgaagcggtatataattggataatttcttggggtaaactgaatgcttgggctttcaattccgatttcttataaggcattaatttttaatgtaatgaaatactcagagtcattttaatcaaattttccaggattccctttt

SEQ ID NO: 310 - DNA, 403 bp, Bos taurus
  Clone ID: 02-LIB3057-006-Q1-K1-A5
gaggccttcaggatggtgcagcgtctgacgtaccgtcgtaggctgtcctacaatacaggctctaacaaaaccaggctgtcccggacccctggtaacagaattgtttacctttataccaagaaggttgggaaagcaccaaaatctgcatgtggtgtgtgcccaggccgactgagaggcgttcgtgctgtgagaccaaaagttctcatgaggttgtctaaaacgaagaaacacgtcagccgagcctatggtggttccatgtgtgctaaatgtgtcccgcgacaggatcaagcgcgctttccttattgaagagcagaagatcgttgtgaaagtattgaaagcacaagcacagagtcagaaagctaaataaaaaatgaaccgtttttgagtaataaatcaaaacgcc

SEQ ID NO: 311 - DNA, 296 bp, Bos taurus
  Clone ID: 02-LIB3057-007-Q1-K1-A9
gcgccgcgccaacccgcgtccatgcagctccgcaggcaaccgctttccgctccccggccgggggacacgcgccccgcagcccagcggctcgcggttccgctgctactgctgctcgccctccagggggcggcggcgtccgggggccccgaggactccgggtggctccaggacgcggagccctcgagccggctcctctcgcaggcggcgcgcgcggcgctgcacttcttcaacttccgcgccgcctcgcccagcgcccttcaggtgctggcgaatgtgctggacggccgctcgtgggt

SEQ ID NO: 312 - DNA, 426 bp, Bos taurus
  Clone ID: 02-LIB3057-008-Q1-K1-A5
cggactcgtgggcccacgcgtccgttgtcttcgtgggcggacgcgtgggcggacgcgtagtcgtactcgtggggtttcttgaaatcatcaccaccatggacagcaaaggttcgtcgcagaaagggtcccgcctgctcctgctgctggtggtgtcaaatctactcttgtgccagggtgtggtctccacccccgtctgtcccaatgggcctggcatctgccaggtatccattctagacctgttttaccgggctgtcatggcgtcccactacatccatgacctgtgctttcaaatgtccaacgaatttgataaactttttgccaagctcacaggtttcattaccatggccttcaacagctgccataccttctcccttactacccctgaagataaagaacacgcccaacagacccatcatgaagttctta

SEQ ID NO: 313 - DNA, 330 bp, Bos taurus
  Clone ID: 02-LIB3057-008-Q1-K1-A9
gctggcaattctaatataaacaggtacatgccgcttcaacgaggagcgagactttcagggtgatcactttgatcaatatgaagaaggacatttggaaattgaacaagcatcccttgacaagcctatagaatcggataatattggacatcgcttactccagaaacatgggtggaagctgggccagggattgggaaaatctcttcaggcattatgatcctggacttgttgtggcgatggtaaacttagcagtcgtaattatctattatcagactgagatactcctttgacataagttcaccaatatgttaggcttactatctctgatgcagc

SEQ ID NO: 314 - DNA, 380 bp, Bos taurus
  Clone ID: 02-LIB3057-009-Q1-K1-A9
gtcaccaaagagggcctggaacttccataagatgaggaagagaaaaagaaacaagaagagaaaaagacaaagtttgaaaacctctgcaaaatcatgaaggacattttggagaagaaagttgaaaaggtggttgtgtcaaaccggttggtgacatccccatgctgcattgtcacaagcacatacggctggacagcaaacatggaacggatcatgaaggcgcaagccctgagagacaactccacgatgggttacatggctgccaagaagcacctggagatcaaccctgaccattccatcattgagaccttgaggcaaaaggcagaggctgacaagaatgacaagtctgtgaaggatctggtcatcctgctgtacgaaacagc

SEQ ID NO: 315 - DNA, 325 bp, Bos taurus
  Clone ID: 02-LIB3057-011-Q1-K1-A5
aatagatcgcagcgagggagctgctctgctacgtacgaaaccccgacccagaagcaggtggtctacgaatggtttagcaccaggcgccccacgaacgtgcggtgcgtgactggcgagggggcggccgacttttcggccgcgccccgtgtgccgggacgaagggctctacgcaccggaccccggtcccgactcgcggcggtggcgcgccgtgccgcgccccgggggacgcgggcgactgcccgacggccgcgactgcggtggaccggctattccaggcctaccgtggcttccgcggcgctggcgtattgttccggctgggcgggat

SEQ ID NO: 316 - DNA, 199 bp, Bos taurus
  Clone ID: 02-LIB3057-012-Q1-K1-A9
aaaaaaaaaataaaaaaaaaaaaataataaaaaaaaaaaaaaaaaaaaaaaaaaaagagaaaaaaaaaaaaaaaaaaataaaaaaaaaaaaatatataaaaaaaaacattcaaaatacataaataaaatataaaaactatataaatcattatactataaaaaataaattcaacatctaatattttaaacctcctacatt

SEQ ID NO: 317 - DNA, 357 bp, Bos taurus
  Clone ID: 02-LIB3057-013-Q1-K1-A5
cggacgcctggggtcaggtctatacttcagcggaccaccgacaacacccccacgacagcgcatttcctgtcacgcgtggctgcctccatttcctgctgaaccaccaatgattcccccatcacctcccatatcttcagattctctctatgatgcttatacttctggaattatgttaatctattcgtacatgactggttatcatactgcatattacatcagttacaaacaaaaccaaacagaacgatggtactcacatttcaatcaatgaatttaggtgtacctttctaccaagggacatctattctgatgtgccctgactgaagtgaacaaatgtgtcatcattttcttcatacacac

SEQ ID NO: 318 - DNA, 444 bp, Bos taurus
  Clone ID: 02-LIB3057-016-Q1-K1-A5
cgcgtcacgcgggcgaagtcatcaccaccatggacagcaaatgttcgtcgcagaaagggtcccgcctgctccggctgctgttggtgtcaaatctactcttgtgccagggtgtggtctccacccccgtctgtcccaatgggcctggcaactgccaggtatcccttcgagacctgtttgaccgggcagtcatggtgtcccactacatccatgacctctcctcggaaatgttcaacgaatttgataaacggtatgcccagggcaaagggttcattaccatggccctcaacagctgccatacctcctcccttcctacccctgaagataaagaacaagcccaacagacccaccatgaagtccttatgagcttgattcttgggttgctgcgctcctggaatgaccctctctatcacctagtcaccgaggtgcggggtatgaaaggagccc

SEQ ID NO: 319 - DNA, 365 bp, Bos taurus
  Clone ID: 02-LIB3057-018-Q1-K1-A5
cgctgacccaggagaacgtcagctgccttaacaccagcctggtgatcctgatgcgagccggactgaaagagcgactgcccctctacctgcggctgctgcagcggatggagcacagcaagaagtaccccggcttcctgctcaacaacttccacaacctgctgcgcttctggcagcagcactacctgcacaaggacaaggacagcacctgtctggagaacagctcctgcatcagcttctcatactggaaagagaccgtgtccatcctgttgaacccagaccgccagtctccctctgcccttgtcagctacattgaggagccctacatggacatagacagggacttcaccgaggagtgatcttggtcc

SEQ ID NO: 320 - DNA, 368 bp, Bos taurus
  Clone ID: 02-LIB3057-019-Q1-K1-A5
cggccaccgcgcagctgccggtccacctccgccaccgcttagccgcgctcggagccctgccgaggaggctgccgccgccgccaggagcccgcagcccgtgccccgagcccgccgccaccgccctccgagggcgccccaggccgcgccatggtgaaggtgacgttcaactcggctctggcccataaggaggccaagaaggacgagtccaagagcggcgaggaggcgctcatcattcctccggacgccgttgccgtggactgcaaggacccagatgaagtggttccggttggccaaagaagagcttggtgttggtgcatgtgctttggactggcgtttatgcttcgcaaggttgtcaattctgggggggg

SEQ ID NO: 321 - DNA, 451 bp, Bos taurus
  unsure (422): unsure at all n locations; Clone ID: 02-LIB3057-019-Q1-K1-A9
gtttcttgaaatcatcaccaccatggacagcaaaggttcgtcgcagaaagggtcccgcctgctcctgctgctggtggtgtcaaatctactcttgtgccagggtgtggtctccacccccgtctgtcccaatgggcctggcaactgccaggtatcccttcgagacctgtttgaccgggcagtcatggtgtcccactacatccatgacctctcctcggaaatgttcaacgaatttgataaacggtatgcccagggcaaagggttcattaccatggccctcaacagctgccatacctcctcccttcctacccctgaagataaagaacaagcccaacagacccaccatgaagtccttatgagcttgattcttgggttgctgcgctcctggaatgaccctctgtatcacctagtcaccgaggtacggngtatgaaaggagccccagatgctatccta

SEQ ID NO: 322 - DNA, 424 bp, Bos taurus
  Clone ID: 02-LIB3057-020-Q1-K1-A9
ctccggggagactgaggacaccttcattgctgacctggtggtggggctgtgcacggggcagatcaagactggtgccccttgccgatccgagcgcttggccaagtacaaccagatcctcaggtaagaagctgcccgcgctgagtgtgggcttggtccccaggaggagcccgtttgtgctctgtggtacgaggtgggtcaggcgccctggccccagtggtgttaggttggggccagtcaggcacctgatagccctgccctggatcgggcctgctccgcacgactgcctggtggctcctggtgggagagggaactgctcccctctggacaattgcaacctagaatttgggggagctacaaggaggccttagtgattctctgactctccagccttgttttgtgaacaggataacagagctcagagaaa

SEQ ID NO: 323 - DNA, 385 bp, Bos taurus
  Clone ID: 02-LIB3057-021-Q1-K1-A5
cgagccccgaggggctctcgcttttggctccaagcgcacggacgcgctccggccgggcgcgacccgatccggggacagtgccaggtgatgagtttgactgaggcggtacacctgtcaaacggtaacgcaggtgtcctaaggcgagctcagggaggacagaaaccttccgtggagcataagggcaaaagctagcttgatcttgattatcagtacgaataccgaccgtgaacgcggggcctgacgatccttgtgacctttggacttttaagcccgaggtgtcagaaaagttaccacatggataactgccttgtggcggccaagcgttcatagcgacgactgtttgtgatccttcgatgacactgttcctatcctgttaagctgaatt

SEQ ID NO: 324 - DNA, 428 bp, Bos taurus
  Clone ID: 02-LIB3057-022-Q1-K1-A5
acgagacgactcaggtcctgtggacagctcaccagctatgatggctgcaggccccctgaccttcctgctcctggctttcgccctgctctgcctgccctggactcaggtggtgggcgccttcccagccatgtccttgtccggcctgtttgccaacgctgtgctccgggctcagcacctgcatcagctggctgctgacaccttcaaagagtttgagcgcacctacatcccggagggacagagatactccatccagaacacccaggttgccttctgcttctctgaaaccatcccggcccccacgggcaagaatgaggcccagcagaaatcagacttggagctgcttcgcatctcactgctcctcatccaatcgtggcttgtgcccctgcagttcctcagcagaatcttcaccaacaacttggtgtttggca

SEQ ID NO: 325 - DNA, 419 bp, Bos taurus
  Clone ID: 02-LIB3057-023-Q1-K1-A9
atcgcgagcggccgccctttttttttttttttctttgacagtgctttattatctgtgcgcagattttaaatgagatccctaatttccccagtttcgacctaaacatgtacagttctagtactgaccttctaattagcagtatgaccctagacaagccaccttacatctctgcctccacccacatccaagagagataatgacacccttttttaacctacttacttataggtaggtaggcgtaagatttatgttgctgatcaatcacaggtaaaatatataaggtttttcatactaactactttctaatatttgtttttataatttaatcaaaataaaaacggcatactttcagaactacaaaattcagcagttgtatcagatgaatttagtaaatctagtcataatgataaatccattca

SEQ ID NO: 326 - DNA, 414 bp, Bos taurus
  Clone ID: 02-LIB3057-024-Q1-K1-A5
cgacccacgcgtccgggccggtctccattcacatggctcaactggaaatctattttgtgaacaagctcactcaggaacggtccagtatttcagcactttgttcttctggaggtcgactttaagtcatttggtggcaactgcagcttagaagcagcatctgtagttggggaaagatggacttacgggggcttggtaatgcaggtggtgaaggaacaggttatgagagctcttacaaccaagcctagctccctggaccagttcaagagcaaactgcagaacctgagctacacagaaatcctgaaaatccgccagtctgagaggatgaaccaggaagatttccagtctcgcccgattttggaactaaaggagaagatccagccagaaatcttggagctgatcaaacaactacgcctg

SEQ ID NO: 327 - DNA, 411 bp, Bos taurus
  Clone ID: 02-LIB3057-025-Q1-K1-A9
ctcaagatggcccccgcacccgcccctctgcagagaaaccggcagaggcggcggcgagagctggtgtttgttctcacccagccgaagggaaagaaggccaaggggaagaaggtggccccggccccggccgtggtgaagaagcaggaggccaagaaggtggtcaaccccctgttcgagaagaggcccaagaattttggcattggacaggacatccaacccaagagggacctcacccgctttgtcaaatggccccgctacatccggctgcagcggcaaagggctattctctataagcggctgaaagtgcctcctgcaattaaccagttcacgcaggccttggaccgacaaacagctactcaactgcttaagctggcccacaagtacagaccagagacaaagcaagagaagaag

SEQ ID NO: 328 - DNA, 353 bp, Bos taurus
  unsure (334),(340): unsure at all n locations; Clone ID: 02-LIB3058-005-Q1-K1-A9
gcaggcctataggacgttcgcggctgtgcctggcctgcacccgcccctggacacccctgcccaggtaggtggtgggcagccctcaggtgccccgctgcgtgcgcctgcgagggtgtgacacccgaggggctgggtctgagggcgcgcttcccccagcaccccatgctcgggcccacggcctcgccggagcagctgtccttccgcgagcggcagaagtacttcgagctggaggttcgggtgccccaggccgagggcccccctaagcgcgtgtcgctggtgggcgctgacgacctgcggaagatgcaggaggaggagggtgagcaggcggcgcggnggtggnggagggcggtggt

SEQ ID NO: 329 - DNA, 343 bp, Bos taurus
  Clone ID: 02-LIB3058-009-Q1-K1-A5
actcgacgccacgcgtacggtacagacgtatccgcgctagtctccctatgtcacggtcctttctagacgatctgaggggcttgacttctgctgcagaaagtcctttaattggccatatatgcatcattcagctggatctcagtgtcattcctcgcgacaccactttcacagatcctgatgccaatcagactgcaccttagattgatgctcaagcagatcaagagttcagcattgcctaacgccagattgcacaaacccaaagactgtagattatcgactcttatgagtagaaattaaagctcatttagcactggatcattattcatatgtccattttgatgaa

SEQ ID NO: 330 - DNA, 427 bp, Bos taurus
  Clone ID: 02-LIB3058-010-Q1-K1-A5
atcagattgttttaaagcacactttatatttgttatcttgtactaatatatagaaggagtaaatgtatcttccataaggaacttcattggtgagattgcactgtccagattacataagcatatgcatcttctttggtaattgaatgtaaaagagagatatacaaggcttttctttcttactcttccaagtgaaatcctgaaatgtttcatggctaatgtttatctggctgtgatcttaatacaaacctaactgatatttcatctaagagattatttctgtcttgtagttaaaaattaatcctgtattctgcattcttattgtttctctttaccttcaagtaatattggtgctattaaataacatttaaaataatggctatttctgatacttaagtacaatttcagctacagtaattcatgtattaac

SEQ ID NO: 331 - DNA, 380 bp, Bos taurus
  Clone ID: 02-LIB3058-012-Q1-K1-A9
tcgggaggtgggactgagtggcttgtcatccaggcggcccgcgacgtgctgggcttcttgcacgtggtgcgctttgtgcgcatcctacgcatcttcaagctcacacgccactttgtggggctgctcgtgctgggccacaccctgcgcgccagcaccaacgagttcctgctgctcatcatcttcctggccctgggcgtgcttatcttcgccaccatgatctactacgcggagcgcatcggcgctaggccctccgacccgcggggcaatgaccacaccgacttcaagaacatccccatcggcttctggtgggccgtcgtcaccatgacaacactgggctacggggacatgttccccaagacatggtccggcatgctggtggg

SEQ ID NO: 332 - DNA, 425 bp, Bos taurus
  unsure (378): unsure at all n locations; Clone ID: 02-LIB3058-013-Q1-K1-A5
cggacgcgtgggttttaatttgcaagagggaaaatctgttttgtgagtcagagttgtggtggggaaaaaagcttgtaaatttgatgtgtggcctcttaaagaccacaggcgaccttgtgtccacaccctaccctctcctggtctcagacaccctttccactagctgccttgtgcctgttcctgtctttgttgagctgtgttgcatcttcttccaaacgtgtttacaggtcctcctaagccatgttacgtttgcaggcttttataaaaccaaatctgctttcataaagcgtaacatcaaaaaatagctaatcccatcacgacacttgtctctccacacacgttttgcctttggggttatggttggggtttatttctttntgttggtgttgttgtttatttgctattttaaaaggaaattgcacttt

SEQ ID NO: 333 - DNA, 372 bp, Bos taurus
  Clone ID: 02-LIB3058-014-Q1-K1-A9
gaaaatgtgtattaggcaggggtgcagatcagttatttccattcttccattcttgctgtactacatgacatttgaagcacctggatgggctatcaaatgagaaattagcattatacattgatagcattgggaaacattggtctttcatttccacttttttcctctttccctcccccagccctgcaacatggtattcatctggttttaatgctgcataaatatgcattgtctcatgcctgtttgctttggatgctgtatgcccagctgtaacaagatgttgcttcttttgttatttgtatacagccgcttgctttaaactagtagatgctgaaatagctttccttgcatgtctaaaataaaaatattgcatgt

SEQ ID NO: 334 - DNA, 411 bp, Bos taurus
  Clone ID: 02-LIB3058-015-Q1-K1-A5
ggtgaatatagaccacgagaccagggagctgaccaggacgaacctgcaggccgccacagccgtgtgcttcgacgcggcgcagtggaaggtgcgagccctgatggagaaggactcctacccgcgcttcctgaagtcccccgcttaccgggacctggccacgcaagccacagccgcctctgcctccccgtccagcagcagcccagctgagcccttgcacacctgagcctcagggcctggaaggagccagccgggcagagagattgagtcacccacccccgaggtgctgtccccatggggaggcaggttctgcaaagcaagagaggacagcgaaggaaaaagctgacccggtgacaccctcacttccagatccttgggactgaattccatgcgtgagagggtcaccccacttct

SEQ ID NO: 335 - DNA, 450 bp, Bos taurus
  Clone ID: 02-LIB3058-016-Q1-K1-A5
actgcggtaccggatcggagtttccacccacccgtccggagcgagctgagtggttgtgtgattgcgtcccggagaccggtagcgcttgcagcatggctgaccaactgactgaagagcagattgcagaattcaaagaagctttttcactatttgacaaggatggtgatggaactataacaacaaaggaattgggaactgtaatgagatctcttgggcagaatcccacagaagcagagttacaggacatgattaatgaagtggatgctgatggtaatggcacaattgacttcccggaatttctgacaatgatggcaagaaaaatgaaagatacagacagtgaagaagaaattagagaagcattccgtgtgtttgataaagatggtaatggctatattagtgcaggatagcttcggcatgtgatgacaaacctttgagagaagttaacagatg

SEQ ID NO: 336 - DNA, 394 bp, Bos taurus
  Clone ID: 02-LIB3058-016-Q1-K1-A9
gtggatcgtggctccttctccgtagaagtgatcctcaccctttttggctttaagctcttgtacccagatcactttcacttacttcgaggcaaccatgagacggacaacatgaaccagatctatggcttcgagggggaggtgaaggccaagtacacagcccagatgtacgagctcttcagcgaggtgttcgagtggctcccgctggcccagtgcatcaatggcaaagtgctgatcatgcacgggggcttgttcagtgaagacggcgtcaccctggacgacatcaggaagatcgagcggagtcggcagcccccagattcaggtcccatgtgcgacctgctttggtccgacccgcagccgcagaacgggcgctcggtcagcaagctgggcgtgagct

SEQ ID NO: 337 - DNA, 421 bp, Bos taurus
  Clone ID: 02-LIB3058-018-Q1-K1-A5
cccgcctatgccatccctgtggctttgcagaaagcagggctgaccgtggatgacgtggacatctttgagatcaacgaggcctttgctagtcaggctgtgtactgtgtggagaagctgaaactcccccttgagaaggtgaaccctttggggggtgcagtggccttgggccacccgctgggctgcacgggggctcgacaggttatcacgctgctcaacgagctgaagcgccgcgggaagagggcctacggggtggtgtccatgtgcatcgggactggcatgggagccgtcgacgtctttgaataccccggaaactgacagtggccagggcagaggtgcaactcccgcagcaatgccacaccacaggagggatagcaagtcaagacacccgagctgctgtgagcacacataacacgaacagatg

SEQ ID NO: 338 - DNA, 390 bp, Bos taurus
  unsure (311): unsure at all n locations; Clone ID: 02-LIB3058-020-Q1-K1-A9
ggactgtccctcagcagatttagctggggggctgagggccagaagccaggattcggctatggaggcagagcgtctgactacaaatcggctcacaagggactcaaggggcacgacgcccagggcacgctttccaaaatcttcaagctgggaggacgagacagccgttccgggtccccgatggcaagacgctgaagcccagctcccctcccagaaccccgtccccagcttcttaatacaactgcctcgacgctaaccattgtctaaattcccaagtgcagcaggcatccccccaccctgcccacatgcgcgtnctgcaggctcctggccagcggctcaatggagaagacggtgcagctgtcagctcacccttgaagatcaacgaggtccctg

SEQ ID NO: 339 - DNA, 439 bp, Bos taurus
  Clone ID: 02-LIB3058-021-Q1-K1-A5
catttataacacaaagcagagtagtatttttatatttaaatgtaaaaacaaaaaaattatatatatgggtgtgcagataaatgtgtgttttctctttagggagaaaaagccattctggttacggggaacccaaatttgagactaagtagtctggttagaaataaggatctccttttgagtgggcgtggggatgggagaggctgtgctggaagagttggctgtttggggctgatattccctcacgaccacttgagggcttctctctgccctgcttgcccttctgggaggctgacgttggttggttaacaggtggaagcccatgatagcagtagccatcacctgagccccaggtttaaaagacacacatgtacttgtacacacaggggtttggaaatatgagttggctggtcaacttgagcatgttactgacaagggggta

SEQ ID NO: 340 - DNA, 451 bp, Bos taurus
  Clone ID: 02-LIB3058-022-Q1-K1-A5
ctaatattgagtatccacaatcctaaaggacttacatgaacattaatatgaatatctttgatcgtatatattggatcaacatacctactaggcctcttaccccattcattctcaccatcagcacaactatcaatcaacctatgcatagccatcctcctgtgagcaggagccgtaatttcaggatcccgcaatatttctcatgcatcacttgcccatttcttaccacatggaacacccactccactaatcccaatactagtgcttattgcaactatcaccctttttattcaacctatagccctcgccttgcgactaacagctaacatctatgcatgacacctattaattcacctaatcagatgagctacacttgcgctaatgagcattagcactacaacagctctaattacatttaccattctaatcctactaacaattctagagtttgcag

SEQ ID NO: 341 - DNA, 371 bp, Bos taurus
  Clone ID: 02-LIB3058-023-Q1-K1-A5
cccaatagagccctatacccggcctcatccggccttgtggcgaatggtctttgggctcagcgtgctctacttcctgttcctggtattcctcctcttcctgaacttcgagcaggttaaatccttgatgtactggctagacccaaaccttcgctatgccacaagggaagcagacgtcatggagtatgctgtgaactgtcatgtcatcacctgggagaggattatcagccactttgatatatttgcctttggacatttttggggctgggccatgaaggccctgctgatccgaagttatggtctctgctggacaatcaatatcaccctggagctgaccgagctttcttcatgcatcttctaccccaaattttttt

SEQ ID NO: 342 - DNA, 372 bp, Bos taurus
  Clone ID: 02-LIB3058-024-Q1-K1-A5
cggacgcgtgggcaaaacggaaactggagtgcatgcttagttgtgcttatttgctcagtcatgtctgactctttgtgactgcatggactgtatgcccaccaggctactctgtccatggggattcttcaggctagaatactggagcgtgttgccatgccctccttcaggggacctttccaacccagggatcatacccaggtcttctccattgcaggtggatcctttaatgtctgatccaccatggtaaagatagactctaaaacagagactgcgctaagactttgaaggacattacatgcttataaagtgatcaatcccactagcagatagcaactgtgaatatatatgtaccaaaccaggactagctaaata

SEQ ID NO: 343 - DNA, 408 bp, Bos taurus
  Clone ID: 02-LIB3058-024-Q1-K1-A9
aacaaaatggcggtgccgaaggggagcctatggctcagggcccaactggggatcccgccgctgctgctgctggccatggccctggccggaggctcgggaaccgcttcggctgaagcgtttgactcggtcttgggtgatacggcgtcttgtcaccgggcctgtcagttgacgtatcccttgcacacctaccccaaggaagaggagttgtacgcgtgtcagagaggttgcaggctgttttcaatttgtcagtttgtggatgatggaattgatttaaatcggaccaaattggaatgtgaatctgcatgtacagaagcatattcccaatctgatgagcaatatgcttgccatcttggttgccagaatcagctgccatacgcagaattgagacaagagcaactcatgtccctg

SEQ ID NO: 344 - DNA, 420 bp, Bos taurus
  Clone ID: 02-LIB3058-025-Q1-K1-A5
ggaagatgatatagataaaattaaacccagtgagtctaatgtgactattcttgggcgatttgattacagccagtgtgacatttggtacatgaggttttctatggatttctggcaaaagatgcttgcattgggcaatcaggttggcaaactttatgtttgggatttagaagtagaagatcctcataaagccaaatgcacaacgctgactcatcacaaatgcggggctgctattcgacaaaccagtttcagcagggacagcagcattcttatagctgtttgtgatgatgccagcatttggcgctgggaccgactgcgataaagtactttttccaatcaaaattagcgtgtgttttctgtgtacaatagaactaatgtatcctgctagtaagggcacatagagcatttagagttgtctttcag

SEQ ID NO: 345 - DNA, 427 bp, Bos taurus
  Clone ID: 02-LIB3058-026-Q1-K1-A9
caaaacaaatgctaaatggatagcgttaattttgtagctttatgtttttgtgcttctaccaagcctgatcttaaaatgggcaattttatgaagacacttagttgtgagcgtcacgtttccagcgatcaaaaatctctagtctatttagactgtccttgggtgtcagtcttcccgtgttttgtagattttttttttttaagcaatagtttctagattacctgctttgaatgctcactgagcttctctcaactatttttcaggagtctatttaagtttttttttttaaataaacattaagatttcctttctggtacttttttcttgcctatttttagcacagagatttttgaagcgatcagtatctgtcattgtaaaatataactttattaaatttgcaatgtctttctataaattataaccccctaaa

SEQ ID NO: 346 - DNA, 356 bp, Bos taurus
  Clone ID: 02-LIB3058-027-Q1-K1-A5
tacgctttctggagcagcataacaaggcgctttctgtcgagctcaaccagctgctgtccaatgagcggaccaaactgagcggcggctaccatgctgatctgcacgagctgcgcctgcggctcgatcaactcactgccaacagctcccggctcgatgtggagagggacaacctgacacaggacctgagcaccttgaggcataatctccaggatgaaaccaaccagaggctggaagctgataacaacctgtctgcctatcgacaggaatcatattaagccaccctggcccgtctggatcaggagaggaagatagagtctctggatgaggaaattcggttcttgatgaatatccattaa

SEQ ID NO: 347 - DNA, 249 bp, Bos taurus
  Clone ID: 02-LIB3058-029-Q1-K1-A5
gggaggctctggacttcactccgccaccctcgaggggtccttgagcctcggggctccgtggtgcctgcaggagaagccaggaggaccgcctgggctagcagaccctctcccctgaagtgtgtccggattctgcctctagccaaagtataggggtctgccatccactgcccgcctcctgcccctcggctgcatgtccaccgaccacgcctgcctgaggacaaaggcttgctctgtctgcacacccttacc

SEQ ID NO: 348 - DNA, 309 bp, Bos taurus
  Clone ID: 02-LIB3058-030-Q1-K1-A9
ggcggattccattcttttgtagtgttccagagatgacaactgggaccaggggatggaaataccataatggaagtggtttttgggtgagaatgctgctgcttctgctgctaagttgcttcagtcgtgtctgaccctgtgcgaccccatagacggcggcccactgggcttctctgtccctgggattctccaggcgagatcactggagtgggttgccatttccttctccaatacatgcatgcatgctaagtcgcttcagtcgtgtcgtggaccgcagcccaccaggctcctctgtcacgggattctccaggc

SEQ ID NO: 349 - DNA, 193 bp, Bos taurus
  Clone ID: 02-LIB3058-031-Q1-K1-A5
ctagacgtacgcaccccagtcaacggaatccatgccacagcacagtcaacgcatctgcagccgcgcaacacggcagctacaatatccccgcgcggctgcgcaccctgcacaacctggtgatccagtactcctaataggtccgatcactatgaaaacttcaaacccctatatcctaaaatttcacaagtaccaa

SEQ ID NO: 350 - DNA, 434 bp, Bos taurus
  unsure (158),(208),(332),(402),(413): unsure at all n locations; Clone ID: 02-LIB3058-034-Q1-K1-A5
gccacagctgatttggacatcatatttgtctccactaaatgtccatatctaatttaatggatatttaacttgcctaaataaatccctttatgctacatttaactggcagaaaagcagccatcctggccatggactccaaggacttctgttgaattggngtttctctgttctcttttgtagaataatgtgtaggttgatgtaacttcangagatgctagttatgaacagaggatttgcaaaaaaggatgcagagcaaaatgctgtctaaagtgaaagagattgcactactttttttttacccataaaagtattatatgtccattaagattgangtaaaatttatagctatataaaacagacataatttaatgttgtatttttcttttttctttaacatttcanacatcttctgntattaaatgtcattttaatgg

SEQ ID NO: 351 - DNA, 455 bp, Bos taurus
  Clone ID: 02-LIB3058-036-Q1-K1-A5
tacccacgcggccgcggacgcgtgggctttgctgtttgtactagcccataggtctcaaaagggtgaagtcatctttgggcctgaccccagcaagaccagcatctccaggctccagccttcctccttgtgcctgacagtcagggaaagagtgggactggccagagaccaccttctcgggtcagccagcttgtctggatctatggtgggactgcagctcttccttacccaaggggaggtaaggccaggcctctagcaacgtggcgttgtctgtcatgacctttaaaggcccaagggcctgtccctgtctcctgactaaaaggcatctgcatccctgttcatatcacacaacagagaaacttgttctcgtggcatgtaccatccctgtgagagagcgttgtatatgattttgtattttttaattcattttaatctacaaggttggaatctagttttta

SEQ ID NO: 352 - DNA, 409 bp, Bos taurus
  Clone ID: 02-LIB3058-038-Q1-K1-A5
aacgcttgatctaatgtcttcatattactagcatgtataatagctttcatagtagggatgccactatatggcctccacctttgactacctaaagctcacgtagaagcccccatcgcaggctccatagtccttgcagcagttctactaaaactaggggggtacggtatgctacgaatcacactaattctaaaccctatgaccgactttatagcatacccattcattatactctccctatgaggcataattataaccagctcaatctgcctccgtcaaacggacctaaaatcactaatggattactccttggaaggcaacttacaattggttatcgtagccatccttatccagacaccttgaagctacttaggagcaaccgcccttatgattgcccacggcctaacatcct

SEQ ID NO: 353 - DNA, 389 bp, Bos taurus
  Clone ID: 02-LIB3058-040-Q1-K1-A5
ctggaggcgaagaatgcgttcggccaatcgcaagccagaagatgagggtgctgtgggctgccgaggtggacgcgcttctggcaggacgccaggcggacatggagggagagctgtggcccgaggagaccctgactacacaatagacccgggagaaggacagccagacttgagagcaagcgctgagccgctacagcgattacctgcgctggcagcagaccctgcctgaccaggtgcaagaggagctgctcaacacccaggtcattcacgaactgacggcgctgatggaggagaccacgaacgaagagaaggactacaacgacgagctggagggacagctaggccccatcgcccaagagacacaagcccgcgtgttcaatgagctgtaagca

SEQ ID NO: 354 - DNA, 424 bp, Bos taurus
  Clone ID: 02-LIB3058-041-Q1-K1-A9
acccactcgtgcgccgagagggtggggaaggcggtttccgtgcgagagaggactcggggcagccaggctggggcggtgccggagtgccggcgctttgaactctgggtgaaggtgaagcacaacttttgcaactcgtgctggcggctctcctccccccagtataaaaagaacttcatggatcagactgctaacaagtacatggaagatttgaagagctgaagaaaaaaaaactcactgctaaacttgttttttaaaatatctaggttggaatttgcccttgacaaataacaagatgatgagtgatgcaagtgacatgttggctgcagcgctggagcagatggatgggattatagcaggttctaaggccctggaatattccaatgggattttcgattgccagtcccccacctccccattcatggga

SEQ ID NO: 355 - DNA, 404 bp, Bos taurus
  unsure (241): unsure at all n locations; Clone ID: 02-LIB3058-042-Q1-K1-A9
gccagggctgcgggcctggtgtggctgtcgccatggggtcacacagactcggacacgactgaaacgacttcgcagcagcagcagcagcagcagcagcagcagcggcatagatatcaaaagggtttagaacagtcaggtaggatcacacagcaccgtgaagcaatacttctccacttagccaaagctacaaaagatttctgtctaggtcaacctaaagagatcacggaagaggaaagaaacnaaaatccattagcaaaggcagttaacctctcaagaaaccttgtgctaggcacaacactcttttctgggggtccactttccctacaacctcctgatcccattctgtacccattcctttgcttctcccatcctgaaactgccacctggaagaaagaacgacgtcg

SEQ ID NO: 356 - DNA, 368 bp, Bos taurus
  Clone ID: 02-LIB3058-043-Q1-K1-A5
agaccttttgatacttactgccacttctttgccaccaagggcgcactgtagggcaccaagaagggccacaaactccacctggactacatcgggccttgcaaatacatccccccctgcctggactccgagctgactgaattccccttgcgcatgcgggactggcttaagaacgtcctggtcacgctgtacgagagggacgaggacaacaacctcctgaccgagaagcagaagctgcgagtgaaaaagatccacgagaatgagaagcgcctggaggctggcgaccatcctgtggaactgctggcccgggacttcgagaagaactacaacatgtacatcttccctgtgcactggcaattcgggcagctgga

SEQ ID NO: 357 - DNA, 425 bp, Bos taurus
  Clone ID: 02-LIB3058-044-Q1-K1-A9
ggctgctgcaatatgtggacgatctgcttctggccgctgagaacaaggatgattgctgggaaggaaccaaggcctcgctgagactgctgatggaggctggttaccgggtctcgaaaaagaaggctcggatctgcaaggaggaggttggccaatcgcaagccagaagatgaaggttctgtgggttgccgtggtggtcgcgcttctggcaggatgccaggcggatatggagggagagctggggcccgaggagcccctgactacgcagcagccccgggggaaggacagccagccttgggagcaggcgctgggccgcttctgggattacctgcgctgggtgcagaccctgtctgaccaggtgcaggaggagctgctcaacacccaggtcattcaggaactgacggcgctgatggaggagaccatgaagg

SEQ ID NO: 358 - DNA, 432 bp, Bos taurus
  Clone ID: 02-LIB3058-045-Q1-K1-A5
gacggccacgtctccctgcaagagtacttggcctttatgatcagccgtgagaccgagagcgtcaagtccagcgaggagattgagagcgccttccgggccctgagctctgaagggaagccttatgtgaccaaggaggagctgtaccagaacctgactcgggaacaagccgactactgcgtctcccacatgaagccctacgtggacggcaagggccgcgaactccccactgcttttgactacgtcgagttcacccgctcgctcttcgtgaactgatcctctgctcctaggttagcctggcccacgctgcttgccctaccgtcgccttgctgcatgtcaactcctctctgtgctcttaagaaaaatattccagacagtgttgctttccagtgtaaccttaacttgcttagctgggtttaagatttagtagaaaac

SEQ ID NO: 359 - DNA, 428 bp, Bos taurus
  Clone ID: 02-LIB3058-046-Q1-K1-A9
cggacgcgtgggcttttgcttgaaattttatgggaagatgtaaatgaatacatatgcctctgtacacatacaacacacacacacacacacacacacacagcacacacagcacacacgtgcatgaagtcaactgtcctccaaatgtgtgctctgggtgtgtgttgtgcataaagccaacccacagattttcacatgtggggcagtcaccaggcacttacctgttcagtgagctctccacatgggtttacgatgtttgagaaacactgaaaactcatgacttgcatggtgaacttgctggtctccatttccagtgttaattctaagctgctatacagcatggtgggggcttcccaggtgactcagtggtaaagaatccacctgccaatgcaggagacacaggttcgatccctgggttgggaagatgccct

SEQ ID NO: 360 - DNA, 434 bp, Bos taurus
  Clone ID: 02-LIB3058-048-Q1-K1-A5
atctttatgaagcacttgtcacgtgccttacattgagctctttaaaaagtaatttatcaatccctaataaattcaagtcaaaaaaggagaaattccttttattttttttaatttttttattattatttttttttactttacaatattgtattggttttgccatatatcaacatgcatccaccacgggtgtacacgtgttccccatcctgaacccccctcccacctccctacatgtataatatcatagaaacaaatcgccagtccaggtttgatgcaggatacaggaagcttggggctggtacactgggatgacccagagggaatggtatggagaaattccttttaaaaatttattatatcataattgaaatataaagagccatgaagtactactaaaatttccattctgttgcctgcttaaataagttctcata

SEQ ID NO: 361 - DNA, 430 bp, Bos taurus
  Clone ID: 02-LIB3058-049-Q1-K1-A9
gtgctagatcgcgagcggccgccctttttttttttttttaataccactttaaatggagtgtacaacagcattggtaatactgcaaggtgacagactcttgtttagaaaacaaaaattacttgctactctggctgatacattcccatgagtcttcaatggatgaaaatgtatcgtgaatttcagctgcaaattattacaaaactttcacaatctagccacgtggtgctcagaaaagatttcgacattctaaaattttactgaaatgaaaatgctaattctccaacagtatacttttactgaagaaaaacataagtgaccaaatcttatggttttagggctaaacaacagaaaactgactacatcatatgcgtgcagttaatggggtggttctgagtcgtcttctcatccctctacctgatccatgacatga

SEQ ID NO: 362 - DNA, 431 bp, Bos taurus
  Clone ID: 02-LIB3058-050-Q1-K1-A9
cgccgggccgcgttgtacatacgcccgtgcagcgtcccctgtccctggtgcggcctccgcttcgtttttctttcagaaaataaacgtgctgtgttcacagaaggcccttcaccgcgggagcggacgagcagtagcttggcgtctcggtgtttaaaacgggaaatgacctgtggcgtctccgcgtgtgaagggacgggaggcccgaggggcagccggcctcctgtgaaggctcggccgcctgaggggggcccttcctgcccgcggggctaccccccgccacgtggacggccccggccgagggctgcccgcagagccctcgccgggcggaacccctctgggcccttgttcgggaccccgagcccgaggtcagtgcccagagtcacagccgaggactgtcgaagggggcgcaaggagccgggggatggcgcgaa

SEQ ID NO: 363 - DNA, 183 bp, Bos taurus
  Clone ID: 02-LIB3058-051-Q1-K1-A5
ccgaggcccgaatcatgctgtggtctcacggaaagataaggcaacttgtgtggagaaaatattaaacaaacagcaggatgattttggaaaatctgtaaccgactgcacgagcaatttttgtttattccaatcaaattccaaggaccttctgttcagggatgacactaaatgtttcgcaattga

SEQ ID NO: 364 - DNA, 316 bp, Bos taurus
  Clone ID: 02-LIB3058-054-Q1-K1-A5
ctcaagcaaaatacacagcctatttgttctgaaccctggggtttcctgcagctcactttcatcgccttaacctcgtgtgtgtctgtacctcgcgtgtgtctatttcgatttatgtgtatgaccccaaaactgaagttagtagcgaagtctcaggtttgggtagtcgtgaagtgcacaatatctaattctacctgaatcttttgagggaagattaccaatagaaagccttggtaagattatttggtaggaccaaataaagtacacgtactgtacataaaacagattttgcatctatataataaagcaatgttgtaag

SEQ ID NO: 365 - DNA, 415 bp, Bos taurus
  Clone ID: 02-LIB3058-054-Q1-K1-A9
cccgggctgaccccacagttgaaagtgatgatgctttcaagaatagaatggaagttaaggtgaagattcctgaagaattaaaaccatggcttgttgaggactgggacttagtcaccaggcagaagcaacttttccaactcccagccaagaaaaacgtggatactattttggaagaatacgccaactgcaaaagatcgcaaggcaatgttgacaacaaggagtatgcagttaatgaggtggtgggagggataaaagagtatttcaacgtgatgttgggcacccagctgctctacaaatttgagaggccccagtatgctgaaattctcttggctcaccctgatgcgccgatgtcccaggtttatggggcaccacacctactgagattatttgtaagaattggggcaatgttggcata

SEQ ID NO: 366 - DNA, 297 bp, Bos taurus
  unsure (18),(85),(116),(185),(188)...(189),(202)...(204),(206),(220),(227),(231),(241)...(242),(254),(272),(277): unsure at all n locations; Clone ID: 02-LIB3058-056-Q1-K1-A5
ccggggcgacccacgcgnccgcgcggcccgagaaacagcgcgaggaccgccagagagacgaaaggggccgagagcggagcgcagncggagccgccgcgccccgaagggggggacancagccccaagcaggaagaaggggagcggaagggcaacgagcgagagggcaccggcaaggagacacccangannggggaccgaggcnnngnccactacacaggcnggctgcncganggcaccaagnncgacaccagccnggaccgcagggacaggancaccngcgaccgggggaaaggggag

SEQ ID NO: 367 - DNA, 177 bp, Bos taurus
  Clone ID: 02-LIB3058-056-Q1-K1-A9
tctagatcgcgagcggccgcccttttttttttttttttcatcacaattaattctattccacagcatgtttaggggaatgttattctcaggaagatgttcaggactcacataattaatcaacagatcctgtaaagtacatacatttatggatccctacttttcatttaagcagcataa

SEQ ID NO: 368 - DNA, 472 bp, Bos taurus
  unsure (278): unsure at all n locations; Clone ID: 02-LIB3058-057-Q1-K1-A5
gttacacagtttgtttcacaaactcaaatacttattcccaataaggagaattcaacgctgcctttcttgcagacccctctaaaaataacatacataaaaattctcattcattcagtatctcctctctctctctctctctcacacacacacacacactcacacttcttctaaccccaacaattcatttcaaacaccattagattgctctgaccaagatatgcatctgcatcaggagtttcaaaggcccaaatcattgtgtcataaggtgactatttatntctttgagggccagtttattcattctattgatatcttttatatatatttttcatgtcataattgtttttttttctatcttattttttatattttttttactttatttttatgtatattattaaattcttttttttttgttattttctaaattttttttatatatttttatatttctatatatttctattttttt

SEQ ID NO: 369 - DNA, 424 bp, Bos taurus
  Clone ID: 02-LIB3058-058-Q1-K1-A9
gctggatttagggagggcatcctgctaccatgcctcttcccaacaccctggggaccagtcttctgttctgttctgtttgtcatcatttaatgttcccactgcatgctgtgacttccccctccccaaacaagagaccccactgcatgttctgagacagtgtggggtgctaagataaagaagggtgtgggtgtggatggagggtggacaaagcttggtcctgtcagttaacagggtcttgcatgaggctctgtatgccccagggtaccgaccagatccccaggttccagccagaagccatgccccaggctggaccctgatctcccatgtacagggcagcctggcagcgttgggctgagcttccagaaccggtgggtttgaactggccttgtggtccaaggcagctctgaacaggattgggacaggt

SEQ ID NO: 370 - DNA, 448 bp, Bos taurus
  unsure (391),(431): unsure at all n locations; Clone ID: 02-LIB34-001-Q1-E1-A5
agcagagtcttgggagggcgtgcgagatgccagcagggcccacgccgtgtgcgcacaggatccggagagaatgaacaacagcagatttacgctggacggaaagcaccagaccttccccatttcggaggactgcctgatcctcaacatatacagcccggctgaggccccctcgggggcaggaaggccagtcatggtgtggttccacgggggctctctcgtgactggcaccgccacctcgcacgatgggtctgccctggccgcctatggggacgtggtcgtggtcacagtccagtaccgcctgggcttccttggctttttcagcactggggacaagcacgctcctggcaactggggcttcctcgacgtcgtggctgctctgcgctgggtgcangggaacatcaccccctttgggggtgacttcaactctgtcnacatctttggtgaatct

SEQ ID NO: 371 - DNA, 401 bp, Bos taurus
  Clone ID: 02-LIB34-002-Q1-E1-A5
ggaatttttcccttttaattgcttcttcctgtagcactcataagggctgggacatttaggttaaactagaacactcttgcctggaaaatcccatggacggaggagcctggtgggctgcagtccatggggccgctaagagttggacatgactgagcaacttcactttcacttttcactttcatgcattggagaaggaaatggcaacccactccagtgttcttgcctggagaatcccagggacaggggagcctgatgggcggccgtctatgaggtcgcacagagtcggacacgactgaactgacttagcagcagcagcagcacaacattttcatgggtttgttaaaacttaaataaactggaactgttttggttcccacaatcctcaattgattgtttattta

SEQ ID NO: 372 - DNA, 416 bp, Bos taurus
  Clone ID: 02-LIB34-004-Q1-E1-A9
gatgatttcttgcaacttcgatggatttagaaccatggtgacatttaatatcgctactctttctgtgcatctctgcttaatgcacaggtgtgtttcgacgagatacacggacgagtgagattgctcatcggtttaaagatttgggagaagaacattttaaaggcctggtactgattgccttttctcagtatctccagcagtgtccatttgatgagcatgtaaaattagtgaacgaactaactgagtttgcaaaaacatgtgttgctgatgagtcccatgccggctgtgaaaagtcacttcacactctctttggagatgaattgtgtaaagttgcatcccttcgtgaaacctatggtgacatggctgactgctgtgagaaacaagagcctgaaagaaatgaatgcttcctgagccac

SEQ ID NO: 373 - DNA, 412 bp, Bos taurus
  Clone ID: 02-LIB34-005-Q1-E1-A5
gactaagttatattaattagggatggtaactctcatgccagccaccgcggtcatacgattaacccaagctaacaggagtacggcgtaaaacgtgttaaagcaccataccaaatagggttaaattctaactaagctgtaaaaagccatgattaaaataaaaataaatgacgaaagtgaccctacaatagccgacgcactatagctaagacccaaactgggattagataccccactatgcttagccctaaacacagataattacataaacaaaattattcgccagagtactactagcaacagcttaaaactcaaaggacttggcggtgctttatatccttctagaggagcctgttctataatcgataaaccccgataaacctcaccaattcttgctaatacagtctatataccg

SEQ ID NO: 374 - DNA, 355 bp, Bos taurus
  Clone ID: 02-LIB34-005-Q1-E1-A9
cttgctaatttcaaaaactatcagttctttattggtgaaaacatgaatccagatggcatggttgctctgctggactaccgtgaggatggtgtaaccccatatatgattttctttaaggatggtttagagatggaaaaatgttaacaaagttggcagttactttggatcaatcacctgtcgtcataactggctggctactgcttttcatccacacaacaccaggacttagacagatgggactgatgtcatctcgagctcttcatttgttttgaacgttgatttatttggagcggaagcattgtttttgagaaaacgtgtcatgtaggttgtctaaaaataaaacgcatttaaactc

SEQ ID NO: 375 - DNA, 385 bp, Bos taurus
  Clone ID: 02-LIB34-006-Q1-E1-A5
acaccagtgaagtcatcaagtgcccccagcccaagaccctggactcattcaccatcattcaggacctgcagcctcaataccagtaccgggactatttcatcgccacctgcaaaaaaggctacgagcttgtggaggggaacaaggcactcctgtccttcacagctgtctgccacgatgatggcacatggcaccgtgccatgcccaggtgcaggatcaaggactgcgggcagccccgaagcctgctcaacggggccttcaattacaccaccagagagggggtgaacacctacgatgcacgtatccagtactactgccatgagcccttctacaagatgcacaccagatgtggcacaagcgagtctgagcgagggctgtacacctgcac

SEQ ID NO: 376 - DNA, 360 bp, Bos taurus
  Clone ID: 02-LIB34-007-Q1-E1-A5
gggaatggcaacccactccattattcttgcctggagaattccttggacagaggagcctggtaggccagatacagtccatggagttgcaaagagttggacatgactgagtgactaacactttcactttcattcataatattaattttttctttatttttaactttaagttatatgctgactgacaatatattgaatcctgtggaaaacataatgtacttacacaaatgtaagtaagagctgatagatgcagagaacacaaagaataaaattcacaatatttgctagaacatacgaattagaaaaccatcataggatactagtctattacaagaagagtaatgattttatttgtcataaaag

SEQ ID NO: 377 - DNA, 406 bp, Bos taurus
  Clone ID: 02-LIB34-008-Q1-E1-A5
cgcaccctccgagtgtaatcttctacattctttcattgctttcttcagcatgcctggcatatgttgctacccgagacaactgctgcatcttagatgaaagatttggtagttattgcccaactacctgtggaattgcagatttcctgaataattaccaaaccagtgtagacaaagatctacgaactttggaaggcatcttatatcaggttgagaacaaaacatcagaagccagagagctggtcaaagcaatccaaatcagctataaccctgatcaaccatcaaagccaaataacatagagagtgctaccaagaattccaagagtatgatggaagaaattatgaaatatgaaacactgataacaacacatgaatcaacaattcgatttttgcaagaaatatataactc

SEQ ID NO: 378 - DNA, 418 bp, Bos taurus
  Clone ID: 02-LIB34-009-Q1-E1-A5
ctttggcacaatgaagtgggtgacttttatttctcttctccttctcttcagctctgcttattccaggggtgtgtttcgtcgagatacacacaagagtgagattgctcatcggtttaaagatttgggagaagaacattttaaaggcctggtactgattgccttttctcagtatctccagcagtgtccatttgatgagcatgtaaaattagtgaacgaactaactgagtttgcaaaaacatgtgttgctgatgagtcccatgccggctgtgaaaagtcacttcacactctctttggagatgaattgtgtaaagttgcatcccttcgtgaaacctatggtgacatgggtgactgctgtgagaaacaagagcctgaaagaaatgaatgcttcgtgagccacaaagatgattacccaagacct

SEQ ID NO: 379 - DNA, 371 bp, Bos taurus
  Clone ID: 02-LIB34-010-Q1-E1-A9
gctggctcgaatgtcatgcagaccttcaccttctatgccagtgaagacaagctggagaacagggggaactatgttgcagagaaaatatccgggcagaaagtcaatgaagccgcttgtgacattgcccggcaagtggctgatgaaggagatgctttggtagcagggggtgtgagccagacaccttcgtaccttagctgcaagagcgaaactgaagtcaaaaaagtctttcagcaacagttagaggtcttcgtaaagaagaacgtggacttcttgatcccaaattattttgaacatgttgaagaggctgtatgggcagttgaagccttgaaagcatcagggaaaccagtggcagcaactatgtgcatcggccc

SEQ ID NO: 380 - DNA, 437 bp, Bos taurus
  unsure (285),(345),(388): unsure at all n locations; Clone ID: 02-LIB34-010-Q1-E2-A5
cagaagtgacggaacgctgctcggatggctggggctttgatgctaccaccctggatgagcatgggaacatgctgtttttaaaaggggagtttgtgtggaagggtcatgcctgggcccggcagttgatctcagagaggtggaaggatgcccccagtcccgtggatgctgcattccgctatgatcgtaacagtgtccttctgatcaagggggacaaattctgggtatatcctcctgagaagggggaggaatatccaaagttgctccaagagaagtttcctggaatcncattcccactggatgcagctgtggaatgtcaccgcggagaatgctctcatgagggtgtcntcttcttccaaggcaaccacacgtggttctgggacttctctancaaaaccataaagaaacgttcctgccagccgttgggaactgctcctcgg

SEQ ID NO: 381 - DNA, 287 bp, Bos taurus
  unsure (104): unsure at all n locations; Clone ID: 02-LIB34-011-Q1-E1-A5
ggtcgacccacgcgatcgagcggaggcatccgagttccggacacggtcggcgtgaggaccaagctggcgcggggcgatgctgcgggtgcggtgtctgcgcggcnggagccgcggtgccgaagcgctgcactacatcgggtctccgcttggaagaactgtaacgggatgggtgcagcgaactttccagagcacccaggcagctacggcttcctcccggaattcctgtgcagctgatgacaaggccactgatcctctgcccaaagactgccctgtctcctctttcaacg

SEQ ID NO: 382 - DNA, 312 bp, Bos taurus
  Clone ID: 02-LIB34-012-Q1-E1-A5
acaaaactttggcacaatgaagtgggtgacttttagttctcttctccttctcttcagctctgcttattccaggggtgtgtttcgtcgagatacacacaagagtgagattgctcatcggtttaaagatttgggagaagaacattttaaaggcctggtactgattgccttttctcagtatctccagcagtgtccatttgatgagcatgtaaaattagtgaacgaactaactgagtttgcaaaaacatgtgttgctgatgagtcacatgccggctgtgaaaagtcacttcacactctctttggagatgaattgtg

SEQ ID NO: 383 - DNA, 414 bp, Bos taurus
  Clone ID: 02-LIB34-012-Q1-E1-A9
gctgggtgctcctcttgagtcagccctatccacggcagagatgttttccgtgagggacctctgcctggtcctgagtttggtgggtgcaattaagacagaagatggtagtgatcctcccagtggtgactttttaactgaaggaggaggggtgcgtggcccaagacttgtggaaagacagcaatctgcctgcaaagagacaggctggcccttctgctctgatgaagactggaatacaaaatgcccttctggctgcaggatgaaagggttgattgatgaagtcgatcaagattttacaagcagaataaataaactaagagattcactatttaattatcagaagaacagtaaggactctaatacattgaccaagaacatagtggaactaatgagaagggattttgccaaagctaacaa

SEQ ID NO: 384 - DNA, 418 bp, Bos taurus
  Clone ID: 02-LIB34-014-Q1-E1-A5
agagaagaacattttaaaggcctggtactgattgccttttctcagtatctccagcagtgtccatttgatgagcatgtaaaattagtgaacgaactaactgagtttgcaaaaacatgtgttgctgatgagtcccatgccggctgtgaaaagtcacttcacactctctttggagatgaattgtgtaaagttgcatcccttcgtgaaacctatggtgacatggctgactgctgtgagaaacaagagcctgaaagaaatgaatgcttcctgagccacaaagatgatagcccagacctccctaaattgaaaccagaccccaatactttgtgtgatgagtttaaggcagatgaaaagaagttttggggaaaatacctatacgaaattgctagaagacatccctacttttaatgcacagaactcc

SEQ ID NO: 385 - DNA, 287 bp, Bos taurus
  Clone ID: 02-LIB34-014-Q1-E1-A9
aaataggggagaccaacccttcgaacatccacaagaatgtgcggtaagctataaatgggcaccatagtctcttctgcctgggctttggcttcgatgtcagctatgccttcctgaatatcatggcagtacaaaacagatgtatggccaggcgcatctatgatgtgtcagactccgccctgaagttgcatgacttctactacgtggtgaacatgacagtgatgacgtcagtgtcactttgagtacccaatcactgctgtcgaggctgtcgcacatagactcttcatggt

SEQ ID NO: 386 - DNA, 404 bp, Bos taurus
  Clone ID: 02-LIB34-015-Q1-E1-A5
ggaggattcggtaactgacttgttcccctaataattggtgctcccgatatagcatttccccgaataaataatataagcttctgactcctccctccctcattcctactactcctcgcatcctctatagttgaagctggggcaggaacaggctgaaccgtgtaccctcccttagcaggcaacctagcccatgcaggagcttcagtagatctaaccattttctctttacacttagcaggagtttcctcaattttaggagccatcaacttcattacaacaattatcaacataaagccccccgcaatgtcacaataccaaacccctctgttcgtatgatccgtaataattaccgccgtactactactactctcgctccctgtattagcagccggtatcacaatgctatt

SEQ ID NO: 387 - DNA, 416 bp, Bos taurus
  Clone ID: 02-LIB34-016-Q1-E1-A5
gtttcagaaactttcctgaaattttcttctcgttttctcttaccgtatttattaattttaagtctttctttaaggatatttagctctgaatggcaattaaaactcactttggactgtattcccaagttactaaacacagagttattataaatttgtctatttgatgagataatattttagcttatttcctaaatatataataaattcattgtgatattttgcatttttttcatattttgtattttaatgatcacacataattgggtcttggtgattttttaaattattttaaaaatagtttagtatatactaatataacaggagcagactttaggaattcaaatgcctaggtatttcattacctctcaatcattcctatttaattattcttttttaatggagataattatatcttt

SEQ ID NO: 388 - DNA, 370 bp, Bos taurus
  Clone ID: 02-LIB34-016-Q1-E1-A9
agagcccgtggcactgggggccccaaggaggagaacgggggtcaccatgtcttggtcctcgcaccctccgagtgtaatcttctacattctttcattgctttcgtcaacatgcctggcatatgttgctacccgagacaactgcggcatcttatatgaaagatttggtagttattgcccaactacctgtggaattgcacatttcctgaataattaccagaccagtgtagacaaagatctacgaactttggaaggcatcttatatcacgttgagaacaaaacatcagaagccagagagctggtcaaagcagtccaaatcagctataaccctggataaccatcaaagccaaataacatagagagtgctaccaag

SEQ ID NO: 389 - DNA, 417 bp, Bos taurus
  Clone ID: 02-LIB34-017-Q1-E1-A9
gatgagaacagtcttaaagttcctccaaattccttggaaccactcagtattacaccatgaagagatgattggaaaagctgggggagtatctctgtcaaaagtggagagatctacagaccaagtcatcaagccagtcaatgtgggagctctatcaaaatgggttgggaagatacctccagatgttttacaagacatggcagtgattgcacccatgcttgccaaacttggatatgacccatatgccaatccacctaactatggaaaacctgatcccaaaatccttgaaaacaccagaagggtctataaaggagaatttcagcttcctgaatttcttaaagaaaaacctcagtctgagcaggtggagtagcagagccagaaacctcttacatacatgagggaagactgctgcccttttgg

SEQ ID NO: 390 - DNA, 421 bp, Bos taurus
  Clone ID: 02-LIB34-019-Q1-E1-A5
atgaaaagaagttttggggaaaatacctatacgaaattgctagaagacatccctacttttatgcaccagaactcctttactatgctaataaatataatggagtttttcaagaatgctgccaagctgaagataaaggtgcctgcctgctaccaaagattgaaactatgagagaaaaagtactgacttcatctgccagacagagactcaggtgtgccagtattcaaaaatttggagaaagagctttaaaagcatggtcagtatctcgcctgagccagaaatttcccaaggctgagtttgtagaagttaccaagctagtgacagatctcacaaaagtccacaacgaatgctgccatggtgacctacttgaatgcgcagatgacaaggcagatcttgccaagtacaaatgtgataatcaggatac

SEQ ID NO: 391 - DNA, 381 bp, Bos taurus
  Clone ID: 02-LIB34-019-Q1-E1-A9
ggcgactgtcattcacaaccccctgaaagcgcttggggaccagttctacaaggaagccattgaacactgccggagttacaactcccgcctgtgcgcagagcgcagcgtgcgcctcccattcctggactcgcagaccggggtggcccagaacaactgctacatctggatggagaagaggcatcgaggcccaggccttgccccgggccagctgtacacataccctgcccgctgctggcgtaagaagagacgattgcacccgcctgaggatccgaaactgcgggtgctacaaataaaacctgaaagtggagctgcccctgaagaaggatgggttcaactcagaaagcaccaccctggaaagcgctgctccgccggtgaaggggg

SEQ ID NO: 392 - DNA, 428 bp, Bos taurus
  Clone ID: 02-LIB34-020-Q1-E2-A5
ccgggagctatctcgctagtgcaaatgtctgccggccagaggttcgcctttgcaatatgcattctagaaataagtctcctgagagcggggcccactcccagctacgacccagcagaaagacaaggcataccattgcccatagactgcaggatgagctcctggagtgagtggtcgaaatgtgacccttgcctcaaacaaatgtttcgttcaaagagcattgagatctttggacaatttaatgggcgaaagtgtgtggacgccgtgggagaccgacagcagtgtgtacccacagaggcctgcgaagaccccgaggatggctgtggcaacgatttccagtgcggtacaggcagatgcataaagaatcgacttctgtgtaatgaagacaatgactgcggagactattcagatgacgataactgtcaacagga

SEQ ID NO: 393 - DNA, 412 bp, Bos taurus
  Clone ID: 02-LIB34-021-Q1-E1-A5
ggccgggtccgggtttgagtcgctggagcagtgcttggaaaaacatctgccactcgcagaactgcaggaggtcaaacgccttctctatggcaaagagaccaggaagctcgacctgcccggcgctgctctcgaggccgcctccagaggggacttcgagctgcagggctatgcgttcgaggccgccgcggagcagcagaggaggccccggactgtgcgtgtggggctcgttcagaacaggaccccgctccccgcggacacccccgtggtgaaacaggtcaccgctctacacagacgcatggaggccgtcgtggaggtggctgccatgtgtggagtcaacatcatctgcttccaggaagcgtggacgatgccctttgccttctgtacgagagagaagcttcctggacggaatttg

SEQ ID NO: 394 - DNA, 374 bp, Bos taurus
  Clone ID: 02-LIB34-022-Q1-E1-A5
ggagaacttctccgtgatgaaaggaaaaacccagattcacagtatggtgaactcattgaaaagtacattaaagatggaaagattgtgccagttgagataaccatcagtttgttaaggagggaaatggatcagacaatggcagccaatgctcagaagaataaattcttgattgatgggtttccaagaaatcaggacaaccttcaaggctggaataagaccatggatgggaaagctgatgtatcttttgttttattttttgactgtaataatgacatctgtattgaacgatgtcttgagaggggaaagagtagtggtagaagtgatgacaacagagagagcttggaaaagagaattcaaacctatcttcagtcaac

SEQ ID NO: 395 - DNA, 410 bp, Bos taurus
  Clone ID: 02-LIB34-024-Q1-E1-A9
ggtcgacgcacgcgatctgaactgcatgataatgaggtgatacaggacgtggtggcagaaaaatgaagaggatcctggttttcctccttgctgtagcctttgtgcatgctctagagagaggccgagggtatgagaaagataaagtctgcaaggaccttgccagcctgggaagagatgacttcacatctttgtcaatggtcctatacagcagaaaatttcccagtggcacctttgaacagatcagccatcttgtgaatgaagttgtttccttaacagtaacctgctgtgcggaaggggccgatcctgactgctatgacaacaggactttagcattgtctgacaagtcctgtgaaagcaactctcaattccaagtgcacgctggaactcctgagtgcgtgcaccgatgaggg

SEQ ID NO: 396 - DNA, 410 bp, Bos taurus
  Clone ID: 02-LIB34-026-Q1-E1-A5
aaccccgtcagccaggcagaaagctccgggagcagcttcatggaagagaaacagattctgtgcgtggggctagtggtgctggacatcatcaatgtgatggacaaatacccagaggaggacacggacagcaggtgcttgtcccagagatggcaacgcggaggcaatgcatccaactcctgcactgtcctctccctgcttggagccccctgcgccttcatgggctcgctggcccggggccacgttgctgacttcctggtggctgacttcaggcagcggggcgtggacgtgtctcaggtggcctggcagagcagaggggagaccccgtgctcttgttgcatcatcaacaactccaatggctcccgtaccattgtactctacgacacgaacctgccagatgtgtccgctaaaga

SEQ ID NO: 397 - DNA, 411 bp, Bos taurus
  Clone ID: 02-LIB34-027-Q1-E1-A5
tcgacccacgcgtacggaatggataatcctgacacattttattccttgaagtaccaaatcaaggagggcgactgtccttttcaaagtaacaaaacttggcaggactgtgactacaaggactctgcacaagctgccacaggagagtgcacagcgaccgtggccaagagagggaatatgaagttctccgtggctatccagacctgcctgatcactccagccgagggccccgtggtgacagcccagtatgagtgccttggctgtgtgcatcccatatctaccaagagccccgacttggagcctgttctgagatatgccatccaatattttaacaacagcaccagtcattcccacctccttgatctgacacaattagaaagagcccaaagacaagtggggtctggatggaactat

SEQ ID NO: 398 - DNA, 406 bp, Bos taurus
  Clone ID: 02-LIB34-028-Q1-E1-A5
aggacgcgtggggttggagtcgctgttggctcttggtggcctggtgctgcttcgggactccgtggagtgggaggggcgtagtctcctgaaggcgcttgtcaagaaatctgcgttgtgtggggagcaagtccacgtcctgggctgtgaagtgagcgaagaagagtttcgtgaaggttttgactccagtatcaacaaccggctggtttaccatgatctcttcagagaccctctcagctggtcaaaacctgggaaagcccttcctggcgggcccctggaagccttaagggccctggacaataggacaggttctggccctgccaccattgctcttgattccctcagctgggtgctgcatcaccttccctgccccatactctggcagacgctgcatgctctgagccgtcag

SEQ ID NO: 399 - DNA, 269 bp, Bos taurus
  Clone ID: 02-LIB34-028-Q1-E1-A9
ggtcaacccacgcatccgaagcaatctgcctgcaaagagacaggctggcccttctgctctgatgaagactgggatacaaaatgcccttccggctgcacgatgaaacggttgactgatgaagtcgatcaacattttacaagcagaatatctaaactaatatattcactatttaattatcacaagaacagtaaggactctaatacattgaccaacaacatagtggaactaatgagatgggattttgccaaagctaacaccaatgataatac

SEQ ID NO: 400 - DNA, 407 bp, Bos taurus
  Clone ID: 02-LIB34-029-Q1-E1-A5
cggacgcgtggggggatatttatgtatacatatagctgattcactctgaacagcagaaactaatgagacactttaaagcaattaaactccaatttaaaaaaagaaatataactctaatacaatagtattatttaacatatatggtgagtagtgaaagttgctcagtcgtgtctgactctgtgaccccgtggactatatagtccatgaaattctctaggcgagaatactagagtggatagccgttcccttctccaggggatcttcccaacccagggatcaaacccaggtctcccacattgcaggcagattgtttatcggctgagccaccagggaagcccattttaacatatatatttaacatacatagttcatatttaaagtttcgctaaatttcgcaatcatgtcct

SEQ ID NO: 401 - DNA, 326 bp, Bos taurus
  Clone ID: 02-LIB34-030-Q1-E1-A5
agaagcttcacactgagaggtaggcagagagcagcacacacagctgaaaggaaactcagaggagggaatcaccaagaaagtggccatggagctaatcccaagcttttccatggaaacctgggttctcctgtctatcagcctggtgctcctttatctatatggaacttattcacacggactatttaagaagctgggagttcctgggccaagacctctgccttattttggaaatgttctgtcctaccgaaagggtgtttgtgagtttgatgaagaatgttttaaaaagtatgggaaaatgtgggggatttttgaaggtaaacatcctc

SEQ ID NO: 402 - DNA, 403 bp, Bos taurus
  unsure (376): unsure at all n locations; Clone ID: 02-LIB34-030-Q1-E1-A9
caagcagaagtggctggtggtttctgttttggaatagcagcagggtggagagaaaggtaggagggatggaaataggtgccgccttcttcgtagtcagaataggggaagaaccccaagggtttaagaagacggcatcagctttttttgttatttttttggtggagcagttaaaacacacacatttattaagttcatcttatatgggtggcatcagctttaattaagaaagcagactcagggcttctcttgaggtccagtgattaagtctccatgcttccaatgcagagggcacaggtttgatctctggtcgaggaactaagatcctacaaacaagtggtgtggcaaaaaaataaataaattaaatatcctcaaatanaactgaggataaactgactcctaagcc

SEQ ID NO: 403 - DNA, 391 bp, Bos taurus
  Clone ID: 02-LIB34-031-Q1-E1-A5
cagacgcgtgggttctgaagctgccgtaaagcttatcaatgaatatgtgaagaataaaactcatggaaaaattgagaagctcttcaatgatcttgacgtgctcacaaatttaatcttgttgaattatatcttctttaaagcccagtggaagacgccatttaatcctaaccatacttacgaatcagagttccacgtgagccagaacgagagggtgattgtacccatgatgaccctttacctggaaaccccttacttccgggacgaggagctgggctgcacgctggtggagctcacgtacaccagcaacgacagcgccctcttcatcctccccgatgagggcaaaatgcaggacctggaagccaagctgaccccgggagacgctgaacgcggt

SEQ ID NO: 404 - DNA, 400 bp, Bos taurus
  Clone ID: 02-LIB34-032-Q1-E1-A5
tcacagatctgcagctggactaggtccatctctaaattatgcattatccaatggttctgaacccagcggaggaagtatttccaaggtactcatttggaatattgataattgactcactggatttctgtcgcacgtgggaggcactgaataactgtaaggatgcatggctgggcaagtccagcggggtgtccagcttcaaccacaagcagctggggaggatccttaacaagccacagctaaagtataagcctgtctgcaatcagagtggcatgtcacacttagtctcaactagagcaaactgtagcatttctgcatgtcacactgaaagtgttcttgttgcctatgccggtcagggattccaatgactaaaacaatgggtgatccataaccagcccgttct

SEQ ID NO: 405 - DNA, 417 bp, Bos taurus
  Clone ID: 02-LIB34-032-Q1-E1-A9
caacacatgaatcaacaattcgatttttgcaagaaatatataactcaaatagtcaaaaaatcgttaacctaagagataaagtggtccagcttgaagcaaactgtcaagagccttgtcaagatacagtgaaaatacatgatgtaactgggagagattgccaagatgttgccaataagggggccaaagagagtggactttactttatcagacctctgaaagctaagcagcagttcttagtctactgtgaaattgatgggtctggaaatggatggactgtgtttcagaagaggcttgatggcagtctggatttcaagaaaaactggattcaatataaagaagggtttggacatctgtctcctactggaaacacagaattttggctgggaaatgagaagattcatttgataagcacacagt

SEQ ID NO: 406 - DNA, 361 bp, Bos taurus
  Clone ID: 02-LIB34-034-Q1-E1-A5
aattgggatgaaaaagtttaccctactgtcaactgtcaaccacctggacagacgtcactcatgaaaaggcctccgggtttttcaactttccgatgagttcatgtgagcgaaactgaaggaagcacaactcgtagtcgaccccactctgccatgtcacctgtacaagattaagagcgggattcacgaacagaagaaggacccactcatcggcatggctgggaccatggaaatcagataacattacatggccttgggcttggccagaagcataagcaggagcaaagtcatgggcaccatacaagtcatggtcttgggcatggaaatgacaagcaacatggtctcgggcatggacataagcatg

SEQ ID NO: 407 - DNA, 416 bp, Bos taurus
  Clone ID: 02-LIB34-034-Q1-E1-A9
acaaatctccccagcaggccacaggcaatgtgaagtattcatctagccaaccaacatttcttgatttacagtgttgcccttttcagcaaatgccagtgtcaagttccatttaatcagaagctccatggctctttgaattatgctgttgagtgctgactgtgtgttctactgaaggagtaaaacactgactatccaaagaggaaaggatattttgtttttataataatcatatgttattgttttcttcttccctttctatgcaactgtaaattaatgaacagaatggtatttggaaatggaaatacatttgtcactgatttgtatactgtatacagtattgggaaagtgggtggggggtttcgaatatgagaccttctttttaataaccgtgaacaaatgcatcagaagtagaagac

SEQ ID NO: 408 - DNA, 445 bp, Bos taurus
  Clone ID: 02-LIB34-035-Q1-E1-A5
ccggggccacgcacgcgtccggaaagacgccatttaatcctaaccatacttacgactcagagttccacgtgagccagaacgacagggtgattgtacccatgatgaccctttaccatgtgaaccccttacttccgggacgaggagctgggctgcacgctggtggagctcacgtacaccagcaacgacagcgccctcttcatcctccccgatgagggcaaaatgcaggacctggaagccaagctgaccccggagacgctgacgcggtggcgaaactccctgcagcccagacttatacatcgactcaggctgccaatgttttccatctccagccactaccagctgaaagacatcctttcccagctgggtatcaggaaaatcctcaccagcgattgcggacgtctcaaggaatcacagatgagcataagcctggcagtttcccacgtga

SEQ ID NO: 409 - DNA, 438 bp, Bos taurus
  Clone ID: 02-LIB34-036-Q1-E1-A9
gggccaacccacgcgtccacagaggtgaaacaggtaatggatcccaaaggccagagagtgaagcttaatgatggccacttcattcctgtcctgggatttggcactgctgaagctaaagaggttcctaagagtgaagctctggaagtcaccaaatttgctatagaggttgggttccgccatattgactgtgctcatgtgtaccaaaatgaagagcacgttggccaggccattcgaagcaagattgcagatggcactgtgaagagagaagacatattctacacttcaaagctttggtgcactttccttcgaccagagttggtcagaccagccttggaaaagtcactgaaaaatcttcacctggactatgttgatctctatattattcattttccactggctatgaagccaggggaggaattattgccaaaagatgaaaat

SEQ ID NO: 410 - DNA, 376 bp, Bos taurus
  Clone ID: 02-LIB34-037-Q1-E1-A4
tagaaatactccttgcctcagtgctgggctttgtcatcgactggttcgtctccaaggtcatcgcaggagacttggccccttgaacatggatcgtgggggcctgcggtgaggcccacagctgtcgaggatgggagcagccgcgcaatcaagggtgatgcatcagttgaggagatcgtttacttacagcaaatgattgacacggtccgtttaactccaccttccgtagacattcgtttcaactatcgcttcacactccaacataggatggagggaagcaactccgactggactgtgtgaatttcactgcatgaagcaggtagcacattctcagaagggtacctcacttcaagactaagagtgaagggctggtcatcca

SEQ ID NO: 411 - DNA, 384 bp, Bos taurus
  Clone ID: 02-LIB34-037-Q1-E1-A9
tggagcaggaggggccggagtattgggatcgcgagacgcgaatctccaaggaaaccgcacagactttccgagtggacctgaacaccctgcgcggctactacaaccagagcgaggccgggtctcacactatccaggagatgtacggctgcgacgtggggccggacgggcgtttcctccgcgggtatgagcagtacggctacgaaggcagagattacatcgccctgaacgaggacctgcgctcctggaccgcggcggacacggcggctcagatcaccaagcgcaagtgggaggcggcagattatgctgagtctttgaggaactacctggagggccggtgcgtggaggggctccgcagatacctggagaacgggaaggacgcgctgc

SEQ ID NO: 412 - DNA, 392 bp, Bos taurus
  unsure (316),(333),(336),(340),(372): unsure at all n locations; Clone ID: 02-LIB34-038-Q1-E1-A5
agattattgaggggactgggctatgtccttttgccttaatttgtgcatattcattaaagtaaaattcattgtgcttaatgatatcaagactaaacggcataacaaagaagtactaatatgaagatgattcctcgtatcaggaatgattaagtatttggtacagtaagttccctatgtaaaaacaagttccgttctgagagccaagttcgtcagtcaaatttgtttataagtccaacaaagttagttcatctacccaaccagcacaattggctaaatagtactgttctgtaatagatttataagtcttttcacgcanataatatgtaaacacanaanatanacatctttactcgtacagtacagtaccttganaagtacagtagtatagtata

SEQ ID NO: 413 - DNA, 413 bp, Bos taurus
  unsure (312),(367): unsure at all n locations; Clone ID: 02-LIB34-038-Q1-E1-A9
cctgaaaactggagggccttcaaggccctcattgccgctcagtacagcggggctcaggtccgcgtgctctccgcaccaccccacttccattttggccaaaccaaccgcacccccgaatttctccgtaaatttcctgctggcaaggttccagcctttgagggtgacgatggattctgtgtgttcgagagcaatgccattgcctactatgtgagcaacgaggagttgcggggaagtactcccgaggcagcagcacaggtggtgcagtgggtgagctttgctgatagcgacatagtgccaccggccagcacctgngtgttccctaccttaagcatcatgcaccacaacaagcaggccacagagaatgcanaggaagaggtgaggcgaattctggggctgctggatgctcacttgaa

SEQ ID NO: 414 - DNA, 420 bp, Bos taurus
  Clone ID: 02-LIB34-040-Q1-E1-A5
cttttctagaaacatgaaatattggagtaatccttctgctcacagtaatagccacagcatttataggatacgtcctaccatgaggacaaatatcattctgaggagcaacagtcatcaccaacctcttatcagcaatcccatacatcggcacaaatttagtcgaatgaatctgaggcggattctcagtagacaaagcaacccttacccgattcttcgctttccattttatccttccatttatcatcatagcaattgccatagtccacctactattcctccacgaaacaggctccaacaacccaacaggaatttcctcagacgtagacaaaatcccattccagccctactataccattaaggacatcttaggggccctcttactaattctagctctaatactactagtactattcccacccg

SEQ ID NO: 415 - DNA, 405 bp, Bos taurus
  Clone ID: 02-LIB34-041-Q1-E1-A5
tcgacgcacgcctctacagggcgtcgatcataggtcacctacagccgcagaccccttccccagccccagtctgtagctgcctcgagcagggagctggtggctcttccatccccagaccagccaagcctgtgagtgacaccccagacagaggaaccagagccatgcggagtctcagcggactgctgttgttactgactgcctgcctggcagtaaacgccagctccgtgcccacattgcccgatgacattcaagtgcaggagaacttcgacctgtctaggatctatgggaagtggttcaatgtggccgtgggctccacctgcccatggctgaagaggttcaaggagaagatgaccatgagcacagtggtgttgaaagcgggggcgacgagcaaggagatcagcgtca

SEQ ID NO: 416 - DNA, 247 bp, Bos taurus
  Clone ID: 02-LIB34-042-Q1-E1-A9
gatgaactggcatgggtcctgtcactcaatgaagaacatgtccatgaagattagggcttaatttccagagcaataataccccccacacagagtattattcctccacattgtataacatttttatatatcatgttaacagaaattttttttcaaaccttatatctccctaaagctatcaaaatgtagttggtgtgagttttcagaaaaagtttttaggacaaatggcatttaaaacagcacatggttt

SEQ ID NO: 417 - DNA, 373 bp, Bos taurus
  Clone ID: 02-LIB34-043-Q1-E1-A5
agttctagatcgcgagcggccgcccttttttttttttttttacaaacttttaacacactttatttaagggccaaacaaggcagcatttggacagttaagaaaggcacctcattgaaaataatacatcacagtgttgtagactgatcccagtcataggatttgaggatggaaaggacagtctttggataatgttgcttaagacacttgctcattgattaaaaagagtcctttcacatgatgtggatggaggaaggcaagagcacaggactgtggcgtatgctgggtggctgccgagggctcacccgtgagggcaagtgggctggtaaatcagtggtgagtatggaagggaaggacaccagcctgccccatgact

SEQ ID NO: 418 - DNA, 389 bp, Bos taurus
  Clone ID: 02-LIB34-044-Q1-E1-A5
acggacgcgtgggggaaaagacagacaggtgttctgctctaccaggcctatggacagtcagaagcgggaataagctgtggcactctccgggggatgaagatcaagccaggttccatggggaaggccatcccaccctttgacattcagatcattgatgacaagggcaatatccagcctcccaacacggaaggaaacattggcatcaggatcaagcccaccaggcccataggcctcttcatgtactatgagaataacccagagaaaacagctgaagtggaatgtggggacttttataacactggggacagagcaactattgacgaagagggctacttctggttccttgggaggagtgacgatgtcatcaatgcatccggataccgcgttgg

SEQ ID NO: 419 - DNA, 415 bp, Bos taurus
  Clone ID: 02-LIB34-044-Q1-E1-A9
aaagcagttcggcctggataccccaaactcatccgagatgtctggggcattgaggggcccattgatgctgccttcacccgtgtcaactgtcacggaaagacatacctcttcaagggtagtcagtactggcgctttcaggacggtgtcctgaagcctgacttcccccgaaacatctcggaccgcttcgggggtattcccgattatgtggatgcagccttgggcctccccgctcacaacttcaacggcagggagccggtctacttcttcaacggcaaccactactgggaatatgtgttccagcagcagcccagtcaagacgattgtgaaggcagctccctgccggccgcatttaaacactttgccctgatggcagcgggacaactggatggacatcctccgaattcgcttctggggc

SEQ ID NO: 420 - DNA, 438 bp, Bos taurus
  Clone ID: 02-LIB34-046-Q1-E1-A9
aggctagtgacagatctcacaaaagtccacaaggaatgctgccatggtgacctacttgaatgcgcagatgacagggcagatcttgccaagtacatatgtgataatcaagatacaatctccagtaaactgaaggaatgctgtgataagcctttgttggaaaaatcccactgcattgctgaggtagaaaaagatgccatacctgaaaacctgcccccattaactgctgactttgctgaagataaggatgtttgcaaaaactatcaggaagcaaaagatgccttcctgggctcgtttttgtatgaatattcaagaaggcatcctgaatatgctgtctcagtgctattgagacttgccaaggaatatgaagccacactggaggaatgctgtgccaaagatgatccacatgcaggctattccacagtgtttgacaaacttaag

SEQ ID NO: 421 - DNA, 393 bp, Bos taurus
  Clone ID: 02-LIB34-048-Q1-E1-A5
atccggacaaattctgggtatatcctcctgagaagggggaggaatatccaaagttgctccaagagaagtttcctggaatcccattcccactggatgcagctgtggaatgtcaccgcggagaatgctctcatgagggtgtcttcttcttccaaggcaaccacacgtggttctgggacttctctacaaaaaccataaagaaacgttcctggccagccgttgggaactgctcctcggccatacgatggctcaaccgctactactgcttccggggtaacaaattcctgcgcttcgaccccgtcacgggagaagtgaattccacttatcctcgggatgtccgagattacgttatgtcctgccctaacagatgccatgcacataggaattcacccagca

SEQ ID NO: 422 - DNA, 415 bp, Bos taurus
  unsure (406): unsure at all n locations; Clone ID: 02-LIB34-048-Q1-E1-A9
ggaagattctcctgcactagacatgcaaatgcaagtttgtgtctgtaaaatgataatccagatttctatagcaaatgatgtaataatggcttttaatcctactttcctgtgggtgaatgaaggttaaggcttaacaatcatttaaaagaaacatgtatttgcttttgacagctgattattcacttaaaatgactagaatgaaagtttctagcagaaatatgattttatttgaccagaaaaagtcttagtgacatttatgtttacatatcatctcatgacctattttttaaaaatatcactgtaattatataagaagaaaagataaagataatttactgagaaatttatatttttctcagtttccatgaggaagaacacattgctggtctttggaaaatacgtcaancacatcatg

SEQ ID NO: 423 - DNA, 401 bp, Bos taurus
  Clone ID: 02-LIB34-049-Q1-E1-A5
ttcccggggcttgaccagcacctactggctcaccataagcgggactggcagctgccagaatttgcacacagcctgggcaacattcttctggatcctaagttataaagactgccattgtctgattttattcccagaaacactgcaaagggaagaggtagcccatatttttcatctgctgaagcacattatcagaggtgactaagggtgacccttcctaggccatccttagtcttgctaagtcttgatcttcctgaccatcccagcattgtacattctgggaatttcctcttggtcaggcacctccctgtcactttagtcaagagtcagtgaattacggaactctgctcaatgttatgaggcagtctggatgagatgggagtttgggggagaatggatacatg

SEQ ID NO: 424 - DNA, 435 bp, Bos taurus
  Clone ID: 02-LIB34-050-Q1-E1-A5
aatacatttaaacaaatatcagaagatctgagaagcagaattgagatcctgaggcgcaaagtcatagaacaagtacaacgtatcaacgttctgcagaaaaatgtcagggatcaactggtagatatgaaacgattggaggtggacattgatattaagatccgatcttgcaaagggtcatgcagtagagctttagaacataaggtagatctggaggactataaaaatcagcagaagcaacttgaacaggttattgccataaacctacttccctctagagacattcaatacttaccattgataaaaatgagtacaattacaggccctgttcccagagagttcaagagccagctccaagaggcccctctagaatggaaggcactgctggaaatgcagcagacgaaaatggtgttggaaactttcggtggcgatggacat

SEQ ID NO: 425 - DNA, 232 bp, Bos taurus
  Clone ID: 02-LIB34-051-Q1-E1-A5
ggctgtcgcctttccggccgcgctccgtgtcccgggacgacgggctctccgcaccggatcccggtcacgacgcgcggtgggggcgcgccgcgcctttccccgggggacgcgggcgatctgtcgctggttgagactgcagttgacctgctatccgacgccaactgatgctcacgcggagttgccatatcgttccgcctgtgcgggattctgatctagaggcgttcagtcatat

SEQ ID NO: 426 - DNA, 237 bp, Bos taurus
  Clone ID: 02-LIB34-052-Q1-E1-A5
agtccatctcaggttttgcacacagctgcttccagtatgccatccagaagaagtggccactctacatgagcaccaagaacaccatcctgaaagcttacgacgggcgcttcaaggacatcttccaggccatctttgagaagcactacaagactgagttcgacaaacataagatctggtacgagcaccggctcattgatgacatggtggctcaggtcctcaagtcctcaggcggctttg

SEQ ID NO: 427 - DNA, 240 bp, Bos taurus
  Clone ID: 02-LIB34-054-Q1-E1-A5
cttccagctgcggcggggcgcggaggagcagctggtaccccgggccagcaccagtccggaccgcgtcttcttccggctgagcgcgctggccgcgggcgacggcagcggctacacctgccgctaccggctgcgcagcgagctggcggcctggtcccgggacagtgcgccggctgagctggtgctgagcgacgggacgctccccgcgccggagctgtcggccgaacccgcgatcctgagccc

SEQ ID NO: 428 - DNA, 373 bp, Bos taurus
  Clone ID: 02-LIB34-056-Q1-E1-A5
gaactatgcatagtttaagatcagcctcaacaatgccaatctacagattttaacagtgcaaatctaactctcagatatctttgttggtacctaagtaggtaataagtcttctttctggacatcatcgtagagtccatctttcaagcactttaatattttctagttgccaaaggatatgaaatacatgattggatgctaacttccctgaaatcagtggttccacattcaccacagggatacaagcctactatgtttgggaaagaccactacaatttaatctaaaagcttatgttggacagaattaggttgtagtaaggaggtttacaccctctgacacatacgaaaaaccaccgcaaatttattatatccttac

SEQ ID NO: 429 - DNA, 365 bp, Bos taurus
  Clone ID: 02-LIB34-056-Q1-E1-A9
ccgggtaaacccaagcgtccgggtagccggcgtggcccagcgggcgcgcagcaatgggaagcgccgtccggtgcgcatcatcctctacgcctttctggacaaagtgcagcagactccacacaagcctttcctgctcttccgcgacgagacgttcacctacgcgcaggtggaccgacgcagcagccaagtggctcgggcgctgcgcgaccacctcggcctgcggcagggagactgcgtggcaattttcatgggcaatgaaccagcttacatatggctgtggctgggactgatcaagctgggctgtgccatggcgtgcctcaactacaacatccgcgggaagtccctgttgcactgctttcagtgct

SEQ ID NO: 430 - DNA, 220 bp, Bos taurus
  Clone ID: 02-LIB34-057-Q1-E1-A5
attctcagtaatacaaatgatggataaaaaaaaaaagcctgccacctctgttggctaggcagttttgtacacttttttgaaatatgtaaaaattatgaaacaaacctcatcagtataatataattaaaaggccaatttttttcctggcaactgtaaatgaaaaaatatatggactaaacatagccctgtgctgtatcatggccacagtatattgtaaccc

SEQ ID NO: 431 - DNA, 225 bp, Bos taurus
  Clone ID: 02-LIB34-058-Q1-E1-A5
gtttttaaaaggggagtttgtgtggaagggtcatgcctgggcccggcagttgatctcagagaggtggaaggatgcccccagtcccgtggatgctgcattccgctatgatcgtaacagtgtccttctgatcaagggggacaaattctgggtatatcctcctgagaagggggaggaatatccaaagttgctccaagagaagtttcctggaatcccattcccactgga

SEQ ID NO: 432 - DNA, 226 bp, Bos taurus
  Clone ID: 02-LIB34-058-Q1-E1-A9
ccagtgtccatcccatcttgctatccaggaaaacgccaacaccctcgcccgctatgccagcatctgtcagcagaatggtctggtacccattgttgagccataggtaattcctgatggcagccatgacatggaacactgccagtatgttactgagaaggtcctggctgctgtatacaaggccctgaatgaccatcacgtttacttggagggcaccctgttgaagcct

SEQ ID NO: 433 - DNA, 207 bp, Bos taurus
  Clone ID: 02-LIB34-059-Q1-E1-A5
gttcttccttgtagagttataaacggaaagattacactatctgattaatagtttcttcatactctgcatataatttgtggctgcagaatattgtaatttgttgcacactatgtaacaaaacaactgaagatatgtttaataaatattgtacttattggaagtaatatcaaactgtatggtgataagtattgttttaatctcttatgg

SEQ ID NO: 434 - DNA, 213 bp, Bos taurus
  Clone ID: 02-LIB34-059-Q1-E1-A9
atctacctggacaaggtctcacacacagtggaggactgtctgtccttcaaagttcaccagtactttaatgtcggacttatacagcctggggcagtcaaggtgtactcctattacaacctggatgaaacttgtatccgcttctatcacccggataaagaggacggaatgctgagcaaactctgccacaaagatacctgccgctgtgcagaggac

SEQ ID NO: 435 - DNA, 193 bp, Bos taurus
  unsure (11): unsure at all n locations; Clone ID: 02-LIB34-062-Q1-E1-A5
cgggaatacancaggaatggaggtgaaacatctgaaatgtacctcattcagcctgaggattctagcaaaccatatagagtatactgtgatatgaaaacggaaaaaggaggatggacagtaattcagaaccgtcaagatggtagtgttgactttggcaggaaatgggatccatataaacaaggatttggaaata

SEQ ID NO: 436 - DNA, 342 bp, Bos taurus
  unsure (334): unsure at all n locations; Clone ID: 02-LIB34-063-Q1-E1-A5
ccacgcgacaggaaagcccctcaccctgcaatgggaacctcttcagacttccttcttaataaggggcacaattgttggcctggttctcctcggagtagcagtggtggcttgagctgtgatctggatgaatagacgctcaagtgaaaaaggatggatctatagccaggctgcaatcagtgacagtgcccagtgctctgatgtgtctctcacggttcctagagttttatacaactgccttgtagggactgagtgatgctgcatcctgctaagtgacttcagattaccggacacctctttctgcaactgcatctgaatgtgtctgtgctcctattancataacat

SEQ ID NO: 437 - DNA, 241 bp, Bos taurus
  Clone ID: 02-LIB34-063-Q1-E1-A9
acttaaacgggtgctggtgccgcttcttttacctgagaaatgctacgaccaaattttcgtccagtgggacttgcgtcatgttccctgcctcaagattcttctcagcaaaggcctgggactgggcattgtggctggctcacttctggtaaaactaccccaagtgtttaaaatactgggagccaagagtgcccaaagattgagtcttcagtcggtaatgctagagctaatggcattgactggg

SEQ ID NO: 438 - DNA, 216 bp, Bos taurus
  Clone ID: 02-LIB34-065-Q1-E1-A5
atagcatccctccgcctagcaatttctgcagaaagcatcgctacatggactcagcaagacaccaccaaactgagggcatcagctcgaaatttcatcatctacagagggctcctcttcaggtgttcctgctgagcttggtgttaagacagctttccatgcttacgtatcttgcatgatgttcctgctgcacggtgcccagatgctgcacatgcggga

SEQ ID NO: 439 - DNA, 249 bp, Bos taurus; identical to SEQ ID NO: 199
  Clone ID: 02-LIB34-066-Q1-E1-A5

SEQ ID NO: 440 - DNA, 237 bp, Bos taurus
  Clone ID: 02-LIB34-067-Q1-E1-A5
cagcgggggccaccgcgtgtccccgcgtcctccgagtcgggtcctccaggcgcgccgggcgctgcccctgtgtgtctcccgctgccagcccgcgccccgtccccgttcggtcatgctgtccctctgcctcatggccgcgctgctgctggccgccgggcccgggccgagcctgggcgacgaagccatccactgcccgccctgctccgaggagaagctggcgcgctgccgcccccccgt

SEQ ID NO: 441 - DNA, 223 bp, Bos taurus
  Clone ID: 02-LIB34-068-Q1-E1-A5
cgggttcccgggtaccatcaagcgtccggtgctcccaatgcctgctgtcggcgctcaggtgcttgagtcaacccctcctccacatgtgatgagagttgaaaatgacccacacttcatcatctacctgccaaaaagccaaaagaatatttgtttcaatattgaccaaacctggaaaatcctcaacttgttcgatcagaatagggttttggcaacggcagctcgt

SEQ ID NO: 442 - DNA, 210 bp, Bos taurus
  Clone ID: 02-LIB34-069-Q1-E1-A5
gaatgcttcctgagccacaaagatgatagcccagacctccctaaattgaaaccagaccccaatactttgtgtgatgagtttaaggcagatgaaaagaagttttggggaaaatacctatacgaaattgctagaagacatccctacttttatgcaccagaactcctttactatgctaataaatataatgggagtttttcaagaaatgctgcc

SEQ ID NO: 443 - DNA, 259 bp, Bos taurus
  Clone ID: 02-LIB34-069-Q1-E1-A9
attcgcgggtcgaaacacgcgaccggggatgcctgggtcgctgctggctgaatacagggatcgggttcatctgcgagcttccgtggatgccagttgtgcacaattaaagtggttcaatccagcctcgtgacttggatactaggtagcctgatgcaaaagctttccagtgtcaatgcagaagtctccataatgatagataccaggcttgctgagcttcaaagcactttgcccaagatcatcatccttaggggtgactcct

SEQ ID NO: 444 - DNA, 227 bp, Bos taurus
  Clone ID: 02-LIB34-070-Q1-E1-A5
cgcaaagcacaccaatggatctctttgtagttctagtgatctgtctttctattttgattttcctttttctatggaatcagaggcatgccaaagggaagctgccacctgggcccactcctctcccaattgttggaaatattctgcagataaatattaagaatgtcagcaaatccataagcaagctagcagaagattatggtcctgtgttcactctgtattttggcatg

SEQ ID NO: 445 - DNA, 405 bp, Bos taurus
  Clone ID: 02-LIB34-071-Q1-E1-A5
agctaaagcccaccctctggctagagctcctgagcttgggcacggagttgaaggtgggaatgtggccaagccggatccagaagtgacggaacgctgctcggatggctggggctttgatgctaccaccctggatgagcatgggaacatgctgtttttaaaaggggagtttgtgtggaagggtcatgcctgggcccggcagttgatctcagagaggtggaaggatgcccccagtcccgtggatgctgcattccgctatgatcgtaacagtgtccttctgatcaagggggacaaattctgggtatatcctcctgagaagggggaggaatatccaaagttgctccaagagaagtttcctggaatcccattcccactggatgcagctgtggaatgtcaccgcggagaatg

SEQ ID NO: 446 - DNA, 224 bp, Bos taurus
  Clone ID: 02-LIB34-071-Q1-E1-A9
ctccttgtgtttgcatgaccaaggctatcacgtcactgcttagctagcccacatccgtcactgcaaggactttcaggatcccaggaacagggcgataatgggtgttgccactaacgtgttcattgaggacagggggatcgagtttgtgtaagacttcatctttacggccatccagtccatccacactgtattctgattcatacttcctgcccacctcactcgct

SEQ ID NO: 447 - DNA, 406 bp, Bos taurus
  unsure (341): unsure at all n locations; Clone ID: 02-LIB34-072-Q1-E1-A5
gtccatgatttcttgcaacttcgaaaaatttaaaaccatgaaacatctattactgctacttttctgtgcttttatagttcaggcccaatttcctactgactatgacgagggacaagatgacagacctaaggtaggtttgggtgcccgcggtcatcggccctatgacaagaagaaggaagaggcccccagcctgagacctgtgccccctcccatcagcggaggtggctatcgggctcgtcccgccacagcaactgtgggccagaagaaagtggagagaaagccccctgacgctgatggctgcctgcacgcggacccggatctgggtgtgttgtgtcctacangatgtaagttgcaagatactttggtaagacaggagagaccaatccgaaagagtatagaagattta

SEQ ID NO: 448 - DNA, 368 bp, Bos taurus
  Clone ID: 02-LIB34-073-Q1-E1-A5
aaaggaattgcttatgtggagtttgttgatgttagctcagtgcctctagcaataggattaactggtcagcgggttttaggagtgccgatcatagtacaagcatcacaggcagaaaaaaacagagctgcagcaatggcaaacaatctacaaaagggaagtgcgggacctatgaggctttatgtgggctcattacattttaacataactgaagatatgcttcgagggatttttgagccatttggaaggattgaaagtatccagctcatgatggatagtgaaacaggtcgatccaagggatatggatttattacgttttctgattcagaatgtgccaagaaagctttggaacaacttaatggatttgagct

SEQ ID NO: 449 - DNA, 216 bp, Bos taurus
  Clone ID: 02-LIB34-074-Q1-E1-A5
cccgggccgacccacacgtccaggcgggcgtggtctcctaccccttcgacaccgtgcggcggcgcatgatgatgcagtcggggcgcaaaggagccgacatcatgtacaagggcaccgtggactgctggcggaagatcctcaaggacgagggcggcaaggccttcttcaagggcgcctggtcaaacgttctgcgcggcatgggcggcgccttcgtgc

SEQ ID NO: 450 - DNA, 208 bp, Bos taurus
  Clone ID: 02-LIB34-076-Q1-E1-A5
agactgttcatagcgagcggacgcccttttttttttttttatagtttctggtgtatgtatgtcttgcacttcttttgttcaagttgctaagtactttattttcctgtatttttagaatagaagtaccttattaatttcatgcttggttttttcattgctagtatacacaaatacaattggtttttgtaacagggaattcagccaaaga

SEQ ID NO: 451 - DNA, 353 bp, Bos taurus
  Clone ID: 02-LIB34-076-Q1-E1-A9
gtgagtcgtattacaagctgcatccccaagactggacctcaatagatgggccgctgcagattgtataatcgctgctgctcatggttctgcagcaggcctctggccgcccccacggtgcctatggcctcttcctgcgctaccgctctggaggcgttgatgctccgtggcatcagtagcttccgtcagtataagtatgatctggtggcagttgacatggctctggatggcatgttccgtaagctcgaacatcttctggatcgcctgatccagtccttcttcatctacctgctccctgcgctctgccgcttcgtcttcattggtctctacatgccggccgccggttttttgctcct

SEQ ID NO: 452 - DNA, 441 bp, Bos taurus
  unsure (427): unsure at all n locations; Clone ID: 02-LIB34-077-Q1-E1-A5
ctccttgcatgctgacacaccggggcctctctgaagccaccatgaaatccttcgttctgctcttttgcctggctcagctctggggctgccactcgatcccgcttgacccggttgcaggttataaggaaccggcctgtgatgacccagacacagagcaagcagccttggctgccgtggactacatcaacaagcaccttcctcggggctacaagcacaccttgaaccagattgacagtgtgaaggtgtggccgaggcggcccacgggagaggtgtatgacattgaaatagataccctggaaaccacctgccacgtactggaccccacgcccctggcgaactgcagcgtgaggcagcagacgcagcacgcggtggaaggagactgcgatatccacgtgctgaaacaagatggccagttttccgtgctgtntacaaaatgtgatt

SEQ ID NO: 453 - DNA, 458 bp, Bos taurus
  Clone ID: 02-LIB34-078-Q1-E1-A5
tataaagagtcgtattactgtttgtctcaattggccatttaagtttaatagtaaaagactggttaatgataacaatgcatcgtaaaaccttcagaaggaaaggagaatgtttttgtggaccatatgttttgtgtgtggcagtttaagttattagtttttaaaatcagtactttttaatgaaaacaacttgaccaaaaatctgtcacagaatttgagacccattaaaaaaagtttaatgagaaacctgtgtcttccttttggtcaacactgtaactccctacagtactactttggtaagagttgctcataagctatttctggtaaaacaattttcaaattatgggtttgtatttctaaggtggagcttcaagtttgttaaccttgtgttgagaactcatctgttttaataacatcttaagcaatggtgcaacacttttccagattaagacagatgaaca

SEQ ID NO: 454 - DNA, 447 bp, Bos taurus
  Clone ID: 02-LIB34-078-Q1-E1-A9
gtcgtattatcccaggaagcgctcggtgcccttactgcccgtctcagcaaggaggagaccgtgctagcaacagtccaggctctacagacggcctcctacctgtcccagcaggctgacctgagaagcatcgtggaggagattgaggaccttgttgctcgcctggatgaactgggaggtgtgtatctccagtttgaagaaggactggcaacgacggcattgtttgtggctgccacctacaagcttatggaccatgtggggacggagccatccattaaggaggatcaggtcatccagctcatgaacgccatcttcagcaagaagaactttgagtcactctctgaagccttcagtgtggcctctgctgccgctgcgctctctgagaatcgctaccatgtgcccgttgtggttgtgcccgagggctctccttcctacactcaggaacaggct

SEQ ID NO: 455 - DNA, 411 bp, Bos taurus
  Clone ID: 02-LIB34-079-Q1-E1-A5
gacccacgcgtccgctagttctagatcgcgagcggccgcccttttttttttttttttttttttttttatttttccttcctttaatcttaagcaaaagagacacaggggttcaaaaataaaaatttctttttttccctctcccaaacatttaccccagctctgcctgtcattccatacctctaacgctcatcagggcctgcagtgcattcagagcgcatgcgtcatgcctggcagggcgaatcttctaaaagttctgacatgtgtacttaaatttgggttgagactcgcacctagctcggcacatacccatataatcttctactgacggcttactctacagccgttttgacattgaccatctgctcttgatggcctgtttcgctgtatttggatccctatttctggatccat

SEQ ID NO: 456 - DNA, 397 bp, Bos taurus
  Clone ID: 02-LIB34-079-Q1-E1-A9
gtttggcacaatgatatgggtgacttttatgtctcatcaccttctcttgagctctgcttattccagcggtgtgtttcgtcgaaatatagacattattgggattgcgcagcggtttaaagatttgggagatgaagattgtattggcctgtcacagattgccttgtctcactaactccatcagtgtccagttgatgatcatgtaaagttacagagcaattcacatgattttgcaaaatcatgtgttgccgatcagtcccatgcctgctgtcaaatgtcacgtcacattcgctttggagatgaattgtgtaaagttgcatcccttcgtgaaacctatggtgacatggctgactgctgtgagaaacaagaacctgaaagaaatgaatgcttcctgaaccac

SEQ ID NO: 457 - DNA, 399 bp, Bos taurus
  unsure (389): unsure at all n locations; Clone ID: 02-LIB34-080-Q1-E1-A5
agctccagctcaccatggctcgggcattgagagtgccagttgcactgtggctgttgggcttgtgctggtctttggctaaagcccaccctctggctagagctcctgagcttgggcacggagttgaaggtgggaatgtggccaagccggatccagaagtgacggaacgctgctcggatggctggggctttgatgctaccaccctggatgagcatgggaacatgctgtttttaaaaggggagtttgtgtggaagggtcatgcctgggcccggcagttgatctcagagaggtggaaggatgcccccagtcccgtggatgctgcattccgctatgatcgtaacagtgtccttctgatcaagggggacaaattctgggtatatcctcctgagaanggggaggaat

SEQ ID NO: 458 - DNA, 403 bp, Bos taurus
  Clone ID: 02-LIB34-082-Q1-E1-A5
aggcacaagggtccccaaagacagggtcactcagataactgtgatacaccagtaggaagtgaaagtttacaaccttctcttccacaaaagaagctctgacgaaagagatgcataaatcagttactctgacagtttcccaaagattcagaatctgctttgagtagctgctgttgccactgtcgacatctggtatttgaaaaaacagggtctgcaatcacctgacagtgtacagaaaagctcccctctttgtgtagctgacagggccttttggcggaggagaatgtcattgaatcttgacagtgacgtttgcctccagctgcctgacaggcagcaggtcagcagctcaaccccacagaagccagcaccaagtgaagctgaaaaaataaggccaaaatgtgaaaat

SEQ ID NO: 459 - DNA, 305 bp, Bos taurus
  Clone ID: 02-LIB34-083-Q1-E1-A9
gcggcggctctggatccactgccgacaccccgctctcgcatgcagacatgaggacagagagaacttccttcctcctggctctggggctcctgctgtctgggttctgctccacggtccactgcctcccagagattttgaccccagaagaacagcacacagggacgtctgtggatggccactcattaccctctatcagtactgacttcgccttcagcctctacattcagttggctttgaaggaccccaataaaaatgtcaccttctcccctctgagcatctacatatccttggccttcctgtccctg

SEQ ID NO: 460 - DNA, 455 bp, Bos taurus
  Clone ID: 02-LIB34-086-Q1-E1-A5
ccggcaaaatgaagtgggtgacttttatttctcttctccttctcttcagctctgcttattccaggggtgtgtttcgtcgagatacacacaagagtgagattgctcatcggtttaaagatttgggagaagaacattttaaaggcctggtactgattgccttttctcagtatctccagcagtgtccatttgatgagcatgtaaaattagtgaacgaactaactgagtttgcaaaaacatgtgttgctgatgagtcccatgccggctgtgaaaagtcacttcacactctctttggagatgaattgtgtaaagttgcatcccttcgtgaaacctatggtgacatggctgactgctgtgagaaacaagagcctgaaagaaatgaatgcttcctgagccacaaagatgatagcccagacctccctaaattgaaaccagaccccaatactttgtgtgatgag

SEQ ID NO: 461 - DNA, 387 bp, Bos taurus
  unsure (365): unsure at all n locations; Clone ID: 03-BOVMS1-001-Q1-E1-A3
caaaattgtgattgctggaggtgtcactgaagacggtctttcagcttcagttgaagcttttgacctcaacaccaataagtgggaagtaatgactgaatttccccaagaaagaagttccatcagtttggtcagcttggctggatccctgtatgctattggtggttttgccatgattcagctggaatctaaagaatttgcacccactgaagtcaatgacatatggaagtatgaagacgataaaaaagaatgggctgggatgctgaaggaaatacgttatgcttcaggagctagttgcctagcaacacggttaaatctcttcaaactgtctaagctataaataagaaggtgaaaaacataatagatanggaagtggtctgtttggataat

SEQ ID NO: 462 - DNA, 292 bp, Bos taurus
  Clone ID: 03-BOVMS1-002-Q1-E1-A3
ccccatcccaaaggacgacccagcccaccggatgcacgccccttcatcctttgccccgccccttcctcgtgatgcccaccctaaaaacgtttggtccacctggggctctatccatccttctagttccagttccaaccagagttccaaccaatgggctccagactctgggttctggccaatgaaaaacctcccttacagtctcctcttctttttccccaagctccgcccaccatcgggagctctggctaatggagctcacctggagctgttgctttttctctactcaaagcaa

SEQ ID NO: 463 - DNA, 368 bp, Bos taurus
  Clone ID: 03-BOVMS1-003-Q1-E1-A11
cgaccacgcgtccgatcactccttcaagataacctaccacatttcacagacacatcaatggattgggttccagaaaccttgccccaagggaactcaaagaaatccggaagtttgccatgaaggaaatgggaaccccagatgtgcgcatcgacaccaggctcaacaaagccgtctgggccaaagggatcaggaatgtcccataccggatccgtgtgcggttgtccagaaaacgtaatgaagacgaagactcgccaaacaagctctatactttggttacctacgtgcccgtcaccaccttcaaaaatctacagacagtcaatgtggatgagaactaattgctgatggtccaataaagttattgaactgcc

SEQ ID NO: 464 - DNA, 332 bp, Bos taurus
  Clone ID: 03-BOVMS1-004-Q1-E1-A3
ccgggtcaagttatggggcaaccgcctggataaacggttttccgccctttgccgttggatccaaggtcctaaatattggctcctggttcaaaactggaacaacactcaaccctatctcggccaatcctttggatttataagggattttgccgatttcggcctattggttaaaaaatgagctgatttaacaaaaatttaacgcgaattttaacataatattaacgcttacaatttacgtggcacttttcggggaaatgtgcgcggagaccctatttgtttatttttctaaatacattcaaatatgtatccgctcatgagacaattaccctgat

SEQ ID NO: 465 - DNA, 413 bp, Bos taurus
  unsure (378): unsure at all n locations; Clone ID: 03-BOVMS1-005-Q1-E1-A11
gcggcacggaagccgtcaccatgccacaaaatgaatatattgagttacaccgtaagcgctatggatatcgtttggattaccatgagaaaaagagaaagaaggaaggtcgagaggctcatgaacgttcaaagaaggcaaaaaagatgattggtctgaaagcgaagctctaccataaacagcgccatgctgagaaaatacaaatgaaaaagactattaagatgcatgaaaagagaaacaccaaacagaagaatgatgaaaaaactccacaaggagcagtacctgcatatctactggaccgtgagggacagtctcgagctaaagtactttccaatatgattaaacagaaacgaaaagagaaagcgggaaaatgggaggtcnctctgcctaaagttcgtgcccaaagagaaacagaa

SEQ ID NO: 466 - DNA, 412 bp, Bos taurus
  Clone ID: 03-BOVMS1-005-Q1-E1-A3
gcagattatccaaatgttaatagacgaacaacaacccagactttaaagaagaaaaaaaattctggtaaaaagaccaggtctgcagtattagaacagaacttcaaagagtctttaagggaggttgaaaacaaaaaagagattgactgtctccgcctttgtgaccctgagcacagaattgtgtgtgaaggtacctactggcatgtgttttcacggctctgtctcaccaagacaaccaggggacccccaacgtctcaggctggttactgcgtgtcagtgtcccactgtggctcctttaaagagcaatactggaaaaagctccatagaagaaattgctttgctgttaaagcctggccatctagatgagcagcaaggctgggttgggtaagaggttatcagaatctgaaagtctgtg

SEQ ID NO: 467 - DNA, 189 bp, Bos taurus
  Clone ID: 03-BOVMS1-006-Q1-E1-A3
acatgcgacgtcatatctcttctatacagtcacctaatctcaattcactggacgtcgttttacaacttctcgactgggaaaatgctgacgttacgtaactttatcgccctgcaccacatcaccctttcgataactggtcttctacctgctatgtccgcaccgatagctgttccctaaacttgcacagcc

SEQ ID NO: 468 - DNA, 307 bp, Bos taurus
  unsure (233): unsure at all n locations; Clone ID: 03-BOVMS1-008-Q1-E1-A3
gtccggagaaagaattgatgacttggaagacgagctgtacgctcagaaactgaagtacaaagccatcagcgaggagctggaccacgctctcaacgacatgacttccatataagtttctttgcttcacttctcccaagaccccttcatcgagctggatgtcccacctctctgacctctgcagtttgtctgttctccagctgaccctgattctttcttttcacatcctgccttanggccaggtacacactgtgcttcctgttgtacagaagctcttcacttcagtgtaaaataaacactatgtaagctg

SEQ ID NO: 469 - DNA, 139 bp, Bos taurus
  Clone ID: 03-BOVMS1-009-Q1-E1-A11
acgagtgattatacgtcttctataaagttccctaaattcaaatcactggccgatattttacaaagtcttgagtgggaaaatcttgacgtctccaaatgtaatcgccttttagaacaacccgcttttggcaattggcgta

SEQ ID NO: 470 - DNA, 334 bp, Bos taurus
  unsure (26),(304): unsure at all n locations; Clone ID: 03-BOVMS1-009-Q1-E1-A3
cgacccatcggcccacccaataatanaaatgttaacaatgcattcatcgaccttccaaccccatcaaacatttcatcatgatgaaatttcggttccctcctgggaatctgcctaatcctacaaatcctcacaagcctattcctagcaatacactacacatccgacacaacaacagcattctcctctgttacccatatctgccgagacgtgaactacggctgaatcatccgatacatacacgcaaacggagcttcaatgttttttatctgcttatatatgcacgtaggacgaggcttatattacnggtcttacacttttctagaaacatgaaata

SEQ ID NO: 471 - DNA, 368 bp, Bos taurus
  Clone ID: 03-BOVMS1-010-Q1-E1-A3
tcgcctggaaggcaacgtcaaacccctccaaaagggtcacctaaattcaattcacgggccgtcgttttacaacgtcgtgactgggaaaacccgggcgttacccaacttaatcgccttgcagcacatccccctttcgccagctggcgtaatagcgaagaggcccgcaccgatcgcccttcccaacagttgcgcagcctgaatggcgaatgggacgcgccctgtagcggcgcattaagcgcggcgggtgtggtggttacgcgcagcgtgaccgctacacttgccagcgccctagcgcccgctcctttcgctttcttcccttcctttctcgccacgttcgccggctttccccgtcaagctctaaatcgggg

SEQ ID NO: 472 - DNA, 314 bp, Bos taurus
  unsure (203),(209): unsure at all n locations; Clone ID: 03-BOVMS1-011-Q1-E1-A11
gcatttcagatcaaaggggtcagcattcaccgtaaagctaatttgcctttggctgggtgtccaacttgaaagaacagagcccgtgtggtttagttacatgtcttactatacgtacctgcactttcagcttctgtatttactaaccaagggagaaagaacaaaaaacactctctactaaccagaggacagtgatcacagtgctntcacanacatcttaattagtttaactccaagaagacatcaaggcagggagtagaacgttttgagtaagattcttatgtgtatttcgattgcagtttagctactgtcatcca

SEQ ID NO: 473 - DNA, 181 bp, Bos taurus
  Clone ID: 03-BOVMS1-012-Q1-E1-A3
gtgagaattcctttctccttggtgagcctttccctcatttaatgtttacatgtcatctaggaaaacgcagtttctggtgccttctctccaatcagctctttcttcagagtgagacgtacttgtctacagatttctctcattttgcagcatagtcccattcacacaagtattttgggatatt

SEQ ID NO: 474 - DNA, 453 bp, Bos taurus
  Clone ID: 03-BOVMS1-013-Q1-E1-A3
gggtcgacccacgccttcggaaaaattacagcttgttccaattgaccaggatgcttaatcactgcagtgccctggaaaaaagtgtcttagcgcatgcatatcataagagtcaagccttagaacctccaccgcaatgtctcgtatttcatatttatctaaggaaggaataggaacaagaagcattttgtaagttgaagctggtcaaagtgaagttaaccagatcatggaataaaagttcaagaagtacgtttttctttcatagcctatagccagacacatgctcattgttagtgataatgagaaacataccaaacaaaaccccaagattttaaatcacgaaagataactcaaaaatttattttaaaccatagcagaaactttcttcttcagcacatcttttataggatttatttaaagcagtgaaatgagtttcatcattttttacctcctctc

SEQ ID NO: 475 - DNA, 357 bp, Bos taurus
  Clone ID: 03-BOVMS1-014-Q1-E1-A3
cccacgcgtccggccaaatgttaatgcagcaatattgataaaggtcattcagtggtgcactcaccacaacgatgatcctcctcctcctgaggatgatgagaacaaagaaaaacgaacagatgatatacctgtttgggatcaagaattcctgaaagttgaccaacggacactctttgaacttatattggcagcaaactatttagacatcaaacgtttgcttgatgttacctgcaagactgttgctaatatgatcaagggcaaaactcctgaggagattcgatagacattcaatatcaaaaatgattttactgaacaagaggaagcccaggtacgcaaagagaaccagtggtgtgagga

SEQ ID NO: 476 - DNA, 322 bp, Bos taurus
  Clone ID: 03-BOVMS1-015-Q1-E1-A11
atgcgacgtcatagctcttctatagtgtcacctaaattcaattcactggccgtcgttttacaacgtcgtgactgggaaaaccctggcgttacccaacttaatcgccttgcagcacatccccctttcgccagctggcgtaataccgaaaaggcccgcaccgatcgcccttcccaacagttgcgcagcctgaatggcgaatgggacgcgccctgtaacggcgcattaagcgcggcgggtgtggtggttacgcgcagcgtgaccgctacacttgccagcgccctatcgcccgctcctttcgctttcgtcccttcctttctcgcca

SEQ ID NO: 477 - DNA, 417 bp, Bos taurus
  Clone ID: 03-BOVMS1-016-Q1-E1-A11
acgacgcgtccgatcattcatatctttctgatctgtaaatacttaaaaaaaagagtagttttgtatcaacctaaatgagtcgaagttcaaaaataatacatttcagtcttttcataattgttgacctaagaagattacacattttctagtgacatgtacatactgtatatagccggattaacggttataaagttttgtaccatttattttatgacattttacactgtaactattgaaactaacggttggtaggagaaagtttcttatggaacgaataccctgctcaacacttaatcaatctttgtgcctcaacatactgttgatgtctaagtatgcctcagtgggtcgaggaatttcccattgaagatgtcctatccaccgaaaaatgctgtgcacatcacctgatatgcaacgata

SEQ ID NO: 478 - DNA, 287 bp, Bos taurus
  Clone ID: 03-BOVMS1-016-Q1-E1-A3
ccaaaatcctcggaggttaataaaacccgattgggacgccatcaatccttctaaagtgtcacctagattcagctcaacgggcgtcgtttttcaacatcttgactggagaaatctgtcgttttcagcttaatcgccttgcagcacatcttccattcgccagctgacgtaatatcaaatatgccagcagcgatcgcacttcacaacagttgcgcatcctgaatggcgaatgggactcgccctgtagccgatcattaagcacagctggtgtggtggttacgcgcatcgtg

SEQ ID NO: 479 - DNA, 422 bp, Bos taurus
  Clone ID: 03-BOVMS1-018-Q1-E1-A3
tacggtcaggaattcctcgatcgaccattcgatgaagaatgcataagatgaacattgcatgaccagattattttaatgtccttgcctttaaaaaaaaaaaaaaatcatttcaaaagtattcaaaactgtcaagctacccagtcagagggctgttgccatttaaaatcactgtaattaattagtttggttagagcacaaagcttagctaatcaaccatttttttttaaatttcttttattcagagaagactgaaaatcagtttagtttaaatgtcttttactttcttttgtgtctttctttcttacaatgaagacatgattcctctagtttaatgtcaaaagtttttgaagtgtttcaaaaatgttttacttaccgtaaccctaaagttgttgtcttttggtctatgaagtgggtaactgttg

SEQ ID NO: 480 - DNA, 453 bp, Bos taurus
  unsure (436): unsure at all n locations; Clone ID: 03-BOVMS1-019-Q1-E1-A11
tacgggccggaaatcccggggccgaccaaggcgtccgggagaagtctgagcattcagaagctgcccacctctctacctacagtgacgggggcgtcttcttctctgcagcctcaacaggttacaaacatgcaagaaccacagagctcccacagcaacgatcatcttcagttgctacccagcagacaacggtatcctccatcccatcccatccatccactgctggaaaaatcttccgtgccatgtatgactatatggctgctgatgcagatgaggtatccttcaaagatggagatgccattgtcaatgttcaagctattgatgaaggttggatgtacggcactgtgcagaggactggcaggactggcatgctcccagccaactacgttgaagctatttagacacttcaaagcatcaatcctgtctaaatgacctacanatcttgttagtatttca

SEQ ID NO: 481 - DNA, 316 bp, Bos taurus
  Clone ID: 03-BOVMS1-019-Q1-E1-A3
ttccaatccccaaaaaaaaaaaaaaaaaaaaaaaggaagaaaaactaaaagataaaaaacttaaataaacgaaaataaaaaaatcaatcaatcaacaaaaaagtcaaaataaattcaaatcaaagaaacttagaataaaaaagaaaggggcgcgccacctaatggttttacccttcttaatctctgtatgaaacatcatgctcttccaaaagtggccccaaaatcaatttcccgggaccgcttttaaaacagaccatttgggaaaacccctgggttaacccaacttaccccctttgcgtgaaatacccttttcgca

SEQ ID NO: 482 - DNA, 428 bp, Bos taurus
  Clone ID: 03-BOVMS1-020-Q1-E1-A3
gtcgctgtcgcctccctccagtcgccatcatgatcatctaccgggacctcattagccatgacgagatgttctccgacatctacaagatccgggaggtcgcggacgggctgtgtctggaggtggaggggaagatggtcagtaggacagagggtaacatcgatgactcgctcattggtggaaatgcctccgctgaaggccccgagggcgaaggtaccgaaagcacagtaatcactggtgtcgatattgtcatgaaccatcacttgcaggaaaccagcttcacaaaagaagcctacaagaagtacatcaaagattacatgaagtcaatcaaagggaaacttgaagaacagagaccagaaagagtaaaaccttttatgacaggggctgcagaacaaatcaagcacatccttgctaatttcaaaaactatcag

SEQ ID NO: 483 - DNA, 432 bp, Bos taurus
  Clone ID: 03-BOVMS1-021-Q1-E1-A11
agtacataatagatgaaatcaataacccatctcttacagtaaaaaccataggacatcagtgatactgaagctatgagtatacagattatgaggacttaagcttcgactcctacataattccaacatcagaattaaagccaggggagctacgactattagaagtcgataatcgagttgtactaccaatagaaataacaatccgaatgttagtctcctctgaagacgtattacactcatgagctgtgccctctctaggactaaaaacagacgcaatcccaggccgtctaaaccaaacaacccttatatcgtcccgtccaggcttatattacggtcaatgctcagaaatttgcgggtcaaaccacagtttcatacccattgtccttgagttagtcgcactaaagtactttgaaaaatgatctgcgtcaatattat

SEQ ID NO: 484 - DNA, 450 bp, Bos taurus
  unsure (252): unsure at all n locations; Clone ID: 03-BOVMS1-021-Q1-E1-A3
cctcattttagtaaaaaagaaaaacagacaaaaaaaaaaccctgagaagtctgaattttagttaaatgaccccaaactggcatttaacaatgtttataaaaatatatatatataaatatatatatataatgaaaatcatttcagagttgcaaaagcctcagtttatgacattaagtttatgaaacttctgaaaattgccttttttggagactattatgctgaagaaaatagtgtagtccgttttgtgaggangagatgtgagcacccagaatgtctttcaaggccgggcgggtataattgtttactgcctactggatttttttctgttaacattgaaaggcaaaaatctgattatttagcatgagaaaaaaaaaaatccaactctgcttttggtcttgcttctataaatatatagtgtatacttggtgtagaccttgcatatatacaaat

SEQ ID NO: 485 - DNA, 418 bp, Bos taurus
  unsure (262): unsure at all n locations; Clone ID: 03-BOVMS1-023-Q1-E1-A3
aagtaaatatggacttggagtttacaattggaatctggaccctaaagaacatttaccaggaacaaaggtgaaagtgaagaaggaattggccattacaagttcctggacatacaagatgaacattttcaggcaaaaagactaagtatattttgtgaaaagtttatacctcaatccttactactgtatttttaaaaaacaagttatttcaagattaaaaaaggcaacagaattttaattgttgcttataagcaactttccatanacatttatatcatatttaaaaaggtcaattcattcaactaagaaccaatttaaagcacgctgaaaacctaaatctgaattttgctttctggacaaaaattaaagcacacgtgatcagtttaaaaatacaatcctaaaagatcataaaccctgacat

SEQ ID NO: 486 - DNA, 414 bp, Bos taurus
  Clone ID: 03-LIB188-002-Q1-E1-A3
ccaagtcccgttctccaagtcgacgattatctcgagtccgaatgttcactgttctcttactctgctctctctggccaaccacaaactgaaaattgtagtgtgcgagctgagcccggcggattctccggctgagggtcagtcccgagtcagcgtccaggtcaccgaccagtcccgcagctcgcaggctctgctgtgcctctctggcatattcctcctgctccgtccccacagggatgaccaccacctggaacggggacagccatagtggccatttccccccacagctctctgccagcactcccaacatcctttccacggaaccgagcacagcgcgatgaatgaggactggacgccctagggcccccaactgccccttgtacttggtgagaagggccggcggatccgggaattgac

SEQ ID NO: 487 - DNA, 237 bp, Bos taurus
  Clone ID: 03-LIB188-003-Q1-E1-A11
atgcaggcggtgtttaaattcaacgtgaggggtgtccgtgatgtttggagtttgaaaatggatttaaacagtgctaaaccgagtccactgggtttggttccgtgccgtttttgagcaagtcaatcaatcactggctttgggtccgttgaagtcagcaacgcgaacgtccaattcctcctcaagaccaactgcgttctcaataactctacgtcctccagaacttcctgtgggaacaaa

SEQ ID NO: 488 - DNA, 376 bp, Bos taurus
  Clone ID: 03-LIB188-003-Q1-E1-A3
tccaacttgctacagcgcgtgccggacctgcagaacaacaaaataactgagatcaaagatggagactttaagaacctgaagaaccttcatacactgattctcatcaacaacaaaattagcaaaatcagccctggggcatttgctcctttggtgaaattggaacgactttatctttccaagaatcaactgaaggaattgccagagaaaatgcccaaaactcttcaggagctgcgtgtccatgagaacgagatcaccaaagtgcgaaagtctgtgttcaatggattgaaccagatgatcgtcgtagaacttggcaccaacccgctgaagagctcaggcattgaaaatggagcctttcagggaatgaagaagctctcct

SEQ ID NO: 489 - DNA, 402 bp, Bos taurus
  Clone ID: 03-LIB188-005-Q1-E1-A3
ggacactattaccaatgaattcatataactaattcaagagaaaagacaccacacttggaaaaaaaaaaaagatttttaaagataatggttttaattgagttaatgagatgaaaaaatcgtgaagccctatgttctacttacatgaaagaagattttttaaaaaataatcactgcacaaaatacaaagggtggggttatgctgtggtattaaatttctctccattatgtttttcttgactgttcaagggcaaattaaagtttccacggcaaatctgttctcaaaatgccgaatcgtaacacagacgtcagctgaacgtttctgaatacctttaatggtttctctgcgttgcagtttataagtttccttatcatgggacagtcgataaatatagaaacccaagt

SEQ ID NO: 490 - DNA, 275 bp, Bos taurus
  Clone ID: 03-LIB188-006-Q1-E1-A3
gtcaaccgaatcagtctgccggtttctctgccactccacggctacatcttctgggtagaagccggtgaccatgtaggtgacgctgagcgtgcttttgctgagctcttccttgggtgggtccaggacatacacctgcggctcccgggccggccctttgctcctggagatgatcctcacgatgggggccgagaggcctttgttgttgaccttgcacttgaactcctttcctccagtccagtcctggtgctggatgggcagggcgctgaccacgcggt

SEQ ID NO: 491 - DNA, 376 bp, Bos taurus
  Clone ID: 03-LIB188-007-Q1-E1-A11
caaaccaatagagcccactggcatctgttgcctgcacagcttgagaactaaactggtttaataagtcacaggctcagcccggttaggatgacctttgtccctctagacaaagggggactgagagggctgatcaggccctggctctggggcttatcctatgcagagaggagaggcctagtggctcaggctggccagaccacatctcctgaccccatgggggtaccagcagaagccgggccagggccctactagagtcatttataaaaataacattcgaccctcgggggtctctgatcggttctctggctccaactcaggcgacaccgccacgctgaccatcagtggggcccagccagaggacgaggccgactactac

SEQ ID NO: 492 - DNA, 293 bp, Bos taurus
  Clone ID: 03-LIB188-007-Q1-E1-A3
ggacgcgggataactcggtaaacacaggcattggcatgaccaaagctgatcttgtaaataatttgggaaccattgccaagtctggcactaaagcgtttatggaggctcttcaggctggtgcagacatctccatgattgggcaatttggtgtgggcttctactctgcctacctagtggcagagaaagtggttgtgatcacaaagcataacgatgatgaacagtatgcttgggagtcttctgctggaggttccttcactgtccgtgctgaccatggtgagcctattggccgcggt

SEQ ID NO: 493 - DNA, 400 bp, Bos taurus
  unsure (84): unsure at all n locations; Clone ID: 03-LIB188-008-Q1-E1-A3
gatacctgggcaatggccctcgcatcgtcttgaacggggctgggaacttcatggacccctcgaagaaacacatgcgcaaggtcnccaacggctacctgcgcttccactacggggccgagaactcactgggtggcttcgcctacgtagagatcagccccaaggagatgagcgtcacttacattgaacctcggcaattcctcttaagacaggttccgaggcgagccaagtccgagcatcagcaccgccgcgggctccacgctggggcctgagtgagaaggcgcctccctgccggtgggtgggttggtcccactgggacacacacacaccccctccctactccccctgcccatgggcaagctttctcaggagcccgtggtgtgatggcaaagcaagaaagaga

SEQ ID NO: 494 - DNA, 424 bp, Bos taurus
  Clone ID: 03-LIB188-009-Q1-E1-A11
catgctaccgaccgccggcgggactacatcaggacccaggatcggcccccagaatcctcatctttgatgcgaccagtcgagcctctggggtccccgaccgattctccggctccaggtctgggaacacagccaccctgaccatcacggcgcttcaggccgaggacgaggcggattatttctgtgcatcttatcacatcagtagtactgcttttactattttcggcatcgggaccacactggccgtcctgggtcagcccaagtccccaccctcggtcaccctgttcccgccctccacggaggagctcaacggcaacatggccatcctggtgtgtctcatcagcgacttctacccgggtagcgtgaccgtggtctggaaggcagacggcagcatcatcaaccgcatcgtggagaccacccgggcctc

SEQ ID NO: 495 - DNA, 408 bp, Bos taurus
  Clone ID: 03-LIB188-009-Q1-E1-A3
gccactgggagcgggtaacaactaaaaacatagttagccataaagtaggactttataaaacataaacagaacaggtgccgtctcgtccacagaacagttccagtctcagtgtgcagtatgtagttaagccctagtaccttcattcttttgcatagaaaactttgaaactgtgtatccccaaattaaaaaatatatattactagcaaagtaagattgtagtagtttgatcttgtacgacgccagcgggcatgtggaggaccttgctgccgagcagaacacgcagatcacgtccatcgccattggctctacagaaggcgttaaccaggcagacaaggcaataaacacagctgtgaagtcgggcaggtgggtgatgctaaagaacgtccacctggccccgggctggctgat

SEQ ID NO: 496 - DNA, 369 bp, Bos taurus
  Clone ID: 03-LIB188-010-Q1-E1-A3
acgcggacgtaatggccgcgggctactggagtgaggtgccattgccttctcccatatctattcacaagcctgcctaaatcattgacttctagccacctttgggatgccaatgcccacccacccttaccaggccgcataggagagaaaacacttaccacaggaggtccgggtaaggaacaaggaactaacaagctcccaccaaccaggattctgcagaggtcaacaagaggtcagcaagagatgggagactgcagtccagaggtcctagcaacttccagcgagcagcaaagacccagcatagtcaaaactaattcaatgttaccaaaaccaaataaataaacggacagaagttcttgggacacatgactg

SEQ ID NO: 497 - DNA, 419 bp, Bos taurus
  unsure (330): unsure at all n locations; Clone ID: 03-LIB188-011-Q1-E1-A3
gccatgggaccatgatagactcaaagctctcctgcagcaaatttcccctggatagtgccacctttgcatctccccaagattttgggcttgtgttgcagacactcaaagagtataacctaaccctaaagaggctgagcttccacgacatgaatctggctgactgtcagagtgaggtgctctttttgctacagaatctgactcttcaggagattaccttctccttctgccgtctgtttgagaagcgcccagcccaatttctgcccgagatggttgctgctatgaagggcaactccacattgaagggcctccggctgccaaggaaccgcctgnggaatgctggcctactggccctggcagatgttttctcggaagattcatcctcctctctctgtcagctggatatcagtttcaactgcatc

SEQ ID NO: 498 - DNA, 419 bp, Bos taurus
  unsure (404): unsure at all n locations; Clone ID: 03-LIB188-012-Q1-E1-A3
gccatagccgcgggatacagatgtcaaggatcatggaacctttggcgtcctgaggcttcttgactgtttcgggggctgggcgtatggaaacccgcagcatcgctaaggcaggagacttcctcgaaaaccactacagagagttgcgaaggccatatactgtggccattgctgcctatgccctggctttgttgggcaagctggagggtgaccgcctcaccaaatttctgaacacagccaaagaaaagaaccgctgggaggaacccaaccagaagctctacaatgtggaggccacgtcctacgccctcttggctctgctggcacgcaaagactacgacactacgcctcctgtcgtgcgctggctcaacgagcagatatactatggaggtggttatggctccacgcanggcactttcatggtg

SEQ ID NO: 499 - DNA, 377 bp, Bos taurus
  unsure (105): unsure at all n locations; Clone ID: 03-LIB188-014-Q1-E1-A3
gccaaggccgcgggatcctggacacattggatttgtttttaaaaatggaaaaatcacatccattgtgaaagacagttctgcacctagaaatggtcttctcacggnacataacatctgtgaggtcaacggacagaacgtcatcggactgaacgactctcagatcgcagacatattgtccacagctggaaatatagttactattacaatcatgcctgcttttatctttgaacacattattaaacggatggcgccaagcattatgaaaagcttgatggatcacaccattcctgaggtttacaagtcacggcacagtggaaacttcccagaagttctcccgtttacgtctcgggcaactgacctttctattatgcacctga

SEQ ID NO: 500 - DNA, 403 bp, Bos taurus
  Clone ID: 03-LIB188-015-Q1-E1-A11
cgaagacgtctggactgactcaaactgcccatttctctgccactccacggcgatgtagtctgggtagaagctggtgaccatgcaggtgaggctgaccgtgcttttgctgagctcttcctggggtggggccaggacatacacctgcggctcccgggccggccctttggtcctggagatggtcctcacgatgggggccgggaggccttcgttgtggaccttgcacttgaactcctttcctccagtccagtcctggtgctggatgcgcagggcgctgaccacgcggtaggtgctgttgaactgctcctctctcggcttcgtcgtggctgtgtttacctccacgtcgtccacgaaccaggagaacttcacctcggggtcatcgtggcccacgtccaacaccacacac

SEQ ID NO: 501 - DNA, 370 bp, Bos taurus
  Clone ID: 03-LIB188-015-Q1-E1-A3
acaaagacaccacacatctcagtaccagatactctcaacacaagctgaaacattgatctaggggcccagctgggacttctcccaaccccctctcatgggtgtccgtccggaaatgaacgaataccccgagaaccgggctggggtttatttaagcttttctgtctgggtttacggagggcgggcactttaatgttattaaggctggtttgggtgtgggcaaagaatcttggccacaatccaccagtttgcttaattttgtctcctggtctagaccacctgcactgcagctgtgtggcaactgggggttcctcgcaggtcataagggtaactgggctcttgcatgcatcctatccccttcatgggtactcct

SEQ ID NO: 502 - DNA, 324 bp, Bos taurus
  Clone ID: 03-LIB188-016-Q1-E1-A3
ggataccggataactttgaaccccatggcaccatcctcaacttcactggtgataactccagcaccaggggatggagagtcatgggcacactgctaagcctccgggcaatgttggcctgtcatgatcagcagtgcagagcttctcaagagtcaccacgcagatataccaaggaagaagtgaaatcccacaacaaccctgaaactggggtccgggtaactttgggctgttaaggttttgataacacaaaatttgttgacatacaaccaaggggggcaataaaagctatgccaacaacccgggggtccttaaaagcccttctgggcc

SEQ ID NO: 503 - DNA, 432 bp, Bos taurus
  unsure (82),(298): unsure at all n locations; Clone ID: 03-LIB188-017-Q1-E1-A11
ccatggaagccgaaggacgtcgggatagataagccatgggtcctctccgggctcgggggtcgcatcctcaggagtagtgtancgagcaaattctggaaagtagtcctcaatcttcgattttccagcaaggactttctcagccagcagatcttgcttgttgaggaacagaatcacaaaaaatgggcccaaccaaccggtaatccaaaaggcccttgaaaaggttaaaacccccttgaaggcggttggccgggttgtcctcccgaatgacaatttggtacctgcggctggaaaccacaanaatgatggaattcacatcattgaaccattggttccatttgcggcgttaatcgcgctggccgccaacttcaaacatgtggaatttgactttgtccacctggaacttggtctcaaagattccagaagtcaggacac

SEQ ID NO: 504 - DNA, 428 bp, Bos taurus
  Clone ID: 03-LIB188-018-Q1-E1-A3
gccatggaggccggatcaagtattaagatctgcagacactggctgggaaccacggggatgaccttcgtcgcacgaagacggagatttctgaaatgaaccggaacatcagccgtctccaggctgagatcgagggtctcaaaggccatagggcttccctggaggctgccatcgctgacgctgagcagcgtggtgagatggctgttaaggatgctcaggccaagctggccgagctggaggccgctctgaggaacgccaagcacgacatggcgcggcagctgcgcgagtacagcgccgaatctaccttcgaggggatcctcaaaaacccaagagcagagtctttgaacagcaggtccctctggccgggtggagagccaaagagctggaagctccgagacttgttttttccaaatttctcctgcgccttgctg

SEQ ID NO: 505 - DNA, 442 bp, Bos taurus
  Clone ID: 03-LIB188-019-Q1-E1-A11
gggatacttggagactgctgaaaaagacagattctaggtttgcacaatggtctctgtcatttacagacaagatgccttagggagcccttggtgctaattcacagccacccaaagccaagggtgacacaggatgctctacaaataaaatattcttggaattctcacctcactttctgtcttattttagatttagctgagttttgcccatgacctcactggattccacccaggatgatgatgttaaatcaccctgatgatttatgaagacaatcattgcactagcaatgattaccaagtcacctacattgctcttctggaaaggagtgagcaagcccacgaatctccaagttggttccagcatatcctttgttgagaaaaacaatggtttgtgatccacggcagctcctggaccagagcctcccttcaccctaaactggctgac

SEQ ID NO: 506 - DNA, 412 bp, Bos taurus
  Clone ID: 03-LIB188-020-Q1-E1-A3
gccatgggcccaggttctactacaagcaaccaaattaggtagcctgtttatcttgagctgacttcctgctccagggctggcttcctaatccagtcatattgctgaagtgtggctgaggtgagcccaggcctctctccgcgggtgagggttgctcctcacttaggttgtggggagaacccccccccacagtaaatggaagcagttgcctgcctgcctctggagtcccttttgcaacactcctttctttccctgggctgaagccaggacctggtggtgttccttacaggatagtcagtgacgatgccgggcacagctttccggagtgaaggccattgggcccgagcaccctttcacttggctccccccaccctctctaggaatcacattatgactgaatgctaggggtgggggc

SEQ ID NO: 507 - DNA, 381 bp, Bos taurus
  unsure (288): unsure at all n locations; Clone ID: 03-LIB188-022-Q1-E1-A3
ggatagcctcaggacggctcccacagcaagccccagcccaagaaggctaatgggaacgtctgccaggactgcattcagctggtaaccgacgtccaggaagctctgaggaccaactccaccttcgttgaggccttggtggaccacgctaaagaggaatgcgaccgcctggggcctggcatgtccgacatgtgcaagaactacatcaaccagtaatcggaagttgctaaccaaatggtgatgcatatgcaacccaaagagatctgtgtgctgggcggcttctgtgacgangtgaaggagatgcccatgaagaccctggtgcctgctgaagtggtctcagagaacgtcatccccgtcatcccctgcaaaggctgacatttactg

SEQ ID NO: 508 - DNA, 220 bp, Bos taurus
  Clone ID: 03-LIB188-023-Q1-E1-A3
cacaggacgaggacaagggcaggtacctacaagaggcccctgtgggcatcatcaggggcctcaaactgctcggtgacatcagatgcaggtctaacgagccaacgaatgactgcaagggctcgcccagccacagcttacatggcgagcgggtttctgaagctcctgccggcaaacttggccttgctgcccagttcctcttcaattctgacgatctggatgt

SEQ ID NO: 509 - DNA, 378 bp, Bos taurus
  Clone ID: 03-LIB188-024-Q1-E1-A3
aatctaccatcgaggggatcctcaaaaacccaagagcagagtctttgaacagcaggtccctctggccgggtggagagccaaagagctggaagctccgagacttgttttttccaaatttctcctgcgccttgctgagaagcttccagatcaagtcttccttgccatccacacttcgggccacgacagcatgagaagggacctgggccaggtggcactccttgaacgcatccactggcgcccgactgttgttcaggcagagaagctcatactggtccctgtcagccttctctggcaagttctcaaacactgtcgcctctttaacaaaagccacgtctccagccccgtcctgcagacacttgaaggcaccagaataaccga

SEQ ID NO: 510 - DNA, 403 bp, Bos taurus
  Clone ID: 03-LIB188-025-Q1-E1-A11
gaccatacctagcaccaatgtccatatatgaagtcatgtatagctgctggcatgagaaacctaaaggccgcccgacgtttgctgagctgctacaggttcttacagagattgcagaaacctggtgacctaaagggactgccaacccagaggatcatcctgcaggactgtcatgaaaggaaaccctgggtgaagtcactgatggtgaatatcaccctttagagccactgactctaagaaacagtgcaaagattacaggcttttccaatttgttaaagcttgagagtattctgacaataacttttctacatatatgtttgagagtgacttctaaacttggactattctataatattctttatgtctcatgcatgaagaatgaaaaaattgctccatagtcgtcttt

SEQ ID NO: 511 - DNA, 420 bp, Bos taurus
  Clone ID: 03-LIB188-026-Q1-E1-A3
ccatggcagagggataattgaaacaacatcctgcaggggaggctcctttattccagaatttggcagaatttattttcatcttctacacatgagccaccaaactagaatacaaaagtcactcctcttcagtagagcagtgtcctcagttaatgataacgttttcatgtaaccttaaggctctcacggcgcttctcgtgaggagcaaccactataacgacgactatggagcaattttttcattcttcatgcatgagacatatataatattagataatagtccaagtttagaagtcactctcaaagatatatgtagaatagttatcgtcagaatactctcaagctttaacatattggaaaagcctgtaatctttgcactgtttcttacagtcagtggctctaaatggtgatattcaccatcag

SEQ ID NO: 512 - DNA, 235 bp, Bos taurus
  Clone ID: 03-LIB188-027-Q1-E1-A3
gccatggatacgagcatcaatgcataagcagcaaaaggcattcctgagttttatgactatgacgtggcccttgtcaggctcaaggaaaagctcaagtatgagaccaccatcaggcccatttgtctcccctgcaccgagggatcgattcaagcctttacgcttccaaggtcaaccacatgccaccaacagatgcaagaactactccctgcaaaggacattgaagctccgtttgtgt

SEQ ID NO: 513 - DNA, 392 bp, Bos taurus
  unsure (383): unsure at all n locations; Clone ID: 03-LIB188-028-Q1-E1-A11
atcgaactcaggctgcccatttctctgccactccacggcgatgtagtctgggtagaagctggtgaccatgcaggtgaggctgaccgtgcttttgctgagctcttcctggggtggggccaggacatacacctgcggctcccgggccggccctttggtcctggagatggtcctcacgatgggggccgggaggccttcgttgtggaccttgcacttgaactcctttcctccagtccagtcctggtgctggatgcgcaaggcgctgaccacgcggtaagtgctgttgaactgctcctctctcggcttcgtcgtggctgtgtttacctccacgtcgtccacgaaccacgagaacttcacctcggggtcatcgtggcccacgtccaccnacacacacg

SEQ ID NO: 514 - DNA, 335 bp, Bos taurus
  Clone ID: 03-LIB188-028-Q1-E1-A3
tcatacgccacccactggttgcccttggtggcatatgggacctgctggtcacggaatctgtgggtggtggctccgtggaggaagtcacagatctcataataggcaaggatccctttctccttggtgaactggcctggaattcctggccctgagatgggggctcccacatctgtcttggaagaggccagagtgtagctcctcccaaaagtggggatacccatcaccagcttattggctggagcccccagcctcagcatgtagctcacagcgtagtcagcgttactgaatctgtcagaacttgcatcttcctggcctcgaaacaaggggctgtggtg

SEQ ID NO: 515 - DNA, 425 bp, Bos taurus
  Clone ID: 03-LIB2809-002-Q1-E1-A3
atggccgcgggatacagtattctttaaaattttctttttaaattgaaagccaacaactctgcctttatgatgctaagctcatgttcttatttcttctcctatcttctttctcttctgttcccattatccttccctttgttttgtccctgtcaccttcctttctccttctcctcattgccccccaggcaagcaggtggtcagtcattggtgggtttccagcttccaaagcctagacaaccctgctgtagtctcaaactagtggtctttgccccggctgaccctttccttgagctgtctgagctttaaggtggatggctcaagctagagatatgacagaatcttctgggaagggccttgatgatcttcagcccagacttttgctaaatgaaatggaaaaataactttattttggcaccaaactgaaa

SEQ ID NO: 516 - DNA, 421 bp, Bos taurus
  unsure (363),(391): unsure at all n locations; Clone ID: 03-LIB2809-003-Q1-E1-A11
gagtgaaaatatctctctggggatacggcactgctttctggggaacaggcaggactttggactgagaaagggacagcacggactgaggaggaaacatgacagttggaggaagaggctggtgaggctggtgcatccaagactggagcagaggcagaggaaggtgcagattttcaacatcagtgagagtcaggctctggctttcagtaaagggctcaactggatatttagggaagggcatttctttgtgcttaggagccatagcctccttcactttggagactcccattacttcaggctgaaggaaaggcggcaccaccacaggggtttgagtaagaggagggatgttttgtgggaggctgttanggatgggcccagggaagggatagactanagactgtgtctgggcaaaggggtggatttt

SEQ ID NO: 517 - DNA, 424 bp, Bos taurus
  Clone ID: 03-LIB2809-004-Q1-E1-A3
gcacgatagaccaataaagcctgaatgggcagatctctctggggataggacactgctttctggggaacacgcaggactttggactgagaaagggacagcacggactgaggaggaaacatgacagttggaggaagaggctggtgaggctggtgcatccaagactggaccagaggcagaggaaggtgcagattttcaacatcagtgagagtcaggctctggctttcagtaaagggctcaactggatatttagggaagggcatttctttgtgcttaggagccatagcctccttcactttggggactcccattacttcaggctgaaggaaaggcggcaccaccacaggggtttgagtaacaggagggatgttttgtgggaggctgttatggatgggcccagggaatggatatactagagactgtgtct

SEQ ID NO: 518 - DNA, 478 bp, Bos taurus
  unsure (96): unsure at all n locations; Clone ID: 03-LIB2809-005-Q1-E1-A11
tgctcgccgtatgcacgcggacgccaatacagcacggatagactgagtgagcatatctctctggggataaggcactgctttctggggaacaggcangactttggactgagaaagggacagcacggactgaggaggaaacatgacagttggaggaagaggctggtgaggctggtgcatccaagactggagcagaggcagaggaaggtgtagattttcaacatcagtgagagtcaggctctggctttcagtaaagggctcaactggatatttagggaagggcatttctttgtgcttaggagccatagcctccttcactttggagactcccattacttcaggctgaaggaaaggcggcaccaccacaggggtttgagtaagaggagggatgttttgtgggaggctgttagggatgggcccagggaaagggatagactagagactgtgtctgggcaaaggggtggattttatcctggagttc

SEQ ID NO: 519 - DNA, 399 bp, Bos taurus
  unsure (85): unsure at all n locations; Clone ID: 03-LIB2809-006-Q1-E1-A3
atgctcgcagccgccatgggcccaggagatcactaagtgcgagagcccgctggtgaaaaggcactgctttctggggaacatgcangactttggactgataaagggacagcacggactgatgaggaaacatgacagttggaggaagatgctggtgaggctggtgcatccaagactggagcagaggcagaggaaggtgcagattttcaagctttttttttttttttttttttttttttttttaatagtgccttaaaatgtaatttattgaaaagaagaaagacaaaatctcagttaatgcacacaattatttgatatgatggcacttacaggagaagtgattcaaaggcttttaaaacattttccatacagaaatttaatgaagactttaattccctttga

SEQ ID NO: 520 - DNA, 334 bp, Bos taurus
  Clone ID: 03-LIB2809-009-Q1-E1-A3
gggatacaacagaaatgccccaaagagtgctgatgaacgacttcacagtacgacagacggaatccatgcccaacagaaagaacctatgataggagtgaatcaggaactggcctacttctaccctgagcttttcagacaattctaccagctggatgcctatccatctggtgcctggtattacgttccactaggcacacaatacactgatgccccatcattctctgacatccctaatcccattggctctgagaacagtgaaaagactactatgccactgtggtgaagagtcaagtgaattctgagggactccacagttgaggtcgttgatggttct

SEQ ID NO: 521 - DNA, 377 bp, Bos taurus
  Clone ID: 03-LIB2809-013-Q1-E1-A3
ggatacaatacagaaacatgacacattcttgactcttccagtcattcaactcccggaacacctcacattttgtacaagcttttttttttttttttttttttttttttttttaggtttatgcctttattgctgaaggaggagcggccccaaacaggaggccccacgaggggcctggaagatcctgggtcccaggaggggtgaatgtggtcccggttcctcctggtcccctgatggggcaggcggggatgacatcgtctgtccccagaggggccaaggctcccgggctcccaaaggcgccggcatgggctcacctaaatgtggcactgctcctccagctgggttgggttgaaggacagccggatgtgcatgggcaaggc

SEQ ID NO: 522 - DNA, 333 bp, Bos taurus
  Clone ID: 03-LIB2809-016-Q1-E1-A3
tggggatagggcactgctttctggggaacaggcatgactttggactgagaaagggacagcacggactgatgaggaaacatgacacttggacgaatatgctggtgaggctggtgcatccaagactggagcagaggcacaggaaggtgcacattttcaacatcagtgacagtcaggctctggctttcagtaaagggctcaactggatatttagggaacggcatttctttgtgcttaggagccatagcctccttcactttggagactcccattacttcaagctgaaggaaatgctgcaccaccacaggggtttgagttaaatgagggactttttgt

SEQ ID NO: 523 - DNA, 277 bp, Bos taurus
  Clone ID: 03-LIB2809-017-Q1-E1-A3
gataccgctggaacatcaactttaccacgttcttcattgattgcatggctgccatcggtctggcttatgaccggaagaaagtatccaaggctgccatcttggccaggataaaaagaactggagaggaaagctacaagagtggctgaatttgtggtcccttgggttccttttccaaaagccatctgggcagaggtttaatgttctgtttattaactactgaataatgctaccaggatgctaaagatgacgttaacccattaaagaatactgtatcact

SEQ ID NO: 524 - DNA, 383 bp, Bos taurus
  Clone ID: 03-LIB2809-018-Q1-E1-A3
gctccaaacgccatgggccaggaatatcactttatctgtttaaattgacagccaacaactctgcctttatgatgctaagctcatgttcttatttcttctcctatcttctttctcttctgttcccattatccttccctttgttttgtccctgtcaccttcctttctccttctcctcattgccccccatgcaagcaagtggtcagtcattggtgggtttccagcttccaaatcctagacaaccctgctgtagtctcaaactactggtctttgccccggctgatcctttccttgagctgtctgatctttaaggtggatggctcaagctagagatatgacagaatcctctgggaacggcctttatgatcttcagcccagaacttttg

SEQ ID NO: 525 - DNA, 350 bp, Bos taurus
  Clone ID: 03-LIB2809-019-Q1-E1-A3
gccatgggcgcgggataacacgactgaatgggcatatctctctggggatagggcactgctttctggggaacaggcaggactttggactgagaaagggacagcacggactgaggaggaaacatgacagttggaggaacaggctggtgaggctggtgcatccaagactggagcagaggcagaggaaggtgcagattttcaacatcagtgagagtcacgctctggctttcagtaaagggctcaactggatatttacggaagggcatttctttgtgcataggagccatagcctcttcactttggagactcccattacttcaggactaaggaaaggcggcaccaccacacgggtt

SEQ ID NO: 526 - DNA, 369 bp, Bos taurus
  Clone ID: 03-LIB2809-020-Q1-E1-A11
acaagctattttttttttttttttttttgtttctttttcgtttggtggaggtgatcaccgatgctgtggctgggctgccccatgtagtgcgggtcagcgcccgggactttctggatgctggcacctggagctcctggagccccgatgcctgggggactccaagcactgagcccctaccgaaggagatgccagttggggaccagcaacacacacagacagatgaagaacctcaggcagacagccccgctcccccaaagccgtcccttcttaccgacccacagccacttgaccacagagaccccctggagcatgtggccgtgctggcatctttgggaatcttctctttcctgggactggtggcttgggccc

SEQ ID NO: 527 - DNA, 377 bp, Bos taurus
  Clone ID: 03-LIB2809-020-Q1-E1-A3
atggatccgggatatggataatgttcccattagtgctgacggaacgacttcacagtatgaaagagggaatccatgcccaacagaaagaacctatgataggagtgaatcaggaactggcctacttctaccctgagcttttcagacaattctaccagctggatgcctatccatctggtgcctggtattacgttccactaggcacacaatacactgatgccccatcattctctgacatccctaatcccattggctctgagaacagtgaaaagactactatgccactgtggtgaagagtcaagtgaattctgagggactccacagttatggtctttgatgggtctgaaaattccatgctctacatgtcgtttcatctatca

SEQ ID NO: 528 - DNA, 382 bp, Bos taurus
  Clone ID: 03-LIB2809-022-Q1-E1-A3
cagaaaggcctagatgggcatatctctctggggatagggcactgctttctggggaacaggcaggactttggactgagaaagggacagcacggactgaggaggaaacatgacagttggaggaagaggctggtgaggctggtgcatccaagactggagcagaggcagaggaaggtgcagattttcaacatcagtgagagtcaggctctggctttcagtaaagggctcaactggatatttagggaagggcatttctttgtgcttaggagccatagcctccttcactttggagactcccattacttcaagctgaacgaaaggcggcaccaccacaggggtttgagtaagaggatggatgttttgtgggaggctgttagggatgggc

SEQ ID NO: 529 - DNA, 380 bp, Bos taurus
  unsure (364): unsure at all n locations; Clone ID: 03-LIB2809-024-Q1-E1-A11
tttctttttaaattgaaagccaacaactctgcctttatgatgctaagctcatgttcttatttcttctcctatcttctttctcttctgttcccattatccttccctttgttttgtccctgtcaccttcctttctccttctcctcattgccccccaggcaagcaggtggtcagtcattggtgggtttccagcttccaaagcctagacaaccctgctgtagtctcaaactagtggtctttgccccggctgaccctttccttgagctgtctgagctttaaggtggatggctcaagctagagatatgacagaatcttctgggaagggccttgatgatcttcagcccagacttttgctaaattaaatggnaaaattacctttattt

SEQ ID NO: 530 - DNA, 360 bp, Bos taurus
  Clone ID: 03-LIB2809-027-Q1-E1-A11
ggatactcgtgactgtaaaatcccatggacagaggatcctgataggctgcattccgaacaggcacgacttttcactcacaaatggacaacactgactgacgatgaaacatgacagttggaggaagacgctggtgacgctggtgcatccaagactggatcagatgcacaggaatgtgcacattttcaacatcagtgagagtcaagctctggctttcagtaaagggctcaactggatatttagggaatggcatttctttgtgcttacgagccatagcctccttcactttggagactcccattacttcacgctgaatgaaacgcggcaccaccacaagggtttgagtaagaggacggatgttt

SEQ ID NO: 531 - DNA, 373 bp, Bos taurus
  Clone ID: 03-LIB2809-029-Q1-E1-A3
taccatgaatttttgttctgcctaagttttaagggaatatatgttacaaccaagttcttctgagataaagcttaagctgctgtcaggaacccaactgtgactcttctgtttaaacctcattaatgcagaggaaaaatgttccactgtggttttgatgttttggaaggtctaacttgtgggtctcaaagctggacagggtccaccttttggaaaactggcacccataatgctgccagtgaactggtcatccatttccacctcaacaattactgtgactttgagctcctttgtggggatgaacatcaatctcttcataaacagcttctgtggtgacagcaggagctaagggatcagactccattacttcacagta

SEQ ID NO: 532 - DNA, 417 bp, Bos taurus
  Clone ID: 03-LIB2809-030-Q1-E1-A11
gggatacagcaaaaaggcctgaatgggcatatctctctggggatagggcactgctttctggggaacaggcaggactttggactgagaaagggacagcacggactgaggaggaaacatgacagttggaggaagaggctggtgaggctggtgcatccaagactggagcagaggcagaggaaggtgcagattttcaacatcagtgagagtcaggctctggctttcagtaaagggctcaactggatatttagggaagggcatttctttgtgcttaggagccatagcctccttcactttggagactcccattacttcaggctgaaggaaaggcggcaccaccacaggggtttgagtaagaggagggatgttttgtgggaggctgttatggatgggcccagggaagggatagactagagactg

SEQ ID NO: 533 - DNA, 392 bp, Bos taurus
  Clone ID: 03-LIB2809-031-Q1-E1-A3
gggatccctggtgagattgaggaaagcctttcaagcagtgaggaatctattacacgcatcaataagaaaattgagaagtttcagagtgaggaacagcagcaaacagaggatgaactccaggataaaatccacccctttgcccagacacagtctctagtctatcccttccctgggcccatccctaacagcctcccacaaaacatccctcctcttactcaaacccctgtggtggtgccgcctttccttcagcctgaagtaatgggagtctccaaagtgaaggaggctatggctcctaagcacaaagaaatgcccttccctaaatatccagttgagccctttactgaaagccagagcctgactctcactgatgttgaaaatctgcaccttcctct

SEQ ID NO: 534 - DNA, 361 bp, Bos taurus
  Clone ID: 03-LIB2809-032-Q1-E1-A3
cgtatgtgtatgatacataaggttatgtattaattgtagccgcgttctaacgacaatatgtacaagcctaattgtgtagcatctggcttactgaagcagaccctatcatctctctcgtaaactgccgtcagagtcggtttggttggacgaaccttctgagtttctggtaacgccgtcccgcacccggaaatggtcagcgaaccaatcagcagggtcatcgctagccagatcctctacgccggacgcatcgtggccggcatcaccggcgccacaggtgcggttgctggcgcctatatcgccgacatcaccgatggggaagatcgggctcgccacttcgggctcatgagcgcttgtttcggcg

SEQ ID NO: 535 - DNA, 260 bp, Bos taurus
  unsure (138): unsure at all n locations; Clone ID: 03-LIB3057-001-Q1-K1-A3
agacgactcagggtcctgtggacttctcaccagctatgatggctgcaggtaagcgtcgctaaaatcccctccattcgcgtgtcctaaaggggtaatgcggggggccctgccgatggatgtgttcagagctttgggctntagggcttccgaatgtgaacataggtatctacacccagacatttggccaagtttgaaatgttctcagtccctggagggaagggtaggtggaggctggcaggagatcaggcgtctagctccct

SEQ ID NO: 536 - DNA, 123 bp, Bos taurus
  Clone ID: 03-LIB3057-003-Q1-K1-A3
atttctgagatggttcttaatgatccattccctggcaaacttctctgagctttatagctttgtaatgcatgcttggctctaatgggtttcatcttaaataaaaacagactctgtagcgatgtc

SEQ ID NO: 537 - DNA, 303 bp, Bos taurus
  Clone ID: 03-LIB3057-004-Q1-K1-A11
ctggtgaagtgtgtttcttgaaatcatcaccactcatggacagcataggttcgtcgcagatagggtcccgcctgctcctgctgctggtggtgtcaaatctactcttgtgccagggtgtgttctccacccccgtctgtcccaatgggcctgtcatctgcctggtatcccttcgagacttgtattaccgggctgtcatggtgtgccactacttatatgacctctgctcggaaatgttcccagcttttgattaacagaatgccctgttcaaagggactattactatggtcgtgatcagctgattta

SEQ ID NO: 538 - DNA, 392 bp, Bos taurus
  Clone ID: 03-LIB3057-004-Q1-K1-A3
cgagagcttcctggtgaagtgtgtttcttgaaatcatcaccaccatggacagcaaaggttcgtcgcagaaagggtcccgcctgctcctgctgctggtggtgtcaaatctactcttgtgccagggtgtggtctccacccccgtctgtcccaatgggcctggcaactgccaggtatcccttcgagacctgtttgaccgggcagtcatggtgtcccactacatccatgacctctcctcggaaatgttcaacgaatttgataaacggtatgcccagggcaaagggttcattaccatggccctcaacagctgccatacctcctcccttcctacccctgaagataaagaacaagcccaacagacccaccatgaagtccttatgagcttgattcttggg

SEQ ID NO: 539 - DNA, 442 bp, Bos taurus
  unsure (2),(100),(194),(251): unsure at all n locations; Clone ID: 03-LIB3057-005-Q1-K1-A3
gncgggcaccccggggcgcggaggtgcgcttctacctaaatccttctttccccccaactccgcacgcccgggcactctcaaacccagtccacgctgctgnccccgctccctcttttctcggaccccagcaaactttcggtcccttactcgcccctcgcccgttactcgtcgtggctcgggcccggccgcgccgncccgagggctcctccggatctcccagtttccagctccgaccattagaggatccaganacatgtcgaccacacttatgtccgccttctacgatatcgacttcttgtgcaaggtacgcgggtgagcagggagcccttcgagttctcaggcttggccttatgtcctcggctttgggggttctcattccgctctgactttcttagattgaggaaaaatcccagagtttgcactgttgctcgagccttgtggg

SEQ ID NO: 540 - DNA, 413 bp, Bos taurus
  unsure (303): unsure at all n locations; Clone ID: 03-LIB3057-006-Q1-K1-A11
gtgaagtgtgttccttgaaatcatcaccaccatggacagcaaaggttcgtcgcagaaagggtcccgcctgctcctgctgctggtggtgtcaaatctactcttgtgccagggtgtggtctacacccccgtctgtcccaatgggcctggcaactgccaggtatcccttcgagacctgtttgaccgggcagtcatggtgtcccactacatccatgacctctgctcgcaaatgctcaacgaatttgataaaccgtatgcccagggcaaagggttcattaccatggacctcaacagctgccatacctnctgccttcctacccctgaagatatagaacaagcccaacagacccaccatgaagtccttatgagctcgattcttggttgctgcgcttctggaatgaccctctgtatcacct

SEQ ID NO: 541 - DNA, 425 bp, Bos taurus
  Clone ID: 03-LIB3057-008-Q1-K1-A3
cgaagggaagaaaagtgaccgagaggccgctgaacatcctcgccccggcgcagcgggagccgcccgaggcagcttccccgtgacagagcctcagcctgcctggaagatgccgagactgtgcagcagtcgttcgggcgccctgctgctggccttgctgcttcaggcctccatggaagtgcgtggttggtgcctggagagcagccagtgtcaggacctcaccacggaaagtaacctgctggcgtgcatccgggcctgcaagcccgacctctccgccgagacgccggtgttccccggcaacggcgacgagcagccgctgactgagaacccccggaagtacgtcatgggccatttccgctgggaccgcttcggccgtcggaatggtagcagcagcagtggagcccagaagcgcgaggaggaagtggcgg

SEQ ID NO: 542 - DNA, 377 bp, Bos taurus
  Clone ID: 03-LIB3057-011-Q1-K1-A3
cccggtcgaccacgcgtccggggagcttcgccggctttcctctccctttctcccgtctcctgtgttaggtctgacctccggccgatcgtccgccgccgcacggcttgccgccatggccctcagcgatgccgacgtgcagaagcagattaagcacatgatggcttttattgaacaagaagccaatgagaaagcagaagaaattgatgcaaaggcagaagaagagttcaacattgagaaaggtcgtcttgtccaaacccaaagactgaagattatggaatattatgagaagaaagaaaagcagattgagcagcagaagaaaattcagatgtccaatttgatgaatcaagcgaggctcaaagtcctcagagcgagagatg

SEQ ID NO: 543 - DNA, 438 bp, Bos taurus
  Clone ID: 03-LIB3057-013-Q1-K1-A3
cgaagggaagaaaagtgaccgagaggccgctgaacatcctcgccccggcgcaccgggagccgcccgaggcagcttccccgtgacagagcctcagcctgcctggaagatgccgagactgtgcagcagtcgttcgggcgccctgctgctggccttgctgcttcaggcctccatggaagtgcgtggttggtgcctggagagcagccagtgtcaggacctcaccacggaaagtaacctgctggcgtgcatccgggcctgcaagcccgacctctccgccgagacgccggtgttccccggcaacggcgatgagcagccgctgactgagaacccccggaagtacgtcatgggccatttccgctgggaccgcttcggccgtcggaatggtagcagcagcagcggagttgggggcgcggcccaaaagcgcgaggaggaagtggcggt

SEQ ID NO: 544 - DNA, 417 bp, Bos taurus
  Clone ID: 03-LIB3057-014-Q1-K1-A11
ccggaattcgcacggcatccgtccaggtaacctgaaagtatctttgttctgaaattaatttagaggaaaggaatactgtatgtgaaattgagcttgggcttcttccaaattgcaagatcaggccatgtgtaatattttccctaaaattagagaatattaatgcatgtttgaggattttaaagcaccatggtctaaaccagaagctatattttgcatatttggactcagccatccattaagaacttatgttgtcttctggacatatttatcaaaataatgttgttctaaatagtataaaatagaaaatttgtgatctatataatttatgtataaccttcattgttgtaaatttagggggaaatgcatcatacagttatgattttttttcaccagtgaaacaataaagttgctattaac

SEQ ID NO: 545 - DNA, 335 bp, Bos taurus
  Clone ID: 03-LIB3057-015-Q1-K1-A3
acggaggcgagagcgacccctggatcgacttaaagcccgcgcgccactgcatccccgtgtcgagctgctacgtcccgccgccgcagccaccatgcccaagagaaaggctgaaggggatgctaaaggagataaagccaaggtgaaggacgaaccacagagaagatctgcaagattatctgctaaacctgctcctccaaagccagaacccaagcctaaaaaggcccctgcaaagaagggagagaaggtacccaaagggaaaaaggggaaagctgatgctggcaaggatgggaataaccctgcagaaaatggagatgccaaacagaccaagcacagaa

SEQ ID NO: 546 - DNA, 121 bp, Bos taurus
  Clone ID: 03-LIB3057-017-Q1-K1-A3
cgggtggacccacgcgtgcgaccttgaacaggtagccaatgagactcatgggcatgtgggaggtgacttagcaaccctgtgctctgaggctgctctgcaagccatccgtaagaagatggac

SEQ ID NO: 547 - DNA, 338 bp, Bos taurus
  Clone ID: 03-LIB3057-019-Q1-K1-A3
ggcaggctctgctgggctgggggtgcgccctgttgaccctcctgctagtggtcgccctggcctacatggtggatgacgtctccccgacctcatccggcgccgcggccgtctaccaaggcctccaccggaccctgtgggcggcggccgtgggctgggtcctgttcgcgtgccatgaaggctacggaggtctggtgaaccggctgctctcctgcggcgtctggactcgcctggccagcatcagctacgcttgctacctggtacatcccaccctcatcatcctctacaacgggcttcaggagacgctgattcactacaccgacgtcaacatgttctatctc

SEQ ID NO: 548 - DNA, 244 bp, Bos taurus
  Clone ID: 03-LIB3057-021-Q1-K1-A11
tccgtttcgactacgcgtacggttgacgcgatgtgatctgtgctccagtgctctgaatgtcaaagtgaagaaattcaatgaagcgcgggtaaacggcgggagtaactatgactctcttaaggtagccaaatgcctcgtcatctaattagtgacgcgcatgaatggatgaacgagattcccactgtccctacctactatccagcgaaaccacagccaagggaacgggcttggcggaatcagcggg

SEQ ID NO: 549 - DNA, 400 bp, Bos taurus
  unsure (382): unsure at all n locations; Clone ID: 03-LIB3057-021-Q1-K1-A3
cttgcctgctcctctcactctctatcctctgctgttctccggcatggtgtgcctgtatttctctggaggctcctggatggcagctctgatagtgatgctgatggtgctgtgccctcccctggcctgggccagggagatccaaccacatttcctgcagtatcataagggcgagtgtcatttcttcaacgggaccgagcgggtgcggttgctggacagacacttctataatggagaagagttcgtgcgcttcgacagcgactgggacgagttccgggcggtgaccgagctggggcggccggccgacgagcagtggaacagccagaaggacttcctggagcagaagcgggccgaggtggacagggtgtgcagacacaactacggnggtgtggagagtttcact

SEQ ID NO: 550 - DNA, 300 bp, Bos taurus
  Clone ID: 03-LIB3057-024-Q1-K1-A11
attgttacttctagcaggtaaatgtatgtagcagtgcacgggtgatctctgcggccttgaccctgtacatgcagaaggctctcgtaatactccacattcaaactgaagaggaaaatggaaatctctaatgaagctgctgtgtgtatttatgaatattaatgaataaaaactgcttggatgggttaccctaactactggattggggttttttgcaccggccataattttaaagaccttgttatttaagagatcttaaatacaaggagctaaaacttaaaacaaacataacagcccaaagct

SEQ ID NO: 551 - DNA, 384 bp, Bos taurus
  Clone ID: 03-LIB3057-025-Q1-K1-A3
cggacgcgtgggctagatcgcgagcggccgccctttttttttttttttaaaccaaggcggtggcaacccactccagtactcttgcctggcaaatcccatggacagaagagcctggtaagctgcagtccatggggtcgctaagagtcagacacgactgagcgacttcactttcacttttcactttcatgcattggaaaaggaaatggcaacccactccagtattcttggctggagaatcccagggatgggggagcctggtgggctgccgtctatggggtcgcaccgagttggacacgactgaagtgacttagcagcagcagcagcagccatctaggaagccttatatactatggacaagtgtaaaatagcatcttagtagagaag

SEQ ID NO: 552 - DNA, 264 bp, Bos taurus
  Clone ID: 03-LIB3058-001-Q1-K1-A3
tgccttgtgagtttgttttcaggttgttggccataggatggtctttggttaatagctcaaaaaagttccgcaggcattgcctgcccaccctgttgtgcccaggccacggtctgtaccctgtgcctctgtccttcccaggtgcggtgggggcaggagagtttgtgagcccctgtgagagtggcgacaacctgggtgagccctctgccctggaagagcagagagggcctctgcccctcaacaagaccttgtttctgggctatgcct

SEQ ID NO: 553 - DNA, 265 bp, Bos taurus
  Clone ID: 03-LIB3058-002-Q1-K1-A3
acgtccacgcgtactggcggtccgtcgcggcttcttagccagacggactgacccaatgtctcgggcacttgctacgcgaacactctaccgctggtagaggagcgcgtcgaccagatgcgcaagttgctcgctaggatcatgactcagaggcgtccagtcataatgggacacacggtagttaaagcgccactggctgcagaacctagctcgacaaccacttgcgtgaaccaaccgttctgactgatctaagctgaattacaatgag

SEQ ID NO: 554 - DNA, 430 bp, Bos taurus
  unsure (408): unsure at all n locations; Clone ID: 03-LIB3058-003-Q1-K1-A3
gggacagtggtggccgtggagggcgagacagtctccatcttgtgctccacacagagcaacccggatcctattctcaccatcttcaaggagaagcagattctggccacggttatctatgagagtgagctgcagctggagctgccggccgtcacccctgaggacgacggagagtactggtgtgtggccgagaaccagtacggccagagggccaccgccttcaacctgtctgtggagttcgctcctgtgatcctattggagtcccactgtgcggcagcccgtgacacagtgcagtgcctctgtgtggtgaaagccaacccagagccctccgtggccttcgagctgcccttgcgcaacgtgacggtgaacgagacagagcgcgagttcgtgtactcagagcgcagcggcctnctgctcaccagcatcctgacgc

SEQ ID NO: 555 - DNA, 426 bp, Bos taurus
  unsure (144): unsure at all n locations; Clone ID: 03-LIB3058-004-Q1-K1-A11
ctgtacgtgaagctgggccaggggctctgctccttcaaccacctgctgccccccgagtacatcaggacattgcgggtgctggaggacagggccctcacgcggggcttccgggaggtgagcccaccccccgaggcgtgaggcggngagtgtggccccatggtgtcccccacgctgctcgaggcgtgttcctccaggtggatgagctgttcctcgaagacttccaggccccgccccacgagctcttccaggagtttgactaccagcccattgctgcagcgagcctggcccaggtgcaccgtgccaggctgcacgatggcaccgtggtggccgtgaaggtgcagtacatcgatctgcgggaccgctttgatggcgacatccacaccctggagctcctgctgcacctcgtggagctcatgcaccccagct

SEQ ID NO: 556 - DNA, 426 bp, Bos taurus
  Clone ID: 03-LIB3058-004-Q1-K1-A3
tcgcgagcggccgacctttttttttttttttttttttttttttcaggtaggaaacttctttattattggccgtgattcatccatcatgtagtgtccaacatggattacgtgtccagaggatcagtctggcactcatcacccctgcctggctgcagctgcccctccagtccagacgccaggactttgcccatcacaccagagaagccacacccccacgagtttattcttggggtaccaagggacaaggctgtcctgggattggaccctctgtctcacccctcattttcatcagggtttctggggaagacttgactggagtctagacaaatcagtctctttttggtttcatgatcatttagaaaacagaaaagacaaacatttcacagtctttaaaaaataggagtctgaagagggaagccagggtcc

SEQ ID NO: 557 - DNA, 419 bp, Bos taurus
  unsure (317),(369): unsure at all n locations; Clone ID: 03-LIB3058-006-Q1-K1-A11
acgcgagaagtttgagaaggaggcggccgagatgggaaagggctccttcaagtatgcctgggtactggacaagctgaaggcagagcgggaacgcggcatcaccatcgacatctccctctggaaatttgagaccaccaaatactacatcaccatcatcgacgccccaggccaccgcgacttcattaagaacatgatcacaggcacatcccaggcggactgcgccgtgctgattgtggccgcaggagtgggtgagttcgaggcaggcatctccaagaatgggcagacccgggagcacgcgctgctggcctacacgctgngcgtgaagcagctcatcgtgggggtgaacaagattggactcacggagcccgnctacagcgagaagcgctatgatgaaaatgtcaaagaggtcagcgcctaca

SEQ ID NO: 558 - DNA, 420 bp, Bos taurus
  Clone ID: 03-LIB3058-007-Q1-K1-A11
attgtctaggtgcccacaaggtgggcagaccttatgctttgggggttgagggcaggccttacacaaactaaaagctgcttatgatgtgccttcaacaagctgctcagtcctcttcatcagcaaacttaccagtctgtagttgcttttatccttttgtaaaatctatagcaatgaatgtagatttagttcaacttttagttctctcaaactaaatggctcagacggtaaagcgtctgtctgcaatgcaggagacccgggtttgatccctgggttaggaagatcccctggagaaggaaacgtcagcccattccagtactcttgcccggaaaatcccatggccggagaagcctggtcggctactgtccatggggtcgcaaagtctgacacgactgagcgtcttcactttcacttttagttctc

SEQ ID NO: 559 - DNA, 386 bp, Bos taurus
  Clone ID: 03-LIB3058-007-Q1-K1-A3
ggatgatgacggcagagggcagaagcagatctggagaattgaaggttccgacaaagtgccggtggaccccgccacgtacggacagttctacggtggtgacagctacatcattctgtacaactaccgccacggcggccgtcagggacagatcatctacaactggcagggcgcccagtccacccaggatgaggtcgctgcctcggccatcctgaccgctcagctggacgaggagctgggagggactcccgtgcagagccgtgtggtccaaggcaaggagcccgctcacctcatgagcctgtttggcgggaaacccatgatcatctacaggggcggcacctcccgcgagggtgggcagacggcccccgccagcacccgcctgttccagg

SEQ ID NO: 560 - DNA, 437 bp, Bos taurus
  Clone ID: 03-LIB3058-011-Q1-K1-A3
gtcaaaaagtgcttggaactcttcactgaactggcagaagataaggagaactacaagaagttttatgagcagttctctaaaaatattaagcttggaatacatgaagattctcaaaatcggaagaagctttcagagctgttgaggtactatacttctgcttctggtgatgagatggtttctctcaaggactattgcacaagaatgaaggaaaaccagaaacacatctattacatcacaggtgagaccaaggaccaggtggccaactcggccttcgtggagcgcctccggaagcacggcttggaagtgatctacatgatcgagcccattgatgagtactgtgtgcagcagctgaaagagtttgaagggaagaccttagtgtcagtcaccaaaagaggcctggaactttcagaagatgaggaagagaaaaagaaacaaga

SEQ ID NO: 561 - DNA, 394 bp, Bos taurus
  Clone ID: 03-LIB3058-013-Q1-K1-A3
accatcaggactatgttggaagatttgggaatggatgatgaaggagatgatgatccagtccccttgccaaatgttaatgcagcaatattgaaaaaggtcattcagtggtgcactcaccacaaggatgatcctcctcctcctgaggatgatgagaacaaagaaaaacgaacagatgatatacctgtttgggatcaagaattcctgaaagttgaccaagggacactctttgaacttatattggcagcaaactatttagacatcaaaagtttgcttgatgttacctgcaagactgttgctaatatgatcaagggcaaaactcctgaggagattccaaagacattcaatatcaaaaatgattttactgaagaagaggaagcccaggtacgcaaagaga

SEQ ID NO: 562 - DNA, 308 bp, Bos taurus
  unsure (257): unsure at all n locations; Clone ID: 03-LIB3058-015-Q1-K1-A11
gagccacgcgtccgactcccacaggctcctgtctctgtatggagagagctggggagaaaggaggtctcggttctggactgaggtctgcacagggctggtgtccccacgcacgcctgcttccgaagatgctgctgtctcgtttgaagaccggcctacatcaagccaccgcaacacctaggtttatggaaaatttcaggccttgcctgcaactccattctgactgccgtcacccacttgctgactcacttgaagcctanggtgggtgtcccagtgctcttgaattctttgcccaaagatgaccagcattt

SEQ ID NO: 563 - DNA, 435 bp, Bos taurus
  Clone ID: 03-LIB3058-016-Q1-K1-A3
cgcgccgcctatctctggcagcctgcggtggtttaaaggaggtggcgggaagctggtgtttggtcgagtttatcactctcatagtcgcttgggttgttcacaatcaacaaagcaaaaaaaaccccaaaacaaaaaaaaaccacgaagatgtctgttgatccaatgacctatgaggcccagttctttggcttcacaccacagacttgcatgcttaggatctacattgcctttcaagactacctgtttgaagtgatgcaggctgttgaacaggttattctaaagaagctggatggcatcccagactgtgcgattagcccagtcgagattcgcaagtgcacagaaaagtttctttgcttcatgaaaggacgttttgataacctttttggcaaaatggagcagctcttcttacagttgattttgcggattcccccaaat

SEQ ID NO: 564 - DNA, 179 bp, Bos taurus
  Clone ID: 03-LIB3058-017-Q1-K1-A3
attttgagctgtacttgggatatgaatatgtcactgctcttcagaatctaagagaaagtaaaccgcctgactcctcaaaggatgagtgcatggtgaagtggtgtgcaattggtcaccaggagaggacatagtgtgatcggtggagtgggttcagtggcggggcaatagagtgtgaaaca

SEQ ID NO: 565 - DNA, 210 bp, Bos taurus
  Clone ID: 03-LIB3058-018-Q1-K1-A11
gacctgattaagttcatggagcagaacgggctgacccgagctcaggccgaatcgcaagctgaggagctgtgcttcccccgatcggtggtggagtacctgcagggctacatcgctatccgccacggcggcttaccagagccgcttcgatccaatgtgctgctagacctgccgagggtggagaggctggcatgagccttccttccaaccctg

SEQ ID NO: 566 - DNA, 428 bp, Bos taurus
  unsure (345),(405): unsure at all n locations; Clone ID: 03-LIB3058-018-Q1-K1-A3
acggtcctgaccattggcatgaactgtttccgaatgccaagggagagaaccagtcgcgcattgaactgaacactaaagagatcagccacgacccttccctgaagccatggacagcatcctatgacccaggctctgccaagaccatcctaaataatgggaagacctgcagggttgtgttcgatgatacttatgacaggtcaatgctgagaggtggtcccctcgccgcgccataccggctccgccagttccaccttcactggggctcctcggacgatcacggctcggagcacagcgtggatggagtcaagtacgcagcagagctacatttggttcactggaattcanagtataacaattatgcaactgctctgaagcatgccgacggtatagctgtggttggggttnttcttgagataggacgtgagaaa

SEQ ID NO: 567 - DNA, 416 bp, Bos taurus
  Clone ID: 03-LIB3058-019-Q1-K1-A11
ctacaatgaaattatagccaatgccactcaccaaatctttgcacctagtagatagatcaatgtaaaaaaaacaaataccagaaacctaactgtacagtgagtgtggggggaatgtagtaacctagttagtagtcctcagtataaccaattgtacaaggggaagtggtgtttacctacctgtccatcaccattactggaagctgtactgatcagttcattgataacgggcaatttttttttgttttttgtttttgttttgctcttcacagaatgatttcttaaccttcaatttaccctgaggtcaagccttttgtctttctgtgttaccggtgttcagtctcttttaggaatgaaccagcaagatgttcatttaaaactgaccaaagaacaaattcattcctggtctagtttcctgg

SEQ ID NO: 568 - DNA, 445 bp, Bos taurus
  Clone ID: 03-LIB3058-021-Q1-K1-A11
gcggcgacgactcttaccagagccgcgcagtgcccgtggtgcgcgcccgaaggcgcctggtccaaaggacaaactatctctcggacttggagcttgcttggactacttatcccgagaagtagtcatgctgatacaggtccatctagactgaccaagcctacattaagaggaggaacctgtgctgctagcatgtttacgtcgacagaagcatgaacaccatcaaccgcatggaatgtcagactgcaacgaataacaggcacaccaacaaccgtctgtgactcatgctcctgcagagtgcccacaatatgaatctgtgactgcctactgtccgcaccattggcaatcttgccatgcagacgcatgcttgcttgtcattgcctgatctgccagtgtgacactaactcgtttcctgctgtaatggcgtcccaagtgcatggggccctgc

SEQ ID NO: 569 - DNA, 333 bp, Bos taurus
  Clone ID: 03-LIB3058-021-Q1-K1-A3
atcgcgagcggccgccctttttttttttttttttttgatgggattcgtgtgacttttaattctgatttggctaatgttttacagtaagtgtaaggagtaaagacaggaatggagtgagggaaaggaagaagagaaacgtattctttcaagttccttgaacggctaacgcacgtgctacgatcagaaagtcgagtaaaagcatcatgtccttttcaccacggcaatggacatgtgtgacacagatatggcaactcttcaaatctgaggaagagactctcacaccatagaacgggcactaatgtcctgttcacacgctaagaaattggttctaag

SEQ ID NO: 570 - DNA, 341 bp, Bos taurus
  Clone ID: 03-LIB3058-027-Q1-K1-A3
cttcctggagcagcagaacaaggcgctggctgccgagctcaaccagctgcgggccagggaacccaccaagctgggcgacgtctaccaggcggagctgcgcgagctgcgcctgcggctcgatcaactcactgccaacagcgcccggctcgaggtggagagggacaacctggcacaggacctgagcaccttgaggcagaagctccaggatgaaaccaaccagaggctggaggctgagaacaacctggctgcctatcgacaggaagcagatgaaaccaccctggcccgtctggatctggagaggaagattgagtctctggaggaggaaatccggttcttgagga

SEQ ID NO: 571 - DNA, 184 bp, Bos taurus
  unsure (32): unsure at all n locations; Clone ID: 03-LIB3058-028-Q1-K1-A3
agatcagtgaaactaaaaacaggttgtgtganaagataagccagattaacaaagtgaaatgaaagttgcttagtcatgtccaactttgggacccatggactgaagcacaccgggtttctctgtccatggaattcttcagtccaaaatactggaatgggtagcttcttccatctttaagggaata

SEQ ID NO: 572 - DNA, 400 bp, Bos taurus
  Clone ID: 03-LIB3058-029-Q1-K1-A3
ttctgcgggcacccaccctggaagccatgagggatgtctacatcgtacaggacctgatggagacggacctgtacaaattgctcaaaagccagcagctgagcaacgaccatgtatgctacttcctgtaccagatcctgcggtgcctgaagtatatccactccgccaacgtgctccaccgggatttaaagccctccaacctgctcatcaacaccacctgcgaccttaagatctgtgatttcggtcttgcccggattgctgatcccgagcatgaccacactggctttctgacggaatacgtggccacacgctggtaccgttccccagagatcatgcttaacttcatgggctacaccaagtccattgacatctggtctgtgggctgcattctggcttgagatgc

SEQ ID NO: 573 - DNA, 428 bp, Bos taurus
  Clone ID: 03-LIB3058-031-Q1-K1-A11
cctgaaggaaatcagtcctgaatattcactggtaggactgatgctgaaactgaagctgcatgagttgtacatgactgagtgactgaactgaataggtgtatactctttttgttatttactcttatttttttatgttttttttattatattttattttttttttttcttttttattttattttcttttttttttctttttttttttatttttttcttttttttttattatttatttttttttttttttttttttttttatttttttattttttttttttttttttttttttttatttttttatttcttttttttttttttatttcttttttttttttttttttttttttatatttttttttttttttttttttttttttttttattttttttttttatttttttatatattattttttattttattttt

SEQ ID NO: 574 - DNA, 335 bp, Bos taurus
  Clone ID: 03-LIB3058-031-Q1-K1-A3
acgatgtctctcacttaatcctccacagtgtcctgtgagatagaaagcagactaagatgcgaaatcagtgaatccaaggcaatataaataggctcaagtactcaagatctcatcatcgtcatcacttttagtatttagctgtacctcacaacatctccttcattagtcttctttgtaaaagccttcagtgaggttgagcattgccttctcggctttggaggctagagttccatggtgagtaagaagcattggtatgtaatgtctcaggtatctacattttctttgttaatgcccttttattcttgttcattataattttttgttatttatttttt

SEQ ID NO: 575 - DNA, 393 bp, Bos taurus
  Clone ID: 03-LIB3058-032-Q1-K1-A3
ccgaattcggaaactggctgaccaatgcacaggtcttcaaggcttcttggttttccacgagctttggtgggggaactggttctgggttcacctccctgctgatggaacgcctctctgtcgattatggcaagaagtccaagctggagttctccatttacccagccccccaggtttccacagctgtcgttgagccctacaactctatcctcaccacccacaccaccctggagcactctgattgtgccttcatggtagacaatgaggccatctatgacatctgtcgtagaatcctcgacattgagcgcccaacctacacatatcttaaccgccttattagccagatagtgtccttcatcactgtctttttttttattctttttctttttttgtttt

SEQ ID NO: 576 - DNA, 408 bp, Bos taurus
  Clone ID: 03-LIB3058-033-Q1-K1-A11
tcgcggacgcgtgggggctctggggtccattttacactgaaaactggcccctctcctcaggcggctccatctccagctctgagagtgtgtggcagaatgcctgaaacttcaactttgcaggttttgagctagaggcagtgatatactgagccttggcggaagggggaagaacttggctgggaggtgaccgaggtgggtccctacagggtggcatggcagcgagcacagatgtggctgggctggatgaaagcttccgcaagtttgccatccatggtgaccccaaggccagtgggcacgagatgaatggcaagaactgggccaagctgtgcaaggactgcaaggtggctgactgaaaggctgtgacagggaccgatgtctacatcgtcttctccaaagacaaggcgaaat

SEQ ID NO: 577 - DNA, 384 bp, Bos taurus
  unsure (225): unsure at all n locations; Clone ID: 03-LIB3058-034-Q1-K1-A3
ggaattcccgacccgagcgtccgaagagcccgtctgtccagtcatgccaaattggatagtgaccttccaaggcgtgggagatgatgacgaggatgaaatcagtgtccccaagaaaaagttggtggaccctgtagctggggtagggggtcccgggagccgcttcaaaggcaaacactctttggacagcgatgaggaggaggaggaggaggaggaagggtccagcanatatgacatcttggcctcagaggatgtggaaggtcaggaagcagccacgctccccagtgagggaggtgtgcggatcacacccttcaacttgcaggaagagatggaggaaggccactttgatgcaaacggcaactatttcctgaaccgggatgctcaaat

SEQ ID NO: 578 - DNA, 444 bp, Bos taurus
  Clone ID: 03-LIB3058-035-Q1-K1-A3
ccacacccacgcactcgaccttttatgataggcccgatttgaccttcttgcagtccaaggaactctcaagagtctgctccaacaccacagttcaaaagcatcaattcttcggcgctcagctttctttatagtcaactctcacatccatacatgaccacgggaaaaaccatagcctcgactagatggacctttgttggcaaagtaatgtctgctttttaatatgctgtctagcatattttttctacagacttgatatttttgtgatgttaaaattttccagcccagaccattgtctggtgattgctttacctttggcctcttcaataaggtaacatggattttttttggttccttttttttaatataagtcctctaattttcttcttaacttaactaatactatctggcttgtatgtggttgctttttctcaatccggggctggt

SEQ ID NO: 579 - DNA, 378 bp, Bos taurus
  Clone ID: 03-LIB3058-037-Q1-K1-A3
cggttcggaatctccgggctacgacgtacgggcttatgtttcagtctttaatccattttcagttaatcttagtgaatggtgtaagacggaatgcagtttcattcttttgcatatggatatctgattttcagcacagttgattcaatagaatattctttcctcactgtttattattagcacccctgtcaaagattagttgaccatgctgttctgtgcttggttgctcagtcctgtccgactgtttgcaaccccatggactgtagcccatcaggcttctctgtccatggggattctccgggcaagaatactggagtgggttgccatgcccttctccagcgtatcttcccaactcagcaatcaaacccaggtctcctgcat

SEQ ID NO: 580 - DNA, 458 bp, Bos taurus
  unsure (56): unsure at all n locations; Clone ID: 03-LIB3058-040-Q1-K1-A11
ggaattcccggcccgacgcgtccgtgcgtaagtcacttcagtcgtgtccaacttgngtgaccccatagacatcagcccaccaggctcccccgtccctgggattctcacagtcattgggcccttatgcaaaggaaacgtctcagctttacatcaaaagatgagcaaatgaatatacaaattatacatgtgaagttacgattccctgctttgacctacttatcttcattaaatgactagctgctgatgctgatcacagtgactgatctactacagttgaaaggttccggtcactttattatagacttaaaagtaggaattcatttcagatatattagccaggaccacagttaggtgttatctgcgtcatttgttgtccacttaaaggtgattttcttgacctcaccgagatcaactagacaaatatgtttatgtgagtgtgcgtgtctttggatggggtt

SEQ ID NO: 581 - DNA, 192 bp, Bos taurus
  Clone ID: 03-LIB3058-043-Q1-K1-A11
gttctagatcgcgagcggccgccctttttttttttttttttttacattttattcacatggatttgtcgcttttagtgtgctcacagaaaattagaacaccttaagcagggagttaatagcaatttttggaagccaaggtaccttccatttcttaggcaaattgggcaaagcttcttcaagttttaccaaacc

SEQ ID NO: 582 - DNA, 389 bp, Bos taurus
  Clone ID: 03-LIB3058-043-Q1-K1-A3
ccacgcgtccgaaagaagaactaaagaacctcttgaggttgtgtaagaggagagtgaaaaggtggcttaaaactaacttcagaaaactaagattgtggcatccagtcccatcacttcatggcaaatagatgtggaaacaatggaagcaactgaactgaactgattgttatctagtaatctatgtttgctttcataaatactttccttatcctgttttagaatatgtattgtcagttcagttcagctgctcagttgtgtctgactctttgcaaccccatggactgcagtgtgccaggcttcactgtccctaatcaactcccagagcttgctcaaactcatgtccatcaggtcggtgatgctatccaaccacctcatcctctggtggcccc

SEQ ID NO: 583 - DNA, 302 bp, Bos taurus
  Clone ID: 03-LIB3058-044-Q1-K1-A3
ccggatatgacccacgcgtccgacggcgcgtgggtgtgtgcaatatcatttaagcactacgtattactttcactggaaactaattctggacattaaatatgactggataggatagaagcgatgcaggattattttacgggatcccatacacagctgcggaccgcacacatacacaattcatgatgagagaaagaaaagcgagtttcttgtcggcctttaccaaacgagattattgggaaacccgggccattaggcatcttaatgggcttgctgtacataccggtttagcccaatggcttaat

SEQ ID NO: 584 - DNA, 385 bp, Bos taurus
  Clone ID: 03-LIB3058-046-Q1-K1-A3
ggaattgtctacttctggtcatgcttttactgatacagggaaagcatcaggcaacctagagaccaaatacaagatctgtaactatggactgaccttcacgcagaagtggaacacagacaatactcttgggacagaaatctcttgggagaataagttggctgaagggttgaaactgactcttgataccatatttgtaccgaacacatgaaagaagagtgggaaattgaaggcctcatataaacgggattgtttcagtcttggcagtaatgttgatatagatttttcaggaccaaccatctatggctgagctgagttggcctttgaaggttgggttgctggctatcagaagagttttgacacagccaaatgcaaactgtcacagaat

SEQ ID NO: 585 - DNA, 376 bp, Bos taurus
  Clone ID: 03-LIB3058-048-Q1-K1-A3
atcaaagctacatggcaacaagagctcttaaagggctgtctcctgacctgggctccatctctaggtactgccccacttgcaagcagcaccagctggccaccaagaagctggacctgtggatgctaccagagacactcatcatccacctgaagcgcttttcctacaccaagttctccagagaaaagctggacacccttgtggagtttcctatccggtctggggcctggggaggctggctgggggcaggagtcgggtggggaggaaggcagggactgggggaagggggcgccactgatattaacccttgccacacccacagggacctggacttctctgagtttgtcatcaagccacagaacgactcatccccggagct

SEQ ID NO: 586 - DNA, 466 bp, Bos taurus
  unsure (391): unsure at all n locations; Clone ID: 03-LIB3058-049-Q1-K1-A3
accggttccggaatggctggatcgacgcgtgcgggcccgggtccgctcctcctccttctccgtcttctttcctgagcgctgcccggccggccgccatggcgaacgtggccgacacgaaactgtacgacatcctgggcgtcccgcctggagccagcgagaacgagctgaagaaggcatacagaaagttagccaaagaataccatcctgataagaatccaaatgctggtgacaaattcaaagaaataagctttgcatatgaagtactatcaaatcctgagaagcgcgaactatatgacagatatggagaacaaggtcttcgggaaggtagcggtggaggtggtggcatggatgatattttctctcacatctttggtggaggattatttagctntatgggtaatcagagcagaagtcgaaatggcagaagaagaggagaagacatgatgcatccactcaaagtatcttt

SEQ ID NO: 587 - DNA, 411 bp, Bos taurus
  Clone ID: 03-LIB3058-052-Q1-K1-A11
gtttttctgcgtcaggtactaaatagctctgtaaaagtgtaattttaaataagcaataattaacgcacagtttattttgtagggagtcttgctccataggaagagaaaactgtggtcctttatgaatagccagctgcagtgtctgctctgttccccttgtttgttagatgtattctatgctctggagacttcattttcctctctaactgaggcttccatcataacctttaatgttgtttcctctctgcctatctggagacattgtcatgaaagtttctgtggcatagttatactgttgtgattagtgggagctttctagtagaccatgagtctttggttatattttgaaaagtaaatttttaatggcacaaagcatgctggtagctcctttatgaagaaaatgttttgctt

SEQ ID NO: 588 - DNA, 418 bp, Bos taurus
  Clone ID: 03-LIB3058-053-Q1-K1-A11
gaggcacgcgtccggctgggaagagcgatgacgatggaggccggtgatgcagcgccgccggcgggggcgggcggctggggcaagtgggtgcggctcaacgtggggggcacggtgttcctgaccaccaggcagacactgtgccgcgagcagaagtccttcctcagccgcctatgccagggggaagagctgcagtccgaccgggatgagacgggggcctacctcatcgaccgtgaccccacctactttgggcccatcctcaacttcctccggcatggcaagctggtgctagacaaggacatggccgatgagggggtcctggaggaagcggaattctacaacattggcccgctgatccgcatcatcaaagaccggatggaggaaaaggattacaccgtcacacaggtcccacccaagcacg

SEQ ID NO: 589 - DNA, 365 bp, Bos taurus
  Clone ID: 03-LIB34-001-Q1-E1-A3
ggtcgaccgacccgtccgcttatcccgactcgacgtcgtcgttacagggaagaagaagcgggtgagaaaaacttctgtttccaccgttttgcccatttctgcagatttgttccgaggccgaggcatctccaaggcagtgatggctctccagaggacccaggcctttcttctgctcttgctgctgaccctgctggggctagggctggtacagccctcctatggccaggatcgcatgtaccaacgattcctgaggcaacatgtggaccctgatgagacaggaggcaatgacagctactgcaatttgatgatgcaaagacggaagatgacttcacatcagtgcaagcgcttcaacactttcattcatg

SEQ ID NO: 590 - DNA, 385 bp, Bos taurus
  unsure (333): unsure at all n locations; Clone ID: 03-LIB34-003-Q1-E1-A11
accccacaaaactttggcacaatgaactgggtgacttttacttcgcttctctcttctctgcatctctgcttcatgcacaggttcctaccgactataaccacggacaagatgacatgcccaacgtatgtttgggttcccacagtcatcggtcctatgacaagaacagagaacatgctcccagcctgagacctgtgccccctcccatcagcggatgtggctatcgggctcgtcccgccacagcaactgtgggccagaagaaagtggagagaaagccccctgacgctgatggctgcctgcacgcggacccggatctgggtgtgttgtgtcctacangatgtaagttgcaagatactttggtaagacaggagagaccaatccgaaagag

SEQ ID NO: 591 - DNA, 385 bp, Bos taurus
  Clone ID: 03-LIB34-005-Q1-E1-A3
caccgtccatgcagatatatgcacacttcccgatactgagaaacacatcaagaaacaaactgcacttgttgagctgttgaaacacaagcccaaggcaacagaggaacaactgaaaaccgtcatggagaattttgtggcttttgtagacaagtgctgtgcagctgatgacaaagaagcctgctttgctgtggagggtccaaaacttgttgtttcaactcaaacagccttagcctaaacacgacacaaccacaggcatctcagcctaccctgagagtaagaggaaaaaagagaaatgaaaactcagagcttattcatctgttttccttttctgttggtgttaaaccaacactctcactaaagaacgtaaatttctttaaatattttg

SEQ ID NO: 592 - DNA, 391 bp, Bos taurus
  Clone ID: 03-LIB34-006-Q1-E1-A11
gccccgggcccgccgacaccatgagttggtcctcgcaccctccgagtgtaatcttctacattctttcattgctttcttcagcatgcctggcatatgttgctacccgagacaactgctgcatcttagatgaaagatttggtagttattgcccaactacctgtggaattgcagatttcctgaataattaccaaaccagtgtagacaaagatctacgaactttggcaggcatcttatatcaggttgagaacaagtcatcagaagccatagagctggtcaaagcaatccaaatcagctataaccctgatgaaccatcatcgccacatagcatagagagtgctaccaagaattccaagagtatgattgaagaaattatgacatatgagacactgat

SEQ ID NO: 593 - DNA, 419 bp, Bos taurus
  Clone ID: 03-LIB34-006-Q1-E1-A3
ggcagcattcagaacagtccttaggtgcatttttgtcttatcccacctgagcactaataagtagtatcaggccagagatttggggcagtcgataaatgtccgttttacagatgcacttttaggttttggtctgttcactgatttctagaagtctgtagctgcctttaggcaggggccacgcgaccaaacccctgatttcctgcaactttctgtttgcaggtgtaaggggcagtactaatggggatcaccagctgctccccgtgagctgccacagtcagctggcccggaagggcatgcaaccttgggaatggttgtggctttggctgttcacagagcttcagcctaaggacggctggagccattgataactcactgctcgtatgacaccacttttggctttccttgttcacaaccagtat

SEQ ID NO: 594 - DNA, 432 bp, Bos taurus
  unsure (355): unsure at all n locations; Clone ID: 03-LIB34-007-Q1-E1-A3
gctccagggccgcctttttgcctatcctgacactcaccgccaccgcctgggacccaactatctccagatacctgtgaactgtccctaccgtgctcgagtggccaactaccagcgtgacggccccatgtgcatgatggacaatcaggggtggggctccaaattactaccccaatagctttagtgctcccgagcatcagccttctgccctggaacacaggacccacttctctggggatgtacagcgcttcaacagtgccaacgatgacaatgtcactcaggtgcggactttctatttgaaagtgctgaatgaggagcagaggaaacgcctgtgtgagaacattgcgggccatctganagacgcacagctttttatccagaagaaagcgttaagaactcagcgatgtccatcctgaatatgggctccgcatccag

SEQ ID NO: 595 - DNA, 388 bp, Bos taurus
  Clone ID: 03-LIB34-008-Q1-E1-A11
cggtgttcaccctgtacctgggctctcagcgtgccgtggtcgtgcatggctacaagcccgtgaaggaggtcctgcttgactacaagaacgagttttctggcagaggagaaaaccctgggttccagatgcacaagaacaatgggatcattttcaacaatggatcaacctggcgggacacccgacggttctcgttgaccaccctccgtgacttagggatgggaaaacagggcaatgagcagcggatccagagggaggcccacttcctgctggaggtgctcaggaagacccagggccagccctttgaccccacgtttgtcgtcggctttgcaccttacaatgtcatctctgacatcctcttccacaaacgctttgactataaagatcagac

SEQ ID NO: 596 - DNA, 271 bp, Bos taurus
  Clone ID: 03-LIB34-009-Q1-E1-A11
cagttagctcccaacctcacatagcaggggggcagtgaccaatgacgacgaatacacagagtcaccaccgtcaaccgcggatccgcagcgatcctgccatccgccatttatcgcactgttttgaattttttttataactatccctgtctcttgagttgagtggacagtgaagcctctatgtagggtgtctgatactgtgcccaccacagaagtcacgggaatggagaccgtcgctgactggcctggcccccgggggacagtggctggtccc

SEQ ID NO: 597 - DNA, 396 bp, Bos taurus
  Clone ID: 03-LIB34-009-Q1-E1-A3
cccacgcgtccgactggtggctcttccatccccagaccagccaagcctgtgagtgacaccccagacagaggaaccagagccatgcggagtctcagcggactgctgttgttactgactgcctgcctggcggtaaacgccagctccgtgcccacattgcccgatgacattcaagtgcaggagaacttcgacctgtctaggatctatgggaagtggttcaatgtggccgtgggctccacctgcccatggctgaagaggttcaaggagaagatgaccatgagcacagtggtgttgaaagcggggccgacgagcaaggagattagcgtcaccaacactcacatgcggaaaggtgtctgtgaatcgatctctgggacttatgagaaaacaagcactgatggg

SEQ ID NO: 598 - DNA, 449 bp, Bos taurus
  Clone ID: 03-LIB34-010-Q1-E2-A11
ggtacgcctgccagtattgtccagcatcgcgggtcgtaccacgcgtcggccggcttccgtgaaaataacattccccagctcgaagaggtttctcagtttctgcagagttgcactggtttccgcctccgaccagtcgctggcctgctttcttctcgggatttcttgggtggcctggctttccgagtcttccactgcactcagtacatcagacatgggtctaagcccatgtatacaccagaaccggacatatgccatgagctcttgggacatgtacctttgttttcagatcgcagctttgcccagttttcgcaggagatcggccttgcctccctgggtgcacctgatgagtacattgaaaaacttgcaacaatttactggtttactgtggagtttgggctctgcaagcaaggagactccataaacgcatatggtgctgggctcctgtcatc

SEQ ID NO: 599 - DNA, 327 bp, Bos taurus
  Clone ID: 03-LIB34-010-Q1-E2-A3
acgcgtccggaataaatcagttactctgacagtttcccaaagattcagaatctgctttgagtagctgctgttgccactgtcgacatctggtatttgaaaaaacagggtctgcaatcacctgacagtgtacagaaaagctcccctctttgtgtagctgacagggccttttggcggaggagaatgtcattgaatcttgacagtgacgtttgcctccagctgcctgacaggcagcaggtcagcagctcaaccccacagataccagcaccaactgaagctgaaaaaataaggccaaaatgtgaaaatgaccttcaaattaaatatatgaaa

SEQ ID NO: 600 - DNA, 401 bp, Bos taurus
  Clone ID: 03-LIB34-011-Q1-E1-A11
atcgcgggcggcggaggccgggcgcgctcgcagcacggccatggcgttcggcaggagtcaccgggacccgtacgcgaactccctgggccagctgatagaaaaggctacatttgctggagtgcagacggaagactggggccagttcatgcacatctgtgacataattaacaccacccaggatgggccaaaagatgcagtaaaagctttgaagaaaaggatttccaaaaactataatcataaagaaatccaactcaccttgtcacttattgacatgtgcatgcagaactgtggtccgagtttccagtctctgattgtgaagaaggaatttgttaaagatagtctagttaagctgctgaatcccagatacacattgccaatagacattcacaatagaattttga

SEQ ID NO: 601 - DNA, 428 bp, Bos taurus
  Clone ID: 03-LIB34-013-Q1-E1-A11
gtcgacgcgacgcgtccggacatgactgactgctgtgagaaacaagagcctgaaagaaatgaatgcttcctgagccacaaagatgatagcccagacctccctaaattgaaaccataccccaatactttgtgtgatgagtttaaggcagatgagaagaagttttggggaaaatacctatacgaaattgctagaagacatccctacttttatgcaccagaactcctttactatgcgaataaatataatggagtttttcaagaatgctgccaagctgaagataaaggtgcctgcctgctaccaaagattgaaactatgagagaaaaagtactgacttcatctgccagacagagactcaggtgtgccagtattcaaaaatttggagaaagagctttaaaagcatggtcagtagctcgcctgaaccagaaatt

SEQ ID NO: 602 - DNA, 378 bp, Bos taurus
  unsure (363): unsure at all n locations; Clone ID: 03-LIB34-013-Q1-E1-A3
ccacgcgtccgacaaatggaacaaccgtgtggtgagcaacctgctctattaccagaccaactacctagtggtggctgccatgatgatttccgttgtggggttcctgagccccttcaacatgatccttggaggcattgtggtggtgctggtgttcacaggcttcgtgtgggcagcccacaataaagacatcctccgtcggatgaagaagcagtaccccacagcgtttgtcatggtggtcatgctagccagctacttcctcatctccctcttcgggggagtcatggtctttgtgtttggtatcacatttcctttgctgttgatgttcatccatgcgtcgctgaggctccggaacctcaagaacanactggagaataaaat

SEQ ID NO: 603 - DNA, 414 bp, Bos taurus
  unsure (397): unsure at all n locations; Clone ID: 03-LIB34-014-Q1-E1-A3
cccgggtccacgtccgatagaacccctttcattatgaagcatgcagtgttatcggagagcaaggacggcctgagtgtatatgaagggagacgtgtgcataccatggggtggattgggtcacccagaggcccagttgcaggtattcggtacgtgtatcacctcagatggcaaaccggattgtggattctgcaaggagcatcctcaacaagtttatacctgatatctatatttacacagaccacatgaaaggcatcaactctgggaagtctccgggctttgggctgtccctggttgctgagaccaccaatggcacttttctcagtgctgagctggcttccaacccccagggccaaggcgcagcgatgctgcccgaagaccttggcaagaactgtgccangctgctgcttgaagaga

SEQ ID NO: 604 - DNA, 384 bp, Bos taurus
  Clone ID: 03-LIB34-015-Q1-E1-A11
aggacgcgtgggtggcaccccactccagtactcttgcctggaagatcccatggacggaggagcctggtaggctatactctatggggtcgcaaagagtcggatacgactgagcgacttcacgcactttagtttctgtggaagccctttcacattttaaaatgtaatatactttgtaccatttaatgtagtttgtgatgaatcacatgttgattgtctaagtgttaaataccctttttgtgatgctttgtgaaaaataaattctttatagatttttaactctgggagagattttaaataatccagctctcatactgggtaagaaaaacaacttcatagcacccaggtcactagttagtgacattgggtaggtcacctctccttgag

SEQ ID NO: 605 - DNA, 390 bp, Bos taurus
  unsure (28): unsure at all n locations; Clone ID: 03-LIB34-015-Q1-E1-A3
tcccgggtcgaccgacagcttcagcganaggatacaggaagcaagctggtcggaaggggttgtgacaaccccagccatgtggagaggcctggggctggctctggctctctgcctcctcctaaccggagggacagagagccagggccaaagctcctattgtaagcaacctccaccctggagcataaaggatcaagaccctatgctgaactcctacggttcagtgactgtggttgctcttcttcaagccagctgatacctgtgcattctgcaggcatctagattggaggacctgcgagtaaaactggagaaagaaggatattctaacatctcctatgttgttgttaatcatcaaggaatctcttctcgattaaaatatgtgcatcttaaaaa

SEQ ID NO: 606 - DNA, 426 bp, Bos taurus
  Clone ID: 03-LIB34-016-Q1-E1-A3
ctagttctagatcgcgagcggccgcccttttattttttttgttgacagctcaacatggtgagtacgtcttacaacatcatgtcgacaatatccatctggtgaacttccggcatctgaccatacagctcgtcagcatcatagaatactctcctgaattcatttaactcatagagaggagaaaatcagtcaccgtgatatatcgtccttattaccgagagctggacacggtattggaaagcagactgacgacgaagttgccacacttaagtgcaagctggtcctgtgcgatataaataagcatggacttgaggaaacagccaccgaatgcaagagactgggtgcaaaagctcatacctttgtggtagactgtagtaacccgagaagatatttacagctctgcaaagaacgtgaacgcagaagttggag

SEQ ID NO: 607 - DNA, 368 bp, Bos taurus
  Clone ID: 03-LIB34-017-Q1-E1-A3
ctttaacggaacggtctcccagaagcaatttagaatgactggtaaaacgaaatatacccaaagctcgcagcaacaaaaaaggatacagttctttctggccagcttcctgcttctgccctttctgctcgtctgcatcgtagagtctctcctgaagctttttattcctaagaagagaaaatcagtcaccggagagattgtccttattaccggagctggacacggtattggcaggcagactgcctacgaatttgccaaacttaagtgcaagctggtcctgtgggatataaatgagcatggacttgaggaaacagccaccgaatgcaagagactgggtgcaaaaggtcatacctttgtggtagactgtagta

SEQ ID NO: 608 - DNA, 308 bp, Bos taurus
  Clone ID: 03-LIB34-018-Q1-E1-A11
agcgccactgaagatcctggtgtcgccatgggccgccgccccgcccggtgttaccggtattgtaagaacaagccgtacccaaagtctcgcttctgtcgaggtgtccctgatgctaagattcgcatctttgacttggggcgtaagaaggccaaagtggatgagttcccactctgtggccacatggtgtcagatgagtatgagcagctctcctctgaagccctggaggctgcccgtatttgtgccaacaagtacatggtgaaaagctgtggcaaagatggttttcacatccgagtgcgggtccacccctt

SEQ ID NO: 609 - DNA, 424 bp, Bos taurus
  Clone ID: 03-LIB34-018-Q1-E1-A3
gacccaggcgtccacgcacaggactcatggcccttgaatggaccctgccgcctcccctcccagcacccagggctgtctgtgctaattctccaggcctcagcctgtttcttaacctgagatctgcgcacgattgatggacccacaagtcatccttgagacctttggaccagccggccctaacatgacacaggactatcaatatcttcagcatctggacaacgaagagaatgaccatcagcacagaggaatgccactgcctcctcattcattcagtcagcgtctctacatcggacccagcctcctcctggtcgccatgggccctaacctcctgctgccaatcattctacgtgtgatcagatcccagaactccaagctgcaggaggagctcagcgccctgatagagaccgtcaacaacctcataagt

SEQ ID NO: 610 - DNA, 434 bp, Bos taurus
  Clone ID: 03-LIB34-019-Q1-E1-A4
atcggagaaggacagcagcaccaactggggggagccaaacaggctggccacctcaatggagtttattatcaaggtggcacttactcaaaaacatctactcctaatggttatgataatggcattatttgggccacatggaaatcccggtggtattccatgaagaaaaccaccatgaagataatcccacttaacagacttgccatcggagaaggacagcagcaccaactggggggagccaaacaggctggagacgtataaaagaccatttcaaaagtgatttacttttttaaagaactttatctgaaaagaaaaagataatatttttcctatgggacaatggacttgcaaagcctcacttcactttaaaagttaaaagaacccatgttgagaactccactaacagttttaagccggtggatatttaactacatacc

SEQ ID NO: 611 - DNA, 152 bp, Bos taurus
  Clone ID: 03-LIB34-020-Q1-E1-A11
gtccgcagtgcacagagctgtgagctgccaacatcccaataaaaaggtgaccctctgctgctcagggcttccccactgagccacgggatgaggccaccaggcaggcctcctatggaacgcctccctcagaataaagtttgaaactggcgggc

SEQ ID NO: 612 - DNA, 429 bp, Bos taurus
  Clone ID: 03-LIB34-020-Q1-E2-A11
acaaagatctacgaactttggaaggcatcttatatcaggttgagaacaaaacatcagaagccagagagctggtcaaagcaatccaaatcagctataaccctgatcaaccatcaaagccaaataacatagagagtgctaccaagaattccaagagtatgatggaagaaattatgaaatatgaaacactgatatcaacacatgaatcaacaattcgatttttgcaagaaatatataactcaaatagtcaaaaaatcgttaacctaagagataaagtggtccagcttgaagcaaactgtcaagagccttgtcaagatacagtgaaaatacatgatgtaactgggagagattgccaagatgttgccaataagggggccaaagagagtggactttactttatcagacctctgaaagctaagcagcagttcttag

SEQ ID NO: 613 - DNA, 423 bp, Bos taurus
  unsure (357): unsure at all n locations; Clone ID: 03-LIB34-021-Q1-E1-A11
gtactcagcagcccagtatggggtcctggctctgccctcctcattctggtcctcctgcttagactaagtgtgcagatctggcataagttttatctctgggacctccagcactgctccacggatttgactgggaagacagcagtggtgactggggccaacagtggcattgggaaggctgtgtcccaggagctggcccaccgcggggcccgtgtgatcctggcctgccgtagccgagagcgaggacagcaagccctggctgagatacaagcaacatctaagagcaaccgcctcctacttggtgaagtggacctgagctctatggcctccattcggagctttgctcagcggctgctgcangagtgtcctgagattcatctattggttaacaatgctgcagtctgtgggttccctaccacacttact

SEQ ID NO: 614 - DNA, 410 bp, Bos taurus
  unsure (241): unsure at all n locations; Clone ID: 03-LIB34-021-Q1-E1-A3
cacggttctgcactccggccagccagtgccccatcattgaccctgactgggagtctccagagggcgtgcccattgagggcatcatcttcggagggcgccggcctgttggtgtccctctggtctacgaggctctcagctggcagcacggtgtgtttgtgggggcggccatgagatctgaggccacagcagcggcggagtacaagggcaaagtcatcatgcacgaccccttcgccatgcgccncttcttcggctacaacttcggccagtacctggcacactggctcagcatggcccagcgccccgcacccaagctgcccaagatcttccatgtcaactggttccgaaaggacaaggccggcaggttcctctggcccggcttcggtgagaactcccgggtgctggagtggatg

SEQ ID NO: 615 - DNA, 378 bp, Bos taurus
  Clone ID: 03-LIB34-023-Q1-E1-A11
aatcgaacacgtcttgccaaacttcttagattccagtcttctcaccatccaagtgacatgactagtctagaccagtatgtggaaagaatgaaggagaagcaggacaaaatctacttcatggctggggccagcaggaaagaggccgaatcttctccctttgttgagcgacttctgaaaaagggctatgaagtgatttatctcacagaacctgtggacgaatactgcattcaggctcttcccgagttcgacgggaagaggttccagaatgttgccaaagaaggagtgaagtttgatgaaagtgagaaaagtaaggagagtcgtgaagcagttgagaaagaatttgagcctctgctaaactggatgaaagataaagccctc

SEQ ID NO: 616 - DNA, 301 bp, Bos taurus
  Clone ID: 03-LIB34-024-Q1-E1-A3
agttcaacgcaataccctagagtgagtcgtattaaggaagacatactgtggtgtaccaggtgagtattggctcggaaatgacagaattagccagcttaccaatatgggacccacaaagcttttgattgaaatggaggactggaaacgcgataaggtgacggcactctatgaaggatttactgtacagaatgaggccaacaaatatcaactgtcagttagcaaatacaaaggaacagctggcaatgccctcatacaaagggcttctcaactggtgggagaaaaccggagcatgacgatccac

SEQ ID NO: 617 - DNA, 364 bp, Bos taurus
  Clone ID: 03-LIB34-025-Q1-E1-A11
ggatgatggagctgagcctatctcggctgggactcgggccgctggcagcctccccgtggctgctgccgctcctggctggggtctcctggatcctggcccgcgtcctgggctggacctacaccttctacaacaactctcgccgcctccgatgtttcctgcagcccccaaaaccgaactgggtcttgggtcacatgaacctggtgccctccacggagcagggcctgatctacttcactcagatggcggccaactacccccgtggatatttgatctggtttggccccattatcccaatggtcatcttctgccaccctgacatgctccggagcatcaccaacgcctcagctgccattgcacccaaaga

SEQ ID NO: 618 - DNA, 377 bp, Bos taurus
  Clone ID: 03-LIB34-025-Q1-E1-A3
gagccgccgggttgagaggagcgtggccttctcctctccccgccatggcgtgtgctcgtccactgatatcagtgtactccgaaaagggggagtcctctggcaaaaatgtcactttgcctgctgtgttcaaggctcccattcgacccgatattgttaactttgttcacaccaacttgcgcaaaaacaacagacagccctatgctgtcagtgaattagcaggtcatcaaaccagtgctgagtcttggggtaccggcagagctgtggctcgaattcccagggttcgaggtggcgggactcaccgttccggtcagggcgcttttgggaacatgtgtcctgggggccgcatgtttgcgccaactaagacctggcgacgttgg

SEQ ID NO: 619 - DNA, 389 bp, Bos taurus
  Clone ID: 03-LIB34-026-Q1-E1-A11
accccacaaaactttggcacaatgaagtgggtgacttttatttctcttctccttctcttcagctctgcttattccaggggtgtgtttcgtcgagatacacacaagagtgagattgcgcatcggtttaaagatttgggagaagaacattttaaaggcctggtactgattgccttttctcagtatctccagcagtgtccatttgatgagcatgtaaaattagtgaacgaactaactgagtttgcaaaaacatgtgttgctgatgagtcccatgccggctgtgaaaagtcacttcacactctctttggagatgaattgtgtaaagttgcatcccttcgtgaaacctatggtgacatggctgactgctgtgagaaacaagagcctgaaagaaa

SEQ ID NO: 620 - DNA, 424 bp, Bos taurus
  Clone ID: 03-LIB34-026-Q1-E1-A3
acctgaaatggtgctcaccccttccctcctctcctccagcaccacctggtccccagttctcctggttcaagccctcctgcgtcctggggcctgggcggccttctagaccttgaacagatccaacccaagccatcgcctagacccactctgagcctacatccatcagcctccacctcaattagcatcttagcacgagcatcaaccccaactcagtcccagccctaaagcagccctgaacccaggcagggtccagccacacccaggacccagcatggccagggacttccaggacatccagcagctggactccgaggagaatgaccaccagctcggcagaggcgagggcccaagcacttgtgggcacagccccaggagagaaccattctggaaagggatgcctcctcgccagcctcttgtgctgcag

SEQ ID NO: 621 - DNA, 298 bp, Bos taurus
  Clone ID: 03-LIB34-027-Q1-E1-A11
gaagaaattatgaaatatgaaacactgataacaacacatgaatcaacaattcgatttttgcaagaaatatataactcaaatagtcaaaaaatcgttaacctaagagataaagtggtccagcttgaagcaaactgtcaagagccttgtcaagatacagtgaaaatacatgatgtaactgggagagattgccaagatgttgccaataagggggccaaagagagtggactttactttatcagacctctgaaagctaagcagcagttcttagtctactgtgaaattgatgggtcgggaaatg

SEQ ID NO: 622 - DNA, 415 bp, Bos taurus
  Clone ID: 03-LIB34-027-Q1-E1-A3
gaatgcccaagggcaccatggccgccctgggcatcacggtcgccctgctggtgtggatggccaccctgctgttcatctccatctggaagcacatctacagcagctggaaactgccccctggccctttcccactgcccatcatcgggaatcttttacagctggatattaagaacattcccaaatccttcaccaggctggcggagaggtacgggccggtgttcaccctgtacctgggctctcagcgtgccgtggtcgtgcatggctacaagcccgtgaaggaggtcctgcttgactacaagaacgagttttctggcagaggagaaaaccctgggttccagatgcacaagaacaatgggatcattttcaacaatggatcaacctggcgggacacccgacggttctcgttgaccacctc

SEQ ID NO: 623 - DNA, 393 bp, Bos taurus
  Clone ID: 03-LIB34-029-Q1-E1-A3
aagagctttaaaagcatggtcagtagctcgcctgagccagaaatttcccaaggctgagtttgtagaagttaccaagctagtgacagatctcacaaaagtccacaaggaatgctgccatggtgacctacttgaatgcgcagatgacagggcagatcttgccaagtacatatgtgataatcaagatacaatctccagtaaactgaaggaatgctgtgataagcctttgttggaaaaatcccactgcattgctgaggtagaaaaagatgccatacctgaaaacctgcccccattaactgctgactttgctgaagataaggatgtttgcaaaaactatcagggaacaaaagatgccttcctgggctcgtttttgtatgaataatcaagaagggatcc

SEQ ID NO: 624 - DNA, 402 bp, Bos taurus
  Clone ID: 03-LIB34-030-Q1-E1-A3
gtacgagtacgacaaggcggaaaaggaaacggggcggaaggaaagccggagccgccacacgcgaaggaggaaacggggatgggggctgaggcgggaccgagtgcaggcctaggaaaggcaagagagagaggcggaagcgtggaggaaggggcgagaaggctcgtcaggggagatgaggggagcgcaggggcgcgaaaggaggccaaagggagaggtgaggggaagaacgaggaatggagggtcaggactggtaggcgggagagcgccaggccggcaagagcacagggacgagggggtcaggcttggggccgcctcgcggggacacgggcggccatggggacagcggctgacgaggaggctgcggcggcccggggagccaccctgccgcccagcgcgcgggcc

SEQ ID NO: 625 - DNA, 428 bp, Bos taurus
  Clone ID: 03-LIB34-031-Q1-E1-A11
ggtccaggcacgcgtccgaccgagatgaggttatgctgggagaccatctcgggagccacgctcatcaatgaacgatggctcctcaccacagctaaaaatctctacctgggtcacagtagtgacaaaaaagcaaaggacatcactcctactttaagactctatgtggggaagaaccagcttgtagaggtggagaaggtggttctccaccctgaccactccaaggtagacattgggctcatcaaactcagacagaaggtacctgtcaatgacaaagtaatgcccatctgcctaccttcaaaagattatgtgaaggtgggtcgtgtgggttatgtgtctggctgggggcgaaatgaaaacttcaactttacggagcatctgaagtatgtcatgctacctgtggctgaccaagacaagtgtgtgaaacacta

SEQ ID NO: 626 - DNA, 323 bp, Bos taurus
  Clone ID: 03-LIB34-031-Q1-E1-A3
aaatcatgaagaaagcattcagatactcagaactattatcgaagagaagaaattaaattttaatgcaggtttatctgtaaaatatacacctgttgaagcaattgacaagaataaatgtgtagatttagaacattctgacaaaggaagcacctcaagtccttccaagttggctgctgaggctaagtttcgatttacataatccaaagatgatatttacagactgttgtcatcatattcagctaaacaggagaatatgtttctgcatgtaaaagggaagatttaactatgaagaattgtgatgagaagtcaggatgtcatgctgc

SEQ ID NO: 627 - DNA, 359 bp, Bos taurus
  Clone ID: 03-LIB34-032-Q1-E1-A3
catccatgcagatatatgcacacttcccgatactgagaaacaaatcaagaaacaaactgcacttgttgagctgttgaaacacaagcccaaggcaacagaggaacaactgaaaaccgtcatggagaattttgtggcttttgtagacaagtgctgtgcagctgatgacaaagaagcctgctttgctgtggagggtccaaaacttgttgtttcaactcaaacagccttagcctaaacacgacacaaccacaggcatctcagcctaccctgagagtaagaggaacagagagaaatgaaaactcagagcttattcatctgttttccttttctgttggtgttaaaccaacactctcaccaaagaa

SEQ ID NO: 628 - DNA, 324 bp, Bos taurus
  Clone ID: 03-LIB34-033-Q1-E1-A11
ctcgcgggtcgacgcaagcctctagagtgagtcgtattagatccaggaataggacacaaaggtggaataagcattaattttgtgcactcgttgggaattttttttttataagcttaagactacaatgctttgctacaaatttatgcatttcagtcagatcactgatctacgtgtgatttcctaaacttaattgtgcgttataacaaatgtcacatcataattacagtcctaattagaagtaataagtctgtttgtgtatctttacgctgtagtttaacactttgtattagttcagttactttgcgttggttaaaaaattggctc

SEQ ID NO: 629 - DNA, 443 bp, Bos taurus
  unsure (282): unsure at all n locations; Clone ID: 03-LIB34-035-Q1-E1-A3
gatccacagtctatatttacctgctgcctcaggcacgccggagcaaccactggctccgggcacacggggcctgggcagtggtgacaggagccaccagcggcattggcaaggcttacgcacatgagctcgcccggagaggtctgaacgtcgtcctcatcagtcgagacctgagcaagttgaagcacgaggcaaaggagatagaggggctttacggcaaaagaacacgagtgattcaggtggatttcaccgggggcttggaaatctacgagaccattgaggcangactgaagggcctggaggtcggagtactggtaaacaacgtgggccaaaaatatacaccccgcttgagtaaactgctcgactgttaggacacggccaaaaaactccaggattatataaactgcaacatggtgtctgtggcccagatgactagaatcctcctg

SEQ ID NO: 630 - DNA, 422 bp, Bos taurus
  Clone ID: 03-LIB34-036-Q1-E1-A3
gcgtccgcaccacttcagctccaacccagcagagaagcacccagcctaggacgccaaggagaggcccctctccgggtccctccctccaccatggaatacctctctaacctggaccccagcagcctgctcaggtcagtatccaacatgagcgccgatttgggccgaaaggtctggacctcggctccaccacgccagcgacctttccgagtctgtgataacaagcggaccacccggaaaggcctgacagccgctacccgtcaggaactgctagacaaggctctggaggccctggtgctgagtggagcgctcacactggtgctggaggaagacgggaccaccgtggagagcgaggagttcttccagctgttggaggatgacacgtgcctgatggtgctggagttgggacagagctggagcccccg

SEQ ID NO: 631 - DNA, 419 bp, Bos taurus
  Clone ID: 03-LIB34-037-Q1-E1-A3
aaccccacaaaactttggcacaatgaagtgggtgacttttatttctcttctccttctcttcagctctgcttattccaggggtgtgtttcgtcgagatacacacaagagtgagattgctcatcggtttaaagatttgggagaagaacattttaaaggcctggtactgattgccttttctcagtatctccagcagtgtccatttgatgagcatgtaaaattagtgaacgaactaactgagtttgcaaaaacatgtgttgctgatgagtcccatgccggctgtgaaaagtcacttcacactctctttggagatgaattgtgtaaagttgcatcccttcgtgaaacctatggtgacatggctgactgctgtgagaaacaagagcctgaaagaaatgaatgcttcctgagccacaaagatgata

SEQ ID NO: 632 - DNA, 414 bp, Bos taurus
  Clone ID: 03-LIB34-038-Q1-E1-A3
cggaagggccccaccatggcgggcctgctgcatctcgttctgctcagcaccgccctgggcggcctcctgcggccggcggggagcgtgttcctgccccgggaccaggcccaccgtgtcctgcagagagcccgcagggccaactcattcttggaggaggtgaagcagggaaacctggagcgagagtgcctggaggaggcctgctcactagaggaggcccgcgaggtcttcgaggacgcagagcagacggatgaattctggagtaaatacaaagatggagaccagtgtgaaggccacccgtgcctgaatcagggccactgtaaagacggcatcggagactacacctgcacctgtgcggaagggtttgaaagcaaaaactgcgagttctccacgcgtgagatctgcagcctggacaat

SEQ ID NO: 633 - DNA, 369 bp, Bos taurus
  Clone ID: 03-LIB34-039-Q1-E1-A3
ggcctaataccatatatactaacaatataccaatgatgacgagatgttatccgagaaagcaccttccaagggcaccataccccagctgtccaaaaaggcctccgttatggaataattctttttattatctccgaagtactattctttaccggatttttctgagctttctaccactcaagcctcgcccccacccctgaactaggcggctgctgacccccaacaggcattcacccactaaaccccctagaagtcgcactgctcaacacctctgtcctattggcttccggagtttctattacctgagcccatcatagtttaatagaaagggaccgaaagcatatattacaagccctatttatcatcatcaca

SEQ ID NO: 634 - DNA, 303 bp, Bos taurus
  Clone ID: 03-LIB34-040-Q1-E1-A11
gcgtccgctcagtcaccagaactgacctatgacagtgaatctatggtggcacgctcgatcacgcggggccttctgctgctggcagccctgtgctgcctggcccccatctccctggctggagttctccaaggacacgctgtccaagagacagatgatacatcccaccagcaatcagcatgtcacaagattgcgcccaaactggccaactttgccttcagcatacaccaacagttggctcagcagtccaacaccagcatcatcttctgtctcacccgtgagcatcacttcagccgttgcgatgct

SEQ ID NO: 635 - DNA, 431 bp, Bos taurus
  Clone ID: 03-LIB34-040-Q1-E1-A3
ctcaagatgccgaatggaaagaacgccaacgggaagaaggtggccccggccccggccgtggtgaagaagcatgaagccaacaacgtggtcaaccccctgttcgagaagatgcccaagaattttggcattggacaggacatccaacccaagagggacctcacccgctttgtcaaatggccccgctacatccggctgcagcggcaaagggctattctctataagcggctgaaagtgcctcctgcaattaaccagttcacgcaggccttggaccgacatacagctactcaactgcttaagctggcccacaagtacagaccagagacaaagcaagagaagaagcagaggctgctggcccgagctgagaagaaagcctcgggcaaaggcgatgtccccaccaagaggccacctgtccttcgagcacgggtcaacac

SEQ ID NO: 636 - DNA, 424 bp, Bos taurus
  Clone ID: 03-LIB34-041-Q1-E1-A11
cgacgcacgcctccaagatgaagctgttaataccttcaaagttctcacaagggataaacgtcttgtacctggaggtggagcaacagaaattgaattagccaaacagatcacatcgtatggagagacctgccctggacttgaacagtatgccattaagaagtttgcagaggcatttgaagctattccccgggcactggcagaaaactctggagttaaggccaatgaagtaatctctaaactctatgcagtacatcaagaaggaaataaaaacgttggattagatattgaggctgaagttcctgctgtaaacgacatgttggaagctggtgttctagatacttacctgggaaaatactgggctattaaactggctactaatgctgccgtcactgttctcagagtggatcagatcatcatggaaaaa

SEQ ID NO: 637 - DNA, 443 bp, Bos taurus
  Clone ID: 03-LIB34-041-Q1-E1-A3
cggtcgaccacgcgtccgggtactgaaaccctagaggacgcaactgtgagtgtctctgtcctagcctctcaacttgctttcctgtgtccagtgagtatcttcctgcctgaatgggcgctttatcctactggtgctgaggaaggcagggtctgtacagctgttccagtctaggaggatagcactgcagactccagtactagcctgtccagagcagcaagtgagaggaaacaagccagcattgtaagaggacatgcttctcctccctctctccgtgctgctcctgctcacacagccctggagatccctgggagcacaaatgacaaccttttctcagaaaatactggccaatgcctgtaccctggttatgtgtagccccctggagagtggcttgcctggtcatgatggacaagatgggagagaatgtccccatggagagaaagggg

SEQ ID NO: 638 - DNA, 429 bp, Bos taurus
  unsure (261): unsure at all n locations; Clone ID: 03-LIB34-042-Q1-E1-A3
caaaactttggcacaatgaagtgggtgacttttatttctcttctccttctcttcagctctgcttattccaggggtgtgtttcgtcgagatacacacaagagtgagattgctcatcggtttaaagatttgggagaagaacattttaaaggcctggtactgattgccttttctcagtatctccagcagtgtccatttgatgagcatgtaaaattagtgaacgaactaactgagtttgcaaaaacatgtgttgctgatgagtcncatgccggctgtgaaaagtcacttcacactctctttggagatgaattgtgtaaagttgcatcccttcgtgaaacctatggtgacatggctgactgctgtgagaaacaagagcctgaaagaaatgaatgcttcctgaaccacaaggatgatagcccagacctccctaaa

SEQ ID NO: 639 - DNA, 382 bp, Bos taurus
  Clone ID: 03-LIB34-043-Q1-E1-A11
gacccaagcctctatagaaagtcatattacactgcaccatgaatgtctctgcactgagcccctcgagtaccctgggtggtgtctccgggctccggtaaggggtctccctgctccgcatggttctgcttctgatccatggggcatagctctaaccgcgcagacagtggctgcacagagcccttcatcacttcccatcacctccctcccacttggcctatagacacacgctggagttccaagatgagggccagctgccatacctactgataaaggtacacaaatactcaacggcctgtgttcgcacgagttggggcaccatggccttgtcattggtctacgacgcttaccacatttaggctcgtccttcggagatcagacccaa

SEQ ID NO: 640 - DNA, 332 bp, Bos taurus
  Clone ID: 03-LIB34-043-Q1-E1-A3
tggaaacccactccagtaatcgtgcctggagaatcccagggacgggggagcctggtgggctgctgtctatggggtcgcacagagttggacacgactgaagcgacttaacagcagcagcagcagccctctctgcaaagacactttgtccaaagccggaagaggaggcctgaggtgcagcccagggcccggggcctggccccccatgtggacggggcgccacttgtccaccacctgccaaaaagtcgccctgatatcgtgcaggtctgagtttcatccggactctgcaacctcatggtggatgaggtggttaccctcaaaggaccacaaagaag

SEQ ID NO: 641 - DNA, 411 bp, Bos taurus
  Clone ID: 03-LIB34-045-Q1-E1-A11
aacactacaacctggagtcgctcatcaaggtcgtgtgtgttcccgaagcctgcttgggggcgtcgtcggaccccattgctggggtcgcggttgctctgaagcaggccatgactccagaattcagagcctaccagcgccaggtggtggccaactgcagggctctggccgaggccttgatgggactgggctacagagtggtcacagggggttctgacaaccacttgatcctcgtggacctccgctccaaaggcacagatggcggcagggcagagaaagtgctggaagcctgctccattgcctgcaataagaacacctgcccaggtgataaaagcgcggctacgggccagtgggctgcgcctggggaccccagcattgacctcccgaggggtctttggaagaagatttcaaaaa

SEQ ID NO: 642 - DNA, 346 bp, Bos taurus
  Clone ID: 03-LIB34-045-Q1-E1-A3
ctggtatctctgtagtgtggtctgtgttggcagtaagccgcagtggaggtgctatgctggcatcttagaggtgtggagggaagaactctgacgtccaacatcaacatcttggtcaagtaaagtcttcagggtgttttgcgcacaaattgtagtcagatacctatgcatgtttagagtaaatctccaatttgtaattttccttagaattttgcaaaatgttgtgacagatatttgtcagaattattggaaatatgttatggtggatggcattttttcatataaaattatatttagttctgttgagacatggctaagcctattttcattttaatttgttttactaatt

SEQ ID NO: 643 - DNA, 367 bp, Bos taurus
  Clone ID: 03-LIB34-046-Q1-E1-A3
atccaagctctcaaggaggctcttgctaaggcccgggcttggattgctgatgtggacgagattcaagatggtggtcactacccctgcctggatgacttggagggtctggtggctgtgggccgggacctacctgtggggttggtggaactgacacagctagagctgcaggtactgacaacgcactcctgtagggagaagggctccaagaccttcctcaagaagaattcttgctacactctgctggatgtgctctgcccgtgtgcatacgccggctcagacagcaccaaacgcagccgttggatggagactgaactggggttttagacatctcacacagagctgctggggctatctgcccaagacctca

SEQ ID NO: 644 - DNA, 377 bp, Bos taurus
  unsure (360): unsure at all n locations; Clone ID: 03-LIB34-047-Q1-E1-A3
gacccacgcgtccggcggtgggaggcgatggaggcgccggcggtcctgatgcacgacgtcctgtggccgaaccacgcgctgcgcacggataaaggcgcgatcatggaccaagttcggcggctgctgctgtgcgagaagaccgacctgctgtcccaggcgtgcccgcccgcctgccccgtggcttttcccgacatcttccgatactgcgaacgctgcttcagaccgccctggacgatctgggccacctgggaagtgcccgagcttgtcacacccccggggacaccgatggagagctgacgccctgagacggatgccagcgttcgcgtgcctggcggccaaatattgacccatttactctangaatctgttttcacata

SEQ ID NO: 645 - DNA, 176 bp, Bos taurus
  Clone ID: 03-LIB34-048-Q1-E1-A3
atgtaaatgttccttacgcttgtctttggatggctccccaactaacattacttatgggacgcaagcaagctctggttattccttgaggttgtgtaaacgtggggacagccgtgtctgtacaacaaaaaggacacccattgttggaggaacaaatgcttcttgggaaaattggccct

SEQ ID NO: 646 - DNA, 389 bp, Bos taurus
  Clone ID: 03-LIB34-049-Q1-E1-A3
atagttctagatcgcgagcggccgcccttttttttttttttttgcttcaggtattgtttaattcttaaaatagaaagtaagcagatttataagaaatatttcaaagaaatatcacaactgttaaaaataatacctttctttcaagtgtctgacaaagtactcagcatgtattacagagtttttaaggataattttaatttttaaaattaaaatgaaactatacacatagcatgacagcattcttataagtcaggtattttcatgtaaagctttcaggaaagcacatattaggtgttgaataatttgaagaacatggcctctttgatcattactgaaagaatagatcagaaaaaagctaaccccaaaacaggatgttatatagactgttg

SEQ ID NO: 647 - DNA, 314 bp, Bos taurus
  Clone ID: 03-LIB34-050-Q1-E1-A11
aaatggttggttttgatatgagtaaagaagctgccagaaggtgctatgagaaatctggcctgagaccaagtgatattgacgtaatagaacttcacgaacgcttgtgggccaatgaacttattacttacgaagcactgggactgtgtccagaatgtcaaggtggaaaactggttgaaagatgagataatacttatggaggaaagtgggtcataaatcctagtggcggattaatttcaaaggggcacccacttggagctacaggtctggctcagtgcgttgaactctgctggcatcttgagacggggaagcggaaa

SEQ ID NO: 648 - DNA, 464 bp, Bos taurus
  Clone ID: 03-LIB34-050-Q1-E1-A3
ttccgagtccacccacgcctccggacggagccagagggacggccaagcccaggagccagggaaccgacgaccgagtcatgtggctggaaatactccttgcctcagtgctgggctttgtcatctactggttcgtctccaaggacaaggaggagactttgccccttgaagatggatggtgggggcctggggtgaggcccacagctggggaggataagagcatccgcccattcaaggtggaaacatcagatgatgagatcaatgacttacatcagaggattgacagggtccgtttaactccacctttggaggacagtcgtttccactatggtttcaactccaactatttgaagaaaatcatctcctactggaggaatgaatttgactggaggaagcaggtggagattctcaacatattacctcacttcaagactaagattgaagggctggacatccacttcatccac

SEQ ID NO: 649 - DNA, 272 bp, Bos taurus
  Clone ID: 03-LIB34-051-Q1-E1-A11
ccgggtcgacccacaacgtccgaaaaaaaaaaaaaaaaaaaaaaaaaaaaaaaaaaaaaaaaaaaaaaaaaaaaaaaaaaaaaaaaaaaaaaaaaagggcggccgctcgcaatctaaacgggtttgccgccgggacacaggtgtcgtgaaaaccaccgttaaacctaagccaaaatgggaaaggagaagacccacatcaacatcgttgtcattgggcacgtaaattcagggaagtctaccacgactggccatctgatctataaatgtggcgg

SEQ ID NO: 650 - DNA, 238 bp, Bos taurus
  Clone ID: 03-LIB34-051-Q1-E1-A3
ctctgcggggacaacacccggaagtctgtagataattaccaagaatgctacttggcaatggttccttcccatgcggttgtggctcgaactgtgggcggcaaggaggatgtgatctgggaacttctcaatcacgcccaggaacattttggcaaagataaaccagacaatttccagcttttccaatcccctcatgggaaggacctgctgtttaaggactctgctgatgggtttttaaaga

SEQ ID NO: 651 - DNA, 210 bp, Bos taurus
  Clone ID: 03-LIB34-052-Q1-E1-A3
accttacgtgccctgctggcccgcggccgcgccccgctgcggccctggctcttctgcccggtgcagcgctccttcgcctcgaacgcagcctttgggtacatcagcacagcaaagaggggaatgaacagcaccgtggggttgatccagctgaaccgccccaaagccctcaatgcgctctgcaaacgcctgatcgttgagctcaaacaggca

SEQ ID NO: 652 - DNA, 347 bp, Bos taurus
  Clone ID: 03-LIB34-055-Q1-E1-A11
agatgaattctgctgggagatggagcacagcaggtttctctcttgcctgatactggctgcccttctctcccaagtgaatccccgcattctaaaagtgctggaacctgaggacaaagtaatgttggaatgcaattccagcatcacattgctacaaggaacagaaggacaagaggtgtcaggcaataataaaactcgggacttaggaaaacgtatccaggacccaagaggaatgtatcggtgtggtgaaaacacccaacaacttattctgcaagtatactatcgaatgtgccagaactgtgtggagctggacacagccaccctggcaggcatgatcatcaccgacatca

SEQ ID NO: 653 - DNA, 185 bp, Bos taurus
  Clone ID: 03-LIB34-055-Q1-E1-A3
aggtggacagtcagtgttcataatttccattccagtggattgtgagaagtttcaaattaggaagagaaattgaggtgaagtaaaatcatgtgtttaaaatccactttgaacctctctttatttatgtaagatctatcacagaaaactcaaaaagatttattcattaaaccggtttatgttacaat

SEQ ID NO: 654 - DNA, 228 bp, Bos taurus
  Clone ID: 03-LIB34-057-Q1-E1-A11
tgtcatcctccccgcgggatcgagctcctccacctgcagccgcgggcgagctgggtagccgagccgagccgggcctggccgggccgggtcagagctgcgggaggggcgggccgggggtccggaggagtcacgtgccccctcccgccccaggtctcccactcaggatgcggcttccccggcctcagccctgggggctcggtctgctgctcgtcctcctgcctggggcgc

SEQ ID NO: 655 - DNA, 224 bp, Bos taurus
  Clone ID: 03-LIB34-057-Q1-E1-A3
tccaagtatagcaagcatgacatgaacaaagttctggacctggagttgaaaggtgacatcgagaaatgcctcacagttattgtgaagtgtgctacaagccagccaatgttctttgctgagaagctccatcaggccatgaagggtattggaactcgtcataagacactgatcaggattatggtttcccgctccgaaattgacatgaatgacatcaaagcatgcta

SEQ ID NO: 656 - DNA, 328 bp, Bos taurus
  Clone ID: 03-LIB34-060-Q1-E1-A11
cggccacgcgaccgcttaggagatgaattgtgtaaagttgcatcccttcgtgaaacctatggtgacatggctgactgctgtgagaaacaagagcctgaaagaaatgaatgcttcctgagccacaaagatgatagcccagacctccctaaattgaaaccagaccccaatactttgtgtgatgagtttaaggcagatgaaaagaagttttggggaaaatacctatacgaaattgctagaagacatccctacttttatgcaccagaactcctttactatgctaataaatataatggagtttttcaagaatgctgccaagctgaagataaag

SEQ ID NO: 657 - DNA, 263 bp, Bos taurus
  Clone ID: 03-LIB34-060-Q1-E1-A3
cccgggtccaggcacgcgtccgcagaaggctgtgaacaagtagtcacaggaaggaaactcttgcagtgcctctcaaggccagaggaggtgaaattggccctggaagtgtacaagctgtccctggagattgaaatccttcagacaaataaactaaagaaagaagcatttctcttaagagagagggagaaaaatgtgacttgtgactttaatccagaatagatcacttcagttaatcacctttaccatctctttatgccatcaat

SEQ ID NO: 658 - DNA, 375 bp, Bos taurus
  Clone ID: 03-LIB34-061-Q1-E1-A11
ccatcgcgaccaagcggggctctctctgctgctgggagccctgtgctgcctggcccccatctccctggctggagttctccaaggacacgctgtccaagagacagatgatacatcccaccaggaagcagcgtgccacaagattgcccccaacctggccaactttgccttcagcatataccaccatttggctcatcattccaacaccagcaacatcttcttctcccccgtgagcattgcttcagcctttgctatgctctccctgggagccaagggcaacactcacactgagattctgaatggcctgggtttcaacctcactgagctcgcataagctgagattcacaaagggtttcaacatcttctccaaaccctgaa

SEQ ID NO: 659 - DNA, 361 bp, Bos taurus
  Clone ID: 03-LIB34-061-Q1-E1-A3
gggtcggcccacgcgtccagccctcctgctgctctggggtctgtccctgagcccagtgactgagcaggcgacgttctttgaccccaggccatccctgtgggccgaggccggctcaccgctggcaccctgggccgatgtgacgctgacctgccagagcccgctgccgacccaggagtttcagctcctcaaggatggcgtgggccaggaaccggtgcacctggagtcccctgcccatgagcacaggttcccgctgggaccagtgaccagcaccacccggggcctctaccgctgcagctacaagggcaacaacgattggatcagcccgagcaacctggtggaagtgaccggagcagagcccctg

SEQ ID NO: 660 - DNA, 212 bp, Bos taurus
  Clone ID: 03-LIB34-062-Q1-E1-A11
gttaattttgagttgccagaggtaacctaaccaactcccattatgttttggtactaagggatatacctttcaataaagttactgaaatgcattcctttgccaggtggttttctatttgtttctcttctaactattttggcaatgtgataatagcaccacaataaaaagctgtctccactcactttaaatttagcactaaagtacgaggcatg

SEQ ID NO: 661 - DNA, 429 bp, Bos taurus
  Clone ID: 03-LIB34-063-Q1-E1-A3
ctttgttggaaaaatccaactgcattgctgaggtacagaaagatgccatacctgaaaacctgcccccattaactgctgactttgctgaagataaggatgtttgcaaaaactatcaggaagcaaaagatgccttcctgggcacgtttttgtatgactattcaagaaagcatcctgaatatgctgtctcaatgctattgaaacttgccaaggaatatgaagccacactggaggaatgctgtgccaaagatgatccacatgcatgctattccacagtgtttgacaaacttaagcatcttgtggatgagcctcagaatttaatcacgcaaaactgtgaccaattcgaaaaacttggacagtatggattccaaaatgcgctcatagttcgtaacaccaggaaagtaccccaaatgtcaactccaactctcgtgg

SEQ ID NO: 662 - DNA, 249 bp, Bos taurus
  Clone ID: 03-LIB34-066-Q1-E1-A3
agtagctcgcctgagccagaaatttcccaaggctgagtttgtagaagttaccaagctagtgacagatctcacaaaagtccacaaggaatgctgccatggtgacctacttgaatgcgcagatgacagggcagatcttgccaagtacatatgtgataatcaagatacaatctccagtaaactgaaggaatgctgtgataagcctttgttggaaaaatcccactgcattgctgaggtagaaaaagatgccat

SEQ ID NO: 663 - DNA, 241 bp, Bos taurus
  Clone ID: 03-LIB34-067-Q1-E1-A3
gggatgcctgcggatgaaggaccagtgcgagaagtgccaggagatcctggaagtggactgttcggccagcaacccaactcagacgctgctgcgccagcagctgaacgcatccctgcagctggcggagaagttcagcaggctgtacgaccagctgctccagtcctaccagcagaagatgctcaacacgtcggccctgctcaagcagctgaacgagcagttcacctgggtgtcccagctggcc

SEQ ID NO: 664 - DNA, 211 bp, Bos taurus
  Clone ID: 03-LIB34-068-Q1-E1-A11
aggcctcctggcggatgggtgtcagttatgcacctcctcttactgtcccgcgtcactgctgccgccatgcctcgtgggctccgcctcggtgacgaggatcccaacttccaggcaactactaccatcggccgcatccgtttccacgactatctgggagactcatggggcattctcttctcccatcctcgggacttcaccccagtgtgtacca

SEQ ID NO: 665 - DNA, 199 bp, Bos taurus
  Clone ID: 03-LIB34-068-Q1-E1-A3
gaggagaccctattctatatcaacacttattctgattctttggacagcccgaagtctatattttaatcttacctgcgtttggaataatctctcatatcgtgacctactactcatgaaaaaaagaaccattcggatatatgggaatagtttgggctataatgtcaatcggatttctaggtttcatcgtatgagcccacca

SEQ ID NO: 666 - DNA, 237 bp, Bos taurus
  Clone ID: 03-LIB34-069-Q1-E1-A3
tcccgggtccacgcaacgtccaaacgatgtggactgtgcctacatgaaaaatgtgtacggcggctcagagagtgacaccttctcgtttgccattgacctaccctccgtcatccccacgaaggagaaaattgagttctgtgtcgcctaccatgctaatgggcaggtcttctgggacaacaacgagggtcagaattacagaatcgtccatgtacagtggaagcctgacggggtgcagac

SEQ ID NO: 667 - DNA, 223 bp, Bos taurus
  Clone ID: 03-LIB34-070-Q1-E1-A11
acgactagatctagatcgcgagcggccgcccttttttttttttttttttttttttttttttttttttttttttttttttttttttttttttttaatggaaaaaaaacccggttaaaggaaaaaacctttttgagtttccggggaaaaatcttacataaataaagaaaggttcaaaggggattttaacaacaggttttacactcacctcaatttccccttccca

SEQ ID NO: 668 - DNA, 382 bp, Bos taurus
  Clone ID: 03-LIB34-072-Q1-E1-A3
aaagttcctgagccttcaactatgatagcgtccagatggactggcttgtgcctgccacctgtgagcccatccagagtgtcgacatcgtctcagaagacaagtactaccgattgagccttcgcacacggcgggtggatgcagtgatccctccctacccacgctccatcgcccagtactggctgggctgtccagtccctgcacaaacgtagcagcctgagtccaaacaactggtcactgctgctccctgctccagcatcgtccttcaagctcaataagtatcccgtgaccctgagtcacgtggatgctgcattccgctatgatcgtaaaagtgtccttctgatcaacggggacagattctgggtatatcctcctgagaaggggg

SEQ ID NO: 669 - DNA, 99 bp, Bos taurus
  Clone ID: 03-LIB34-073-Q1-E1-A3
tatcaagctacactgcgcgaatgctgtgtcagacatgatccacatgcatgctattccacagtgtctgacagacttaagcatcctgtggctgatcctcat

SEQ ID NO: 670 - DNA, 230 bp, Bos taurus
  unsure (16),(47),(50): unsure at all n locations; Clone ID: 03-LIB34-074-Q1-E1-A3
tctctgccgtggtatnccagagcaagggatgcttttcacaattttancanaatgaaggtactcactgcagcactgctgtccatccttctgatcacacagcagtgttcttgtgctgtgaatcccacaggctgcgatgccgttgagcctgtggctgtgagagctctggacctgatcaataaaggacggtgggatggctaccttttccagttgctgcgggtcgctgatgccca

SEQ ID NO: 671 - DNA, 359 bp, Bos taurus
  Clone ID: 03-LIB34-075-Q1-E1-A11
ttcctccgggcaagtgcgcagtctctactcccgctcccccagggtccgcggccaccatggcgcattagaggcagcagtgcctgcggcagcatcggcctttgcagcggcggcagcagcaccaggctctgcagcggcaaccccccccagcggcttaagccatggcgcttttcacggcattcagcagcagccttgctgtaaccgacaaagacatcttcggattaagcacattcctcgagttaagcaccaaaacctcgcaacatggccgagatgagctttctgagcagcgacgtgttaaggggggacttcgtgtcccccttcgaccacttgggtttgggggctgaacagaacctaggtctcct

SEQ ID NO: 672 - DNA, 398 bp, Bos taurus
  Clone ID: 03-LIB34-075-Q1-E1-A3
caactgtgagtgtctctgtcctagcctctcaacttgctttcctgtgtccaatagcactgcagactccagtactagcctgtccagagcagcaagtgagaggaaacaagccagcattgtaagaggacatgcttctcctccctctcaccgtgctgctcctgctcacacagccctggagatccctgggagcagaaatgacaaccttttctcagaaaatactggccaatgcctgtaccctggttatgtgtagccccctggagagtggcttgcctgttcatgatggaaaagatgggagcaaatgtccccatggggagaaaggggatccaggtttaccaggacctgcaggaccagcaaggaaggctggatggggttggcctattgggccgaaaagagacaatggc

SEQ ID NO: 673 - DNA, 339 bp, Bos taurus
  unsure (152): unsure at all n locations; Clone ID: 03-LIB34-076-Q1-E1-A3
cccgtaacactagaccctgtaacactagaaaatcattgaatccttcctttgactcttatttgccaaatggagaccctctggtgtgggcacccagcgcgtggcaaggctctttgccagggatgccccgccacgccccaagctgggttaaggangggcgatgccttcgtgttcctcgtcacctctctgatgctgctgcccagactcctctgctctgcaccaaatgttctccgcctgaagcaagagcttggctccccagatggaagcagaaccatgttcaattattcaatccaacttgcaatttgggttaactgctcctcgttgaaacaaaaaacccggaat

SEQ ID NO: 674 - DNA, 439 bp, Bos taurus
  Clone ID: 03-LIB34-077-Q1-E1-A11
ttcgtaatatcgacttacagcgacaaaggagagaagcctgaaagaggccgattcctccactttcactctgtgaccttctgggttggcaatgccaagcaggctgcgtcatattactgcagtaagctgggctttgagcccctagcctacaagggcctggagaccggttcccgggaagtggtgagccatgtggtcaagcaagggcagatcgtgttcgtcttctcctctgccctcaacccctggaacaaagagatgggcgatcacctggtgaaacacggcgatggagtgaaggacattgcgttcgaggtggaggactgtgactacattgtgcagaaagcccgggaacgaagcgccaagattgtgcgggagccttgggtagagcaagataagcttgggaaggtgaagtttgctgtgctacagacgtatggggacacgacacaca

SEQ ID NO: 675 - DNA, 347 bp, Bos taurus
  Clone ID: 03-LIB34-078-Q1-E1-A3
ttcttgagttggtgttgtcatcgtctagttattaagaatatctaaccagtttggtattttacataatcattgtttgaaagcgtctacacatctgcgtttgcgtgtttatgttttcatataaagtgctaggtgatcttagtactacgttcagcattggtgactccctccatcagatcttacattatggtcaggtagactctccagtttgaagtataacaaatttactgacttgtctgaacaaattcaactctgtggttagacagatgatatatgtccgaatatcagacataaatgctgaacattccacagtatcatggttaatataataatagtaatggtcttaagcc

SEQ ID NO: 676 - DNA, 424 bp, Bos taurus
  unsure (411): unsure at all n locations; Clone ID: 03-LIB34-079-Q1-E1-A3
gggtcgaggcacgcgtccgagtttttcaagaatgctgccaagctgaagataaaggtgcctgcctgctaccaaagattgaaactatgagagaaaaagtactgacttcatctgccagacagagactcaggtgtgccagtattcaaaaatttggagaaagagctttaaaagcatggtcagtagctcgcctgagccagaaatttcccaaggctgagtttgtagaagttaccaagctagtgacagatctcacaaaagtccacaaggaatgctgccatggtgacctacttgaatgcgcagatgacagggcagatcttgccaagtacatatgtgataatcaagatacaatctccagtaaactgaaggaatgctgtgataagcctttgttggaaaaatcccactgcattgctgaggtanaaaaagatgccat

SEQ ID NO: 677 - DNA, 412 bp, Bos taurus
  Clone ID: 03-LIB34-080-Q1-E1-A11
catgacgtcagagaatcatctgaacaacagcgacaaagaagttgatgaagttgatgctgccctttcagacctggagattactttggaaggggggaaaacatcaacaattttgggtgacatcacttccattcctgaacttgctgactatattaaagttttcaagccaaaaaagctgactctaaaaggttataagcagtattggtgtacctttaaagatacatctatttcttgttacaagagcaaagaagaatccagtggcacaccagctcatcagatgaacctaagagggtgtgaagttaccccagatgtgaatatttcaggccaaaaatttaacattaaactcctcattccggttgcagagggcatgaatgaaatctggcttcgttgtgacaatgaaaaacagtatgcacac

SEQ ID NO: 678 - DNA, 449 bp, Bos taurus
  Clone ID: 03-LIB34-081-Q1-E1-A11
tccggctcgtcaaggcgtctctgccgaatgctcagctaggttctgcctaccagctggtatgctacttctctaactgggcccagtaccgtccaggcctgggaagcttcaagcctgacaacatcgacccctgcctctgcactcacctgatctatgccttcgctgggatgagtaacagtgagatcaccaccattgaatggaatgatgtggctctctatagttctttcaatgacctgaaaaaaaagaacagccagctgaaaattctcctggccattggaggctggaactttggaactgcccctttcactgctatggttgccactccggagaaccgcaagactttcatttcttcagtcatcaaattcctacaccagtatggatttgacgggctggattttgattgggagtaccctggctctcgtggaagcccttctcaggacaagcatctcttc

SEQ ID NO: 679 - DNA, 211 bp, Bos taurus
  Clone ID: 03-LIB34-081-Q1-E1-A3
gacagatctcacaaaagtccacaaggaatgctgccatggtgacctacttgaatgcgcagatgacagggcagatcttgccaagtacatatgtgataatcaagatacaatctccagtaaactgaaggaatgctgtgataagcctttgttggaaaaatcccactgcattgctgaggtagaaaaagatgccatacctgaaaacctgcccccatta

SEQ ID NO: 680 - DNA, 373 bp, Bos taurus
  unsure (148),(174),(199),(304): unsure at all n locations; Clone ID: 03-LIB34-083-Q1-E1-A3
ggtcgacgcacgcgtccaagacgcagctctgacaaaatacaacagtgaaaacaagagtggcaaccagtttgtattgtaccgcataaccgaggttgccagaatggataatcctgacacattttattccttgaagtaccaaatcaagganggcgactgtccttttcaaagtaacanaacttggcaagactgtgactacaangactctgcacaagctgccacaagagagtgcacagcgaccgtggccaagagagggaatatgaagttctccgtggctatccagacctgcctgatcactccagccganggccccgtggtgacagcccagtatgagtgccttggctgtgtgcatcccatatcttacaagagccccgac

SEQ ID NO: 681 - DNA, 288 bp, Bos taurus
  Clone ID: 03-LIB34-084-Q1-E1-A11
cccacgcgtccacacgcaaagactacgacactacgcctcctgtcgtgcgctggctcaacgagcagagatactatggaggtggttatggctccacgcaggccactttcatggtgttccaagccttggcccaataccagaaggatgttcctgatcacaaggagctgaacctggatgtgtccatccaactgcccagccgcaactctgcggtcaggcatcgtatcctctgggaatctgccagcctcctgcgctcagaagagactaaggaaaatgagcgtttcacagtaaaag

SEQ ID NO: 682 - DNA, 417 bp, Bos taurus
  Clone ID: 03-LIB34-085-Q1-E1-A3
ccgacccaggcctcaggttcatagatttcctttctccaaaagtggacccttcgttaatggaagattcagacgacggcccctcattacccaccaaacagaacgaggagttccgacccttcatcaggaggctcccagagtttaagttctggcacgcggcgaccaagggcatcttggtggccatggtgtgcaccttctttgaggccttcaacgtcccggtgttctggcccatcctggtgatgtacttcatcatgctgttctgtatcaccatgaagaggcagataaagcacatgatcaagtaccggtacatcccattcacgcacggcaagaggacatacaagggcaaagaggacgcgggcaagacattcgccagctagacggccacctgccacctcacggcgccttctcttctcacataca

SEQ ID NO: 683 - DNA, 453 bp, Bos taurus
  Clone ID: 03-LIB34-086-Q1-E1-A3
aattatgaaaaatgaaacactgatatcaacacatgaatcaacaattcgatttttgcaagaaatatataactcaaatagtcaaaaaatcgttaacctaagagataaagtggtccagcttgaagcaaactgtcaagagccttgtcaagatacagtgaaaatacatgatgtaactgggagagattgccaagatgttgccaataagggggccaaagagagtggactttactttatcagacctctgaaagctaagcagcagttcttagtctactgtgaaattgatgggtctggaaatggatggactgtgtttcagaagaggcttgatggcagtctggatttcaagaaaaactggattcaatataaagaagggtttggacatctgtctcctactggaaacacagaattttggctgggaaatgagaagattcatttgataagcacacagtctaccatccc

SEQ ID NO: 684 - DNA, 354 bp, Bos taurus
  Clone ID: 04-BOVMS1-001-Q1-E1-A7
atgcgacgtcatagctcttctatagtgtcacctaaattcaattcactggccgtcgttttacaacgtcgtgactgggaaaaccctggcgttacccaacttaatcgccttgcagcacatccccctttcgccagctggcgtaatagcgaagaggcccgcaccgatcgcccttcccaacagttgcgcagcctgaatggcgaatgggacgcgccctgtagcggcgcattaagcgcggcgggtgtggtggttacgcgcagcgtgaccgctacacttgccagcgccctagcgcccgctcctttcgctttcatcacttcctttctcgccacgttcgccggctgtccccgtcaagctctaaat

SEQ ID NO: 685 - DNA, 357 bp, Bos taurus
  Clone ID: 04-BOVMS1-003-Q1-E1-A7
ctcaagtctgctagtgatctggtacaactcctgcatacccatgacagtagcctgatggtcaccatgaaaaagcttcacacatgcatcacgcattgtccattgacagacgggtgacattctctattaagctcgcacagcacaagaggatgccgcgactgccagcagtgatgcagccgtgattgctgttgaactgaacacagctcaggatatgattgctgagctggaagcgtgatgactgaattgacagggagcatccggtgaaggacctgcaggatcgtcgtgtttaagctgagtatcgggcactgatggacaggttgtagcacctccagacactggaggtcagagtgcgtgagctgg

SEQ ID NO: 686 - DNA, 108 bp, Bos taurus
  Clone ID: 04-BOVMS1-005-Q1-E1-A7
gcgtactcttcactggtttatcagcagacgtttctctgggctttttggtgtatgattcaacactgcgttaaagggggctgttccattgaataaaagagcagtgtggtt

SEQ ID NO: 687 - DNA, 334 bp, Bos taurus
  Clone ID: 04-BOVMS1-006-Q1-E1-A11
gctgaggattccataatattataacggatttaagctgtgaagcctcaaaacatcacaactagattagcatcggtgttctcagatttgggaaaactgcctaattaacattaccctatagtggaattactcaaatttgaattcacctatgaaacatacaaatcaaagtaacagtataaatgtgaaatgcaaatgacaagcctggaaaggtaaactgtgaatcttcatttctaacattgatccaagtttctatattgggtcaatatattgtatttaggtggtgtttaaaaagggtaacctacttaaactatgaggtttacatcaaaaccaccatttc

SEQ ID NO: 688 - DNA, 418 bp, Bos taurus
  Clone ID: 04-BOVMS1-006-Q1-E1-A7
gggttggcaaatcagaagagcaattgaaagaagacggtattgaatacaaagttgggaaattcccatttgctgctaacagcagagctaatacaaacgctgacacagatggcatggtgaagattctcgggcagaaatcaacagacagagtattgggagcacatattctaggaccaggtgctggtgaaatggtaaatgaagctgcacttgcactggagtatggcgcatcctgtgaagacatagctcgagtctgtcatgcccatccgaccttatcagaagcttttagagaagcaaacttggctgcatcatttggcaaatcaatcaacttttaaattagaagattataattttctgcaatttcctggggacctttgtagaagtcacatttcctgaaaggaaatgctcacagctgcaaaaattt

SEQ ID NO: 689 - DNA, 359 bp, Bos taurus
  Clone ID: 04-BOVMS1-007-Q1-E1-A7
atgaaagatgggaactcgctttcttgcatgagcttggactgcacccctcatagtttatgttataaccaagttagctaatttcaatcaactgacactgctcataattggaccaactttgaactcactcttgatagaccaagtgggcttccatgtttaccttccaccaatatcctcaggtcataatttattacatgtcttcacaggttgccgtaatggaattatgcctcataagatctcagtttcaccattcctaagaggctgatgctgagctttcttacatcaaagacacgaagattttgataagggagatggatgctatcttacaacatgaaatcatgcataaagaccatataaagcac

SEQ ID NO: 690 - DNA, 302 bp, Bos taurus
  Clone ID: 04-BOVMS1-008-Q1-E1-A11
acgcgtcaagatacactacccaagggaaaaaaaaaaaaaaaaaaaaaaaaaaaaaaaaaaaaaataaaataaaaataaaaatttaaaaaagaaaaaaaataataaaaaaaaaaaaaaaaaaatttaaaatgaatgaaaaaaaataaaaatgaaaaaaaatatgttgagcacttaaattgggtgtgttcgttgttgatgtattgtttaattctgcttgtcttttcatggttgtcttttatctgaattatagaattatattttaatggctgtttattcgaaattactctttggtgaattctttt

SEQ ID NO: 691 - DNA, 416 bp, Bos taurus
  Clone ID: 04-BOVMS1-008-Q1-E1-A7
atgcgacgtcatagctcttctatagtgtcacctaaattcaattcactggccgtcgttttacaacgtcgtgactgggaaaaccctggcgttacccaacttaatcgccttgcagcacatccccctttcgccagctggcgtaatagcgaagaggcccgcaccgatcgcccttcccaacagttgcgcagcctgaatggcgaatgggacgcgccctgtagcggcgcattaagcgcggcgggtgtggtggttacgcgcagcgtgaccgctacacttgccagcgccctaacgcccgctcctttcgctttcttcccttcctttctcgccacgttcgccggctttccccgtcaagctctaaatcgggggctccctttaaggttccgacttagtgctttacggcacctcgaccccaaaaaacttga

SEQ ID NO: 692 - DNA, 418 bp, Bos taurus
  Clone ID: 04-BOVMS1-009-Q1-E1-A7
ccaacactcattattattacccgatgaggaaaccaaacagaacgcctaaacgccggactctatttcctattctatacactagctggctccctacccctattagtcgcactaatttatatccaaaacacagtaggatccctaaatttcctaatattacagtactgagtacaacctgttcataactcttgatctaatgtcttcatatgactagcatgtataatagctttcatagtaaaaataccactatatggcctccacctttgactacctaaagctcacgtagaagcccccatcgcaggctccatagtccttgcagcagttctactaaaactaggggggtacggtatgctacgaatcacactaattctaaaccctatgaccgactttatagcatacccattcattatactctccctat

SEQ ID NO: 693 - DNA, 371 bp, Bos taurus
  Clone ID: 04-BOVMS1-010-Q1-E1-A7
caggagcactcaagccatcctcaaggatacccagatccacctggatgatgctctgcggggccaggaggacttgaaggagcagctggccatggtggagcgcagagccaacctgctgcaggctgagatcgaggagctgagggccaccctggagcagacagagaggagcaggaagatcgcagagcaggagctcctggatgccagtgagcgtgtccagctcctgcacacccagaacaccagcctgatcaacaccaagaagaagctagagacagacatcactcaaatccagggagagatggaggacattatccaggaagctcgcaacgcagaagagaaagccaagaaggccatcactgatgcagccatgatggctg

SEQ ID NO: 694 - DNA, 415 bp, Bos taurus
  Clone ID: 04-BOVMS1-012-Q1-E1-A11
gagtggttcactgttattgagcattatcaccgaaccagtgccaccattactgaactggtcattggaaacgagtattatttccgggtctttgctgaaaacatgtgtggcctcagtgaagatgcaacaatgacaaaagagagtgccgtgattgccaaggatggcaaaatctacaaaaatccagtgtatgaagacttcgatttcacagaggcacctatgtttactcagccattggtcaacacctatgctgtagctggttacaatgctacgctgaactgcagtgtgagaggaaatcctaagcccaaaattacctggatgaagaacaaagttgttattaaggatgatccaagatacaggatgttcagcaaccaaggggtctgtactctggagattcgcaagcccaagccctatgacgggg

SEQ ID NO: 695 - DNA, 366 bp, Bos taurus
  unsure (310): unsure at all n locations; Clone ID: 04-BOVMS1-013-Q1-E1-A7
actaattttaaccatatggctcctccctctaatactaatagctagccaacatcatctatcaaaagaaaacctaacccgaaaaaaactatttattactatgctgatctcactacaactattcctaattataacctttaccgccatggaactaatcttattttatattctatttgaagcaacactagtcccaacactcattattattacccgatgaggaaaccaaacagaacgcctaaacgccggactctatttcctattctatacactagctggctccctacccctattagtcgcactaatttatatccanaacacagtaggattcctaaatttcccaatattacagtactgagttcaacctgttca

SEQ ID NO: 696 - DNA, 451 bp, Bos taurus
  Clone ID: 04-BOVMS1-014-Q1-E1-A11
aaactgtgaaaaaattcagcatgcacaacagacttgtgaggaatgtagcacattgtttggagaatattattgcagtgtatgccatctgtttgacaaagacaagaaacagtatcattgtgaaaactgtggaatttgtaggattggtccaaaggaagattttttccactgtttgaaatgtaacttatgccttgcaatgaatctccaagggaagcacaagtgtattgaaaatgtttcccggcagaattgtccaatatgtttggaggacattcacacatctcgtattgctgctcaagtcttgccatgtggacatcttctacatagaacatgttatgaagatatgttgaaagaaagctacagatgtccattgtgtatgcgctctgctttagatatgagtaggtcctggagaacaacggatgatgaggtagcacagactcctatgccctcagaatat

SEQ ID NO: 697 - DNA, 419 bp, Bos taurus
  Clone ID: 04-BOVMS1-014-Q1-E1-A7
tgaagaactacaggaacactcaagccatcctcaaggatacccagatccaccgtggatgatgctctgcggggccagcaggacttgacggagcagctggccatggtggcgcgcagagccaacctgctgcacgctgagatcgacgacctgatggccaccctggagcagacagagaggagcatgaagatcgcaaagcacgagctcctggatgccactgagcgcgtccagctcctgcacacccagaacaccagcctgatcaacaccaagaagatgctacagacagacatcacgcagatccacggacagatggaggacattctccacgaagctcgcaacgcagaagacaaagccaagaaggccatcactgatgcagccatgatggctgacgatctgaataatgagcatgacaccagcgcccatct

SEQ ID NO: 698 - DNA, 381 bp, Bos taurus
  Clone ID: 04-BOVMS1-016-Q1-E1-A7
ctcgtggtggaagaacaattcacgatcaagaacagcgagggcgattccatattgaaaacacagatgacctgacgactctgatcatcatggacgtacggaaacaagatggtggactgtataccctgagtttagggaatgaatttggatctgactctgctactgtgaatataaatattcgatccatttaagagggcctgtgctctcacactcagactcattcttaacctttcccaaatgattcacatggactaatctttctatctttctgatctgtaaatacttaagataaagagtagttttgtatcaacctaaatgagtcgaagttcaaaaataatacatttcagtcttttcacaattgttgacctaagaagattacacatt

SEQ ID NO: 699 - DNA, 99 bp, Bos taurus
  Clone ID: 04-BOVMS1-018-Q1-E1-A11
aaaaaaaaaaaaaaaaaaaaaaaaaaaaaaaaaaaaaaaaaaaaaaaaaaaaaaaaaaaaaaaaaaaaaaaaaaaaaaaaaaaaaaaaaaaaaaaaaaa

SEQ ID NO: 700 - DNA, 228 bp, Bos taurus
  Clone ID: 04-BOVMS1-019-Q1-E1-A7
ttctctggttagggtgtgcttgcaactgatgatatacaggaatctgcgccctacgagcactcccacaaataatctcaggagaagtgtgggtagcaattagcctgttatcactactcctaattagtgggtcgtttacccactcaagaataagtacgatactacgacgaatattgataatccactcaacatgggctctagcaagaaaatgatttttctcaacactagcag

SEQ ID NO: 701 - DNA, 423 bp, Bos taurus
  Clone ID: 04-BOVMS1-021-Q1-E1-A7
ttctagatcgcgagcggccgccctttttttttttttttcgacattaaaatacttttaataatttaccttagaattgacattctatacattgtcacaatatacataatctgaagaatacagaagtatttttaatttaatcatgtaaaacacaaatgctgacttgacatatattcacacgtaattctttctctcacgtttacaactcaacagattcgtgaatccagaggaactgctataatcactttacggaacacactgttttagtatttcaaaagtttattccaacccatttcttcttttatactctaaaacatcttcgttatgttgtttgatgagatagatccacaaaaaaacggaatagacttaagtatgccctaactggagatgaagtaaagaagatttgcatgcagcgtttcattaaga

SEQ ID NO: 702 - DNA, 321 bp, Bos taurus
  unsure (248): unsure at all n locations; Clone ID: 04-BOVMS1-022-Q1-E1-A11
tgctttggctgtggtattggtatcaattttggttgtggtggttatgcaacaatgaatgtcggtaattacaacagtcattcttcaaattttggacccatgataggatgaacatttggatgcacatgctctgggccctatggtggcagaggccaatactttgccataccactataccaatgtggctatcgaggctccagcatcagcagtagctatggcagtggcattacagttgtaaatagtgccagtcnacacatcctaacacgacaggagagcatgataagtgacagggaagctacacgttacaatagatttgtgaactca

SEQ ID NO: 703 - DNA, 447 bp, Bos taurus
  unsure (325): unsure at all n locations; Clone ID: 04-BOVMS1-022-Q1-E1-A7
attggatcctttctaggcagtctttcctctctgccagccactaaacttggttccattgcaattcagggagccattgaaaaggcagggattccaaaagaagaagtgaaagaagcatacatgggcaatgttctacaaggaggtgaaggacaggcccctacaaggcaagcagtactgggagcaggcttacctatttctactccatgtaccactataaacaaagtttgtgcctcaggaatgaaagccatcatgatggcctctcagaatcttatgtgtggacatcaggatgtgatggtggcaggtggcatggagagcatgtccaatgtcncctatgtaatgaacagaggagcaacaccatatggtggggtaaagcttgaagatttgattgtaaaagatggactaactgatgtctacaataaaattcatatgggcaactgtgctgaaaatact

SEQ ID NO: 704 - DNA, 428 bp, Bos taurus
  Clone ID: 04-BOVMS1-023-Q1-E1-A11
gatttaccttcatttctgttacaattaaaacttgttagtctaatcttttactcctccccacctcacccctacctctttttttttttttcttttatgtactgcattcttattttctaactgttaaacactgtattggagtttttttttaatttacagatcatatttattttactatttttgtagaaaattattaattttgattgtatttttgtattttcaaagcttcttcacttgtgttccctaaatgttcatattgctgcccaaaagtatgactgtggaggaaaaaaaaaaactttaaaaatccacactttttgttaagaaggaaacatttaacatttatatatttgtgtatggaagacacttgacattttatccctgttgcatctggctgcacagagcctctcctcaaagatgctacaaaacttgaa

SEQ ID NO: 705 - DNA, 359 bp, Bos taurus
  unsure (290): unsure at all n locations; Clone ID: 04-BOVMS1-023-Q1-E1-A7
cacgcatccgaaattgggaaccatgagaagcttgactgtggctggctgagtctgggtcaaactcaactttcctttcacctcaatgccaacccaattcctaccaacctctaaactgacctgcacctttaccctcaccttaaatccccaatccgagctgtcaacataaactccagcctaattctctgaccccatcacccagccccttgaagacagcagagtgtcttgcttgccctgagaaggaagtgtgggccgggtgggacggccacacccagccctagggaagcatggangcatggtgtctgcaacataaatgtccctcccaaggtagggagtgacactggtttaataaaaggattccc

SEQ ID NO: 706 - DNA, 434 bp, Bos taurus
  Clone ID: 04-LIB188-001-Q1-E1-A7
acagcgccgaatctaccttcgaggggatcctcaaaaacccaagagcagagtctttgaacagcaggtccctctggccgggtggagagccaaagagctggaagctccgagacttgttttttccaaatttctcctgcgccttgctgagaagcttccagatcaagtcttccttgccatccacacttcgggccacgacagcatgagaagggacctgggccaggtggcactccttgaacgcatccactggcgcccgactgttgttcaggcagagaagctcatactggtccctgtcagccttctctggcaagttctcaacactgtcgtctctttaacaaaagccacgtctccagccccgtcctgcagacacttgaaggcaccagaataaccgaagtatggttcccgggaggagcaggcacactggttctccccctccccct

SEQ ID NO: 707 - DNA, 404 bp, Bos taurus
  Clone ID: 04-LIB188-002-Q1-E1-A11
acggaagttacttggtaaatccagaatcaggatacaatgtctctttgctatacgaccttgaaaatctgcctgcatccaaggattccatcgtgcatcaggctggcatgttgaaacgaaactgttttgcctctgtctttgagaaatacttccagttccaagaagagggcaaggaaggagagaacagggcagttatccattatagggatgatgagaccatgtatgttgagtcaaaaaaagacagagtcacagtagtcttcagcacagtgtttaaggatgacgacgatgtggtcattggaaaggtgttcatgcaggagttcaaagaaggacgcagagccagccacacagccccacaggtcctcttcagccacagggaacctcccttagagctgaaagataccgatgcc

SEQ ID NO: 708 - DNA, 365 bp, Bos taurus
  Clone ID: 04-LIB188-002-Q1-E1-A7
acacggacggcggtttcatggcgacatctttgggcttggagacggtgttcttttctgggaagggcaggtccgagtgggccactgtgcacgtgaactcctctccggactcccagtcctccgagcagaccgaggcctcaccccgggcgctgaaggtgtcgttgaggtgtcgctcaaaatacgtgtgggtctccagggccttgccgttctgacgggaccagctgatgttcaggccatcataggaggccaggtttgtgaccagacaggacagcttggctgacttcgtgaggaagatgtcggcgaaggatggggggatggtgaagaccccgatgggagatggtggtgcaacatcacatgaggaggacacg

SEQ ID NO: 709 - DNA, 284 bp, Bos taurus
  Clone ID: 04-LIB188-003-Q1-E1-A7
atactaatgggactggcgttgcccctctgcccgggtctgggccagctctgaccccatgtgcaggaggactccgttgagctgctccatctgcatggtataacaggcctccacttccctcacgctgttctccaagctggccttcatatttctcatggactctatatcgatatccagggactggacagttcgcttcagcatccgttgatggtcatctcaacagctctcatctcagtggtcatgcgaagtgaccactgtggtgctctccacaatctgctgggacgagt

SEQ ID NO: 710 - DNA, 370 bp, Bos taurus
  unsure (325),(330): unsure at all n locations; Clone ID: 04-LIB188-004-Q1-E1-A11
ggatacccaatttaattccataatcacagtcaatccatcaattacagtccgtccactctccccgtggggtgttctgagctttgttttgattgtgggatgctatcagtgcgatgagggcaattctttcagcagggagggggttaggccccaccccggtgagttataaagtgcaaactccccccaagtgaggcgctgggaccaggtctgggatgcacagggcagtggaggggggtgggagccgttctggaagcagggatctgccctacaggggtattctgcataaagggggccctctcttctggcaggaaaggctgggaaggactanatcangcagtgggggctggtcctgtggttctcagtatggctgcct

SEQ ID NO: 711 - DNA, 233 bp, Bos taurus
  Clone ID: 04-LIB188-004-Q1-E1-A7
ggccggatacaaccaaatggtaaggcaggggctgcagccagcgagtccctcttcatctctaaccacgcctactaagccgacgtgttctaaggctgccccctcaacactccaggccccgtcccctcccacactcactcttgaagaagaggggggggggttcatctggggctccaggctgctctttcccgtcactcttgcctccttgtgacattggtgcctggtgttgtctgtgt

SEQ ID NO: 712 - DNA, 450 bp, Bos taurus
  unsure (442): unsure at all n locations; Clone ID: 04-LIB188-005-Q1-E1-A7
gccatgcgggcgggatactttttgaagtcggtgtccagcacaaggactttgttctcattcaaggcatcgatcttgaacaccgcagggatcttggttttttctgcaatgatcttcttctgagcacactcaccgttctcccatttctgcagcaggatctccaggtcgccctcaggggtgggcttcagctcctccacatacactctcaggggggcactctgggcgtccagcagggagatgtcgctggccgccatggccaaggagtccagcttgctgcttcttcccagtcttgggttcaagatcttgacaaccatgaaacttctcatccttacctgtcttgtggctgttgctcttgccaggcctaaacatcctatcaagcaccaaggactccctcaagaagtcctcaaatgaaatttactcaggttttttgtggcaccttttccanaagtgttt

SEQ ID NO: 713 - DNA, 399 bp, Bos taurus
  Clone ID: 04-LIB188-006-Q1-E1-A11
gggatacttggtgagaagggccggcggatccgggaattgactgctgtggttcagaagagatttggcttccctgaaggcagtgtagagctttatgctgaaaaggtggccacaagaggactgtgtgccattgcccaggcagagtctctgcgttacaaactcctaggaggccttgctgtgcggagggcctgctatggtgtgctgcggttcatcatggagagtggggccaaaggctgcgaggtcgtggtgtctgggaaacttcgaggacagagggctaaatccatgaagtttgtggatggcctcatgatccacagtggggaccctgttaactactatgtggacaccgccgtgcgccatgtgctgctcagacagggtgtgctgggcatcaaggtaaagatcatg

SEQ ID NO: 714 - DNA, 308 bp, Bos taurus
  Clone ID: 04-LIB188-006-Q1-E1-A7
atacaagcttattttttttttttttttttttttttttttttttttttctattttttttgtgtctttgttgtttttattatcttgatcccaagccctgagaataccagagctacgggtctgagaagtcccgcagggcagtagtctcacagagtcctgagggtcagacctcaaagtgttccaaggcaaagcacttaaggaattcatgcattccattctgcaattttgcagacagccagaaacagaccccaagagtctcgtgagatgggaaaaattcaactcctggtctcatagataaaaggagggagagt

SEQ ID NO: 715 - DNA, 368 bp, Bos taurus
  Clone ID: 04-LIB188-007-Q1-E1-A7
gggcccgggatacttgtcctctgactcaggctgcccatttctctgccactccacggcgatgtagtctgggtagaagctggtgaccatgcaggtgaggctgaccgtgcttttgctgagctcttcctggggtggggccaggacatacacctgcggctcccgggccggccctttggtcctggagatggtcctcacgatgggggccgggaggccttcgttgtggaccttgcacttgaactcctttcctccagtccagtcctggtgctggatgcgcagggcgctgaccacgcggtaggtgctgttgaactgctcctctctcggcttcgtcgtggctgtgtttacctccacgtcgtccacgaaccaggagaact

SEQ ID NO: 716 - DNA, 304 bp, Bos taurus
  Clone ID: 04-LIB188-008-Q1-E1-A11
aaacttcatcacactgtccaggtttaacacacattcactgagtgtgtatctcgtcaatttcatagtggttcagctcataattattggtaaccgtttccacacttacataactcattacgttgtccatttgcttaatagcttccatggatttactcctaagtttctcaaatcaccactggctgtgcacagtgtattgacattctccttttcaaacaattcaggataaggtgccttcaaaagccggtctaaattttcagtgacgacttcttgacggagtccttggtgctctgataagatgtttacg

SEQ ID NO: 717 - DNA, 435 bp, Bos taurus
  Clone ID: 04-LIB188-009-Q1-E1-A7
gggatactgttctgtgatgactgggaaatgcagacttcagaaagctggctcttccagtttgaaaagtgaagcggacctaagacatcaccaggacaggagcggctcagtgttggcgttggacgctgtcgcccagccgtgccctccaccgggaccaccagtgcacatctggccagtgatcttccaggcgcatccaacctgcgttcaccatttctccaccccagttaggtgacctccaagaggcagcagtgtccttgaggccctgccttcggcatgttacaaagcctcagagcggaactctctgctgaggctctctgtggatgacctccttccatggtgaaaagggggtcctgcacaccaagctttcaacctcatgccttgcatagtaaaaagcgttaaggtttttttgttgaaaaggtttgggtttttggttttggt

SEQ ID NO: 718 - DNA, 427 bp, Bos taurus
  Clone ID: 04-LIB188-010-Q1-E1-A11
gccatcgcggcgggatactgaagtggggtgccattgccttctcccatatctattcacaagcctgcctaaatcattgacttctagccacctttgggatgccaatgcccacccaccctcaccaggccgcagaggagagaaaacacttaccacaggaggtccgggtaaggaacaaggaactaacaagctcccaccaaccaggattctgcagaggtcaacaagaggtcagcaagagatgggagactgcagtccagaggtcctagcaacttccagcgagcagcaaagacccagcatagtcaaaacgaattcaatgttaccaaaaccaaataaataaacggacagaagttcttggaacacatgactgaggttaggggtgaggcagtacagacacattcagatgcagctgcagaaagaagggtccagtgatctg

SEQ ID NO: 719 - DNA, 279 bp, Bos taurus
  Clone ID: 04-LIB188-010-Q1-E1-A7
acacaactgcaactctacataaatgccacagatgcagactactgttttcttgctctatttacacagcggatatacctactctaacgaaggaggtggggggaaatgcacaggaaactcagagcactggggagcgagacgagaacgagtaagtgcagcgcatgcgtcagtcgatgtgtaacagtcacaagcggaacacttcagaacaatgcctgccctgtcacacgagcagctactggacagttatgtaaaagtcaatgtgggctttcagactggctatgc

SEQ ID NO: 720 - DNA, 403 bp, Bos taurus
  Clone ID: 04-LIB188-012-Q1-E1-A11
acagcgccaaatctaccttcgaggggatcctcaaaaacccaagagcagagtctttgaacagcaggtccctctggccgggtggagagccaaagagctggaagctccgagacttgttttttccaaatttcccctgcgccttgctgagaagcttccagatcaagtcttccttgccagccacacgtcgggccatgacagcatgacaagggacctgggccaggtggcactccttgaacgcatccactggcgcccgactgttgttcaggcagagaagctcatactggtctctgtcagccttctctggcaagttcgcagacactgtcgtctctttaacataagccacgtctccagccccgtcctgcagacacttgaaggtaccacaataaccgatattaggttcccggga

SEQ ID NO: 721 - DNA, 413 bp, Bos taurus
  Clone ID: 04-LIB188-013-Q1-E1-A7
gcgatgggggcgggataccagtcgaggttcttcacctccaggtctgcgttggcctcctccagggcgcgcaccttctccaggcaggaggacatgcggtcgttgagattctgcatggtggtcttctcattgcaagcgaggaggccgccatctccgccgccaaagtcaccgagagatcccttggactaaatcctctgagatcagagcctgcaatttgcttttccggtccctctggacaactttctgctcaacctggggagggcatgggtgccaggggcatctcccatgcactgggcggttatatttcccactttctggacaaaggcagtttctcgtcgataggctcctcaacgattgatgcggaccttgccgccatcgcaatttcccacggaggcttctcaggtatcactagtgcg

SEQ ID NO: 722 - DNA, 385 bp, Bos taurus
  Clone ID: 04-LIB188-014-Q1-E1-A11
acagagctaaggcacaacctggttgtttccaagagttaggggggcagcagtggagatgggaagcaagccctcttggacgctgggtcccccggtgggcttcttggctgggggctgggcctcagccccgagccccagcaaacccaaggctgtgttgaagaggttgatgggcgtggaaccatcggtgatgagggtggattttaggcccaggctctgcagcaattttacctgcatctccggccctgccacagccatgtctctgatggtgctgggccccagggcctctgtcatctgcttgaacttcttcacctccacctcagccagctgctgggccttgctcacttccagctccagctgggcccgggcatagagcagctccagctctcgt

SEQ ID NO: 723 - DNA, 376 bp, Bos taurus
  unsure (372): unsure at all n locations; Clone ID: 04-LIB188-014-Q1-E1-A7
acaccacctcaaagccccgcttccgcacgcgctccacaaatgcagagttggcaacctgctctttgctctcaccagtgatgtagtagatggacttctgcgtctccttcatgcgagacacatattctgagagagaagtcatctcgtctccagactgggacgtgtgatagcgcagcagctcagaaaggcgtcgccggttagtggagtcctcatggattccaagcttcaggtttttagagaacgcctcatagaattcttatagttctccttgtcttctgctagctcagagaagagctcaaggcacttcttaacaatgttcttacgaataaccttcaaaattttgctctgctggagcatttctcgggagatgttcangggg

SEQ ID NO: 724 - DNA, 378 bp, Bos taurus
  Clone ID: 04-LIB188-015-Q1-E1-A7
acggaacaaatttaaaaatacagaataaaatagctttatctctactattattcacaacatctggtccaaatattacatattaaaatacttaaacgtttaatgaaggtatgttagaaaaacaatatgaaaattctttttaaaaacgccataaaagaattagacataaaaaacaaccccaccccaaataccctcaatatgcaaaataaaaataaaaaccaaacaaaatcccagaaaggtatatagccaaagtcagtcacaaaaacttaaggaaaatataggcatccctactgttttaagaacagtcagaaactgactaacatgacaaaggttgctatgaatgaacaaaaagtgttttaacttgaccgtcagtaagatggt

SEQ ID NO: 725 - DNA, 429 bp, Bos taurus
  Clone ID: 04-LIB188-016-Q1-E1-A11
ggataccaaaagaacttcctcctgatactgcgctgctggacctgcaaaacaacaaaataactgagatcaaagatggagactttaagaacctgaagaaccttcatacactgattctcatcaacaacaaaattagcaaaatcagccctggggcatttgctcctttggtgaaattgggacgactttatctttccaagaatcaactgaaggaattgccagagaaaatgcccaaaactcttcaggagctgcgtgtccatgagaacgagatcaccaaagtgcgaaagtctgtgttcaatggattgaaccagatgatcgtcgtagaacttggcaccaacccgctgaagagctcaggcattgaaaatggagcctttcagggaatgaagaagctctcctacatccgcattgctgacacaaatataactaccatccctc

SEQ ID NO: 726 - DNA, 387 bp, Bos taurus
  Clone ID: 04-LIB188-016-Q1-E1-A7
cggatacaaaccccaagtgattatagaaaaaccaatgtggcagctacgatagagatgtccaaccccagggccacaggccgttgctctctgtttccccgctaatcccaatacttattccacagaaacatacaggcttggagaagttctagctacaacacggcaggtgggaggtggggaggcagaagggtgggggtagggatcacccccaagtccagtgtttcagagaatggaggagggaaaggccaaagctgagggcaattccaggaggagatacaagggaacccccttctccctttcttgtcctcctcacttcccaaattctcagccagtggggtccaatgtgtgacggaaagagagaggctgggggcagcagccttctctccaggt

SEQ ID NO: 727 - DNA, 426 bp, Bos taurus
  Clone ID: 04-LIB188-017-Q1-E1-A7
gccatggcggcgggatactggtctatggcctgttaggaaccaggccacacagcaggagattaaaagacagcaaacaaggaaagattcatctatatttatatccactccccattgcttgcattacaacctgagtttcacctcccgccctctctgtggaaaaactgtttcccatgaaatctgtccctggtgtcaaaaaggttggggacagctgttttacaacacagtgtgaacactcacttcagtctactgtagaacatctaaaggaacccccctcttctggcaggaaggacatctcagctgaaaacctacaaatggggtcctgggcttgtcagcacccaacatgcaggtctcccatctgccccacagcattcctggaaaagtgctacattccacagaaaccccacatcactgcagaggtggccactc

SEQ ID NO: 728 - DNA, 410 bp, Bos taurus
  Clone ID: 04-LIB188-018-Q1-E1-A11
gatactgacgtcactgtatgaggaagccgtgaaggaagataataccatccactggacacgacctcagaaacccagggtgctcacggaggacatttaccaacccagggctccgtctgcggaggtggagatgacggcctacgtgatccttgctcacgtcacggcccagccggccccgaacccagaggacctcaaacgtgccacgagcatcgtgaagtggatctcaaagcagcagaattgccaggggggcttctcctccacccaggacacagtggtagctctccacgccttgtccagatacggagcagccactttcaccagcgctaggaaggctgcacaggtgaccatccagtcttcagggacattttccacaaaattccaagtggaaaacagcaaccgcctgttactacagc

SEQ ID NO: 729 - DNA, 438 bp, Bos taurus
  Clone ID: 04-LIB188-018-Q1-E1-A7
gatactttttaatttgaaagatttgtcaaactcttcacaccgtggcaagagtttgcatgattaataagaagcagctttttcatgaaatgcttggaggtgaacgagttctcagcctgtgagatccgaccatcccattgattttgaaatttcttttgattaatagaaagaaaaagtggggaggggagaagaggaggaacatgctagcgactgaaagatctctggtgacagccatccagatgtgaaaaaagaaaacagaaaacccaaaagaaaaccaatttgccacctgccctttttctgttttaccacgttctgctcctcgctcttgattttggtctttctggttgaaacagcctccctgtcctgcatctcctaaaggtagtttggaggggagcagccctgcaggacatggtgattcacctctcagaggtgtgggggatt

SEQ ID NO: 730 - DNA, 321 bp, Bos taurus
  Clone ID: 04-LIB188-019-Q1-E1-A7
acgaggccatggcggagaagaaccgccgggatgccgaggcctggttctttagcaagacagaggagctgaataaggaggtggcctccaacacagagatgatccagaccagcaagacggagatcacagacctgagacgcacgatacaggggctggagattgagctgcagtcccagctcagcatgaaagccgggctggagagcacgctggcagagacagagtgccgctatgctgcgcagctgcagcagatccagggtctcatcagcagcattgaggcccagctgagtgagctccgtagtgagatggagtgccagaaccaggagt

SEQ ID NO: 731 - DNA, 414 bp, Bos taurus
  Clone ID: 04-LIB188-020-Q1-E1-A11
gccatgggcgcgggataccgggaggcgctggataagggtgatgttacagctcagatagctctgcagcctgcgttgaagttcaacggtgggggccatatcaatcacagcatcttctggacaaatctgagccctaacggtggtggagaaccccaaggggaattgctggaagccatcaaacgtgactttggttcctttgccaaatttaaggaaaagttgactgctgtatctgttggtgtccaaggctccggttggggttggctcggcttcaataaggagcagggacgcttacagattgctgcttgttctaaccaggatcccctgcaaggaacaacaggtcttatccccctgctggggattgacgtgtgggagcatgcttattaccttcagtataaaaatgtcaggcccgattacctg

SEQ ID NO: 732 - DNA, 290 bp, Bos taurus
  Clone ID: 04-LIB188-021-Q1-E1-A7
ggatacatatgtacctcgaactttcggccaaggaaccaaggtagagatcaaaaggtctgatgctgagccatccgtcttcctcttcaaaccatctgatgagcagctgaagaccggaactgtctctgtcgtgtgcttggtgaatgatttctaccccaaagatatcaatgtcaagtggaaagtggatggggttactcagagcagcagcaacttccaaaacagtttcacagaccaggacagcaagaaaagcacctacagcctcagcagcatcctgacactgcccagctcagagt

SEQ ID NO: 733 - DNA, 275 bp, Bos taurus
  Clone ID: 04-LIB188-022-Q1-E1-A7
gggaaacttctccaaagagttgggcacacacttgtccaggccctggtcatcgccagcacacaaggcacagagtctggatttcgggtcagccccaggggcacagttctgactaaagaattcatcaaatgcgcaggagcctgtctggttgacgatcaggcccatggggatgttccagcctgcagtcctgtccacggcggtgtggtacgacttcttgtctttcagagaattccatgtgagcccctcatttgctttcttgaaaactgccacggcaaggt

SEQ ID NO: 734 - DNA, 359 bp, Bos taurus
  Clone ID: 04-LIB188-023-Q1-E1-A11
gatactaaaagaaattcctcctgagacagcactgctggatgtggcacacaactaagttcctgatatcatcaatggaaacattcagaacctaatgaatctccatacacagattcacaccaccacaataataatcaaactcagctgtggggccaatgctcctttggcaaaatttgaaggaactgatgatgccaagactgacatgaatgaattagtctttagtatgtgcaatgttcatcacgcccgtcctatgaatgagaacgacatcatgaggatgaggcaatctgtgttcaatggaatgtggcacatggtcatcggagttgttgctagcaagccgatgaagagctcatgcatctgtaatg

SEQ ID NO: 735 - DNA, 454 bp, Bos taurus
  unsure (440): unsure at all n locations; Clone ID: 04-LIB188-023-Q1-E1-A7
atacagacacatacagatgcagctgcagaaagaggggtccagtgatctgaagtcacatagcgggatgcagcattactcagtccccacaaggcagctgtctcaaactttaggaaccgtgagagacacatcagagccctggtcactgtcaccacttgcagcctgggtgtaggtctgtctttttttcacctgagcgcttcttcctccagatcacagctccagccaccacagctactacgaggagaaccaggccaacaatgatgcccatggtgaggaaggaggtctgaggaggttcccatctcagggtgaggggctcctgaagcccttcgtgctgcacatggcacgtgtatctctgctcctctccagaaggcaccaccagggccgcccacttctggaagtttccgtcccctgaaggcctggtctccacaagctccatgtcctgngtctggtcctctcc

SEQ ID NO: 736 - DNA, 436 bp, Bos taurus
  Clone ID: 04-LIB188-024-Q1-E1-A7
ccatggcggccggatactcctggtactgccgctcggtgtcagctcgcacgtcactcagctgggcttcgataccactgatcagcgcctggatctgcgccagctgggctccgaagcgagcctccgtttccgccagtgtgccttccagggcggctttcatgctgagctgagactgcagctcgatctccaaaccctggagggtgcgccgcaggtcggtgacctccgtcttgctgatctgcagctgctccgtgtggccagcgacctccctgttcagctcctcggtctggctgatgaaccaggcctcagcatccttccggttcttctcagcaatgagctcatattggcttctcatgtcactcaggatcttggctaggtcgatgcccggagcataatccacctccacactgacctggccatccagctggcccttcagcacact

SEQ ID NO: 737 - DNA, 391 bp, Bos taurus
  Clone ID: 04-LIB188-025-Q1-E1-A7
ggatacactttagtgtcggtgatagagatgatcgttgtcgtcatcttttttgttgtctacatgtgtgacctgcagaccatggatgaacatcatcaactggccttggcatgttttcttccgaacgcttgttacggccattctctaactgatcagctccattgtggcgctcgttgaaagaggatccgggtccaatctcgctgctcgggcgctgggcctaggcacagcaagcctctttggctaggatgcctacattagcatctccgtgctgcagcagagacatgcatcagcctctactgatccagcagatcgcccggtgtaggtcaactctcttcatattctctcaacagtctgcagataatacctctattgaactaattccgtcccatcccta

SEQ ID NO: 738 - DNA, 417 bp, Bos taurus
  Clone ID: 04-LIB188-026-Q1-E1-A11
acttataatcggccagcccaccgggcactttgacaagcttgttgttgttcaaatgaagttccctcaaatgaggagtgttggccaaaaaacccattgtcaaccgcagagatgctgttgaaactcagtcccaacttagccaaattattcagtcctttcaggctagctgcatcaactttggtgattttgttgccatcgagatgtaattcagtaagggaaggaggaagaccttgagggatggtagttatatttgtgtcagcaatgcggatgtaggagagcttcttcattccctgaaaggctccattttcaatgcctgagctcttcagcgggttggtgccaagttctacgacgatcatctggttcaatccattgaacacagactttcgcactttggtgatctcgttctcatggacacgcagc

SEQ ID NO: 739 - DNA, 405 bp, Bos taurus
  Clone ID: 04-LIB188-026-Q1-E1-A7
actttacctttgagggtgcatgcagaacttgtggggtccctggtcccgccttccgcagcacctcctagagagtgccagggtcccctcccccttcacacctggggacaaagttccaggaagtttctcacttgagttaggaggtgaactcaagttcatcatctccacctcagctccaggaaaccacccccatcacgtggcttctggaaaatgcactcagaattgatccagagaataatcacaggtagagaaagtagagggagcagtaatttaaactcacccttgaccctgtgccccggcagggggtgaggtctgtccggatcccctgctctgttccttccacgcccacctccctgctggcgctgccagtgcttccaggagggctgtccttcccaagtgggacttttc

SEQ ID NO: 740 - DNA, 389 bp, Bos taurus
  Clone ID: 04-LIB188-027-Q1-E1-A11
accgtgacttgtttttgacactctcctggtcgtcatacgccacccactggttgcccttggtggcataggggacctgctggtcacggaatctgtgggtggtggctccgtggaggaagtcacagatctcataataggcaaggatccctttctccttggtgaactggcctggaattcctggccctgagatgggggctcccacatctgtcttggaagaggccagagtgtagctcctcccaaaagtggggatacccatcaccagcttattggctggagcccccagcctcagcatgtagctcacagcgtagtcagcgttactgaatctgtcagaacttgcatcttcctggcctcgaaacagggggctgtggtgtccgactgtctggcgccaggct

SEQ ID NO: 741 - DNA, 440 bp, Bos taurus
  Clone ID: 04-LIB188-027-Q1-E1-A7
atgggcgcgggatactttgtaatttttcagtctgagaagctgttccagataacccaggtaacgctcagagggcacatcttccttttgaatgtgcttctcaacactattgggaacaatttcctcacttgacgaaatgctttcagcttccatttgcttaatatcttccatggcttgatcctcagttgattcactcccaatatccttgctcagttcattgaccttctcctttccaaacacttctggaaaaggtgccacaaaaaacctgagtaaattttcattgaggacttcttgagggagtccttggtgcttgataggatgtttaggcctggcaagagcaacagccacaagacaggtaaggatgagaagtttcatggttgtcaagatcttgaacccaagactgggaagaaacagcaagctggggtgaactgcccgggcggcgc

SEQ ID NO: 742 - DNA, 418 bp, Bos taurus
  unsure (395): unsure at all n locations; Clone ID: 04-LIB2809-001-Q1-E1-A11
acagcctccagcagaggcccgaggagcctctgcaggaaggtgatgaactgctggtgctccttggactggctcaccttcaggtagcaatctcgttgctcctcaccaaaatcgctgtcttcatcttcttcatcacttctccaagacaaaggttccggaaccttcttgtccaactgctgctcggaagaacaagaactgatatcttcctgattatcttgctcggcaactataaaattgcaatactggataaaccggcccactgtttcatggcaaatttggtaaaaggtctggcaggggagagagatggtgccttcattggagagcagatagcacacgctggcagccttgtgcaccagctgctcctggctgaccaagctgggagacgcgggtcctcctgngcccctcttcttcagaactgcat

SEQ ID NO: 743 - DNA, 404 bp, Bos taurus
  Clone ID: 04-LIB2809-001-Q1-E1-A7
acagcagaaaggcctgaatgggcatatctctctggggatagggcactgctttctggggaacaggcaggactttggactgagaaagggacagcacggactgaggaggaaacatgacagttggaggaagaggctggtgaggctggtgcatccaagactggagcagaggcagaggaaggtgcagattttcaacatcagtgagagtcaggctctggctttcagtaaagggctcaactggatatttagggaagggcatttctttgtgcttaggagccatagcctccttcactttggagactcccattacttcaggctgaaggaaaggcggcaccaccacaggggtttgagtaagaggagggatgttttgtgggaggctgttatggatgggcccagggaacggatagact

SEQ ID NO: 744 - DNA, 421 bp, Bos taurus
  unsure (309): unsure at all n locations; Clone ID: 04-LIB2809-002-Q1-E1-A7
acagcagaaaggcctgaatgggcatatctctctggggatagggcactgctttctggggaacaggcaggactttggactgagaaagggacagcacggactgaggaggaaacatgacagttggaggaagaggctggtgaggctggtgcatccaagactggagcagaggcagaggaaggtgcagattttcaacatcagtgagagtcaggctctggctttcagtaaagggctcaactggatatttagggaagggcatttctttgtgcttaggagccatagcctccttcactttggagactcccattacttcangctgaaggaaaggcggcaccaccacaggggtttgagtaagaagagggatgttttgtgggaggctgttatggatgggcccagggaagggatagactagagactgtgtctgggc

SEQ ID NO: 745 - DNA, 402 bp, Bos taurus
  Clone ID: 04-LIB2809-004-Q1-E1-A11
catggccgggcgatcgaggtacaccaagctggtgggacaggatgtggccaagtttatgaactggatggcggatgaatttaactatcccctgggcaatgtgcatctcttgggatacagccttggggcccatgctgctggtattgcaggaagtctgaccaataagaaggtcaacaggataaccggcttagatccagctggacctaacttcgagtatgcagaagctccaagtcgcctttctcctgatgatgcggattttgtagacgttttacacacattcaccagggggtcaccaggtcgaagtatcggaatccagaaaccagtagggcatgtggacatttaccctaacggaggcactttccaaccaggatgtaacattggggaagctctccgtgtgattgcaga

SEQ ID NO: 746 - DNA, 306 bp, Bos taurus
  Clone ID: 04-LIB2809-004-Q1-E1-A7
atacccatgcataccatggtctcggcaacgctgtaagttgatagcagccaggtcaaagccgtggatcttgtgagtgggctggaaaagcttgttgcacagctcactcgtcaccattttagcctgattcatcagtttggacttcttgggcagcagacgccgcaccagagggtcaattccaccgtctttgattatcctccaggtgttgaagaagagggtgtgtagggggagctctgcttccggaccccatggctggtaattctcatccaggcgggacacagtggacggaacctccatgtggccaaagcg

SEQ ID NO: 747 - DNA, 452 bp, Bos taurus
  Clone ID: 04-LIB2809-005-Q1-E1-A7
catggccgccggatactcttgccaagaaaatcccatggatgaaggagcctggtaggctgtagcccatggagtcactaagagatggacacggctgagcgacttccctttcacttttcactttcatgcattggagaaggaaatggcaacccactccagtgttcttgcctggagaatcccagggacagtggagcctggtgggcttccgtctgtggggttgcacagagtcggacatgactgaagcgacttagcagcagcagcaggcttggaaatcaagcagtcctattttgaattagtatgttttagtcaaaggtatgggattaatgattagtatcggttaggaatttctgtaatgtcctccaatgccaagtgaccactaacatcctatttcctattacaatgattccttgatgagaagtagaaggcataaagaaagttgccagctataaaattaa

SEQ ID NO: 748 - DNA, 404 bp, Bos taurus
  Clone ID: 04-LIB2809-006-Q1-E1-A11
cgtatgtgtatgatacataaggttatgtattaattgtagccgcgttctaacgacaatatgtacaagcctaattgtgtagcatctggcttactgaagcagaccctatcatctctctcgtaaactgccgtcagagtcggtttggttggacgaaccttctgagtttctggtaacgccgtcccgcacccggaaatggtcagcgaaccaatcagcagggtcatcgctagccagatcctctacgccggacgcatcgtggccggcatcaccggcgccacaggtgcggttgctggcgcctatatcgccgacatcaccgatggggaagatcgggctcgccacttcgggctcatgagcgcttgtttcggcgttggtatggtggcaggcccgtggccgggggactgttgggcgcc

SEQ ID NO: 749 - DNA, 419 bp, Bos taurus
  Clone ID: 04-LIB2809-006-Q1-E1-A7
acctggtaagattgtggaaagcctttcaagcagtgaggaatctattacacgcatcaataagaaaattgagaagtttcagagtgaggaacagcagcaaacagaggatgaactccaggataaaatccacccctttgcccagacacagtctctagtctatcccttccctgggcccatccctaacagcctcccacaaaacatccctcctcttactcaaacccctgtggtggtgccgcctttccttcagcctgaagtaatgggagtctccaaagtgaaggaggctatggctcctaagcacaaagaaatgcccttccctaaatatccagttgagccctttactgaaagccagagcctgactctcactgatgttgaaaatctgcaccttcctctgcctctgctccagtcttggatgcaccaacctc

SEQ ID NO: 750 - DNA, 393 bp, Bos taurus
  Clone ID: 04-LIB2809-008-Q1-E1-A7
gatacagcagaaaggcctgaatgggcatatctctctggggatagggcactgctttctggggaacaggcaggactttggactgagaaagggacagcacggactgaggaggaaacatgacagttggaggaagaggctggtgaggctggtgcatccaagactggagcaaaggcagaggaaggtgcagattttcaacatcagtgagagtcaggctctggctttcagtaaagggctcaactggagatttagggaagggcatttcgttgtgcttaggagccataggctccttcactttggagactcccattacttcaggctgaaggaaaggcggcaccaccacaggggtttgagtaagacgagggatgttttgtgggaggctgttagggatgggcccag

SEQ ID NO: 751 - DNA, 377 bp, Bos taurus
  Clone ID: 04-LIB2809-009-Q1-E1-A11
gggataccccagatggaaattgttcccaatagtgctgaggaacgacttcacagtatgaaagagggaatccatgcccaacagaaagaacctatgataggagtgaatcaggaactggcctacttctaccctgagcttttcagacaattctaccagctggatgcctatccatctggtgcctggtattacgttccactaggcacacaatacactgatgccccatcattctctgacatccctaatcccattggctctgagaacagtgaaaagactactataccactgtggtgaagagtcaagtgaattctgagggactccacagttatggtctttgatggttctgaaaattccatgctctacatgtcttttcatctatcatg

SEQ ID NO: 752 - DNA, 440 bp, Bos taurus
  Clone ID: 04-LIB2809-009-Q1-E1-A7
gggatacaactgaagtgactaatcactgcacagaaagcaaatctgttttcaattttcttagcaattctgatataatattcactgtaatcaaaactgcctcagttcagttcagttcagtcactcagtcatgtccaactctttgtgaccccctggaccgcaacacaccatgactccctgtccatgaccaacacccgaagcttgctcaagctcatgtccattcagtgatgccatccaaccatctcatcctcttcctcttctcctctcctgccttcaatctttcccagaatcagatcttttccaatgcatcagttcttcaaagcaggtggccaaagtattggagtttcagcagaggtctttccaggtaatattcaggggtgagttcttttaggattgagtgaatacgtatttagggctgactgcattagaatatattttaagtt

SEQ ID NO: 753 - DNA, 380 bp, Bos taurus
  Clone ID: 04-LIB2809-010-Q1-E1-A11
atgggcccgggatacccagatggaaattgttcccaatagtgctgaggaacgacttcacagtatgaaagagggaatccatgcccaacagaaagaacctatgataggagtgaatcaggaactggcctacttctaccctgagcttttcagacaattctaccagctggatgcctatccatctggtgcctggtattacgttccactaggcacacaatacactgatgccccatcattctctgacatccctaatcccattggctctgagaacagtgaaaagactactatgccactgtggtgaagagtcaagtgaattctgagggactccacagttatggtctttgatggttctgaaaattccatgctctacatgtcttttcatctat

SEQ ID NO: 754 - DNA, 428 bp, Bos taurus
  Clone ID: 04-LIB2809-011-Q1-E1-A7
tccctaccgccatgggcccgggatacagcagaaaggcctgaatgggcatatctctctggggatagggcactgctttctggggaacaggcaggactttggactgagaaagggacagcacggactgaggaggaaacatgacagttggaggaagaggctggtgaggctggtgcatccaagactggagcagaggcagaggaaggtgcagattttcaacatcagtgagagtcaggctctggctttcagtaaagggctcaactggatatttagggaagggcatttctttgtgcttaggagccatagcctccttcactttggagactcccattacttcaggctgaaggaaaggcggcaccaccacaggggtttgagtaagaggagggatgttttgtgggaggctgttagggatgggcccagggaagggatagact

SEQ ID NO: 755 - DNA, 339 bp, Bos taurus
  Clone ID: 04-LIB2809-012-Q1-E1-A11
gccatggcggcgggatacagacataatacattggtattcttgacaaaattacaatctgctggaggcttttgcggaaaaaaagcccttgcagcattctaaacatcagtcaactcttactaagaaattcaaaaatgttttacaggccaaaacgggaatgaggttattagtaaaatgcctcaacagagttggcataatatactggatttgagagttactggaacttggatacataaaaagagggtggacgttgggtcatgcttacaatggtctcacgttcaaataaactactgtgacaaaacaccacttcagaagtcacacgctggaccagggactcttctc

SEQ ID NO: 756 - DNA, 347 bp, Bos taurus
  Clone ID: 04-LIB2809-012-Q1-E1-A7
gatactccatcaatgacgcttctttggtttccaagatgtggtctgtcaggatccagggcatggacatctcaatagggaattgaattcttctgcccattgtcaactccagaaagaactctcggaaccacaactgcgaaaggtcacagcactgctggagcgtctcttaagggattcaaaagacaccacattaattttctgtaaccagaaaggactccacagggcgaggcaagggggcacgtgccaggctttcagccctgggccttggcgagtggacatgagtatgtgccttgcacacagtgtggccatagacaaagccacttggatgtgctgattctcattcaccaaca

SEQ ID NO: 757 - DNA, 434 bp, Bos taurus
  Clone ID: 04-LIB2809-014-Q1-E1-A11
acctggtgagattgtggaaggcctttcaagcagtgaggaatctagtacacgcatcaatgagaaaattgagaagtttcagagtgaggaacagcatcaaacagaggatgaactccaggataaaatccagccctttgcccagacacagtctctagtccatcccttccctgggcccaaccctaacagcctcccaaaaaacatccctcctccgaatcaaaaccctgtggtggtgccgcctttccgtcaacctgaagtaatgggaatccccaaagttaaggggggcatgggtccaaagcaataagaaatggccttccctaaaattccagttgagccctttaatgaaaaccaagacctgactctcactgatgttgaaaatctgcaccttcatctgcctctgcaccagtcttggatgcaccagcctcaccagcctcttcctc

SEQ ID NO: 758 - DNA, 303 bp, Bos taurus
  Clone ID: 04-LIB2809-015-Q1-E1-A11
tacctggtacaattgtgaggagcctttcatgcactgaggaatctattacacgcatcactaagaaaattgggaagtttcatattgaggcataacagctcacagaggatgacctccaggataaaatccacccctttgcccagacacagtctccatgctatcccttccctgggcccagccccaacagcctcccacatcatatccctcctcatactcaaacccctgtgggggtgccgcctttccttcagcctgaggtaatgggagtctccatagtgaaggatgctatggctcctatgcacagagaaa

SEQ ID NO: 759 - DNA, 456 bp, Bos taurus
  Clone ID: 04-LIB2809-015-Q1-E1-A7
gccatgggcccgggatacctggtgagattgtggaaagcctttcaagcagtgaggtaagatagtgttcattcagaggcaatttcccaaatttagagcaataaaatgctgtattatctttttgggttgccattgccatctccaaagatccttataggagggtatgtatttcttataattcattagaagcctaaacataaccagggaactaagaatgattaacaagttcatgcgtggttattattatatattttcaatgactattattcttttagaaccagatgaaaatattagagatcatttgttgtcctaaggagagaacaggatgattgagagacatgtatgcatgcaaagttacttcagccctttccaactctgtatggccctatggactgtaacctgccaggttcctctgtctatgggattctccaggcaagaatacaggagtgggttgtcatc

SEQ ID NO: 760 - DNA, 411 bp, Bos taurus
  Clone ID: 04-LIB2809-018-Q1-E1-A11
cgccatggtcgagggatacagcaaaaaggcctgaatgggcatatctctctggggatagggcactgctttctggggaacaggcaggactttggacggagaaagggacagcacggactgaggaggaaacatgacagttggaggaagaggctggtgaggctggtgcatccaagactggagcagaggcagaggaaggtgcagattttcaagctttttttttttttttttttttttttttaatagtgccttaaaatgtaatttattgaaaagaagaaagacaaaatctcagttaatgcacacaattatttgatatgatggcacttacaggagaagtgattcaaaggcttttaaaacattttccatacagaaatttaatgaagactttaattccctttgactcaatggcctttaaac

SEQ ID NO: 761 - DNA, 420 bp, Bos taurus
  Clone ID: 04-LIB2809-020-Q1-E1-A7
gggatactttgaattttttcagtctgagaagctgttccagataacccaggtaacgctcagagggcacatcttccttttgaatgtgcttctgctcaacactattgggaacaatttcctcacttgacgaaatgctttcagcttccatttgcttaatatcttccatggcttgatcctcagttgattcactcccaatatccttgctcagttcattgaccttctcctttccaaacacttctggaaaaggtgccacaaaaaacctgagtaaattttcattgaggacttcttgagggagtccttggtgcttcataggatgtttaggcctggcaagagcaacagccacaatacaggtaaggatgagaagtttcatgggtgtcaagatcttgaacccaggactgggaagaggcagcaagctggacaggc

SEQ ID NO: 762 - DNA, 280 bp, Bos taurus
  Clone ID: 04-LIB2809-021-Q1-E1-A11
acggctatgagcccagtctggccagccgtcgccggaacctcagcagcccgctgggcctcatggctgtcaaccaagaagcctgggaccacgggctggcctacctgccctttaacaacaagaagccgagcccctgtgagttcatcaacaccaccgcccgcgtgccctgtttcctgacgggagattttcgagcctcagagcagattctgctggccactgcccacaccctccttctccgggagcacaaccggctggccagagaactaaagaaactcaaacctca

SEQ ID NO: 763 - DNA, 145 bp, Bos taurus
  Clone ID: 04-LIB2809-022-Q1-E1-A7
actgttgcattaaaagcgccatcagggacatcgagcaagggtcaaaagtccagagcgccattcatgcacccctggagattagtccttacatgtccattgtcactacagggcccagggctcagagatgagttagcttcaagggggt

SEQ ID NO: 764 - DNA, 271 bp, Bos taurus
  Clone ID: 04-LIB2809-023-Q1-E1-A7
ggcccgggatacatggaaagattgtggaaagcctttcaagcagtgaggaatctattacacgcatcaataagaaaattgagaagtttcagagtgaggaacagcagcaaacagaggatggactccaggataaaatccacccctttgcccagacacagtcccaagccaatcccttccctgggcccatccctaaaagcctccaacaaaacatccctcctcttactcaaaccccggtggtggtgccgccttcccttcagcctgaagtattgggagt

SEQ ID NO: 765 - DNA, 376 bp, Bos taurus
  Clone ID: 04-LIB2809-026-Q1-E1-A11
gggaaagtggtaacgcccgaggtacaacataaaggcctgaatgggcatatctctctggggatagggcactgctttctggcgaacatgcaagacattgtacttacacatctaattgtgtcacatctggcgaatcatcacattttatcgactcggctgttgacgctggtgcttcgactcactttagtatgggcaaaccctcggactttctgtcaacaccatcgctcacccggaaatggtcagcgaaccaatcagcagggtcatcgctagccatatcctctacgccggactcatcgtggccggcatcaccggcgccacaagtgcggttgctggcgcctatatcgccgacatcacccatggggaagatcgggctcgccac

SEQ ID NO: 766 - DNA, 372 bp, Bos taurus
  Clone ID: 04-LIB2809-027-Q1-E1-A7
gggataaaagcaattttttttttttttttttttttttccttaaaatgtaatttattgaaaagaagaaagacaaaatctcagttaatgcacacaattatttgatatgatggcacttacaggagaagtgattcaaaggcttttaaaacattttccatacagaaatttaatgaagactttaattccctttgactcagtggcctttataccagcatgatactactggaatttaggtaacaagctgttaggacaatttcacttaaggatgttacactatctaaaatacagtagagaactcaagaagaaagagtgccttcaatttgagattgccctattctaaaacagcagttgaagcctttggatagaatggtttga

SEQ ID NO: 767 - DNA, 424 bp, Bos taurus
  Clone ID: 04-LIB2809-028-Q1-E1-A11
ggataccagccccatcacacgcttcccgctggcatctcggccagagaactccatgcctagcaggcagttccgagaggcccaatttcctgggatggcgtcgggggacagcttgcccgtggccagcatgatgtcgcggaagttgagggaggcataatagatggtgcagagctggaagccaggggccgtgggctggctgtggcgcagaggggagcagacccagcggatggaagacaggtcccctcgggtgaggacatttatgaaggcatgctctgtctgctcctcgggcttgtcttgttccagtgggaagtggcggaacgctccccaggccccatcacggtagacattcatcaccaggtcactctggagcaccttctgcagctccaaggacttcgggtctgtctcaaggatgggggacgtgctgttg

SEQ ID NO: 768 - DNA, 406 bp, Bos taurus
  Clone ID: 04-LIB2809-028-Q1-E1-A7
acagcaaaaaggcctgaatgggcatatctctctggggatagggcactgctttctggggaacaggcaggactttggactgagaaagggacagcacggactgaggaggaaacatgacagttggaggaagaggctggtgaggctggtgcatccaagactggagcagaggcgcggaaggtgcagattttcaacacctgcccgggcggccgcccgggcaggtacttgtcttccttttaggaaacgaggacacagtaaacatgaagttcttcatctttacctgccttttggctgttgcccttgcaaagaatacgatggaacatgtctcctccagtgcagactcaacaatctccaagaaaccatataggcaggaaaggattatggccataattcccagcaaggaaaaccttgg

SEQ ID NO: 769 - DNA, 379 bp, Bos taurus
  Clone ID: 04-LIB2809-029-Q1-E1-A11
acgggaaaattgaagtaattgaaatcatgactgaccgaggcagtggcaaaaagagaggctttgcttttgtaacctttgatgaccatgactccgtagacaagattgtcattcagaaataccacactgtgaatggccacaactgtgaagtgagaaaagccctgtctaagcaagagatggctagtgcttcatccagccagagaggtcgaagtggttctggaaactttggtggcggtcgtggaggtggttttggtgggaatgacaactttggtcgtggaggaaacttcagtggtcgaggtggctttggtggcagccgtggtggtggcggatatggtggcagtggggatggatataatggatttggtaatgacggaagcaattt

SEQ ID NO: 770 - DNA, 384 bp, Bos taurus
  unsure (292),(352): unsure at all n locations; Clone ID: 04-LIB2809-029-Q1-E1-A7
gccatgggcccgggatacagcagaaaggcctgaatgggcatatctctctggggatagggcactgctttctggggaacaggcaggactttggactgagaaagggacagcacggactgaggaggaaacatgacagttggaggaagaggctggtgaggctggtgcatccaagactggagcagaggcagaggaaggtgcagattttcaacatcagtgagagtcaggctctggctttcagtaaagggctcaactggatatttagggaagggcatttctttgtgcttaggagccatancctccttcactttggagactcccattacttcaggctgaaggaaaggcggcaccaccacangggtttgagtaagaggagggatgttttggtgg

SEQ ID NO: 771 - DNA, 361 bp, Bos taurus
  Clone ID: 04-LIB2809-030-Q1-E1-A7
acatcaaaatctggaatagctgcccatatcaatgtgactccaccaactccgtggacaaaaatggggtgtcaccaaaatgccggtgcacaattcacatgtacatgttggctgggtatcatgagtaagtttccatggaatgtaatgtatccctccgcaaattcagtccggataattatcaaccgtctagctgatgcattcaatccagcactcaaagagtggcaaatgatttactgagagtaccaaatatgcgaggcaccaggcgcacacgtgtcaagtcgcatagtgtcacgagtggaatactcagcactgcagggatctcgatgatgcgttacctgaatcaccagtcaggcctcatgactgg

SEQ ID NO: 772 - DNA, 246 bp, Bos taurus
  Clone ID: 04-LIB2809-031-Q1-E1-A11
actttttgtagtcggtgtccagcacaaggactttgttctcattcaaggcatcgatcttgaacaccgcagggatcttgggtttttctgcaatgatcttcttctgagcacactcaccgttctcccatttctgcagcaggatctccaggtcgccctcaggggtgggcttcagctcctcgacatacactctcaggggggcactctgggcatccagcacggagatgtcgctggacgccatggccaaggagt

SEQ ID NO: 773 - DNA, 361 bp, Bos taurus
  Clone ID: 04-LIB2809-032-Q1-E1-A7
gggataaaactagatttggagttgatattaatagaaattattccaaaattattcttaggtcacaaataactactatcccacataaaaagggaaaaatcccacccaattaaggaaaaggtatcctgtgtatgtttccatggcaatgagtttatgcattctcagattttgtccggctagttatccaccctttatctgatgcatttactccatctctcagagagaaccatatagattcctgacggcatccaggacacgtggctcgtggtggacacacttcatggtggatactgctactataaaaatactcagaacttaatacaattccaagatgccttataacaaacattagtcatgcctcaaa

SEQ ID NO: 774 - DNA, 347 bp, Bos taurus
  Clone ID: 04-LIB3057-003-Q1-K1-A11
cgaatggtttagcaccaggcgccccacgaacgtgcggtgcgtgacgggcgagggcgcggccgcctttccggccgcgccccgtgtcccgggacgaagggctctccgcaccggaccccggtcccgacgcgcggcgggggcgcgccgcgccgcgccccggcggacgcgggcgacggcccgccggcggtgacggcctacgaccggctatcctaggccaaccgaggctcccgcggcgctgccgcatcgttccgcctgggcgggattctgacttagaggccttcactcataatcccacagatggtagcttattcccattggctccttagccaagcacatacaccaaatgtctg

SEQ ID NO: 775 - DNA, 352 bp, Bos taurus
  Clone ID: 04-LIB3057-003-Q1-K1-A7
aaattccaaacatgggatttttctagctagcttttgttgttgtctagaatactaagtctgtagtcaaaaatgtaaatttgtattatttcattcattttaaatttgtgaaattgctttataactaggcatatagtcatttggtttggtatataatctacatatcattcagaagctttttttccctgcagttttgggatgcaatattttatataagtcaattaaatcaagttggttggttggaatcatcatgactaaaagtgaagttgctcagtcatgtccgactctttgcgaccccatggactgtagcttaccaggcttctcagtccatgggattttccatgcaagaagtact

SEQ ID NO: 776 - DNA, 214 bp, Bos taurus
  Clone ID: 04-LIB3057-004-Q1-K1-A7
cccgctggacccacgcgtccgcagcaacttgcctgaaagagaccactctacctgtacgaaccctttgacagctgcaagggcgccttgaggaggatgactgatacactatgttccacgcgctttgcatctgctctctgtgaactctcaccattgaccataagcgctatctcttcatccataaactgggggaagctcggttcaactttgtggacct

SEQ ID NO: 777 - DNA, 386 bp, Bos taurus
  Clone ID: 04-LIB3057-005-Q1-K1-A11
caaaaggcctcaggctaacagcgtggaaagtgaacagaaagaggactgggacagagatgtggctcgtaaacttggcagcacaacagttggatcaaaaagtgaaatgactgcaagccctcttgtagggccagaaagaaaaaagtcttcaactattccaagtaacaatgtgtatcctggaggtagcatggcaagaaggaatacgtacgtctgtgaaagaaccacagatcgatacacagcgttgcaaaatgggaaagacagcagccttacagagatgtccgcgagcaccatgtcctctgcaggctccgccgtggcctccgctgtgccctcagcacgaccccgccaccagaagtccatgtccgcttccggccatcctattaaagtcacac

SEQ ID NO: 778 - DNA, 410 bp, Bos taurus
  unsure (87): unsure at all n locations; Clone ID: 04-LIB3057-006-Q1-K1-A7
gtggccggaaatgttcaacgaatttgataaacggtatgcccagggcaaagggttcaggaccatggccctcaacagctgccatacctnctcccttcctacccctgaagataaagaacaagcccaacagacccaccatgaagtccttatgagcttgattcttgggttgctgcgctcctggaatgaccctctctatcacctagtcaccgaggtgcggggtatgaaaggagccccagatgctatcctatcgagggccatagagattgaggaagaaaacaaacgacttctggaaggcatggagatgatatttggccaggttattcctggagccaaagagactgagccctaccctgtgtggtcaggactcccgtccctgcaaactaaggatgaagatgcacgttattctgcttttt

SEQ ID NO: 779 - DNA, 412 bp, Bos taurus
  Clone ID: 04-LIB3057-007-Q1-K1-A7
cgggcgagggggcggccgcctttccggccgcgccccgtgtcccgggacgaagggcgctccgcaccggaccccggtcccgacgcgcggcgggggcgcgccgcgccgcgccccgggggacgcgggcgacggcccgccggcggggacggcgggggaccggctatccgaggccaaccgaggctcccgcggcgctgccgtatcgttccgcctgggcgggattctgacttagaggcgttcagtcataatcccacagatggtagcttcgccccattggctcctcagccaagcacatacaccaaatgtctgaacctgcggttcctctcgtactgagcaggattaccatggcaacaacacatcatcagtagggtaaaactaacctgtctcacgacggtctaaaccccacttaacgttccta

SEQ ID NO: 780 - DNA, 304 bp, Bos taurus
  Clone ID: 04-LIB3057-008-Q1-K1-A11
cggacgcgtgggccacccccgcggacgctacgccgcgacgagtaggagggccgctgcggtgagccttgaagcctagggcgcgggcccgggtggagccgccgcaggtgcagatcttggtggtagtagcaaatattcaaacgagaactttgaaggccgaagtggagaagggttccatgtgaacagcagttgaacatgggtcagtcggtcctgagagatgggcgagcgccgttccgaagggacgggcgatggcctgcgttgccctcagccgatcgaaagggagtcgggttcagatccccgaatccgg

SEQ ID NO: 781 - DNA, 296 bp, Bos taurus
  Clone ID: 04-LIB3057-008-Q1-K1-A7
agtgttttgttttccaccgataaacctaatccaaaagggaagaaggatatgacacacatggagggtccttcacattgcgcacgtaaattcaaggaattctaccacgactgtccatctcatctataaatgtatctctacctaacaccataacaatcaaaaagttctaaaaccgatgcttaccacatagtaaaattctccttccaatatgcctgactctttaacatactttatactttacattatcttcctatcaccatagacatctgcgtttataaattttataccacctcttacta

SEQ ID NO: 782 - DNA, 418 bp, Bos taurus
  Clone ID: 04-LIB3057-009-Q1-K1-A11
tggagaccaaacctgtgataacctgtctcaaaaccctcctcatcatctactccttcgtcttctggatcactggggtgatcctgctggccgttggagtctggggcaaacttactctgggcacctacatctcccttatcgccgagaactccacaaatgctccctatgtgctcatcggcactggcaccaccatcgtcgtgtttggcctgtttggatgctttgccacatgccgtggtagcccatggatgctgaaactgtacgccatgtttctgtccttggtgtttctggctgagctcgtggctggcatttcagggttcgtgtttcgtcatgagatcaaggacaccttcctgaggacttacacagacgccatgcagaattacaatggcaacgacgagaggagccgggcagtggaccacgtgca

SEQ ID NO: 783 - DNA, 292 bp, Bos taurus
  unsure (252),(255): unsure at all n locations; Clone ID: 04-LIB3057-009-Q1-K1-A7
gcagaaagggtcccgcctgctcctgctgctggtggtgtcaaatctactcttgtgccagggtgtggtctccacccccgtctgtcccaatgggcctggcaactgccaggtatcccttcgagacctgtttgaccgggcagtcatggtgtcccactacatccatgacctctcctcggaaatgttcaacgaatttgataaacggtatgcccagggcaaagggttcattaccatggccctcaacagctgccatacctnctnccttcctacccctgaagattaagaacaagcccaacag

SEQ ID NO: 784 - DNA, 446 bp, Bos taurus
  Clone ID: 04-LIB3057-010-Q1-K1-A7
ctgggagaagggggtcaaagcaaggatctttctcccatagaaagagagcactgaccccgggggcgatggactatttaagccctaactcagccaaccttacttatagcataagggagcatagtgtttgtgtagacaaagggggcgcttggccttatacctcgttagagaagagaaacagggtgtagtcagcatcttcttactcccttctccctgataacagctaccatgacaaccctgtggtttccaaggagctgaggatagagagaaactagttcatatgaaaaatagactggcctaaggagcagcagtcgctagtggctaacagtgtaaactgcgccagccctctggtatacacaggattgattactttttggatagcatgttttttacatgttgattagtatggtactttgtcctttaatatatcttacaaatggtgctttttt

SEQ ID NO: 785 - DNA, 446 bp, Bos taurus
  Clone ID: 04-LIB3057-012-Q1-K1-A11
ctttcttttccttaatgctttaaactatttgctaatggtcgttctactgggcttatgggggacagtggagccactcacaccactgcaattcctgttcacgatggctatgttcttcagcaaggcattgtgaagtcccctcttgctggagactttatcactatgcagtgcagggaactcttccaagaaatgaatatagaactgattcctccatatatgattgcatcaaaagaagctgttcgtgaagggtctccagcaaactggaaaagaaaagagaagctgccccaggttaccaggtcttggcacaattatatgtgtaactgtgttatccaggattttcaagcctcagtacttcaagtatcagattcaacttacgatgaacaagtagctgcacagatgccaactgttcattatgaattccccaatggctacaactgtgattttggagc

SEQ ID NO: 786 - DNA, 240 bp, Bos taurus
  Clone ID: 04-LIB3057-012-Q1-K1-A7
tcgagccaccgaaaccaaatacgaagcataagctggatgtgacatctgtggaagattttaaagcccttcaaaagtacgaaaaggagaaagttgaagagatgatccggcagatttaagaaactggtgctaacctagctatttgccagtggggcttttacgatgaagcgaatcatttacttcttcagaatgacctgccggcggttcgcttggtcggaagacctggaattgagttgatcggca

SEQ ID NO: 787 - DNA, 336 bp, Bos taurus
  Clone ID: 04-LIB3057-013-Q1-K1-A11
caaaatccctgcagtagacccgatgtggccatctcccagttaaatgcaaatgtgaccgattataatgtgatcggacactttccgtaatgcaaaataactcatttccaaaatactgctttggtattttggtaaaaacctgtagcaacttgttacactggggtgagaaagagaaatcaagagaaataaaaaagcagaggaatgggacctactgtagtccccaagtactgttaaatatcttattggacaagggcttgataaaaaaaatccttttaaggatattggatgatcacagctgagcactcaggaacttggatggagaatgctgctaggctcttg

SEQ ID NO: 788 - DNA, 437 bp, Bos taurus
  unsure (418): unsure at all n locations; Clone ID: 04-LIB3057-013-Q1-K1-A7
cccacgcgtccgctccagttgcagtgagctgcttgtcttacgttgttcgcagaggttggccgggtcatggtgccatcctgactgggaagaggacgctccggggagacgaatgaggaaccacctcctcctactgttcaagtacaggggcctggtccgcaaagggaagaaaagcaaaagacgaaaatggctaaattcgtgatccgcccggccaccgctgccgactgcagtgacatcctgcggctgatcaaggaattggctaaatacgaatacatggaagagcaagtaatgttaactgaaaaagatctgctggaagacggtttccgagagcaccccttctaccactgcttagttgcagaagtgcccaaggagcacctgactccggaaggacacagcattgttggttttgccatgtactatnttacctatgatccatggat

SEQ ID NO: 789 - DNA, 300 bp, Bos taurus
  Clone ID: 04-LIB3057-015-Q1-K1-A7
ggtgaagtgtgtttcttgaaatcatcaccaccatggacagcaaaggttcgtcggagagagggtcccgcctgctcctgctgctggtggtgtcaaatctactcttgtgccagggtgtggtctccacccccgtctgtcccaatgggcctggcaactgccaggtatcccttcgagacctgtttgaccgggcagtcatggtgtcccactacatccatgacctctcctcggaaatgttcaacgaatttgataaacggtatgcccagtgcaaagggttcattaccatgtccctcaacatctgccata

SEQ ID NO: 790 - DNA, 357 bp, Bos taurus
  unsure (252): unsure at all n locations; Clone ID: 04-LIB3057-016-Q1-K1-A7
gcataaagggtcccgcctgctcctgctgctggtggtgtcaaatctactcttgtgccagggtgtggtctccacccccgtctgtcccaatgggcctggcaactgccaggtatcccttcgagacctgtttgaccgggcagtcatggtgtcccactacatccatgacctctcctcggaaatgttcaacgaatttgataaacggtatgcccagggcaaagggttcattaccatggccctcaacagctgccatacctnctcccttcctacccctgaagataaagaacaagcccaacagacccaccatgaaatccttatgagcttgattcttgggttgctgcgctcctggaatgaccctctgta

SEQ ID NO: 791 - DNA, 376 bp, Bos taurus
  Clone ID: 04-LIB3057-019-Q1-K1-A7
catgccctcctccaggggatcttcccaacccagggatcaaacccaggtctcccacattgcaggcagattctttactgactgaaccaccagggaagccctataatatttataccatgttgtaaatgattctgtgattttcaaaagaggaactttttggaaattaagaactactgttggatagttacatatgtaattaggctttagccaagcattaaattaatttttaaatagaaccattgttgtatttggctggtgactaattttagttagagcatttcaaatgactaatatagtgagatcattagcatgagtagccttggtcaagtcaaatactattttagaacaggtgtcatggcactttctttaaattgctttg

SEQ ID NO: 792 - DNA, 329 bp, Bos taurus
  Clone ID: 04-LIB3057-020-Q1-K1-A7
atgactcttaactagacggggaccgaaagcgtatctcacatgtactactgatgactgcgcctgctgacccgtagccaccatgcgtgagtgcatctccatccacgttggccaggctggtgtccagatcggcaatgcctgctgggagctctactgcctggaacacggtattcagcccgatggccatatgccaagtgacaagactattgggggaggagacgactccttcaacaccttcttcagtgagacaggggctgtcaagcatgtgcccagggcagtgtttgtagacctggaacccacagtcattgatgaggttcgcactggcacctacc

SEQ ID NO: 793 - DNA, 394 bp, Bos taurus
  Clone ID: 04-LIB3057-021-Q1-K1-A7
gatcaatgaagatatttctgccttaagagctttacaaacccggcaattctccaattgttcacctcactgaagaccaccatgcttcagcacttcccagtcctttacttaccctaagagtaagatgccttccacaatctccagactctaatctctagttattccctgtctactgctccttcttgtattggttttccctccattttccactgtcttcttattatcaccatgtaatgcctttggaatggaccccataggatccttttttttcctgctacagaacctttggaaagttctatgggtgcatctcttgtacacttattacttggagtttcttctaactgtgattgtcatttttctgaatacagtaaacttcaagtgggtctcaagttgaaaa

SEQ ID NO: 794 - DNA, 392 bp, Bos taurus
  unsure (215),(281): unsure at all n locations; Clone ID: 04-LIB3057-022-Q1-K1-A7
ggcaacgcattcagatctggaccaagtcgggacagcaccatcccagccccggagccatgtccatgccagcaggccgcaccacagagatccagacaactacaccagccagcagaatggacattccaacatcaccagccgaagccctgaatctcggtgcagcagacgagcgacaactctgtgcctgtgtggcaggactggagggcagagggtgaggngagagggttaagaagcagagcagggccctcactgtcctttgcctacagcatgtgcattccagcctngctgcctttgctccctcgattcccctttctccctcactgccaccccaaagaaaatgtgtcactcaatttggacctactgagcacgaaaacgaatcccatctttatcaaaac

SEQ ID NO: 795 - DNA, 295 bp, Bos taurus
  Clone ID: 04-LIB3057-024-Q1-K1-A7
ccattacaacattaaccaaatataacatatatttctacgtctctgtttccaattcacctttcttctctccttattattccctcttctactctaagccctccatcatctcttcttctccttaatccctctctctctctctctcacatctcaaaccttccaactcttctaccacggtctcttattcttcaccctctgctacttcttcttcatcttcttctccttcttctacttttcatcttctccttcccaatccttccaccttattctctacttcttcttctacttcctctacctc

SEQ ID NO: 796 - DNA, 419 bp, Bos taurus
  unsure (395): unsure at all n locations; Clone ID: 04-LIB3057-025-Q1-K1-A11
atttttacttctagcaggtaaatgtaggtagcagtgcaggggtgatctctgcggcctggaccctgacatgcagaaggctctcgtaatactccacattcaaactgaagaggaaaatggaaatctctaatgaagctgctgtgtgtatttatgaatattaatgaataaaaactgcttggatggtttaccttaactactgcatgaggttttttgcagcgtgcatgagttttagtgaccttgttatttaagaaatttaaatacaaggagtaaaacttaaaacaaacataaaagcccaaagctttcccaaacattattcaatggttacgaggcaaaaagagttccttgacaaagtagcttttgaataatgtctgcctgaatcacctttctttgtgtgcctnctacgcacaagccagctctgcagt

SEQ ID NO: 797 - DNA, 414 bp, Bos taurus
  Clone ID: 04-LIB3058-001-Q1-K1-A11
gaaagtcctggattctggtgcaccaatcagaattcctgttggccctgagaccttgggtagaatcatgaacgtcattggagaacctattgatgagaggggtcccatcaaaaccaagcaatttgctgctattcatgctgaggctcctgaattcgtggagatgagtgttgaacaagaaattctggttactggtattaaggttgtagatctgctggctccatatgccaagggtggcaaaattgggctttttggtggtgctggagtcggcaagacagtactgatcatggagttaatcaacaatgttgccaaagcccatggtggttactctgtgtttgctggtgttggtgaaaggacccgtgagggcaatgacttataccatgaaatgattgagtctggtgttatcaacttaaaagatgc

SEQ ID NO: 798 - DNA, 352 bp, Bos taurus
  Clone ID: 04-LIB3058-001-Q1-K1-A7
cacagggagatgcggcggctgacgtctgcaggcagaaagagccgcggcctgtgcaagggtcacaagttccaccacactattggtggctctcgccgcgcagcgtggagaaggcgcaatactctccagctccaccgctaccgctaacacgtgatgtttgtaaagtccttacctaataaacaatttatgacgttcctgtctgcttaaaagtgtttttaatttgtctgttaaagctagtctgcagattgcttcattgaatgcattgtcaaattatgaaagttaaagtgcaataatgtttgaagacttattgaagttacttacacatataagtgtatatgaaatgatggtgtatctt

SEQ ID NO: 799 - DNA, 424 bp, Bos taurus
  Clone ID: 04-LIB3058-003-Q1-K1-A11
ggggcgggaagattgctgtgtgaacgctacctgacaatgctgtcccgggtggtactttctgccgccgccgcagcagccccctctctgaagaacgcagccctcctcggtccaggggtattgcaggcaacgaggatctttcacacagggcagccaagtcttgcccctgtaccacctcttcctgaacatggaggaaaagttcgttttgggctgatccctgaggaattcttccagttcctttatcctaaaactggtgtaacaggaccctatgtgcttggaactgggcttatcttatatttactctccaaagaaatatacgtgataactccagagaccttctctgccatatcaacaatatggttccttgtctatataattaaaaaacatggtgcttctgttggggaatatgctgataaactcaatgagc

SEQ ID NO: 800 - DNA, 432 bp, Bos taurus
  Clone ID: 04-LIB3058-005-Q1-K1-A7
gggctcaaagaatccattttcccagtgtaccttctgaaaggataagtttcaggtcaaaggttccgttacagttactatgatgaatcccagggggagatttatagatccattgaacatctagataaaatgggtatgagtattatagaacaattagatcctgtatcttttagcaattacttgaagaaataccataatactatatgtggaagacatcccattggggtgttattaaatgctatcacagagctgcagaagaatggaatgaatatgagcttttcctttttgaattatgcccagtccagccagtgtagaaactggcaagacagttcagtgagttatgcagctggagcactcacggttcactgaagctctgaatccttaggaatgccatctgcacatactcatgctctgtccatggtcccagcctaaccc

SEQ ID NO: 801 - DNA, 362 bp, Bos taurus
  Clone ID: 04-LIB3058-008-Q1-K1-A11
aaacaacccccttctgatcaactctatcaaacgcttactaattggaagcctcttcgcaggatacatcatttccaacaatattcctccaacaacaattccccaaataactatgccctactacctaaaaacaacagccctaattgttacaatcctaggcttcatcttagccctagaaatcagtaatataactaaaaatctaaaatatcactacccctcaaacgccttcaagttctcaaccttgctagggtatttccccacaattatacatcgcctagctccatacataaatttatcaataagccaaaaatcagcatcctcccttctagacctaatctgactagaagccatcctaccaaaaacca

SEQ ID NO: 802 - DNA, 370 bp, Bos taurus
  Clone ID: 04-LIB3058-009-Q1-K1-A7
tagatcgcgagcggacgccctctgccatctggtggccggcaaggaaccagccaacgtgggcgttactaaagcaaagaacggggggtgctgtggaacggctgactgacaccagcaagtacacgggctcccacatggaacgctttgatgagagtggcaagggcaaaggtattgctgggcggcaggacatcctgaatgacagtggctacgtgagtgcctacaagaatgcatgtacctatgatgccaaggtgaagaagtgaggcctaggaaggccacctaaccgcccaccagcgcaactgcctctgccagaagctcgagcctggcctaagggtcacgttgagcaagagagactggtcccttgcttgctggatct

SEQ ID NO: 803 - DNA, 425 bp, Bos taurus
  Clone ID: 04-LIB3058-012-Q1-K1-A11
tcgctctagcggtcgcctttatttcttttaatgtcaaagtgaagaatttcattggactcgtttaatcggcggatgttactttatactcttttatggtttccatgtgctttttaatttttctgttattcttttttatttataaaattaattttttttgttttataaaaaataacccttttttagaatcaacattgttttttttacctaataaaatggtttttcagtattaaattaaatttaaaggtcttttcattggtatgatacctttatacctattaaatattcccaaattttctttttgttcaaaaagttttttaaaaaaaactagtttttaaaaacaccctttttttaaaacaaaatttttaatgtcaaaattttaatctaattcccctgaaacttttttcaaaaaaataaaattttttttt

SEQ ID NO: 804 - DNA, 268 bp, Bos taurus
  Clone ID: 04-LIB3058-014-Q1-K1-A7
gacagcgacccgcggcctagaagtgttccggcaggcaccactttgtcggcacagggggaacctgtcaagaccgaaaaacccacaccaggttctgcaacctgaccatggacaacatcactttacaagggcagatacggctgtacatggacttggagtgagtcatcctgtcctaaagcaagttgctgaacagactcttaacataaggggtggccaaggcttatctggtgcaaaagccaagtaccatggaggtgaaaatcgagaacagaat

SEQ ID NO: 805 - DNA, 394 bp, Bos taurus
  unsure (335): unsure at all n locations; Clone ID: 04-LIB3058-015-Q1-K1-A7
ggaagacagtgcggccgctcccggggcggtggacgcaatggcggcccagaagagaccctcccagagatccaagtacctggcctcggcgagcaccatggaccacgccaggcacggcttcctccccagacacagagacactggcatcctcgactccctcggccgcttctttggctcggacaggggtgcgcccaagcggggctcaggcaaggatggacaccatgcggccagaaccacccactatggctccctgccccagaaggcgcagcacggccggccccaagacgaaaaccccgtagtgcacttcttcaagaacatcgtgacaccccgcacacctnctccatcgcaaggaaaggggcgaggactgtccctcagcagatttagctggagggcttga

SEQ ID NO: 806 - DNA, 443 bp, Bos taurus
  Clone ID: 04-LIB3058-016-Q1-K1-A11
aaataacgaatatgcctgaggtgcatgggaatatagttagctgtactctgaagatacattattttttttttaactaaggcacacaacatataagcatgtaagagtaaagaactgtatgagatgttccttttttcagttcaccaagttggaagccttttgcagctctgtggcttaaaatttcatttgagcaatttactataggatttatatttattattaattgttatttaattttttttccaattttacctgtattaccaaactgggttctccaataatgtccaaattgtaatgttgcctgcttcaacataaagtgtatttggcaataatattataaacccttacaaattttatgcatgtatctactacatccttcaattctcactagaaaaatctcttgaaaccaaatggattaatttatggctatttataatttgctttga

SEQ ID NO: 807 - DNA, 197 bp, Bos taurus
  Clone ID: 04-LIB3058-017-Q1-K1-A11
tcctccagatcgtgggggacctggcccagttcatggtgcagaacgggctgacccgagctgaggccgaagcgcaggcagaggagctgtccttcccccgctcggtggtggagttcctgcagggctacatcggcatcccccacgggggctttccagagccccttcgctccaaagtgctgaaagacctgccgagggtggaa

SEQ ID NO: 808 - DNA, 233 bp, Bos taurus
  Clone ID: 04-LIB3058-017-Q1-K1-A7
cttcatgtcgagggagaccaccgacacagacgctgacgaccaggtcatcgcctactggaaggagctggctggggacaagaacttcatcacagccgaggagctgcggagagagctgccgaccgaccaggccgagtactgcatctgccgcatggcgccctaccagggccctgacgccaggcctggcgccctggactatgagtacttgtacacagccctgtgcggagagagcgacc

SEQ ID NO: 809 - DNA, 408 bp, Bos taurus
  unsure (179): unsure at all n locations; Clone ID: 04-LIB3058-018-Q1-K1-A7
gagatccgcaaggtgctggacgccaacagctgccagagcgagctgcacgagaagtacatgctgctgtgcatgcacggcacgcctggccacgagagcttcgtgcagtgggagatggaggtgtgcaaactgccgcgcctgtctctcaacggcgttcggtttaagcggatatcaagcacctncatggccttcaaaaacattgcctccaaaatagccaacgagcttaagctttaataggctgccaggagtggggggcgcggaagcggccagctggacttcactgctgggccggcgctccgtccgcccgggccagactgcagagatgggtcggtgtgtctcccctgctggcacttcccctacacgcccttctcagttttttcttccatgtttgtgggggatgggagatggttc

SEQ ID NO: 810 - DNA, 282 bp, Bos taurus
  Clone ID: 04-LIB3058-020-Q1-K1-A11
ggcgctgcagtagcgcccgggtccgggcgtcgacatgaccagcgaactggacatcttcgtggggaacacgacccttatcgaccaggacgtgtatcgcctttggctggacggttattcgggtctgtggggggccgactggtggagccggtctggcggagcggttgttttggatgggagagggggccaagccaggactaggcatcctatagggcagtgggcagatgcctgggagtatgaaatgcctggggcttggcgctgaaatcccctatggtctgctgtgcg

SEQ ID NO: 811 - DNA, 329 bp, Bos taurus
  Clone ID: 04-LIB3058-020-Q1-K1-A7
tcaagcccttcttgacaaagcaaaaatcaaccaagggtggcttgattcctcaagatctctcatggaacaagatgtgaaggaaaatgaggccttgctgctccgattcaagtattacagcttttttgatttgaatccaaagtatgatgcaatcagaatcaatcagctttatgagcaggccaagtgggctattctcttggaagaaattgaatgcaccgaagaagaaatgatgatgtttgcagccttgcagtatcatatcaataagctgtcgatcatgacgtcagagaatcatctgaacaacagcgacaaagaagttgatgaagttgatgctt

SEQ ID NO: 812 - DNA, 308 bp, Bos taurus
  Clone ID: 04-LIB3058-022-Q1-K1-A11
gctatatgtagcagagatcaccaatgcttgctttgagccatgcaaccagttggtgaaacgtgacactcgggatgggaaatacatggcctgttgtctgttgcaccgtggtgacgtggttcccacagatgtcaatgctgtcattgccacgatcaagaccaagcgcagcatccagtttgtggactggtgcgcctctgtcttgaacgttggcattaactaccagccttccactgtggtacctggtggcgtcctggccatagtacagctagctgtgttcatgctgagcttcgcctctgtcattgctgacgcct

SEQ ID NO: 813 - DNA, 395 bp, Bos taurus
  Clone ID: 04-LIB3058-022-Q1-K1-A7
tcgcggacccggggcacatccggtcttctgggggcctgcttacggcaggggacagtatgactagagggagacgtacccgcccatacagtccagggacattacccctgaccatgctggatccgactattttgctatcaggcgccggattctacgacaatgacatctctcatccacatcttgattctttgcatgcggtctcacgtgccatgttcaacgcaaacacaccagaggaacactacccattcacctacgactaccaatccatgctgatcgcaagacttataatcaccgggatgatcatgatcctgagcatactcatcgtgttaaacagaatatgccggtgcaaattcaaccagcagcagacgactggggaacctgatgaagaggacggaact

SEQ ID NO: 814 - DNA, 379 bp, Bos taurus
  Clone ID: 04-LIB3058-025-Q1-K1-A7
ctttaagattctatatttctggagtacctatgaagtggtatgactacatcatgtgaaatatttattttcttctttaactttggagtagcagtttttattttaattaaataaaattccaattttttcaacaaattcagggaagatttggtcacattgaagatacagtatttttgtagtatttataagctgtcctatgtgatagacttttagaaagcattttttttatatgaaggtaaaccagtccattatatagctcgttcagactctgtgaacattacacctactaggtttcgatttatcacgtggcacagaatctgcctttgcactgagtaccttttcattcgcatctcctctgccttagtcacagtggcagcagtgc

SEQ ID NO: 815 - DNA, 417 bp, Bos taurus
  Clone ID: 04-LIB3058-026-Q1-K1-A11
tcgaggacatctcttcaaaagggccagcaatgcatttaagacctggagcagacgctggttgactattcagagcaaccaactggtctatcagaagaggtacaaggaccctgtgaccgtggtggtggatgaccttcgtctctgcacagtgaagctctgtcctgactcagaaagacggttctgctttgaggttgtgtcccccagcaagtcttgcctcctgcaggctgactcagagcgcctcatgcagctgtgggtcagcgccgtgcagagcagcatcgccacagccttcagccaggctcgccttgatgacagcccccggggtctaggccagggctcatgacacctggccataagctccgctgccaccctgggccctggtgggttgaccaggggaagggagcctgggggagtggggcacgt

SEQ ID NO: 816 - DNA, 424 bp, Bos taurus
  Clone ID: 04-LIB3058-027-Q1-K1-A7
gctttgtatagattgcaattattcagaattttacttcctcaacctatgaaactatttgtctttgcaagcctttggaaatagttgaaagtattaacattctgttactgttttatagctgttttgatcattccttggtttttagaacagacatgtaacaccaaaaatggaaaatgtgtagcaggattaactaggctacacatttttcagctgtttggctacacccaagaggctgactgatgggcttcctaaaacaagagggtagataaatttttaaattgtgttacctttttgttttcacagagttgagtttaaaacaaatggctaatatttttaggtctcaagcacctatgctacctgatatcttctatgttttttatattttctggaggttaaaaagttacacagtagaatattagttacattt

SEQ ID NO: 817 - DNA, 282 bp, Bos taurus
  Clone ID: 04-LIB3058-028-Q1-K1-A7
ccacgcgtccggttctagatcgcgagcggccgccctttttttttttttttttttttatttggtttttgttctaattaatgttggggttaaatacttatttttttactttttatatctataaaaacaaattctaaaatttcaaagcaaaattaaaaataactttactaaacaaaaaaaaaatttcctaaaaaaaaatatgggacaattttaaaaaaacccctattcaaaaaacacaaagttaaaaatatgaaattaaaaaatccataggacaaattttcaaaa

SEQ ID NO: 818 - DNA, 433 bp, Bos taurus
  Clone ID: 04-LIB3058-029-Q1-K1-A7
catcaccaccaaggagctggggacagtgatgaggtctctgggacagaaccccactgaagccgagctgcaggacatgatcaacgaggtggacgcagatgggaacgggaccattgacttccccgagttcctgaccatgatggccagaaagatgaaggacacggacagcgaggaggagatccgagaggccttccgtgtctttgacaaggacggcaacgggtacatcagcgccgcagagctgcgccacgtcatgacgaacctgggcgagaagctgaccgacgaggaggtggacgagatgatcagggaggccgacattgacggggacggccaggtcaattatgaagagtttgtacagatgatgactgcaaagtgaaggcccccgggcagctggtgatgcccgttctctcgatctctctctccccgcgcgcgcactctc

SEQ ID NO: 819 - DNA, 389 bp, Bos taurus
  Clone ID: 04-LIB3058-030-Q1-K1-A11
cggacgcgtggggtcccacccactaataaaaattgtaaacaatgcattcatcgaccttgcagccccatcaaacatttcatcatgatgaaatttcggttccctcctgggaatctgcctaatcctacaaatcctcacaggcctattcctagcaatacactacacatccgacacaacaacagcattctcctctgttacccatatctgccgagacgtgaactacggctgaatcatccgatacatacacgcaaacggagcttcaatgttttttatctgcttatatatgcacgtaggacgaggcttatattacgggtcttacacttttctagaaacatgaaatattggagtaatccttctgctcacagtaatagccacagcatttataggatacg

SEQ ID NO: 820 - DNA, 427 bp, Bos taurus
  Clone ID: 04-LIB3058-032-Q1-K1-A11
tctagatcaaaaagcaaatctaaacccaagtctgatcggggctcccgttcgcgctctcggagcagatcgaaggatgagtatgagaaatctcgaagcaggtctcgttctcgatctcgttcccccaaagaaaatggaaaaggtgatataaagtccaaatctagatcgaggagccagtcccgttccgattcgcccctacctgctccaccctcaaaggcccgttccgtgtcccctccaccaaaaagagcttcaagatcccattctagatctcgttcaaagtcaaggtcacgatccagatcgagttccagtgattaactctctgatctctccactctttgcactctattactgttcacttttcttacttgtttattttgtttctctttttatgtttttacttttatccttttttgtataattaattcctttt

SEQ ID NO: 821 - DNA, 438 bp, Bos taurus
  unsure (301): unsure at all n locations; Clone ID: 04-LIB3058-034-Q1-K1-A7
cggacgcgtgggctgggcgacagcatggttcaactacccgcagggcctggacgacaagacgaacatcaagaccgtgtgcacatactgggaggatttccacagctgcacggtcacggcccttacggattgccaagaaggggcgaaagatatgtgggataaactgagaaaagaatccaaaaatctcaacatccaaggcagcttattcgaactctgcggcggcggcaacggggcggcggggcccctgctcccggcgctgcccgtgctcctggtgtctctctcggcagctttagcgacctggctntccttctgagcgccgggtcggctcccctcgcgcgcgcccgcactcacgccatgctcccggaaaccgagaggaagatccatacgttctttggggacgttgtgattctctgtgatgctgaaaacactcatatgggaatt

SEQ ID NO: 822 - DNA, 450 bp, Bos taurus
  unsure (409): unsure at all n locations; Clone ID: 04-LIB3058-037-Q1-K1-A7
cgacccacgcgtccgcgcagaatatgtgtctcgcattgaaggttacgcagaagtccatctattacatgactggtgagagcaaagagcaggttgccaactctgcatttgtggagcgcgtgcggaagcggggctttgaggtggtgtacatgacagagcccatcgatgagtactgtgtacagcagctcaaggagtttgatgggaagagtctagtctctgtgaccaaggagggcctggagctgcccgaggatgaggaggagaagaagaagatggaggagagcaaggcaaagtttgagaacctctgcaaactcatgaaggagatcctggataagaaggtggagaaggtgacgatctccaacaggcttgtgtcgtcaccctgctgcatcgtgaccagcacctacggctggaccgncaacatggagcgcatcatgaaagccccaggcgcttgggaca

SEQ ID NO: 823 - DNA, 428 bp, Bos taurus
  Clone ID: 04-LIB3058-038-Q1-K1-A11
gaggacttgacatgatttggaatttcagttgtttttctaatagggtccttgaacgttatggactagagggaaaagattgactggagaggacttgacatgatttggaaaaacagttgctttttgaggctcagcgacaagggcgaggattacaacttcataaaaaaaaaagataacccaaaccaaaccaaataaaatacgttgcgagtttacttttgcaacactagggggcgccaaggtctccgttttcctcctgcatccgtgtccctaacaaagatttggtctctgcaatcttacattattaatgtttctcagatggctgaggggcttgcttcatctgttctgtctgacacttatctaaagtctgtctgtaatttcctaatgttctcaggatgtgctctgataaaaccctcccataaccccagttaata

SEQ ID NO: 824 - DNA, 304 bp, Bos taurus
  Clone ID: 04-LIB3058-038-Q1-K1-A7
gacccacgcgtccgcacgtcgggtctcatgtcgtaacctgactgtcaagaatagacgcatacatatggagcaagccactatctggcgaaggggggtgactacctcaagcggacctataagccgccatcgaacgcaacctagacctggcatctgtacgactaagactggcaggctaccgtatgccacgcaacacactacttctcaacccaacgaccgactataaggcaacccattcattatactctatctatcagcgatattataaccagcgcagtctggctcctggaaacggacctaacatcac

SEQ ID NO: 825 - DNA, 433 bp, Bos taurus
  Clone ID: 04-LIB3058-039-Q1-K1-A11
cagagataccctctcgacttatcaactcttatagaataaaacaaaacatttaatcccgatttaaagtataggagatagaaatctaagtacggcgctatagagaaagtaccgcaagggaacgatgaaagaaaaaactaaaagtataaaaaagcaaagattaccccttgtaccttttgcataatgaattaactagtataagacttaacaaaatgaattttagctaagcagcccgaaaccagacgagctactcacaaacagtttaccaagaactaactcatctatgtggcaaaatagtgagaagatttgtaagtagaggtgacatgcctaacgagcctggtgatagctggttgtccagaaaatgaatctaagttcagctttaaagataccaaaaattcaaataaaccccactgtagctttaaaagttagtctaaaa

SEQ ID NO: 826 - DNA, 449 bp, Bos taurus
  unsure (340): unsure at all n locations; Clone ID: 04-LIB3058-039-Q1-K1-A7
ccacgcgtccggggctagatcgcgagcggccgccctttttttttttttttttttttttttaggattaacatgatttatttcattatcagtcttacaagttgctgaggttgggcaaagccaggagagtaacttcaggcgtttctatcaagtgacagcctgattagcagggccgttactgagcggagggcagtggagggcaccccaggaaccccagctcctacagcagtgttaaaacccctccttcagaggcactggatagggcgtggcccgtgacagccaggggccactccactggcttttggtgcccactgacccctttcagcagagacacaaaggcctncagaggcaccaaggaagcaagatgggctgggcaagtggaaaggactgtactttctcaccgaagctctgtctctggcctcgatcttcccaccgacacaggagggccacac

SEQ ID NO: 827 - DNA, 358 bp, Bos taurus
  Clone ID: 04-LIB3058-042-Q1-K1-A11
ctagtctagaccagtatgtggaatgattgaaggagaagcaggacaaaatctacttcatggctggggccagcaggaaagaggccgaatcttctccctttgttgagcgacttctgaaaaagggctatgaagtgatttatctcacagaacctgtggacgaatactgcattcaggctcttcccgagttcgacgggaagaggttccagaatgttgccaaagaaggagtgaagtttgatgaaagtgagaaaagtaaggagagtcgtgaagcagttgagaaagaatttgagcctctgctaaactggatgaaagataaagccctcaaggacaagatcgagaaggctgtggtgtctcagcgcctgac

SEQ ID NO: 828 - DNA, 379 bp, Bos taurus
  Clone ID: 04-LIB3058-042-Q1-K1-A7
atttcgtttttactttgcgaggtgagttgaatatatggggcccatattcaggatccagcaccaggcaacaatcagtgctccacacatgcatgcatatgcactagaacttctatttgatcagttgaatgaaggagctaaagctcttgatgtaggatctggaagtggaatccttactgcatgttttgcacgtatggttggacctagtgggaaagtcataggaattgaccacattaaagagctagtagatgactcaataaataatgtcagaaaggatgatccaatgcttttgtcttcagggagggtgcaactggttgtaggggatggacgaatgggatatgccgcagaagccccttatgatgctattcacgtaggaactgca

SEQ ID NO: 829 - DNA, 416 bp, Bos taurus
  Clone ID: 04-LIB3058-043-Q1-K1-A7
cggacgcgtgggcgctgaggaggtcggtttggctcccggggcgtttgagcgggctcacccgagcccgcgggccaacgcggatccgggcccgaccggcgggaccgccccggactccccgcgggccttcctagccgccatggaggacggtgtctatgaacccccggacctgactccggaggagcggatggagctggagaacattcgacggcggaagcaggagctgctggtggagatccagcgcctgcgggaggagctcagcgaagccatgagcgaggtggagggtctggaggccaatgagggcagcaaaaccttgcaacggaaccggaagatggcaatgggcaggaagaagttcaatatggaccccaaaaaggggatccagttcctggtggagaacgaacttttgcagaacacacctg

SEQ ID NO: 830 - DNA, 438 bp, Bos taurus
  Clone ID: 04-LIB3058-045-Q1-K1-A7
gtgtccccacccctcttaagtccaggatatactaatttcctggtccaatcagaaattggttttctttccctcaagaatgctaaaatgagcccactataataattctgtattacctaccatggatgaagctagattcagactgacaagctatccaaaatcaattttgtaatagatttcttttaaataaatgtcagctttgccttaatgagtatgttttcaatttctaagaacttacaataggtaaccccaaatccttcaaagaattttgttccacaaatgtttttcttaatgaagaagtgttaccttattaaaatgaccaccactcaaaaccatttttatgtggtctaaatagcaagtttacagtttcataccaattacccaaaacctaattaccaacagaccacagacctcctacttttatagacttgaatattgaat

SEQ ID NO: 831 - DNA, 441 bp, Bos taurus
  Clone ID: 04-LIB3058-046-Q1-K1-A11
ttttaaacaaatatattatgcactctcttggttggaaaataattcaacagtcatttagtgctctcccaccccaagcacaccccagcacatttgaggctgagggcttccccccagtaccttcaggagataactatctctgcttacatactctcagcaacagaacatccgtcatccccacaaccagcccctgtcatggctggctgttagaaagtccttccttatcttgagctgaaatctgtcttcccacaagcattttctgttcctggtagacctttcttctcacccaaatgtgtattttgtttttcagaatagtcactttgagagaggccacatacctattctgaaaatattactacttggaattaggattccccttgggatttgtcttcaaaaccaaggttagccccctgacattccctgtaagtcatccctgtccctgta

SEQ ID NO: 832 - DNA, 435 bp, Bos taurus
  Clone ID: 04-LIB3058-046-Q1-K1-A7
aaagcagcggagctgtttctgcatcatatacggagtttgaccaggggaacacaggcagggcttgcagggctgtaggagctgagctttccgtgttgtagctaattaggaagcttgatttgctttgtgagggaacaattgaaacctctttccaaggaccatttttagtgcccccagccttacttctgcattactgggcatagtgttagctttctggacccagggactcttggtaactataacttaggaaagtcatttctcagtcacaaagcatgtgctgtgctagctgtccaagctgtggagacccctcacctagaaaaaaaaattgactaccaaaaaggactggagcactgtgggttccacatgctgccactacatttaaaaacacaaagctttgtccaccatcctttgaaaacgttgcccatcattaaaatctct

SEQ ID NO: 833 - DNA, 427 bp, Bos taurus
  Clone ID: 04-LIB3058-047-Q1-K1-A7
gggcaccataccccagctgtcctaaatttcctcttaataacatccggcctaacgatgtgatttcactttaactcaatgaccctgctaataattggcctaacaaccaatatactaacaatataccaatgatgacgagatgttatccgagaaagcaccttccaagggcaccataccccagctgtccaaaaaggcctccgttatggaataattctttttattatctccgaagtactattctttaccggatttttctgagctttctaccactcaagcctcgcccccacccctgaactaggcggctgctgacccccaacaggcattcacccactaaccccctagaagtcccactgctcaacacctctgtcctattggcttccggagtttctattacctgagcccatcatagtttaatagaaggggaccgaaa

SEQ ID NO: 834 - DNA, 425 bp, Bos taurus
  Clone ID: 04-LIB3058-048-Q1-K1-A11
gaaggttatattgacgcctacaaatattattgcgaagtggattttggctcatgtatcgttgagagtataacctgagaatagtgggaatcaatgaacaaatccccctataatagcaaatacagctcctattgataaaacatagtggaaatgtgcgacaacgtagtatgtgtcgtgaagaacaatatcgagggaagagttggctaagacaattccagttaaaccccctactgtaaataagaaaataaagcctagggctcacattatagcaggagaccatttgatattacctccatgaagtgttgccaatcagctgaagacttttaccccggttggaatagcaataattatagtggctgatgtgaagtaggctcgtgtgtcgacgtctattccgacagtgaatatatggtgggctcatacgatgaaac

SEQ ID NO: 835 - DNA, 397 bp, Bos taurus
  Clone ID: 04-LIB3058-048-Q1-K1-A7
gttctagatcgcgagcggccgcccatttgtttattgtttttttttttttttatgttgtgcttttttctattcttttttttttttaaacagctcagctttttattcaaggggttactaaagagatttagtcaaaaagaccaaagcccatgtcatcatcagactcttcaaattcttttttctttggtttaacttttttctcctaagctggggcaacaacagtggatggggcaggaccatttgccctttttttcatagcagagtacccaaattttatcataataaatatctttacagcaattttattcctaggaacatcccacaatccacacattccagaactttacacaatcaattttcccattaaatccctactggtaacaatatccttcctatgaat

SEQ ID NO: 836 - DNA, 373 bp, Bos taurus
  Clone ID: 04-LIB3058-049-Q1-K1-A11
gatcgcgagcggccgccctttttttttttttttttttttttttttttttttttttgttttttttttttttttttttttttttttttttttttttttttttttttttttttttttaaaggggaacaaaaaaataaataaaaacaaaaataaaaaaaaacaaaaaaaaaacggggggggaaactcccggaaattttaagggaaaaaaaaaccaaacgggtggaaaaaaagtaaataacaaaaaaaaggagggggcaaaaatccagaaaaattaaaaaaaaaaaaatttaaaaatttttgggtttgggcttccatttaaaaaaaatggtggtaaaaaggtaaaatttaaaaaaacccatttcaaaactttgaaaaa

SEQ ID NO: 837 - DNA, 425 bp, Bos taurus
  Clone ID: 04-LIB3058-050-Q1-K1-A11
cggacgcgtgggggctctggggcccagtcagacactgaaaactggcccctctcctcaggcagctccatctccagctctgagagtgtgtggcagaatgcctgaaacttcaactttgcaggttttgagctagaggcagtgatatactgagccttggcggaagggggaagaacttggctgggaggtgaccgaggtgggtccctacagggtggcatggcagcgagcacagatgtggctgggctggaggaaagcttccgcaagtttgccatccatggtgaccccaaggccagtgggcacgagatgaatggcaagaactgggccaagctgtgcaaggactgcaaggtggctgacggaaaggctgtgacagggaccgatgtcgacatcgtcttctccaaagtcaaggcgaagtctgcccgggtcatcaacta

SEQ ID NO: 838 - DNA, 449 bp, Bos taurus
  Clone ID: 04-LIB3058-051-Q1-K1-A7
tcttcagctctaatcattttgaagatcaatctcatttaaactgaaaattataaagatacttaatatttaattttctagaaagtatgagtgatttgattgaagtagctttgaaatctttttaattgtttttttttctttttacagatactaaaatggatcgtaaagataaattatttgtgattaatgaggtttgtgaaatgaaaaactgcaataaatgtatctattttgaagctaagaaaaaacaagatctctatatgtggctttcaaattcacctcatggaccatctgctaaattccttgttcaaaatattcataccctagctgagctaaagatgactggaaactgtttaaaaggttctcggcccctcttgtcttttgaccctgcttttgatgaattaccacattatgctttgttaaaagaactcttaattcagatctttagtacacca

SEQ ID NO: 839 - DNA, 411 bp, Bos taurus
  Clone ID: 04-LIB3058-054-Q1-K1-A11
ggatgcttctcagctgccaccttcctttgacatttttgaagcctttgcaaaagtgatctgcaactctttcaccatctgtaatgcagagatgcaggaagttggtgttggcctgtatcctagtatgtctttgctcaatcacagctgtgaccccaactgttcgattgtgttcaacgggccccacctcttgctgcatgcagtccgagacgttgaggcaggagaggagctcaccatctgctacttggatatgctgatgaccagcgaggagcgcaggaagcagctgcggggccagtactgctttgactgtgactgtttccgatgtcaaacccaggacaaggatgctgatatgctgactggtgatgagcaggtatggaaggaagtccaggaatccctgaaaaaaattgaagacctgaa

SEQ ID NO: 840 - DNA, 323 bp, Bos taurus
  Clone ID: 04-LIB3058-054-Q1-K1-A7
tagatcgcgagcggccgccctttttttttttttttgtgttcattcttttattgtccattgttttaacctgactgaatacaagatcaacaagagcactgtactcctggcaattatgacatatgttagaacatggattttgcactgtagacaacagtcaacatcagtctatggggtactgcgttgctttttataaagtccaaaataaagatttattttcaaacaagtgactttggtttatttcatacattacactttttcttgcagaaaaaaataaaattgtacaactgccctttaaactttaagtgacactatggaaacacaca

SEQ ID NO: 841 - DNA, 364 bp, Bos taurus
  Clone ID: 04-LIB3058-057-Q1-K1-A7
cccatctcactcctctagattgtctgagccacagtttgagctccctaagtcatacagtaaattgccactatctattttacatatgataatgtataggtttccatgtgactttttccatttgtcccacccatttgtcattccccactctgtgtccgaagtctgttctctatgtctgcgcctacactgctgccctgcatataggttcatcagtaccatctttctagacttcatatgcatgcatttatatacattatttgtttttctctttctaacttacttcactttgtatgataggctctaggttcatttatcattttatatctgacttatactctattccttttttaagtttttttatttctat

SEQ ID NO: 842 - DNA, 426 bp, Bos taurus
  unsure (350): unsure at all n locations; Clone ID: 04-LIB3058-058-Q1-K1-A11
gttcgcgtctgtgttttgcttcgtagccaccactgtcctggccttcttgtatgtaattggcgcccacggcaacagaacatcatggatcaccctggacgcagcctaccactgtgttgcctccctgttttactttggtgcctctgtcctggaagctctggccgccatccagctgcaagacggcttcctctacaaatattaccatgaaaacatctctgctgtggtgttttcgtatgtagccactctgctgtacgtggtccatgccgtgttttccttaatcagatggaagtcttcctagagcagcagaactttaactgaacaccaagaaggtgttaaccgatcggccagccttncagcataacactttagaatgcagaatgttcttgagaacggataaagagagaggtttattcttccgtataccttcat

SEQ ID NO: 843 - DNA, 404 bp, Bos taurus
  Clone ID: 04-LIB3058-058-Q1-K1-A7
ctctgagctagcagaagacaaggagtaactataagaaattctatgaggcgttctctaaaaacctgaagcttggaatccatgaggactccactaaccggcgacgcctttctgagctgctgcgctatcacacgtcccagtctggagacgagatgacttctctctcagaatatgtgtctcgcatgaaggagacgcagaagtccatctattacatcactggtgagagcaaagagcaggttgccaactctgcatttgtggagcgcgtgcggaagcggggctttgaggtggtgtacatgacagagcccatcgatgagtactgtgtacagcagctcaaggagtttgatgggaagagtctagtctctgtgaccaaggaaggcctggagctgcccgaggatgaggaggagaag

SEQ ID NO: 844 - DNA, 451 bp, Bos taurus
  unsure (422): unsure at all n locations; Clone ID: 04-LIB34-001-Q1-E1-A7
ggtatttccagtagtcatgtatggatgtgagagttggactgtgaagaaagctgagtgccaaagaattgatgcttttgaattgtggtgttggagaagactcttgagagtcccatagactgcaaggagatccaaccagtccattctaaaggagatcggtcctgggtgttctttggaaggaatgatgctaaagctgaaactccagtactttggccaccttatgcaaagagttgactcactggaaaagagtctgatgctgggagggattgggggcaagaggaaaaggggacgacagaggataagatggctggatggcatcaccgacctgatggatgtgtgttgggtgaactccgggagttggtgatggacaaggaagccttgcgtgctgcaattcatggggtcgcagagagtccgacacgactgancgactgaactgaactgaactgaataatca

SEQ ID NO: 845 - DNA, 415 bp, Bos taurus
  Clone ID: 04-LIB34-002-Q1-E1-A7
attcgcgcggtcgacccacgcgaccgataacatccagtgggtggtttgcaggagaagcagaagcatctgggcctgggtttcctgaaatcatcacacctgcagcagaaggaaaatgactgagttgaagtacatttctggattcgggaatgagtgtgcctcagaggaccctcgttgcccaggtgccctgccagaaggacagaataatcctcaagtttgcccctacaatctgtatgctgagcagctctcaggatcagctttcacttgtccacggagcaccaataaaagaagctggctgtataggattctaccttcagtttctcacaagccttttgagttcattgaccaaggccacatcactcacaactgggatgaagttgatcctgatcctaaccagctgcgatggaaaccatttgag

SEQ ID NO: 846 - DNA, 429 bp, Bos taurus
  Clone ID: 04-LIB34-004-Q1-E1-A11
tccactccacgcctccgggaggtggttatggctccacgcaggccactttcatggtgttccaagccttggcccaataccagaaggatgttcctgatcacaaggagctgaacctggatgtgtccatccaactgcccagccgcaactctgcggtcaggcatcgtatcctctgggaatctgccagcctcctgcgctcagaagagactaaggaaaatgagcgtttcacagtaaaagctgaagggaaaggacaaggcaccttgtcggtagtgaccgtgtaccatgccaagctcaaaggcaaagtctcctgcaaaaagttcgacctccgggtttccatacgcccagcccccgaaacagtcaagaagcctcaggacgccaaaggttccatgatccttgacatctgtaccaagtacctgggagaacaggatgccacta

SEQ ID NO: 847 - DNA, 405 bp, Bos taurus
  Clone ID: 04-LIB34-004-Q1-E1-A7
gcgtcctgagtctctgcatcaggtttccttcctgttcagtgatcgagggattccagatggacacaggcacatgaatggatatggatcgcatactttcaagctggttaatgcaaatggagaggcagtttattgcaaattccattataagactgatcagggcatcaaaaacctttctgttgaagatgcagcaagacttgcccacgaagatcctgactatggcctccgcgatcttttcaatgccattgccacaggcaactacccctcctggactttatacatccaggtcatgacatttagtgaggcagaaatttttccatttaatccatttgatcttaccaaggtttggcctcacggcgactatccccttattccagttggtaaattggtcttaaaccggaacccagt

SEQ ID NO: 848 - DNA, 297 bp, Bos taurus
  Clone ID: 04-LIB34-005-Q1-E1-A11
gcacaatgaagcttttaataggcattcttttctgtaccttgatcatgggagtcaccggtgacagctggtattcattcttcaaggacgctgtgcaaggggcttcagacttgtggagagcctactgggacatgagagatgccaatgtccagaattcaggcagatacttccgcgctcgagggaactacgaggctgctcaaaagggccctggcggtgtctgggctgcaaaaataatcagcaatgtcggggagtacctttcaagattcttataccagatttaccttggagacagctatgggt

SEQ ID NO: 849 - DNA, 394 bp, Bos taurus
  Clone ID: 04-LIB34-005-Q1-E1-A7
gcgacagctcccaccacagctcctatgaaatatacgggatctactcattctacttagaatttccttgcaagaaacatgggctgcgatcgaaactgtgggctcgtcactggtgctgtcattggtgcagttgtggctctgttcggagggattctaatgccagttggagacatgcttattgagaagacaattaaaaaggaatcggtccttgaagaaggtacaattgcttttaaaaattgggttaaagcaggtgctaacgtttacagacaattttggatatttgatgtgcataatccagaggaagtggcagtcaatagcagcaaaattaaagttaagcaaagaggtccttacacgtacagagtccgttatctagctaaggatataataagccaagact

SEQ ID NO: 850 - DNA, 414 bp, Bos taurus
  unsure (286),(290): unsure at all n locations; Clone ID: 04-LIB34-006-Q1-E1-A7
cactgcccacaccccgctctcgcaggcagacatgaggacagagagaacttccttcctcctggctctggggctcctggtgtctgggttctgctccagggtccactgcctcccagagaatgtgaccccagaagaacagcacaaagggacgtctgtggatggccactcattagcctccagcaacactgacttcgccttcagcctctacaagcagttggctttgaaggaccccaataagaatgtcatcttctcccctctgagcatctccatagccttggccttcctgtcnctgngggctcatgaccacactgtgacagagatcctggaaggtctcaagttcaacctcacagagacccccgagacagaaatccaccagggcttccagcacctcctgcagacgttcaatcagcccagcaa

SEQ ID NO: 851 - DNA, 411 bp, Bos taurus
  Clone ID: 04-LIB34-007-Q1-E1-A11
caaactcatctccattgagtcagtgatgccatccaaccatgtcatcctccgtcacccccttctcctcttgccttcagtctttcccagcatcagggtcttttccagtgagtcagttcttctcatcaggtggccaaagtatttgaactgaatttcagcatcagttcttccaatgaatattcagggttgatttcctttaaggagcatgatgtccatgtgagagctggaccataaagaaagctgagtgctgaagaattgatgcttttaaattgtgctaaagaagactcttaagagtcccttggacagtatggagatcatgctgccttgtaggactaatgtaaagagctagtaaggtcatcaaatgcttagcagatatgcaaacaagtgcttaataaacatttgatatcattatta

SEQ ID NO: 852 - DNA, 316 bp, Bos taurus
  Clone ID: 04-LIB34-007-Q1-E1-A7
aaaatgctgatatttcacattactgatttctaaatcctagaaagaagagcctggagagtttctgaatgtagagaagttccatttagggaagaggtcccttaatagatgtttcaaattgttgcagattctaaaccaagacttaatcctcaaatgtgtttattttacttgtcctaaaataatctgtccacaaatataaaattataagtgataagttgttgttttcccactgggaatttctaatgtgaaaatgtattccatgaaggtaattttttaaaaaaataaaatgctgcataataaaaatttattctactctttt

SEQ ID NO: 853 - DNA, 419 bp, Bos taurus
  Clone ID: 04-LIB34-008-Q1-E1-A7
agcgcgcccctcgccatggctgcgcggtcgctcctcctgatccgcggggggtgcgtcgtcaacgacgactcctcgcaggaggccgacgtgctggtggaggacggcgtggtgcaggcagtggggcgccacgtgctgccgcccggggacgcgccagccgggctgcgggtcctcgacgccgccggcaagctggtcctgcccggcggcatcgacacgcacacacacatgcagttccccttcatgggctcgcgctccgtggacgacttccatctgggcaccaaggctgccctggcaggaggcaccaccatgatcatggattttgctattccacacaaaggccactccctcattgaggcctttgacacctggcgaagctgggctgactcgcaagtctgctgcgattacagccttgcatgtggcag

SEQ ID NO: 854 - DNA, 399 bp, Bos taurus
  Clone ID: 04-LIB34-010-Q1-E1-A11
gcggcttccgtgaagataacattccccagctcgaagaggtttctcaatttctgcacagttgcactggtttccgcctccgaccagtcgctggcctgctttcttctcgggatttcttgggtggcctggctttccgagtcttccactgcactcagtacatcagacatgggtctaagcccatgtatacaccataaccggacatatgccatgagctcttgggacatgtacctttgttttcagatcgcagctttgcccagttttcgcaggagatcggccttgcctccctgggtgcacctgatgagtacattgaaaaacttgcaacaatttactggtttactgtggagtttgggctctgcaagcaaggagactccataaaggcatatggtgctgggctcctgtcat

SEQ ID NO: 855 - DNA, 381 bp, Bos taurus
  Clone ID: 04-LIB34-010-Q1-E2-A7
gataaatttggggagatcctgaagaaaaaagctgctgaagcccacgtggatgctcattactatgaacagaatgagcagccaacaggaacttgtgctgcgtgcatcaccggtggcaacagatcacttgtagctaatcttgctgctgccaactgttacaaaaaagaaaaacatcttgatatggagaaaaactggatgttggtagacaaagcaagagtttattatatagcaggttttttcctcacagtttctccagagtcggttttaaaagtggctcaccatgcttctgaaaacaacagaattttcactttgaatctgtcctgcacatttattagtcagttctacaaggaatcattgatgaaagttatgccttttgttgacata

SEQ ID NO: 856 - DNA, 420 bp, Bos taurus
  Clone ID: 04-LIB34-011-Q1-E1-A7
aggacgcgtggggcctggaaggcagagcaactggacctcgcctaagctgtgtctctgactcatttctgactttaggcaagttcttccaatgggaaaaatggcgaagatgtttagtttcatccttgtcaccactgctctggtaatgggcaggggaagctcggctctggagaactgcctccaggagcaggcgcggctcagagcccaagtgtacctgctggagacccgggtcaagcagcaacaagtcaagatctcgcagcttttgcatgagaaacaagtccagctccttgataaaggagaggagaatagtgtcattgaccttggaggaaagaggcaatacgcagattgttcagagattttcaatgacgggtacaagcagagtggattttataaaatcaaacctctccagagcccagcagaatt

SEQ ID NO: 857 - DNA, 417 bp, Bos taurus
  Clone ID: 04-LIB34-012-Q1-E1-A11
gtcgacccacgcgatccgggaagagcctgtaagtctgtaattcacatctcctgccagcagagaaaagaagaaacatgagcacggcaggaaaagtaataaaatgcaaagcagctgtgctgtgggagctcaataaaccattttccattgaggaggtggaggttgcaccccctaaggcccatgaagttcgtattaagatggtggccacaggaatctgtcgctcagatgaccatgtggttaatggatctctggtcacacgtcttcctgtggtcttaggtcatgagggagccggcattgtggagagcattggagaaggggtgactacagtaagaccaggtgataaagtcatcccactctttattccccagtgtggaaagtgcaatgtttgtaaacacccagaagccaacctttgcctgaaat

SEQ ID NO: 858 - DNA, 405 bp, Bos taurus
  Clone ID: 04-LIB34-013-Q1-E1-A7
gccatggccgccttacgtgccctgctgccccgcgtccgcgccccgctgcggccctggctcttctgcccggtgcagcgctccttcgcctcgagcgcagcctttgagtacatcatcacagcatagaagggaacgaacagcaacgtggggttgatccagctgaaccgccccaaggccctcaatgcgctctgcaacggcctgatcgtggagctcagccaggcactgcaggccttcgaggaagactcagccgtgggggccattgtcctcacaggcggggagaatgtatttgcagctggagccgacatcaaggaaatgcacagcctcacgttccagaactgttactctggcgggtttttgagccactgggaccagctcacacgtgtcaagaaggcagtcatagctgctgtc

SEQ ID NO: 859 - DNA, 399 bp, Bos taurus
  Clone ID: 04-LIB34-014-Q1-E1-A11
cagcgccggcgtgacccacccgccatgctcgccccagcgctcgtcatgctgttggggtttctctgccacgttgctatcgcaagacgaacctgccccaagccagatgagctaccgttttccacggtggttccactgaaacgggcctatgagcccggggagcatataggcttcacctgccagccgggctacgtgtcccggggagggatccggcggtttacatgcccgctcacaggactctggcccatcaacacgcggaaatgcatgcccagagtatgtccttttgctgggatcttagaatacggaacggtacgctatacagcgtttgagtatcccatcaccatcgggttttcttgccacacggagttttagctgaaaagatctaattctgcaaaatgcact

SEQ ID NO: 860 - DNA, 412 bp, Bos taurus
  unsure (268),(373),(382),(400): unsure at all n locations; Clone ID: 04-LIB34-014-Q1-E1-A7
aagatgaaagccaaggaagggaggaatgtgtatagttcttcgcgctatgatgattatgacagatacagacgttctagaagccgaagttatgacagaagaagatccaggagtcggtccttcgattacaactatagaagatcttatagtcctagaaacagtagaccgactggaagaccacggcgtagcagaagccattccgacaatgatagccaagtaaacaagaagaataatgacagataatgcttaagaaaggaaaggtgctacgtanagtgtgagctcttaagttacaacccaggaaaaaggcctgggaactattatactattctcttgagaatttggccctgtaagctgctacatccagttcagctaacanaatcctgtnatacacagagaagaatanagaaaaaccaaa

SEQ ID NO: 861 - DNA, 418 bp, Bos taurus
  unsure (390): unsure at all n locations; Clone ID: 04-LIB34-015-Q1-E1-A7
tcctctgattgcagacatggccactgtggtcgatgtgactgtccattctgagaaatggaaaccgatgaccttccctgcccatccgggagacagagtgaataagatcaaggaacatgtgcgctctaagaccagggttcccgtgcaggaccaggtcctgcagctgggctcgaagaccctaaagccgcagagagctctgtcatcgtatggcatcgacaaggagacgaccatccacctcaccctgaaggtggtgaagcccagtgatgaggagctgcccttggttttggtggagcctggtgagggggggcagaggcatgagctccatgtgcgaatgtccagctcagtggcccaggtgaaggagatgatcaagatgaggaccgctgtacccccgangaagcagattgtgaactgcaatggaaag

SEQ ID NO: 862 - DNA, 387 bp, Bos taurus
  Clone ID: 04-LIB34-016-Q1-E1-A11
gggatttggtaatgtgggcctgcactctatgagatatttacatcgttttggtgctaaatgtgttgctgttggtgagtctgatggcagcatatggaatccagatggtattgacccaaaggaactggaagacttcaaattgcaacatggaacaatcctgggctttcccaaagcaaagatctatgaagggagcatcttggaggttgactgtgacatactaatccctgctgccagcgagaagcagctgaccaagtccaatgcaccaagagtcaaagccaagatcattgctgaaggtgccaacggaccgacaactccagaagctgataagattttcctagagaggaacattatggttattccagatctctacctgaatgctggaggagtgac

SEQ ID NO: 863 - DNA, 419 bp, Bos taurus
  Clone ID: 04-LIB34-016-Q1-E1-A7
agaaagagtcgaccctgcacctggtcctccgtctgaggggtggtatgcagatcttcgtgaagaccctgaccggcaagaccatcaccctggaagtggagcccagtgacaccatcgagaacgtgaaggccaagatccaggataaggaaggcattccccctgaccagcagaggctcatctttgccggcaagcagctggaagatggccgcactctttctgattacaacatccagaaagagtcgaccctgcacctggtccttcgtctgaggggtggctgttaattcttcagtcttctattcataatgttcaatgatgacatccttctgcactctagccatttaccccaatttaagtttagaaattaccagtttcagtaagagctgaacctgttcaaaatattaataaaagttttgttgcatgca

SEQ ID NO: 864 - DNA, 403 bp, Bos taurus
  Clone ID: 04-LIB34-017-Q1-E1-A11
cgccgccaagatgcagattttcgtgaagaccctgacggggaagaccatcactctcgaggtcgagccctcggatacaatagaaaatgttaagggcaagattcaagataaagaaaggaatcctcctgaacaacaaagactgatccttggcgggaagcaactgggaaatagacctaccttggccgaacaaaacaatccaaaaggattcaatcctcacaccaagtgtagaaattctcgtgggggcgcaaagaaaagagagaaaatctcttacaacactcacaagaagaacacgtaagagaaagaaagttaaattggctgttctgaaatactacaaagtggatgagaatggcaaaatcagtcgccttcgccgggagtgttcctcatatgaatattgtgctggagtttt

SEQ ID NO: 865 - DNA, 383 bp, Bos taurus
  Clone ID: 04-LIB34-018-Q1-E1-A7
aggccctctcttcctggctggttgagagtttaccccgccgagctgcgcaatgcggaggctgcaggtggtgctgggtcacctgaagggccggcccgcttcggacccggagccgcaggccaccccgtgttggagcggcgcgcggcgggcgtccgcagaggatgtcgtggtggtgcacgggcggcgcacggccattggccggtcgggccgcggcggcttcaaggacaccacccccgacgagcttctctccgccgtcatgaccgcggttctccaggacgtcaagctgagcccggcccacctgggagatatctgcgtgggaaacgtgcttcagcctggggccggagcgaccatggcccgaattgcccaagtttctgagtgacatcccg

SEQ ID NO: 866 - DNA, 385 bp, Bos taurus
  Clone ID: 04-LIB34-019-Q1-E1-A7
aaacatatgcttacttcattggtggagatgctggagatgcatttgatggctacgattttggcgatgattctagtgacaagtttttcacatcccataatgggatgcagttcagtacttgggacagtgacaatgataagtatgatggcaactgtgctgaacaggatggatctggttggtggatgaacaaatgtcacgctggccacctcaatggagtttattatcaaggtggcacttactcaaaaacatctactcctaatggttatgataatggcattatttgggccacatggaaatcgcggtggtattccatgaagaaaaccaccatgaagattatcccacttaacagacgtgccatcggagaaggacatcagcaccaactgggggg

SEQ ID NO: 867 - DNA, 415 bp, Bos taurus
  Clone ID: 04-LIB34-020-Q1-E2-A7
aataaatttggggagatcctgaagaaagaagctgctgaaccacacgtaggtgctcattagtaagaacagaatgagcaggcaacaggaacttgtgctgcgtgcatcaccggtggcaacagatcacttgtagctaatcttgctgctgccaactgttacaaaatagaaaaacatcttgatatggagaaaaactggatgttggtagacaaagcaagagtttattatatagcaggttttttcctcacagtttctccagagtcggttttaaaagtggctcaccatgcttctgaaaacaacagaattttcactttgaatctgtctgcaccatttattagtcagttctacaaggaatcattgatgaaagttatgccttttgttgacatactttttggaaacgagatgggagctgccgcgtttg

SEQ ID NO: 868 - DNA, 389 bp, Bos taurus
  Clone ID: 04-LIB34-021-Q1-E1-A7
cacctacaggagagtcgacaacaagacggtgaccagagagttcaatgtcaaccccaacaagaccaccttcggggggaattgctccgccacactggcaactctggagctccacagcgagaacctcctgctcctggcgctccagttcgtgatgaacgagagctccagcagggtgttccttcaaggagtccagctgaacctgaccctgcccgacgccaaagaaggcagcttcacggccaccaacagctcactgagggcgctgcaggccacggcggggaactcgtacaagtgcaacgctgagcagcgtctgcgggtcaccagcagcttctccctcaacatgttccgagtgtggctgcaggcgttccgcgtggacggggacaagttcgggcctg

SEQ ID NO: 869 - DNA, 414 bp, Bos taurus
  Clone ID: 04-LIB34-022-Q1-E1-A11
ggttaaacaggagcgcaagttcatcagccacatcaagtgcagggaagcccttaaactgaaggagggggcacactatctcgtgtggggcgtgtcctctgacctgtggggcgagaaacccaagatcagctacatcatcgggaaggacacctgggtggagctgtggcccgaggctgaagaatgtcaagatgaggagaaccagaaacagtgcgaggacctggccaacttcacagagaacatggtcgtctttggctgccccaactgatcccacacacatacaccctctcatacacactgtccacgcaataaagcttcacttctgttccacaaaaaaaaaaaagggcggacggtcgacacgctacaggattaaatcttacttaatcctacatcctacgtcatcgatcgtctaaactgtca

SEQ ID NO: 870 - DNA, 396 bp, Bos taurus
  Clone ID: 04-LIB34-026-Q1-E1-A7
gctgctgggagaggtcgctcggcgatgatgctgcgaggaggctgccagcgcgtcggggcgcggctgagggggctgcgccgcgggccccggggccccgccgacggcgcccggcggggcgtggtctcctgcatcgacccttccatgggactaagtgaagagcagaaagagttccagaaagtggccttcaactttgctgcccgggagatggcgccgcacatggcagagtgggaccagaaggagctgttccctgtggacacgatgcggaaggcagcgcagctgggcttcgggggggtgtatgttcaaacagatgtcggaggggcgggcctctcgcggctggacacctccgtcatctttgaagccttggccacaggctgcagcagcaccacgggctacatg

SEQ ID NO: 871 - DNA, 415 bp, Bos taurus
  Clone ID: 04-LIB34-027-Q1-E1-A7
gacagatgagccatcccggggaggtgtgctccgctctcaacctgtgtgagtctcttcagaagcacctggcggagctgaatcaccagaaacaactcgagtccaatcagatcccggagctggatatggctgaggtggtggctcccttcatggccaacatccccttcctcctgtaccctcaggacggctcccacagcaagccccagcccaagaaggctaatgggaacgtctgccaggactgcattcagctggtaaccgacgtccaggaagctctgaggaccaactccaccttcgtcgaggccttggtggaccacgctaaggaggagtgcgaccgcctgtggcctggcatgtccgacatgtgcaagaactacatcaaccagtattcggaagttgctatcaaaatggtgatgcaatatgc

SEQ ID NO: 872 - DNA, 403 bp, Bos taurus
  Clone ID: 04-LIB34-028-Q1-E1-A11
acagaccagccaagcctgtgagtgacaccccagacagaggaaccagagccatgcggagtctcagcggactgctgttgttactgactgcctgcctggcagtaaacgccagcgccgtgcccacattgcccgatgacattcaagtgcaggagaacttcgacctgtctaggatctatgggaagtggttcaatgtggccgtgggctccacctgcccatggctgaagaggttcaaggagaagatgaccatgagcacagtggtgttgaaagcggggccgacgagcaaggagatcagcgtcaccaacactcacaggcggaaaggtgtctgtgaatcgatctctggtacttatgagaaaacaagcactgatgggaagtttctctatcacaaacccaagtgggatatcaccat

SEQ ID NO: 873 - DNA, 418 bp, Bos taurus
  Clone ID: 04-LIB34-029-Q1-E1-A7
aaattttgtacattttcgatcaaatgtacacctcccctttgctaacaaccgtctgctctcaaggatgttgtgggtttgatttctgagtgttccacggtgtctgtaaatcaaaaccaaagagctcatttgatgaagctgtttattatcagattcgcttctgaattggccagaggaaatctgaatgtatcatcctgtgtgtgtttggatatagatattggaaggctcccagggagggaattgtgagtttcacaacctttataaagatagctcaatattgatggcaatattgagatggatacctgctctgacaaataacttttaggactatgatttccaaagaactaaagagggctttcctgatgtcggtatctatgggttagtcctctggattgttttacctttgaaactgtgctccaaa

SEQ ID NO: 874 - DNA, 394 bp, Bos taurus
  unsure (381): unsure at all n locations; Clone ID: 04-LIB34-030-Q1-E1-A11
ctcaactcagatggaatactgccgcaccccgtgtactgttacttgcaatattcctgtggtgtctggcaaagaatgtgaggaaatcatcaggaatggaggtgaaacatctgaaatgtacctcattcagcctgaggattctagcaaaccatatagagtatactgtgatatgaaaacggaaaaaggaggatggacagtaattcagaaccgtcaagatggtagtgttgactttggcaggaaatgggatccatataaacaaggatttggaaatattgcaaccaatgcagaagggaagaaatactgtggtgtaccaagtgagtattggctcgggaatgacagaattagccaacttaccaatatgggaccacaaagcttttgattganatggaggactgga

SEQ ID NO: 875 - DNA, 423 bp, Bos taurus
  Clone ID: 04-LIB34-031-Q1-E1-A7
gcctgtgagtgacaccccagacagaggaaccagagccatgcggagtctcagcggactgctgttgttactgactgcctgcctggcggtaaacgccagctccgtgcccacattgcccgatgacattcaagtgcaggagaacttcgacctgtctaggatctatgggaagtggttcaatgtggccgtgggctccacctgcccatggctgaagaggttcaaggagaagatgaccatgagcacagtggtgttgaaagcggggccgacgagcaaggagatcagcgtcaccaacactcacaggcggaaaggtgtctgtgaatcgatctctggtacttatgagaaaacaagcactgatgggaagtttctctatcacaaagccaagtggaatatcaccatggagtcctatgtggtccacaccaactacgatga

SEQ ID NO: 876 - DNA, 400 bp, Bos taurus
  Clone ID: 04-LIB34-032-Q1-E1-A11
ggcacatggtactgtgccatgttcaagtgcatgatttgcgactgtaggcatgccctggcttgctcacagggccttcattgtactatatcattcagggggtgatcacctataatgttcgtatccagtacaactgccacatgtccatcaactatctgtactccatgggtggtacatactagtcagagcgattgctgtacacttgcacggctcagggcatttgggacagccacccgataggatagaagattcctcagtgtttgctactatgtcgtaagtcattcaaccctgtcgagcagttgcattgcatcattgtcggtctaaaggctaatcatggcaacttccccttgcatgcctatattaacatcccatggccacgtggtggttccctgatgggggatcg

SEQ ID NO: 877 - DNA, 430 bp, Bos taurus
  Clone ID: 04-LIB34-033-Q1-E1-A7
ctactcttgtgagatgccatattacagcatggaatatgaatggagcgaggtgtatcactgcagtggcaatgggagctgggtgaacaatgtgctgggcatagagccgccaaaatgcattgcagtctgtggcacccccagcgagccttttagatcaacacagggaatatttggaggctccattgcgaagattgaaaatttcgcctggcaagtcttcttctcgaactcatgggctggtggggctctcattgatgaatactgggtgctgacagctgcccatgtcctggatggaaacgatatcccagtgatgtatgttgggtcctcctcagtggtcacctcacaattgtcaagtgctcacatgctcactgcaaatagagtgtttatccatccactatgggaagtcctggatccttcgataacacgatagaatttt

SEQ ID NO: 878 - DNA, 280 bp, Bos taurus
  Clone ID: 04-LIB34-036-Q1-E1-A11
aacttaacacacttgccatcggagaaggacagcagcaccaactggggggagccaaacaggctggagacgtataaaagaccatttcaaaagtgatttacttttttaaagaactttatctgaaaagaaaaagataatatttttcctatgggacaatggacttgcaaagcctcacttcactttaaaagtaaaaagaacccatgttgagaactccactaacagttttatgccggtgataatttatctacataccatttcaataaatattttgtttcctaagact

SEQ ID NO: 879 - DNA, 376 bp, Bos taurus
  Clone ID: 04-LIB34-036-Q1-E1-A7
acagcccccgacggtgaaattcaccatcaggatctaccaccccaacgtggttcagggaccggagggtgtgcctgcccatcatcagcatgaacaactggaaagccatcaccaggacctgccaagtcttggcagccctcaacatgctggtgaatcaaccggagccgggacagcccgttcggctggagctcgcagagcagctgacacaagacccacaactgtttgaccagatggtccaagagttcaccctccagtttggagtggaccggccctcctaacccatcttctgaaccgcctgctttccgtgtgacagatggacgcccctcgtggatgggggacccgaccctctttgcgattttgcacttgctcatgtcttcca

SEQ ID NO: 880 - DNA, 350 bp, Bos taurus
  Clone ID: 04-LIB34-037-Q1-E1-A7
gcaatactctatagtgagtcgtattaagggagacggcaaggatacggcatgagtagttggatggtgtttataaaataaaagccaacaagaggattcctgctaaatgttttatatatatgactgtgaagaaagctgagcaccgaagaattgatgcgtttgaactgtggtgttggagcagactcttgaaagtcccttggactgcaaggacatccaaagcagtccattctaaaggaaatcagtcctgggtgttctttggaaaggacgatgctaaagccgaaactccagtaatttgggcacctcatggcaagagttgactcattgggaaacactctgatgctgggagggattgg

SEQ ID NO: 881 - DNA, 416 bp, Bos taurus
  Clone ID: 04-LIB34-038-Q1-E1-A11
aactctacctcctgaacttactaatgggaaaaggaaagaaatacacaaagaataatatgcacacaatgacgttgtggaatatgcttgcaaccccaaatttctgatgaagggttctcataaaattcagtgtgttgatggagaatggacagctttacctgtgtgtattgaagaggagcgtacctgtggtaatatacctgaccttgatcacggcgatgtcaagccttctgtccctccctatcaccatggagactcggttgagttcagttgcagagaagcatttacaatgattggacccagaattatcatgtgtattactggagagtggacccagcctcctcagtgcattgcaacagatcaacttaggaagtgtaaagggtcaatattatttccacctgaggggaagacagcacataaga

SEQ ID NO: 882 - DNA, 422 bp, Bos taurus
  unsure (395): unsure at all n locations; Clone ID: 04-LIB34-039-Q1-E1-A7
gcatccgggagagcaccctgggccgggaccaccccgctgtggcggccacactcaacaacctggctgtgctctatgggaagaggggcaaatataaggaggcggagccgctgtgccagcgggcactggagattcgagaaaaggtcctgggtaccaaccacccggatgtggcaaagcagctaaacaacctggccctgttgtgccaaaaccagggcaagtacgaggctgtggaacgctattaccggcgggcactggccatctatgaggggcagctggggccggacaaccctaacgtggcccggaccaagaacaacctggcttcctgttacctgaaacaaggcaaatatgctgaagctgagactctctacaaggagatcctgacgcgtgcccatgtgcangagtttggctctgtgggatgatgacac

SEQ ID NO: 883 - DNA, 389 bp, Bos taurus
  Clone ID: 04-LIB34-041-Q1-E1-A7
cttacatgtcaccttgtttagcaggatgtacatcttcaagtggcagcaaaaagtctattgtgtttcataactgtagctgtgtggaagaaaatggtttccagagcaaaaataactcaatgaagttgggtgaatgtccgaaaagtgatgactgtaaaagaaaattttatatttacatagtagtgcaaatacttacccttttttctgctgcattaggaagcacctcaaatatcatgctgatttttaaaaatgttgaacctgaactgaaatcacttgccatgggtttccattcactaactattcgaacgctaggaggaattcgagctcctatatattttggagctctgattgatagagcttgtatgaagtggtccatcaacaactatgggaag

SEQ ID NO: 884 - DNA, 414 bp, Bos taurus
  Clone ID: 04-LIB34-042-Q1-E1-A11
tggaggactataaaaatcagcagaagcaacttgaacaggttattgccataaacctacttccctctagagacattcaatacttaccattgataaaaatgagtacaattacaggccctgttcccagagagttcaagagccagctccaagaggcccctctagaatggaaggcactgctggaaatgcagcagacgaaaatggtgttggaaactttcggtggcgatggacatgccagaggagactctgtatctcaaggaacaggattagcaccaggaagtcccagaaagcctggaaccagtagtattggaaatgtgaaccctgggagctatggacctggaagtagtggcacttggaaccccggccgccctgagcccggaagtgctggcacctggaaccccggccgccccgagcccggaa

SEQ ID NO: 885 - DNA, 412 bp, Bos taurus
  Clone ID: 04-LIB34-043-Q1-E1-A7
cccacctcatggaggtccaggtgaacggaggcactgtggccgagaaactggactgggcccgtgagaggctcgagcagcaggtccctgtgagccaagtgtttggccaggatgagatgattgatgtcattggggtgaccaagggcaaaggctacaaaggtgtcaccagccgttggcacaccaagaagctgccccgtaagacccaccgaggactgcgcaaggttgcctgtattggggcgtggcatcctgcccgggtggccttctctgtggctcgggctgggcagaaaggctaccatcaccgcactgagattaacaagaagatctacaagattggtcagggctacctcatcaatgacggcaaactgatcaagaacaatgcctctactgattacgatctgtctgacaagagcaatca

SEQ ID NO: 886 - DNA, 347 bp, Bos taurus
  Clone ID: 04-LIB34-046-Q1-E1-A7
aatgaacaaaggctgtatgcacatggcacgaagttaagttatacttgtgaagaaggcttcaagatatctggaaataatgtgataatatgccacatgggaaagtggggctctccacctcagtgcatagatgtttcctgtgtgaatccacctcaagtggaaaatgctattatacacaatcaaaagtctagatatcagagtggtgagagagcacgttacgaatgcattgggaagtatgacctttttggggagacagaagtcataggtttggatggaatttggacagaagcacctcagtgttaaaactcgcagaggaaaatgtggggctcctccacgaatatacgatgggg

SEQ ID NO: 887 - DNA, 429 bp, Bos taurus
  Clone ID: 04-LIB34-047-Q1-E1-A7
cggacgcgtgggttctgctcttttattgggatgttcatgttttattgtgctcactggcagacttatgtttcaggcgtgttgaggtttggaaaagtggatgtaactgaaattcagatagctttagtgatcatctttgtgttatctacatttggaggagcaacaatgtgggactacacgatacccatcctagaaataaaattgaagatcttaccagttcttggagtagtaggtggagcaatattttcctgttcaaattatttccatgttatcctccatggtggtgttggcaagaatggatccactatagcaggtaccagtgtcttatcacctggactccacataggaataattattatactggcaataatgatttataaaaagtcagcagctaagttggtttgaaagcatccctgtcgttataccctaatg

SEQ ID NO: 888 - DNA, 425 bp, Bos taurus
  Clone ID: 04-LIB34-048-Q1-E1-A11
gtccagagggattgcctcagaccacactatctccactcgctcagacctgtggaagattagcgaccatgatttccaatgggataggaaccgtcaccgctggaaaaaggagtatatgtcttctccctttgctgcttattggcctctggggctgtgtgacctgtcatcggagccctgtggaagacgtctgcacagccaaacctcgggacattcctgtgaatcccatgtgtatttaccgttcctcagagaagaaggcaactgagggccaaggctccgagcagaagatccctggggccaccaaccggcgggtctgggaactgtccaaggccaattcccactttgccactgccttctatcagcatttggcagactccaagaataacaatgacaacattttcctgtcacccctgagtatctccacagctttt

SEQ ID NO: 889 - DNA, 209 bp, Bos taurus
  Clone ID: 04-LIB34-048-Q1-E1-A7
atctgaatgtcaaagtggctaaattcaatgaagcgcgggtaaacggagggagtaaatatgactctcttagggtagccaaatgcctcgtcatcaaattattgactcgcatgaatggatgaatcacattccgactgtcgctacctactatccagcgaaaccacagtcaagggaatgggcttggaggcctcagcgatgaaacaatgacccag

SEQ ID NO: 890 - DNA, 305 bp, Bos taurus
  Clone ID: 04-LIB34-049-Q1-E1-A7
aatccacgcaactttggtagaatgaattgcgtgacttttaaatctcatctccttctcttcggcactgcgtattccaacggtgtgttccttagacatgtacatacaagtgagattgcacacctgcttacacatttgggagaagcacattttagtatgcctgcacagtgagatgtcttttcgcaatatctccagcaatctcaagttgataagcatgtaaagttactacacaagctcactcagtttgcagctacatgtgttgctgatgagttgcatgtgggctgtgactagtcgattctcactctcct

SEQ ID NO: 891 - DNA, 453 bp, Bos taurus
  Clone ID: 04-LIB34-050-Q1-E1-A7
ccgggtccacccaagcgtccggacaattcgagtgaagaaatatccttacttgtggctctgttacaacggtgaaatctacaaccacaagaagctgcaacaccattttgaatttgaataccagaccaaagtggatggtgaaataatccttcatctttatgacaaaggaggaattgaacaaacagtttgtatgttggatggagtatttgcatttattttactggatactgccaataagaaagtgttcttgggcagagatacctatggggtgagacctttgtttaaagccatgacagaagatggatttttggccgtgtgttcagaagctaaaggactggttaacttgaagcactccatgactccttttttaaaagtggagccttttctgccaggacattatgaagttttggacctaaagccaaatggcaaagtggcgtcggtggaaatggtgaagca

SEQ ID NO: 892 - DNA, 233 bp, Bos taurus
  Clone ID: 04-LIB34-051-Q1-E1-A7
tttcaagaatgctgccaagctgaagataaaggtgcctgcctgctaccaaagattgaaactatgagagaaaaagtactgacttcatctgccagacagagactcaggtgtgccagtattcaaaaatttggagaaagagctttaaaagcatggtcagtagctcgcctgagccagaaatttcccaaggctgagtttgtagaagttaccaagctagtgacagatctcacaaaagtcca

SEQ ID NO: 893 - DNA, 244 bp, Bos taurus
  Clone ID: 04-LIB34-052-Q1-E1-A11
gtcgcggaagatggccgggagaagtttcaagagaccgggcgtttcagggactctgctcccgccacgcattcagcaacctgccacgcctcgacgggacctcctcgccaaggaggaagaatataaacgtccattatctgaagggacagttcatttacattcagaaactaagccaaagaccaaaaatgttgatcccataaacaaagttcaaaacaaactatactctgcaagtaaaggaaggaaatct

SEQ ID NO: 894 - DNA, 237 bp, Bos taurus
  Clone ID: 04-LIB34-052-Q1-E1-A7
ctctatgcaaaaatcaagaaattgttatagagatttctttcgagacatctccaaaatcttctgctcttcagtggctcactcctgaacaaacttctgggaaagagcacccctatctctttagtcagtgccaggctatccactgtagagctattcttccttgccaggacactccttcagtgaaattaacctacagcgcagaggtgtctgtccccaaagaactggtggcacttatgagtg

SEQ ID NO: 895 - DNA, 338 bp, Bos taurus
  Clone ID: 04-LIB34-056-Q1-E1-A11
gtggtgactctcatctgctccaagatgaacccactgtggaccctcctctttgtgctctcagcccccagaggggtcctgtcccaggtgcagctgcgggagtcgggccccagcctggtgaagccctcacagaccctctccctcacctgcacggtctctggattcgcattgactatgtatagtgtaggctgggtccgccaggctccagggaaggcgtgggagtgtcttggtagtataataagcaatggacgtacaagacttaccccagccctgaaatcccgtctcaggatcaccaaggacaattccaagaaccaagtctctctgtcactggacagcgtgac

SEQ ID NO: 896 - DNA, 373 bp, Bos taurus
  Clone ID: 04-LIB34-056-Q1-E1-A7
cagcagctcaaccccacagaagccagcaccaagtgaagctgaaaaaataaggccaaaatgtgaaaatgaccttcaaattaaatatatgaaattggatatattccccaagtcaatctacacaattgcatttccagcatttgtataaggtacctaattaacagtgatccaaaaataggaattggatttgtgcaaacatggagaaattgacttccataaaatttaagtcaaagaaattttgacccaaaccatatttttattcagctgagaggtggttgcagcgtttggttagcatgtctttctttttctttttccagtattctacttgcgttaatgagaacagaaacgtaaactataacctaggggtttctgttgg

SEQ ID NO: 897 - DNA, 220 bp, Bos taurus
  Clone ID: 04-LIB34-057-Q1-E1-A7
tttgatgccatgagagatgctgaagttcttcgtaaagcaatgaagggttttggtacagacgagcaggcaattatagatgttgtggccagtcgttccaatgaccaaaggcaaaaaattaaagcagcttttaagaccatgtatggcaaggatttaatcaaagatcttaaatcagagttaagtggagatatggaagaactgatccttgccctgttcatgccat

SEQ ID NO: 898 - DNA, 223 bp, Bos taurus
  Clone ID: 04-LIB34-058-Q1-E1-A11
ggcggggcgcattgctgaccacaaactgagcagcttcaaggcggacgtgcgagctcacggggagggccaagaattcatgacaacctgcctggtggacgaggaagagatgaagaaactgctccgagaacggggccacatgctggagaaccacgttgaacgcctgtgggcctacctgaccatccaggagctgctggccaagaggatgaagttggagggccaggag

SEQ ID NO: 899 - DNA, 224 bp, Bos taurus
  Clone ID: 04-LIB34-058-Q1-E1-A7
gccctacaagcaatcttatataaccgcatcggcgacattggtttcattttagcaatagcatggttcctaacaaatctcaatacctgagacctccaacagatcttcatactaaacccaagcgactcaaacatacccttgattggactagcattagctgcaaccggaaaatccgcccaatttggcctccacccgtgacttccctctgcaatagaaggcccaactcc

SEQ ID NO: 900 - DNA, 229 bp, Bos taurus
  Clone ID: 04-LIB34-059-Q1-E1-A11
ggtcgaaacaacgtccggaagttaccgtcccagtgagagatctcacaaaggccgagaaggtatgctgccatggggacctacttgaatgcgcagtgtaacggggcagatccggccaactacatgcgtcagaacctgcatctcggctgcattatacggaaggactgcagtcataagactctgatggacagatcccactgcattgctgaggtagacaaaaataccatacctg

SEQ ID NO: 901 - DNA, 236 bp, Bos taurus
  Clone ID: 04-LIB34-060-Q1-E1-A7
gggggctcatgaccacactgtgacagagatcctggaaggtctcaagttcaacctcacagagacccccgagacagaaatccaccagggcttccagcacctcctgcagacgttcaatcagcccagcaaccagctgcagctgagcgtgggcaacgccatgtttgtgtcagaggagctgaagctgctggacaaattcaggaaagatgccgaggctttttacgcctctgaggttttatcca

SEQ ID NO: 902 - DNA, 368 bp, Bos taurus
  Clone ID: 04-LIB34-061-Q1-E1-A7
aggttttggggaaaatacctatacgaaattgctagaagacatccctacttttatgcaccagaactcctttactatgctaataaatataatggagtttttcaagaatgctgccaagctgaagataaaggtgcctgcctgctaccaaagattgaaactatgagagaaaaagtactgacttcatctgccagacagagactcaggtgtgccagtattcaaaaatttggagaaagagctttaaaagcatggtcagtagctcgcctgagccagaaatttcccaaggctgagtttgtagaagttaccaagctagtgacagatctcacaaaagtccacaaggaatgctgccatggtgacctacttgaatgcgcaga

SEQ ID NO: 903 - DNA, 190 bp, Bos taurus
  Clone ID: 04-LIB34-062-Q1-E1-A7
cgaggattagagaccagtttggctgaatgtactttcactaagggagtacacaattcggaggggttggctggtgtggtgtgttacacagagagtgcagctcctccaaaaaaggactcctttcaatgtgtgaatgggaaacgcattcctcagaagaaggcctgtgatggtgtcaatgactgtgtagacaaga

SEQ ID NO: 904 - DNA, 243 bp, Bos taurus
  Clone ID: 04-LIB34-063-Q1-E1-A11
ggggggaggcttccaatttggatgtttaaagcaacttcaagtggtaatcctttccttagtaacaaagtatagataagtaagttaccctaatttaagtaaaccaacttctaaacactgagagcaaatccggtgtttaactggaacccaagatgaatttggcattggttaaagaagtgagaattgtactgtgtagaaagccgagtgctggagaaatgaagcctttggactccaatggtggggaaa

SEQ ID NO: 905 - DNA, 199 bp, Bos taurus
  Clone ID: 04-LIB34-065-Q1-E1-A11
cgcggagaagcgcagcggaggttttgctggtttcggaccccagcggccggatggtgaaatcctccctgcagcggatcctcaacagccactgcttcgccagagagaaggaaggggataaacccagcgccaccgtccacgccacccgcaccatgccgctccttagcctgcacagccgcggaggccgcagcagtgagagttc

SEQ ID NO: 906 - DNA, 215 bp, Bos taurus
  Clone ID: 04-LIB34-065-Q1-E1-A7
cacaaaactttggcacaatgaagtgggtgacttttatttctcttctccttctcttcagctctgcttattccaggggtgtgtttcgtcgagatacacacaagagtgagattgctcatcggtttaaagatttgggagaagaacattttaaagggctggtactgattgccttttctcagtatctccagcagtgtccatttgatgagcatgtaaaatta

SEQ ID NO: 907 - DNA, 246 bp, Bos taurus
  Clone ID: 04-LIB34-066-Q1-E1-A7
cggacgcgtggttgccgcccggcatccatcccagccctgacaaaatgctccagggccgcctttttgcctatcctgacactcaccgccaccgcctgggacccaactatctccagatacctgtgacctgtccctaccgtgctcgagtggccaactaccagcgtgacggccccatgtgcatgatggacaatcatggtggggctccacattactagcccaatagctttagtgctcccgatcatcaacctt

SEQ ID NO: 908 - DNA, 229 bp, Bos taurus
  Clone ID: 04-LIB34-067-Q1-E1-A11
gggaattcccgaggtcgtaccgaggcgtcctggggaaaggatatcagttatgtatacatgatactgtgaagaataatatcgcaactaagcttcgtgggctccgttcaattcaggagaatttgagaatcaagctacaaatattagaatcggatgtctcaactcagatggaatactgccgcaccccgtgtactgttacttgcaatattcctgtggtgtctggcaaagaatg

SEQ ID NO: 909 - DNA, 235 bp, Bos taurus
  Clone ID: 04-LIB34-067-Q1-E1-A7
gtcaccagccctgacctaggacagtgaatcgataatggcactctccatcacgcggggccttctgctgctggcagccctgtgctgcctggcccccatctccctggctggagttctccaaggacacgctgtccaagagacagatgatacatcccaccaggaagcagcatgccacaagattgcccccaacctggccaactttgccttcagcatataccaccatttggctcatcagtcc

SEQ ID NO: 910 - DNA, 237 bp, Bos taurus
  Clone ID: 04-LIB34-069-Q1-E1-A11
caaatatcaacgaagccctgctgcgggccatctttattttgaatgaagccaataacttgggaatgttggaccccaactctgtctcgctgatcatcttggtgtctgacggggatccaacagtaggtgaactgaaattgtcaaaaatccagaagaatgtgaagcagaacatacgagacaacatctccttgttcaagtttggggataggatttgatgtgggactaatgacttttttgaag

SEQ ID NO: 911 - DNA, 212 bp, Bos taurus
  Clone ID: 04-LIB34-069-Q1-E1-A7
gataaactccaggagtgtggccactatctattctctgaaggaatcacttctggctgttggtttggaaaaaaggagatccgtctctacgaaacgtttgttgtccagctccaggacccacgggaacaccggaagcagcccaaacagatgctaaaactgcaggatctggtaatcccctggggctccggagaacctgacgcccttcgcaaacctga

SEQ ID NO: 912 - DNA, 195 bp, Bos taurus
  unsure (112): unsure at all n locations; Clone ID: 04-LIB34-070-Q1-E1-A7
aaaagaagccgccttgtccacaggcttttgaagtgcgctcggcggccccgcggatctgtctcttgcttcaacagtgcttggacggaacagacccagggacgcccttgctcancctccgacaccctccaccttttttcagtcgcaccttcggagtcagcactcactgccgcataccgggaccagcacatttttact

SEQ ID NO: 913 - DNA, 401 bp, Bos taurus
  Clone ID: 04-LIB34-071-Q1-E1-A7
agaactttggcacaatgaagtgggtgacttttatttctcttctccttctcttcagctctgcttattccaggggtgtgtttcgtcgagatacacacaggagtgagattgctcatcggtttaaagatttgggagaagaacattttaaaggcctggtactgattgccttttctcagtatctccagcagtgtccatttgatgagcatgtaaaattagtgaacgagctaactgagtttgcaaaaacatgtgttgctgatgagtcccatgccggctgtgaaaagtcacttcacactctctttggagatgaattgtgtaaagttgcatcacttcgtgaaacctatggtgacatggctgactgctgtgagaaacaggagcctgaaagaaatgaatgcttcctgagccac

SEQ ID NO: 914 - DNA, 416 bp, Bos taurus
  unsure (373): unsure at all n locations; Clone ID: 04-LIB34-073-Q1-E1-A7
acttagcggagccgggagtgtgtggctgctggagaagctggagacctgcgcgagcccagtgtccggccggcaggggccttcggcttccccgacaccggaggacattggcggcagccccgggcctagctgccgagcacagccatgtctggtaatggcaacgcggccgcaatagcggaagaagacaccccaaagatgagagtgattcgagtgggtacccgcaagagccagctggctcgcatacagacggacagtgtggtggcaacgctgaaagctttatacccaggcctgcagtttgaaataattgctatgtccaccacgggggacaagattcttgataccgcgctctctaagattggagagaagagcctgtttnacaaggagctggagcatgctttggaaaggaatgaagtggacct

SEQ ID NO: 915 - DNA, 408 bp, Bos taurus
  Clone ID: 04-LIB34-074-Q1-E1-A7
ttcccgggccgacccaaacgtcaacaaaactttggcacaatgaagtgggtgacttttatttctcttctccttctcttcagctctgcttattccaggggtgtgtttcgtcgagatacacacaagagtgagattgctcatcggtttaaagatttgggagaagaacattttaaaggcctggtactgattgccttttctcagtatctccagcagtgtccatttgatgagcatgtaaaattagtgaacgaactaactgagtttgcaaaaacatgtgttgctgatgagtcccatgccggctgtgaaaagtcacttcacactctctttggagatgaattgtggtaagttgcatcccttcgtgaaacctatggtgacatggctgactgctgtgagaaacaagacctgaaagaaatg

SEQ ID NO: 916 - DNA, 368 bp, Bos taurus
  Clone ID: 04-LIB34-076-Q1-E1-A11
acaacacccagtagtgagtcgtattagtggaggaccaggagaaggatttgatgttgccaagacgggtgatgctcgaattgggtttgtgggttttccgtctgtggggaagtcaacgctgctcagtaacctggcaggggtatattctgaggtggcagcctatgagttcactaccctgaccactgtgcctggcgtcatcagatacaaaggtgctaagatccagcttctggatctcccaggtatcattgagggtgccaaggatgggaaaggtagaggccgtcaagtcattgcagtggccagaacgtgtaacttgatcttgattgttctggatgtcctgaaacccttgggacataagaagataattgaaaatg

SEQ ID NO: 917 - DNA, 449 bp, Bos taurus
  unsure (376): unsure at all n locations; Clone ID: 04-LIB34-076-Q1-E1-A7
tctgcatggcaacctttaaccctccaacagcaatgtggaaggctgccttcccccacgcatttgccccagagtcattggaggctaaaagaggaccgcagctgattatggtgagcagaggtccactggccatttggcacgggctactgctgctgctgttgctaccacttccaagccacggaggaccggccctgagacctcctctccccagccagacaactgaagactctcctgctctgcacctcagcagtggtcctggacaagaacctgttaccattatgacctttaacctcaccaagatcacaaaaatctcctcctcttttgagtttcggacttgggatccagagggagtcattttttatggtgataccaacccaanagaatgactggtttatgctggggctttcggatggcaggcctgaaatccagcttcataatcactgggctcagct

SEQ ID NO: 918 - DNA, 363 bp, Bos taurus
  Clone ID: 04-LIB34-077-Q1-E1-A7
tccgcacaagttactttactcttactaactatacccattataataataagctttaacacctacaaaccttccaactacccactctacgtaaaaacagctatctcatacgccttcattaccagcataattcccacaataatatttatccactcaggccaagaactaattatttcaaactgacactgactaaccatccaaactcttaaattatccctcagctttaaaatagactatttctcaataatatttatcccagtagcactattcgtcacatgatctattatagaattctcaatatgatatatatactcagaccccaatattaacaaattcttcaaatatctactcctattcctcattact

SEQ ID NO: 919 - DNA, 459 bp, Bos taurus
  Clone ID: 04-LIB34-078-Q1-E1-A11
tatagagagtcgtattatgacaaagctcgctacgacagggaaatgaaaaattatgtccctcctaaaggtgacaagaagggaaagaaaaaagatcccaacgctccgaaaaggcctccatctgccttcttcctgttttgctccgaacatcgcccaaagatcaaaagcgaacaccctggcttatccattggggatactgcaaaaaaattgggtgaaatgtggtctgagcagtcagccaaagataaacagccgtatgaacagaaagcagctaagctaaaggagaaatacgaaaaggatattgctgcataccgtgccaagggcaagagtgaagcgggaaaaaagggccctggcaggccgacaggctccaagaagaagaatgaaccagaagatgaggaagaagaagaggaagaggaagatgaagatgaggacgaagaggatgaagatgaggaataaatggctatc

SEQ ID NO: 920 - DNA, 450 bp, Bos taurus
  Clone ID: 04-LIB34-078-Q1-E1-A7
ttcctcttaacacttagcaggagtttcctcaattttaggagccatcaacttcattacaacaattatcaacataaagccccccgcaatgtcacaataccaaacccctctgttcgtatgatccgtaataattaccgccgtactactactactctcgctccctgtattagcagccggcatcacaatgctattaacagaccggaacctaaatacaaccttcttcgacccggcaggaggaggagaccctattctatatcaacacttattctgattctttggacaccccgaagtctatattttaatcttacctgggtttggaataatctctcatatcgtgacctactactcaggaaaaaaagaaccattcggatatatgggaatagtttgggctataatgtcaatcggatttctaggctttattttcttatttacagtaaggggtttaactggaat

SEQ ID NO: 921 - DNA, 418 bp, Bos taurus
  unsure (394): unsure at all n locations; Clone ID: 04-LIB34-079-Q1-E1-A11
tatcctcttatcaacataaacctaggagtcctatttatactagccatatcaagcctagccgtatactccattctctgatcaggctgagcttccaactcaaaatacgcactaatcggagccctacgagcagtagcacaaacaatctcatatgaagtaacgctagcaattatcctgttatcagtactcctaataagtgggtcctttaccctctccacattaattactacacaagaacaaatatggttaatcctcccagcatggcctctagcaataatatgatttatctcaacactagcagaaacaaaccgagctccatttgatttaactgaaggagaatcagagctagtctcgggcttcaacgtagaatatgcagcaagaccatttgccctcttcntcatagcagagtacgcaaatatta

SEQ ID NO: 922 - DNA, 382 bp, Bos taurus
  Clone ID: 04-LIB34-079-Q1-E1-A7
agaggtcttggggccgaaacgatctcaacctattctcaaactttaaatgggtaagaagcccggctcgctggcgtggagccgggcgtggaatgcgagtgcctagtgggccacttttggtaagcagaactggcgctgcgggatgaaccgaacgccgggttaaggcgcccgatgccgacgctcatcagaccccagaaaaggtgttggttgatatagacagcaggacggtggccatggaagtcggaatccgctaaggagtgtgtaacaactcacctgccgaatcaactagccctgaaaatggatggcgctggagcgtcgggcccatacccggccgtcgccggcagtcggagaggcgcgagagggacgggagcccggggcgcggggg

SEQ ID NO: 923 - DNA, 423 bp, Bos taurus
  Clone ID: 04-LIB34-081-Q1-E1-A7
aggacgcgtgggctgaacctggatgtgtccatccaactgcccagccgcaactctgcggtcaggcatcgtatcctctgggaatctgccagcctcctgcgctcagaagagactaaggaaaatgagcgtttcacagtaaaagctgaagggaaaggacaaggcaccttgtcggtagtgaccgtgtaccatgccaagctcaaaggcaaagtctcctgcaaaaagttcgacctccgggtttccatacgcccagcccccgaaacagtcaagaagcctcaggacgccaaaggttccatgatccttgacatctgtaccaagtacctgggagaccaggatgccactatgtccatcctggatatatccatgatgacaggcttctcacctgatgttgaagacctcaaaacgctgagcactggtgtccacagatac

SEQ ID NO: 924 - DNA, 427 bp, Bos taurus
  Clone ID: 04-LIB34-082-Q1-E1-A11
agagaaggatgtgttctcatgagcatatgatgagtgggaattcacacatcagatacttctctgagctgtaagccagtagattctgagccagagtaggctgcttaaattgcaaagctttgctgaagagtggtttgcatgaaagaattaattctgggactacacttataccaaggcctgctattttagagccatgacttagagctttatttatagaaagcaaattgtggatttttttaaaaagattgtcatttgagatatatatataataattcacggggggttaacttgtacccattttgtggttttcagtggaagtgctgagcaatgtattggcccttatttctgcctgtgctgtatgcatgcattttcaagcaagtaatagagccttatatgattctgtgtaatactgggttttacacagagagcc

SEQ ID NO: 925 - DNA, 346 bp, Bos taurus
  Clone ID: 04-LIB34-083-Q1-E1-A7
actccggactggcggataggccgcgtctggaatgagcgggtctgatcgggcacctgtggctcttagcggctatccctacgtctgggggagagaatctcatctgtgagaccgccttctctgcacggtccctctcagttcacccagtgacagctgcttcctggtccctgtcgcatacatggctgaatatgacccgcaggtcgtattgttcgtgaacgcttacagttatactgccacaattggtaactgcccccatcgccatatactattcatggtgctctggctcaattgattcatcttcaatgtcaacactgttgccaccaacaagcagcctgagaccgtacaaaag

SEQ ID NO: 926 - DNA, 418 bp, Bos taurus
  unsure (400),(406): unsure at all n locations; Clone ID: 04-LIB34-084-Q1-E1-A7
accgcggccaggcttgcgcgcagctcccgacaggcggactcccgagcgagatggagtgggtgtgggcgctggtgctactggcggcgctgggcagcgcccgggcggagcgcgactgccgggtgagcagcttccgagtcaaggagaacttcgacaaggctcgcttcgccggcacctggtacgccatggccaagaaggaccccgagggcctgtttctgcaagacaacatcgtcgccgagttctccgtggacgagaatggccacatgagcgccacggccaagggccgagtccgtctcttaaataactgggacgtgtgtgcagacatggtgggcaccttcacagacactgaggaccctgccaagttcaagatgaagtactggggcgtagcgtcctttctccaganaggganacgatgacactg

SEQ ID NO: 927 - DNA, 409 bp, Bos taurus
  Clone ID: 04-LIB34-085-Q1-E1-A11
ccgggccgacccaagcgtcaggaggcataggtcaacagcctgtgccgcagcatcgctaatgcatgagacttccacgatacccactatagagagttgctaataccatatactgtggccattgctgcctatgctctgactgtgttgggcaaactggtgggtgaccgcctcaccaaatttctgaacacagccaatgattggaaccgctgggaggaacccagccagaggctcgacattgtggacgccacgtcctacgccctcttggatctgctggtacgcatagactacgacactacgcctcctgtcgtgctctggctcaactatcagagatactatggacgtggttatggcaccacacacgccactttcacggagttccacaccttggcccaataccatgaagatgttcccg

SEQ ID NO: 928 - DNA, 385 bp, Bos taurus
  Clone ID: 04-LIB34-085-Q1-E1-A7
tcccggcccgaaacacgcgtcagccatgctggaggcactgggctccctggtggctgccctctggaccacgctccgtcctggcattgtcctactgggggcctttgtctttctcctctttgctgatttcctcaaaaggcagcacccaaagaactacccaccagggcccctgcgcctgcccttcataggcaatttcttccacctggacttggggaaagggatcttggttcctcagcaggttgtgaagaaatatgggaacattattaggctagattttggtgtaattcatttcatcgttataactggattgccctatatcaaagaagcccttgtcaaccaggaacataactttgtaaaccgccccatgatacctcttcagaaacatatc

SEQ ID NO: 929 - DNA, 471 bp, Bos taurus
  unsure (8): unsure at all n locations; Clone ID: 04-LIB34-086-Q1-E1-A7
gggtgacncaaacgtccgggtagccagaacagcatgggtggatatgactagttttgttagtagcttttgagttatttcaaattttcacaggcagccaacaagcagtgaaaagcagttattactctagaggaagctatgggacccaatttgcaccatgagtttgtgaaatctggattaaaaaattacctcttcagtgttttctcatgcaaactttcttctagcatgtgatattgagtaaactaaaacttttcagcttttctcaattaacattttggtagtgtacttctggagtgatgttatctgagtttaaagtagttttaagtatgttaaatgtggatcttttacaccacatcatcgtgaatacattggggaggcgtgcttttttggaaaactcaaggtgctagatccctaattcaaagaggacatttctcatgtttgttcattctagtttattttcatttaaaatctctt

SEQ ID NO: 930 - DNA, 383 bp, Bos taurus
  Clone ID: 05-BOVMS1-002-Q1-E1-B1
actgaattaggcactgatgcagataaggaacagtggaaagcggttcacaaacaagtggttgacagtgcttatgaggtgatcaaactgaaaggctacacatcctgggccattggactgtcagtggccgatttggcagaaagtataatgaagaatcttaggcgggtgcatccgatttccaccatgattaagggtctctatggaataaaagaggatgtcttccttagtgttccttgcatcttgggacagaatggaatctcagacgttgtgaaagtgactctgactcatgaagaagaggcctgtttgaagaagagtgcagatacactttgggggatccagaaagaactgcagttttaaagtcttctaatgttgtatcatttcactgt

SEQ ID NO: 931 - DNA, 407 bp, Bos taurus
  unsure (372): unsure at all n locations; Clone ID: 05-BOVMS1-003-Q1-E1-B9
taaggtggaactttccgggaaatgttccccggaaccccaattggttaattttccaaatacaatcaaataagttaccggtcaagaaaaaattaccctggataatggcttcattataatggaaaaaggaaaattatgataatccaaaatttcgttgtcgccctaatcccctttttggcggaatttggccttcctgttttggctcacccagaaacgctggtgaaagtaaaagatgctgaagatcagttgggtgcacgagtgggttacatcaaactggatctcaacagcggtaagatccttgagagttttcgccccgaagaacgttttcaaatgatgagcacttttaaagttctgctatgtggcgcggtattatcncgtattgacgccgggcaagagcaactcggtcgccg

SEQ ID NO: 932 - DNA, 468 bp, Bos taurus
  unsure (19): unsure at all n locations; Clone ID: 05-BOVMS1-007-Q1-E1-B1
ggtcgacgacgcgtccganaatgaagtgaggcacaagattcagcacagcagcacaatatagaacatgcacgactgcaagttcctacatcacaagtaagaagcagatcatcttcaagaggagacgtgaatgatcaggatgcaatccaggagaaattttacccacctcgcttcattcaagtgccagagaacatgtcaattgaagaaggaagattctgcagaatggacttcaaagtgagtggactaccagctcctgatgtgtcatggtatctaaatggacgaccagttcaatcagatgattttcacaaaatgatagtgtctgagaagggttttcattcactcatctttgaagtggtcagagcttcagatgcaggggcttatgcatgtgttgccaagaacagagcaagggaagccacctttactgtgcagctggacgtcctggcaaaagaacacaggagagcaccaatgttc

SEQ ID NO: 933 - DNA, 417 bp, Bos taurus
  Clone ID: 05-BOVMS1-007-Q1-E1-B9
cgtccgctgagttacaaggtcaaaatgacagtgaggcacaagattcagcacagcacaatatagaacatgcacgactgcaagttcctacatcacaagtaagaagcagatcatcttcaagaggagacgtgaatgatcaggatgcaatccaggagaaattttacccacctcgcttcattcaagtgccagagaacatgtcaattgaagaaggaagattctgcagaatggacttcaaagtgagtggactaccagctcctgatgtgtcatggtatctaaatggacgaccagttcaatcagatgattttcacaaaatgatagtgtctgagaagggttttcattcactcatctttgaagtggtcagagcttcagatgcaggggcttatgcatgtgttgccaagaacagagcaggagaagccacct

SEQ ID NO: 934 - DNA, 268 bp, Bos taurus
  Clone ID: 05-BOVMS1-009-Q1-E1-B9
atgcgacgtcatagctcgtctatagtgtcacctaaattcaattcactggccgtcgttttacaacgtcgtgactgggaaaaccctggcgttacccaacttaatcgccttgcagcacatccccctttcgccagctggcgtaatagcgaagaggcccgcaccgatcgcccttcccaacagttgcgcagcctgaatggcgaatgggacgcgccctgtaacggcgcattaagcgcggcgggtgtggtggttacgcgcagcgtgaccgctacac

SEQ ID NO: 935 - DNA, 452 bp, Bos taurus
  Clone ID: 05-BOVMS1-010-Q1-E1-B1
gcgtccgcttaatttttttttttttttttttttttttttttttttttttttttttttttttttttttttttttttttttttttttttttttttttttttttttttttttgggccaaaatcgcaaggggccgccctttttttttttttttccatttttaaaaagaaattttaaggaaaattttccaaaaacaaaaaacataggaaaagggtttttaaagaaaattccaggccatttttcaaaagttttgaattgctaaaaaaactattattaaaaatctgtcaaaggcaaagttaaaatttggcccccaaaaaaaaagcgaacccccttaaacagaacccggtttttaaaacaagggatactcaattcaaggaaaaggggcaatttcaaattggcaagccaattgcaataaatttaaggggtcccccatccaggggaagaaaatggtggcccc

SEQ ID NO: 936 - DNA, 366 bp, Bos taurus
  Clone ID: 05-BOVMS1-014-Q1-E1-B1
aaaaaataaagaacaaaataaagctgtcgttaaatttaaaaacaacaaaatattactaactgcccaaaatatcaatttgatgtagttcttttcatgcaagtttaaattcaattgttagttataattgttggacctccttgagatagtaacaacaaaataaagcaagctatctgcacctcaaaaaaaataaaaaagaaaaaaaaaaagaatacaaaggaagacgaacaaaaggagtaaagacaaagatataaatgcattcaacatcaaaaatcttgctaaagtgacacataagggcgggccacccaaaaggtttaagacatactttagggtgcatgcaacgtaaaagcccttccaaagggtccccta

SEQ ID NO: 937 - DNA, 413 bp, Bos taurus
  Clone ID: 05-BOVMS1-015-Q1-E1-B9
gattatcttaaagacatgaaagaatatcaagtagataatgatggcgtatttgagaagttggatggatatatatatagacacttctttggtcacaccttttcccctccatatggacccagtcgaccagataaaaagcaacgtatggtaaatattgaaagctccaggcatcgaaaacaagagcagaagcaccctcagccacaaccttataaaagggaaggtaaatggcataaatatggtcgcactaatggaagacacatggcaaaccttgaaatagaattggggcagttaccttttgatcctaaatattgaccttcacaactaagttaaattagaaaactgtaacagaaacttggatgctttctttactgtttggtgtttaaactaagatgaaattatcaagataacaatgtctt

SEQ ID NO: 938 - DNA, 436 bp, Bos taurus
  Clone ID: 05-BOVMS1-016-Q1-E1-B9
gcgtccgatttatagtttttaaaaagcctatacagagattccatgtagaaattactgtgttattgtccaagagattagcagtgggcatcaaaacctcaaagttattgaatcttcaatgtaacaatcagagcttaaaaaaataataaatattaaattgaacagattatttctcttgttaatctgtctcaatcaattataaaggagcttcctaaatttgagtttattaatcctttcatttgcattgttaaagtgcctttacactcctttttctattacaaatgaaactggagaatgaaatatgtacatttacattaaaaaaaattttttttaatagcaaaaacctttcttcatgcttcaagatataataagaaccctgtgcaatatattaaagagtatatgctgtgagaaaactttgggaatggaataaatggatttc

SEQ ID NO: 939 - DNA, 342 bp, Bos taurus
  Clone ID: 05-BOVMS1-017-Q1-E1-B1
gaacagtgtaggttctctcataaccctttctgctgttttcccatgatccaactgtgtaatttctggtcagtgattccaggttttaaataatttgtaagtgttcagtttctccacaactttatcatccgctaagaatttaaaaatcacattctctgttcagctgttaatgctgggatccatatttagttttataagcttttccctgtttttagttttgttttgggtttttggctcatgaattttatttctgtttgtcgataagaaatgtaagagtggaatgttaataaatttcagtttagttctgtaatgtcaagaatttaagaattaaaaaatggattggtt

SEQ ID NO: 940 - DNA, 229 bp, Bos taurus
  Clone ID: 05-BOVMS1-018-Q1-E1-B1
tttaaaatttagttaccctttaatgcaattttaaacttcttcaaaagtgtcaccaaatttaaattaattggccttcgttttaaaaattcttaactggaaaaaccttgggtttaccaaatttatatgctttgaaaaaaatccccttttctcaatttgggttaataccaaaaaggccctaaccattggcctttccaaaaatttgccaaacttaattggaaaatggaactcc

SEQ ID NO: 941 - DNA, 415 bp, Bos taurus
  Clone ID: 05-BOVMS1-019-Q1-E1-B1
atttatactagccatatcaagcctagccgtatactccattctctgatcaggctgagcttccaactcaaaatacgcactaatcggagccctacgagcagtagcacaaacaatctcatacgaagtaacgctagcaattatcctgttatcagtactcctaataagtgggtcctttaccctctccacattaattactacacaagaacaaatatggttaatcctcccagcatggcctctagcaataatatgatttatctcaacactagcagaaacaaaccgagctccatttgatttaactgaaggagaatcagagctagtctcgggcttcaacgtagaatatgcagcaggaccatttgccctcttcttcatagcagagtacgcaaatattatcataataaatatctttacagcaatttta

SEQ ID NO: 942 - DNA, 337 bp, Bos taurus
  Clone ID: 05-BOVMS1-019-Q1-E1-B9
cgacccacgcgtccgatcgcgagcggccgccctttttcttttttccttcctaaacaatttccattcagaatggttgcagctctgtagggctagcttttggcaacctgggaagcaagaattgtgctctgaatgtgatctatgttcctgcagaatgcatgttcctctatatttctctggcggacatgtttccagagatgaacgatatgctgagagaaaaggtaactggaacaaaaaccgatttcaccttcttcatgattcagaacgcacggatgttaactggattcacagccattcttctcatcactttgtatgcgggagaaattgaattggagtaata

SEQ ID NO: 943 - DNA, 274 bp, Bos taurus
  Clone ID: 05-BOVMS1-021-Q1-E1-B9
aaccattatactaggaactattattgtcataatcagttctcactgactacttgtctgaatcgggtttgaaataaatatactcgccatcatccccatcatagttgaaaatcaggggggacgagctacagaagcatcagctaaataggttttgactcagtcaacagactcaatactactaataatagccgtcatcattaacctaatattcacaggacaatgaaccgggataaaactatgtaacccaatagcctcaatacttataacgatggcccta

SEQ ID NO: 944 - DNA, 460 bp, Bos taurus
  unsure (387): unsure at all n locations; Clone ID: 05-BOVMS1-022-Q1-E1-B1
acgcctgcacgtagcggtcaaaaattcgggcgacgcaagcctccggtaattttcaattgcttatttacttatgtacctgtttgatcttactaagaaaatttatgcctcattacagtaaaaaggaatttagagatattttttaaaatatgcaaactgtccaatcgagtgatttaatcagtttgggcaactgttacagctgatagtgaatattttgcttcatacagaaattgccactgatttgagtttgtgcactctaattttaacttattgatgctctattgtgcagtagcatttcatttaactttaagataaggctcatttagtatacccaactagttggtaatgtgattatgtggtaccttggctttaggttttaattcgcacganacacctttttggcatgcttaactttctggtaacaccctcacctgcgttggttttgttttttggggtttttttt

SEQ ID NO: 945 - DNA, 461 bp, Bos taurus
  Clone ID: 05-BOVMS1-023-Q1-E1-B1
gtccgctagatcaagatttggatgatgttgaagaagtagaagaagaagaaactggtgaagaaacaaaaatcaaagcgcgtcagctgactgttcagatgatgcaaaatcctcagattcttgcagcccttcaagaaagacttgatggtctggtagaaacaccaacaggatacattgaaagcttgcctagggtagttaaaagacgagtgaatgctctcaaaaaccttcaagttaaatgtgcacagatagaagccaaattctatgaggaagttcatgatcttgaaagaaagtatgctgttctttatcagcctctgtttgataagcgatttgagatcattaatgccatttatgaacctacagaagaagagtgtgaatggaaaccagatgaggaagatgaaatttcggaggagctaaaagaaaaggccaaggttgaagatgagaaaaaggatgaagaaaaagaagat

SEQ ID NO: 946 - DNA, 418 bp, Bos taurus
  Clone ID: 05-LIB188-001-Q1-E1-B1
acacgcgcggcaaccactgggctgtcggacacttaatgggaaaaaagagtgtggcagagtccccacaacttcatgaggaggagagcctgaaggagcagctgagggagtatgcccagtgggaagaagcgacaaggaacttgctaagcctcctacaagcaaagggggcccgaggccaccagatgcctccatgggagcccctgagcattcaccagcctgcctgggattccgaggacgtcagcaacttcaaagacacaggtcctcagcatgaaggaaggaacccccagctgaactgacaatgacgatggccgcctccctcaaagaagcaaaacaaaatccttaagaaactgcgttctatgggcatcagttctactggatcatcaacaaatttcctttgtgcaaaatacttaactattcttgt

SEQ ID NO: 947 - DNA, 449 bp, Bos taurus
  Clone ID: 05-LIB188-002-Q1-E1-B1
cgcatgagccgtaatggccgcggcatacttggcacgggacacgcgtgggtcctctccgggctcgggggtcgcatcctcaggagtagtgtagcgagcaaattctggaaagtagtcctcaatcttcgattttccagcaaggactttctcagccagcagatcttgcttgttgaggaacagaatcacagagatggtgcgcagccatctgttattccagatgctcttgaagaggttcagagcctcctgcaggcggttggtctggttgtcctcccgaatgaccatgttgtagctgctgctggcaaccacgaagatgatggcagtcacatcattgaagcattggatccatttgcggcgttcatcgcgctggccgcccacgtcaaacatgtgggagtttgactttgtcacctggaacttggtctcaaagattccagaagtcaggacacggcagcgga

SEQ ID NO: 948 - DNA, 406 bp, Bos taurus
  Clone ID: 05-LIB188-003-Q1-E1-B1
ggaattcagcagtactgacactgattacgtaagggttgctgctatcagccttgcccactgtgacttctccaaacccaaggaggaaccctagataaaatgccccaacactgtgatgagagcatccagatgttgccatgagaaaccggaaggcagatcttcacagaagccccaagggctcactcctgcccagtgttaggagacagggttgttgacagctcctgtctcactgcagcctctagcacttggtcagtcactctccgccttagcactttgttcactgtcctgtgtcagagctctgagctcgctctacccttttctgaaaaagtatgtgggctgaaggtggtttcattttttgttttttaattgtatatctttttgtatgagaaaaactatattttgtatcact

SEQ ID NO: 949 - DNA, 226 bp, Bos taurus
  Clone ID: 05-LIB188-003-Q1-E1-B9
cttcaccagaactgggctaagttagttagaattcaatcttccgcttgagggacttacacaatcaacaaggtggataacctgtccaactggactgcaggtctggctctgttattcacattgctctttcttctcactgtatcatgttccctcccacatgagctgccagttctcttgggcggacctcagtttctctctcctctccagctgactaaacttttttttctgt

SEQ ID NO: 950 - DNA, 311 bp, Bos taurus
  Clone ID: 05-LIB188-005-Q1-E1-B1
gacacatttcaagagaattctgcgactgtgatgacagggactgcgacaaacatgatgggctcatttgcacagggaatgggatctgtagctgtggaaactgtgaatgctgggacggatggaatggaaatgcctgtgaaatctggctcggcacggaatacccttaacgattacgtggcagggaaccgggttctttcttctcggccctcagaacgtataaatgcagaggaaaccatgtataatcaccactacaacaggtcgaacaagactattgtatgtttttctctttctgaatgcctgaatgaaatctgggt

SEQ ID NO: 951 - DNA, 351 bp, Bos taurus
  Clone ID: 05-LIB188-005-Q1-E1-B9
gatactagacaaaccaatacagcccactggcatctgttgcctgcacagcttgagaactaaactggtttaataagtcacatgctcagcctggttaggatgacctttgtccctctagacaaacggggactgagagggctgatcatgccctgtctctggggcttatcctatgcagagatgagaggcctagtggctcacgctggccaggccacatctcctgaccccatgggggtaccatctcccaacctgagtggttcaaatgccgccgatggcagtggacgatgacgaacctgggtgctccctctatcacctgtctgaggacggcctttgccttggaatgtatccgggccatct

SEQ ID NO: 952 - DNA, 390 bp, Bos taurus
  Clone ID: 05-LIB188-007-Q1-E1-B1
gccatggacccaggatacttgtcaaatcctgtatgactactacaaccctgagcacaagtgttctgtgttttatggggcaccacgtaagagcaaactcttgtccacgttgtgctctgcggatgtctgccattgtgctgaggggaagtgccctcgacagcgccgggccctggagcgtgggcagcaggacttggaaggttaccggatgaaattcgcctgctactctccccgagtggactacggcttccaggttaaggttctccgaaaagacagcagggctgctttccgcctctttgagacccgtatcacccaagtcctgcatttcaccaaggatgccagggccaccgctgatcagaccagaaacttcctggtccgagcctcttgccgccttca

SEQ ID NO: 953 - DNA, 375 bp, Bos taurus
  Clone ID: 05-LIB188-007-Q1-E1-B9
gggacactttgtaattttatcagtctgagaagctgttccagataacccaggtaacgctcagagggcacatcttccttttgaatgtgcttctgctcaacactattgggaacaatttcctcacttgacgaaatgctttcagcttccatttgcttaatatcttccatggcttgatcctcagttgattcactcccaatatccttgctcagttcattgaccttctcctttccaaacacttctggaaaaggtgccacaaaaaacctgagtaaattttcattgaggacttcttgagggagtccttggtgcttgataggatgtttaggcctggcaagagcaacagccacaagacaggtaaggatgagaagtttcatggttgtc

SEQ ID NO: 954 - DNA, 220 bp, Bos taurus
  unsure (127): unsure at all n locations; Clone ID: 05-LIB188-009-Q1-E1-B1
ccgcgggatcacaaaggccgtgagacaagtattgccctcactgttgccacgatgctccccaaaggtgctgtaagagccatcgaagtgcttgtagagcagctgtctctggtaaccagtgttgaggtanaggatagccttggacttgagctctgcagtcagctgctgtgtctcatttagataatccagaacatagatgttaggggcaaagcgggcaatattc

SEQ ID NO: 955 - DNA, 408 bp, Bos taurus
  Clone ID: 05-LIB188-009-Q1-E1-B9
ggcggcgggacactccagtgattcacgctcccggtccatgatcgtctctagctcctcaaagtgccggagtttgatttccaactttttcatctgggtctccaccagcagggccaccagcgatttgatcttcctctcctcaacagcagccaagtgcttggccttcacagcggcagcagccagggcagcggcggcggcggtggagaggttgccctcgccaatgtcacgctccaccttcgtcttcctttccccctctgactccaccacttctttcagcacctcctcctgcccttccttgggctccttctccttcttaggatccgctgtcgggtctccatcactcttttctgacttcttctcgctatcgccatccttccctttctcatcgtccttcttgggtgcctcactggt

SEQ ID NO: 956 - DNA, 382 bp, Bos taurus
  Clone ID: 05-LIB188-011-Q1-E1-B1
gggacacttatgatcggccagcccaccgggcactttgacaagcttgttgttgttcaaatgaagttccctcaaatgaggagtgttggccaaagagccattgtcaaccgcagagatgctgttgaaactcagccccaacttagccaaattattcagtcctttcaggctagctgcatcaactttggtgattttgttgccatcgagatgtaattcagtaagggaaggaggaagaccttgagggatggtagttatatttgtgtcagcaatgcggatgtaggagagcttcttcattccctgaaaggctccattttcaatgcctgagctcttcagcgggttggtgccaagttctacgacgatcatctggttcaatccattgaacacagac

SEQ ID NO: 957 - DNA, 291 bp, Bos taurus
  Clone ID: 05-LIB188-011-Q1-E1-B9
ggatacgtctgtagtggggatgactgaagccccgcgacagcccaagcatcgaggacggctgctccgtgctccagctaacagttctccgcagtcagcccgcggctaacagccccctgtgcccgtccccgggaggatgacattagcgctgcgcgccccacccgctcttttgttagtttagtttcctacgcattacctggctttcccggctagtccctctttatagccaaagaaatgaacattccaaggatttggaagtggaatctatgatgtgaaacactttgcctctcgagt

SEQ ID NO: 958 - DNA, 421 bp, Bos taurus
  Clone ID: 05-LIB188-013-Q1-E1-B1
gccgcgggatacttatgttattaggactaaagtctggatcatttatattttcctgtaagaggcagactgctttcaccctttttaaaaagcttcatttatattaaattgataaccatattaccttaatcggaaccttagccttgaaattgtgaactcctagaagtgttattaatcaagtttgctaccaagttaaaccaaaaaaaattataatggttgtaatcaaaagattaatgaataataaacatatctgtcttcctgaatttctcatgggtgtatgtctagaaaacttacttgatttacgtattgaacaagaatatatttttttcaggctaatcagttgacagtgttatcagttgacaactgaattgtcaaaagttattaaaagttgacttttggttgaaaagcatgaaataacaacact

SEQ ID NO: 959 - DNA, 391 bp, Bos taurus
  Clone ID: 05-LIB188-013-Q1-E1-B9
ccatggccgcgcggataccaagattgtcaagcccaacggcgagaagccggacgagttcgagtcggggatctcccaggccctgctggagctggagatgaactcggacctcaaggcgcagctgcgggagctgaacatcacggccgccaaggagatcgaagttggcggtggccggaaagctattattatcttcgtccccgtcccgcagctgaagtctttccagaaaatccaggtgcgcctggtgcgcgagctggagaagaagttcagcgggaagcacgtcgtcttcatcgcccagaggagaattctgcctaagccaactcgaaaaagccgtactgctgcactgagcagaagctgctctgttcctgcttgggcttcccttacaaactcagccttc

SEQ ID NO: 960 - DNA, 344 bp, Bos taurus
  unsure (42),(55),(132),(154): unsure at all n locations; Clone ID: 05-LIB188-014-Q1-E1-B1
gccaaggccgcgggatacactgaatccagaacatctgggtcnaaggggagtgcancaagaggaaatcccaccggcagatctaagtgataaagtcccaaacaccgagtaagagacaaagatcctcctgcaggngactccggtgggccaaatgacngaggacgccatcgacggaaagcggctgaagcaccttaatcaaaaccccctccgggctgtggggagcaagacatgattggtatgacccccacggtcatcgccgtgcactacctggacagcaccgaccagtgggagaatttcggcttggaaaaccggcaagagtccctggagctcatcagaaaggggtatca

SEQ ID NO: 961 - DNA, 347 bp, Bos taurus
  Clone ID: 05-LIB188-015-Q1-E1-B1
gcgggatgcctgatcaattaagtaatttcctcctttgctatttgtagatgattcagtacatgtggagcccatattacgcagtttcctatggattttgttttgcgtcattgggggaagctgccaacggcattgtgagttcagctctgggctctgtccttcatggtgacgatccggttcatagattttgccgtcgtactctaaagccaacgtaggtaggagactgcacaggggctctaatgcaggcatctggaggtctccgacccccgatagctcgtagaggcttagcaggatccctggcgcatcctacgacggcgcatacatactcagctgcacccacaggcactcct

SEQ ID NO: 962 - DNA, 224 bp, Bos taurus
  Clone ID: 05-LIB188-017-Q1-E1-B9
gaatacgtcctcaaacacaccttatagctggctgtctgtcagatccccgagcatctcagccagcagccagcgatcgatgtgttgatacgtgatgcccacgacatggcagataaattttcggacagagtcttcaaagccggttataccttccaggaggtccatgttttcatccagggcttgccagaaggcttggaagtggcaggtctccagcaggtctccgaggt

SEQ ID NO: 963 - DNA, 341 bp, Bos taurus
  Clone ID: 05-LIB188-018-Q1-E1-B1
cgcgggagacccttccgatggtcacagaacacactctatgctactgtgtttggaggatttccggctctctgccaggacaggcatcatgccacacttgcccgcattgtacatatatccgccatccaagttcagggcatctgcatcccctttcagcactagtaccatgcaatcgtcattggtgtacgccatgtcacaggtcacgttctggccgctctgctggcaccactgctggcacttcttcagcgcatcaggtcccagggcacaccatacgaccctggtgtagctgcccaggcggccgctcgaacttgtcctcagactcaggctgcccatttctctgccac

SEQ ID NO: 964 - DNA, 378 bp, Bos taurus
  Clone ID: 05-LIB188-019-Q1-E1-B1
gcgcgggatacagtaaaatccctaatgcgctcagcccagcttggtggccagctctttggccttcgccttttccagcttggcgatgcgcgccaccgacttcggccccaggacgttgcctccccagtgacgacggatctcatcgtatctgtcgttgtaattggtcctgatggcttccaccagcttagccagggcactcttgtcctccgagttgacttgtgtgaaggctacggtggtgcacgtcttcctgtgcaccaggcgccccagccgggccttgcccttgatgatgcagtagggaacccccatcttgcggcacagggcaagcaggaagaccacgagctcaatgggatccacgtcgtgagcgatcaccaccagctgagc

SEQ ID NO: 965 - DNA, 420 bp, Bos taurus
  Clone ID: 05-LIB188-019-Q1-E1-B9
gggacacctcgttccaaacttaagatgatgccctgaatgcagggcggtgtttatattcatcgtgaggggtgtctgtgatgtttggagtttgaaaatggatttagacagtgctaagcggagtccactgggtttggttctgtgccgtttttgagcaagtcattcattcactggctttggttccgttgaagtcagcatcgcgagcgtccatttcctcctcagacccatctgcgttctcaataactctacgtcctccagaccttcttgtgggaacaaaagaggtctcgttccctcgcctgagcttgctcttgagcgctgtcacctcgcggcccatggcctcgttgctctccgtggcctcgtccagctcacgctgcagtttcctgcggttggcattgatgcgctgggactcctcctccggctcct

SEQ ID NO: 966 - DNA, 401 bp, Bos taurus
  Clone ID: 05-LIB188-020-Q1-E1-B1
aagagcaacagcacttacgacatgctggagagcatcaagaaggaggtcaaaggagacctggaaaatgcctttctgaatctggttcagtgcattcagaataagcccctgtattttgctgacagactgtatgactccatgaagggcaagggcactcgcgacaaggtcctgattagaatcatggtctcgcgcagtgaagtggacatgttgaaaattagatctgagttcaagaaaaagtacccagatccagcccctgggcagaggcacgtagtgcccttgtcttgtcctgggagcagtcatggacttgggtccttcatgccccatggtggacactggagcaccacccctcagcctcagggagagaggagctgcgcaagagaagcaggaggcactctagttatctg

SEQ ID NO: 967 - DNA, 338 bp, Bos taurus
  Clone ID: 05-LIB188-021-Q1-E1-B9
tggcggcgggatactgcatcaaacataatgtcagtaatgtgttcgaacacattctgtccgtttacatatctggctattggaaacaatgcaatcgctttgaatatgctgcatctgtggtgctcgctggaaattgcaatgacctctggactgaagtctatcatctcgtgctgacctcatgttgacctctgcataatcctatttggcgggagcttgtcacatccttgttccatattcggacatcatgtggtaaatgttatctcccatacacgggttgataatcggatgtgagcatttgcactcaagatgctggtagacttcattggcttatgcaggcttgt

SEQ ID NO: 968 - DNA, 427 bp, Bos taurus
  Clone ID: 05-LIB188-022-Q1-E1-B1
ctagtacagcaaaatatccagtcacttattggcaaactgaaggtgagaactagtcacttacaggttttattcaaacacagtgcaatactgccacgttcatatagacttttctttttttttttacagttatcaacactcttctgacaaagacaaggttttggaatggcaaaagcaacagaagttttagatctcaaagctccggaagggaattaatctgagtcttcatcatcaagatagtcctcagcattgcttaatgatcggactgcatctgttccctgcttctttttcaggagagatgcataggcagcattagtagccatgtccagggccagcttcttctcattgtttcttaagtctgttctagcacctttttccagaagcaactgtacgtggtctcgtggatgccagcagactccatcccgatgaa

SEQ ID NO: 969 - DNA, 419 bp, Bos taurus
  unsure (407): unsure at all n locations; Clone ID: 05-LIB188-024-Q1-E1-B1
ccatgtgcgccggatagcggtcttcataccagcaaccaaattaggtagcctgtttatcttgagctgacttcctgctccagggctggcttcctaatccagtcatattgctgaagtgtggctgaggtgagcccaggcctctctctgcgggtgagggttgctcctcacttaggttgtggggagaaccccccccacagtaaatggaagcagttgcctgcctgcctctggagtcccttttgcaacactcctttctttccctgggctgaagccaggacctggtggtgttccttacaggatagtcagtgacgatgccgggcacagctttccagagtgaaggccattgggcccgagcaccctttcacttggctccccccaccctctctaggaatcacattatgactgaatgctangggtgggggctg

SEQ ID NO: 970 - DNA, 213 bp, Bos taurus
  Clone ID: 05-LIB188-024-Q1-E1-B9
agcacatgaaagtcaagctggccctggacgtggagattgccacctacaggaagctgctggagggcgaggagagccggctggagtctgggatgcagaacatgagtatccacaccaagaccaccagtggctacgcaagtggactgacttcgtcctacgggacccctggcttcaactaaaacctgaaccccggctccttcagccgcaacaattcca

SEQ ID NO: 971 - DNA, 279 bp, Bos taurus
  Clone ID: 05-LIB188-025-Q1-E1-B1
aagcttatttttatttttttttttttttttttttttttttgggccataaatttttattggcaggtcagggggaaaggcaagggtaagggtccctcccctcccatgcccctacccaggaaaattccttctgcagcagagcgggaaagccagaaggccgccagactcagagggccttcgcgagtgacaggtcgttgaagtaagcatcctggccctccagcaggtttcggtaggtggcaatctcctgctccagccgggtcttgatgtccatgaggtgttggt

SEQ ID NO: 972 - DNA, 389 bp, Bos taurus
  Clone ID: 05-LIB188-025-Q1-E1-B9
gggataccgcgtagtcagagccctgcccatccagcaccaggactggactggaggaaaggagttcaagtgcaaggtcaacatcaaaggcctctcggcctccatcgtgaggatcatctccaggagcaaagggccggcccgggagccgcaggtgtatgtcctggacccacccaaggaagagctcagcaaaagcacggtcagcgtcacctgcatggtcatcggcttctacccagaagatgtagacgtggagtggcagagagaccggcagactgagtcggaggacaagtaccaacaaagtcgcttcccagaaaggaatgagtgtgtatgggcttgggcggcaagtgtatgatcccaaatactgtgctgctcccacagaacctgtcattcacaac

SEQ ID NO: 973 - DNA, 406 bp, Bos taurus
  unsure (186),(279),(382): unsure at all n locations; Clone ID: 05-LIB188-027-Q1-E1-B1
cttgaccattgtcatcagttctagacaaaaagtccaatccctaacaaaaggaaacttaagggtaacaaggaaaccactgaaaaccaatcccaaacactgaaacctgccaggctcccctttactcctccccaggtccttcagcgggaggacctgcaagggcaagcccaccttggcttgattgcctgncaactgagaccctgctctggggaagggaagaggtcagaggaagccctgcagagggctggggaggtggggcccatctctgagcaatcagagtangaggaaagaatgtatgtgcctgatggagaaagggatcggcatgctgggaggtgagggacttatctggggtgctccttcctcctccgtttgtggtcacagacangaagtcacaagatggcgccatcct

SEQ ID NO: 974 - DNA, 235 bp, Bos taurus
  Clone ID: 05-LIB188-028-Q1-E1-B1
tgcacgtggccgccatgggacgcgcggatactgggaagctgcacctctttctgaccgatacagaacttgcccaggtccaggttccggacgggaaactccaccaggtcgttgatcttgtcacgccagatgaagctgcggaaggagaagcgcttgagctgcacgatgagcacgttgggcaggcgccacagcagcagctgcttggaggcctcgcggtgctgtttgcactgcgggcagt

SEQ ID NO: 975 - DNA, 408 bp, Bos taurus
  Clone ID: 05-LIB188-028-Q1-E1-B9
gctccctagccgccatagaccggctaaggcatgacaggcggctctggcttcccacccctctgttcagagatgggggtggtgggcactatttcatctttgggttccacaatgctcacgtgatcaggcagaggcttcttagggccaatcttaccagtcgggtcccaaggcagcatgatctttaccttgatgcccagcacaccctgtctgagcagcacatggcgcacggcggtgtccacatagtagttaacagggtccccactgtggatcatgaggccatccacaaacttcatggatttagccctctgtcctcgaagtttcccagacaccacgacctcgcagcctttggccccactctccatgatgaaccgcagcacaccatagcaagccctccgcacagcaaggcctcct

SEQ ID NO: 976 - DNA, 399 bp, Bos taurus
  Clone ID: 05-LIB2809-002-Q1-E1-B1
acagcagaaaggactgaatgggcatatctctctggggatagggcactgctttctggggaacaggcaggactttggactgagaaagggacagcacggactgaggaggaaacatgacagttggaggaagaggctggtgaggctggtgcatccaagactggagcagaggcagaggaaggtgcagattttcaacatcagtgagagtcaggctctggctttcagtaaagggctcaactggatatttagggaagggcatttctttgtgcttaggagccatagcctccttcactttggagactcccattacttcatgctgaaggaaaggcggcaccaccacaagggtttgagtaataggagggatgttttgtgggaggctgttatggatgggcccagggaagggat

SEQ ID NO: 977 - DNA, 480 bp, Bos taurus
  Clone ID: 05-LIB2809-003-Q1-E1-B1
gcgggatagtccatcatcaggaacaactgcccaaatcaacgtgattccaccatctccgtggaagaaaatggggtgtcagcagaaagccggttctcagttcagatgttcaagtttgctggaaattatgacctagttttcctgcattgtgaggtttctctctgtgatttcattaaagaagggtgccaaccgtcttgctcaagaagtcaactccgcagtgaaggggtggctattgatccagcccgagttctagatctgggacccatcactcgcaaaggtgcccagtctcttggtgtcatgagtggaacacccaacactgcagggttcctggtggcctggcccctggttctcctgcctgtcctcctggctgggctgttctgagagctcagctgggcatctggccttgaagcttgtgttcttccctctggcgatggcttccagtcaccctgcagctctgctggttctgtcttcaaacaaatcacg

SEQ ID NO: 978 - DNA, 451 bp, Bos taurus
  Clone ID: 05-LIB2809-003-Q1-E1-B9
taccgggcccgaattccgtgtaaactatagtgtcacctaaatcgtatgtgtatgatacataaggttatgtattaattgtagccgcgttctaacgacaatatgtacaagcctaattgtgtagcatctggcttactgaagcagaccctatcatctctctcgtaaactgccgtcagagtcggtttggttggacgaaccttctgagtttctggtaacgccgtcccgcacccggaaatggtcagcgaaccaatcagcagggtcatcgctagccagatcctctacgccggacgcatcgtggccggcatcaccggcgccacaggtgcggttgctggcgcctatatcgccgacatcaccgatggggaagatcgggctcgccacttcgggctcatgagcgcttgtttcggcgtgggtatggtggcaggccccgtggccgggggactgttgggcgccatct

SEQ ID NO: 979 - DNA, 455 bp, Bos taurus
  unsure (266): unsure at all n locations; Clone ID: 05-LIB2809-004-Q1-E1-B1
ccggatagcacgcaaggacttgcgcaaagtgagcactcgcttcttggttcccaccacgcagcctttgagcatgacaaagtcattggtcacctcaccgtagtggacaaagccacccagagggttgatgctcttgtcagacagatcgtaatcagtagaggcattgttcttgatcagtttgccgtccttgatgaggtagccctgaccaatcttgtagatcttcttgttgatctcagtgcggtgatggtagcctttctgcccagcccganccacagagaaggccacccgggcaggatgccacgccccaatacaggcaaccttgcacagtcctcggtgggtcttacggggcagcttcttggtgtgccaacggctggtgacacctttgtagcctttgcccttggtcaccccaatgacatcaatcatctcatcctggccaaacacttgggtcacaaggacct

SEQ ID NO: 980 - DNA, 400 bp, Bos taurus
  Clone ID: 05-LIB2809-005-Q1-E1-B1
tggaacttgttcacaatagtgctgaggaacgacttcacagtatgaaagagggaatccatgcccaacagaaagaacctatgataggagtgaatcaggaactggcctacttctaccctgagcttttcagacaattctaccagctggatgcctatccatctggtgcctggtattacgttccactaggcacacaatacactgatgccccatcattctctgacatccctaatcccattggctctgagaacagtgaaaagactactatgccactgtggtgaagagtcaagtgaattctgagggactccacagttatggtctttgatggttctgaaaattccatgctctacatgtcttttcatctatcatgttcaaacattctatccaaaggcttcaactgctgttt

SEQ ID NO: 981 - DNA, 418 bp, Bos taurus
  Clone ID: 05-LIB2809-005-Q1-E1-B9
gaggcatttaacaaatactaatcgggcttcccaggtggtgctagtggtaaagaacctgcctgccaatgcaggagacgtaagagatgcaggtcaattcctaggccctggaggagatgacaacccactcctgtattcttgcctggagaatcccatagacagaggaacctggcaggttacagtccatagggtcatacagagttggaaagggctgaagtaactttgcatgcatacatgtctctcaatcatcctgttctctccttaggacaacaaatgatctctaatattttcatctggttctaaaagaataatagtcattgaaaatatataataataaccacgcatgaacttgttaatcattcttagttccctggttatgtttaggcttctaatgaattataagaaatacataccctcctat

SEQ ID NO: 982 - DNA, 345 bp, Bos taurus
  Clone ID: 05-LIB2809-008-Q1-E1-B9
gggcccggcatacagcagaaaggactgaatgggcatatctctctggggatagggcactgctttctggggaacaggcatgactttggactgagaaagggacagcacggactgacgaggaaacatgacagttgtaggaagaagctggtgaagctggtgcatccaaaactggagcaaaagcataagaaagtgcaaattttcaacatcagtgagagtcaggctctggctttcagtaaagggctcaactggatatttatggaagggcatttctttgtgcttaggagccatagcctccttcactttggagactcccattacttcaggctgaaggaaatgcggcaccaccac

SEQ ID NO: 983 - DNA, 438 bp, Bos taurus
  Clone ID: 05-LIB2809-010-Q1-E1-B1
gccatgggcgcgggatactgcttgtgagcgtgctaagcgcactctctcttccagcacccaggccagtattgagattgattccctctatgaaggaatcgacttctatacctctattacccgtgcccgatttgaagaattgaatgctgacttgttccgtggcaccctggaccctgtggagaaagcccttagggatgccaaactggacaagtctcagattcatgatattgtcttggttggtggctcaacccgtatccccaagattcagaaacttctccaggacttcttcaacgggaaagaactgaataagagcatcaaccctgatgaggctgttgcatatggtgcagctgtccaggcagccattttgtctggagacaaatctgaaaatgttcaagacttgctgctgttggatgtcactcctctttcccttggaattgaaac

SEQ ID NO: 984 - DNA, 302 bp, Bos taurus
  Clone ID: 05-LIB2809-011-Q1-E1-B9
gagatgagtttcaatccatgtcaaagtccattaatcctgatgaagaatgcttgtttactgtgagagcttcagtgatcatcacggacacctctatgaagaatgtgtcctgctgcatccggaacctccttcttggccaggagaaagaaatagaggtttccataccagcctccttcttcccaatgttgattccctggatggtggctgcggctgtcatcttggtggtcttaggacttctcacaattgggtccatattttttacctggacactatacaaggaaagatccacacagaggaggaatgaa

SEQ ID NO: 985 - DNA, 408 bp, Bos taurus
  Clone ID: 05-LIB2809-012-Q1-E1-B1
aaaaggcctgaatgggcatatctctctggggatagggcactgctttctggggaacaggcaggactttggactgagaaagggacagcacggactgaggaggaaacatgacacttggaggaagaggctggtgaggctggtgcatccaagactggagcagaggcagaggaaggtgcagattttcaacatcagtgagagtcaggctctggctttcagtaaagggctcaactggatatttagggaagggcatttctttgtgcttaggagccatagcctccttcactttggacactcccagtacttcaggctgaaggaaaggcggcaccaccacaggggtttgagtaagaggagggatgttttgtgagacgctgttatggatgggcccagggaacggatagactagagactgtg

SEQ ID NO: 986 - DNA, 395 bp, Bos taurus
  Clone ID: 05-LIB2809-016-Q1-E1-B1
cgcaatgggcccgggctacagtgaaactgcaaatggctcattaaatcacttatggttcctttggtcgctcgctcctctcctacttggataactgtggtaattctagagctaatacatgccgacgggcgctgacccccttcgcgggggggatgcgtgcatttatcagatcaaaaccaacccggcgcccgccccccggccggggccgggaggaggcacgaatacagaccgtgaaagcggggcctcacgatccttctgacctttggggttttaagcaggaggtgtcagaaaagttaccacagggataactggcttgtggcggccaagcgttcatagcgacgtcgctttttgatccttcgatgtcggctcttcctatcattgtgaagcagaattcacca

SEQ ID NO: 987 - DNA, 467 bp, Bos taurus
  Clone ID: 05-LIB2809-017-Q1-E1-B1
gggatactgaagaaactgggcaaggactcgaaagataagtgtggtaaactggaccccacctacaccagcgccactttactctttcagaaagaccctccagccaacatccagctcttccaagaggtgcccaatggtcagtccaaggaggacacagtgggccggcccctgccccacctggccgcggccatgcaagcctctggggaggccgtatactgtgacgacatccctcgctacgagaatgagctgttcctccggctggtcaccagcacccgggcccacgccaagatcaagtccattgatgtttcagaagctcagaaagtgccaggatttgtttgctttctctctgctgatgatattcccgggagtaatgaaaccggactctttaatgatgagacagtctttgcgaaggatacggtgacttgtgttggtcacatcattggtgctgtggtcgctgacaccccagaaca

SEQ ID NO: 988 - DNA, 377 bp, Bos taurus
  Clone ID: 05-LIB2809-017-Q1-E1-B9
ggatactctctaaatggtgagagactgggcacctacatgggccataccggagctgtgtggtgtgtggacgcggactgggacaccaagcatgtcctcactggctcagctgacaacagctgtcgtctctgggactgtgaaacagggaagcagctggccctgctcaagaccaattcagcagtccggacctgtggctttgactttgggggcaacatcatcatgttctccacagacaagcagatgggctaccagtgcttcgtgagcttctttgacctgcgggatccaagccagatcgacagcaatgagccctacatgaggatcccttgcaacgactccaagatcaccagtgccgtttggggacctctgggagagtgcatcat

SEQ ID NO: 989 - DNA, 358 bp, Bos taurus
  Clone ID: 05-LIB2809-020-Q1-E1-B1
agcagaaaggccagaatgggcatatctctctggggatagggcactgctttctggggaacaggcaggactttggactgagaaagggacagcacggactgaggaggaaacatgacagttggaggaagaggctggtgaggctggtgcatccaagactggagcagaggcagaggaaggtgtagattttcaacatcagtgagagtcaggctctggctttcagtaaagggctcaactggatatttagggaagggcatttctttgtgcttaggagccatagcctccttcacttccttttaggaaacgaggacaaagtaaacatgaagttcttcatctttacctgccttttggctgttgcccttgc

SEQ ID NO: 990 - DNA, 359 bp, Bos taurus
  Clone ID: 05-LIB2809-020-Q1-E1-B9
cttcaagcagtgagggatctattacacgcatcaataagacaattgagaagtttcagagtgaggaacagcagcaaacagaggatgaactccaggataaaatccacccctttgcccagacacagtctctagtctatcccttccctgggcccatccctaacagcctcccacaaaacatccctcctcttagtcaaacccctgtggtggtgccgcctttccttcagcctgaagtaatgggagtctccaaagtgaaggaggctatggctcctacgcacaaagaaatgcccttccctaaatatccagttgagccctttactgaaagccagagcctgactctcactgatgttgaaaatctgcacctt

SEQ ID NO: 991 - DNA, 440 bp, Bos taurus
  Clone ID: 05-LIB2809-022-Q1-E1-B1
cgggagactagagtagaaaggacaattcattaagtatatttagaatccaagctactactactgagaaattacagtatttattcagttcagttcagtttagtagctcagtcgggtccgactctttgcgaccccatgaatcgcagcacaccaggcctccctgtctatcaccaactcccggagtttacccaaactcatgtccatcgaatcggtgatgccatccagccatctcatcctctgtcgtccccttctcctccagcccccagtccctcccagcagcagggtctttcccaatgagtcaagtcttcgcatgaggtggccaaaatattggagttacagtgtttattagagattcaataagttgaaaattcagagtcctcagtttcaaagaaataacatgtgactgaaaacatgtttaattttaaagttttcatcaactccac

SEQ ID NO: 992 - DNA, 365 bp, Bos taurus
  Clone ID: 05-LIB2809-023-Q1-E1-B1
acaactaacttaagagttgacattaatagaaattactccaaaattattcttaggtcacaaataactactatcccacataaaaagggaaaaatcccacccaattaatgaaaaggtatcctgtgtatgtttccatggcaatgagtttatgcattctcagattttgtccggctagttatccaccctttatctgatgcatttattccatctctcagatagaaccatatagattcctgacggcatccaggacacgtggctcgtggtggacacacttcatggtggatactgctactataaagatactcagaacttaagagaattccaagatgctttataaaaagcattagtcatgcctcaaaactgccctt

SEQ ID NO: 993 - DNA, 375 bp, Bos taurus
  Clone ID: 05-LIB2809-024-Q1-E1-B1
atacctggtgagattgtggaaagcctttcaagcagtgaggaatctattacacgcatcaataagaaaattgagaagtttcagagtgaggaacagcagcacacagaggatgaactccaggataaaatccacccctttgcccagacacagtctctagtctatcccttccctgggcccatccctaacagcctcccacaaaacatccctcctcttactcaaacccctgtggtggtgccgcctttccttcagcctgaagtaatgggagtctccaaagtgaaggaggctatggctcctaagcacaaagaaatgcccttccctaaatatccagttgagccctttactgaaagccagagcctgactctcactgatgttgaaaat

SEQ ID NO: 994 - DNA, 318 bp, Bos taurus
  Clone ID: 05-LIB2809-024-Q1-E1-B9
cgtatgtgtatgatacataaggttatgtattaactgtagccgcgttctaacgacaatatgtacaagccgaattgtgtagcatctggcttactgaagcagaccctatcatctctctcgtaaactgccgtcagaatcggtttggttggacgaaccttctgagtttctggtaacgccgtcccgcacccggaaatggtcaacgaaccaatcagcagggtcatcgctagccagatcctctacgccggacgcatcgtggccggcatcaccagagccacaggtgctgttgctggcgcctatatctccgacatcaccgatggggaa

SEQ ID NO: 995 - DNA, 367 bp, Bos taurus
  Clone ID: 05-LIB2809-025-Q1-E1-B9
cgtatgtgtatgatacataaggttaggtattaattgtagccgcgttctaacgacaatatgtacaagcctaattgtgtagcatctggcttactgaagcagaccctatcatctctctcgtaaactgccgtcagagtcggtttggttggacgaaccttctgagtttctggtaacgccgtcccgcacccggaaatggtcagcgaaccaatcagcagggtcatcgctagccagatcctctacgccggacgcatcgtggccggcatcaccggcgccacaggtgcggttgctggcgcctatatcgccgacatcaccgatggggaagatcgggctcgccacttcgggctcatgagcgcttgtttcggcgtgggta

SEQ ID NO: 996 - DNA, 332 bp, Bos taurus
  Clone ID: 05-LIB2809-030-Q1-E1-B1
cgtatgtgtatgatacataaggttatgtattaattgtagccgcgttctaacgacaatatgtacaagcctaattgtgtagcatctggcttactgaagcagaccctatcatctctctcgtaaactgccgtcagagtcggtttggttggacgaaccttctgagtttctggtaacgccgtcccgcacccggaaatggtcagcgaaccaatcagcagggtcatcgctagccagatcctctacgccggacgcatcgtggccggcatcaccggcgccacaggtgcggttgctggcgcctatatcgccgacatcaccgatggggaagatcgggctcgcca

SEQ ID NO: 997 - DNA, 411 bp, Bos taurus
  Clone ID: 05-LIB2809-030-Q1-E1-B9
acagcaaaaaggcctgaatgggcatatctctctggggatagggcactgctttctggggaacaggcaggactttggactgagaaagggacagcacggactgaggaggaaacatgacagttggaggaaggggctggtgaggctggtgcatccaagactggagcagaggcagaggaaggtgcagattttcaacatcagtgagagtcaggctctggctttcagtaaagggctcaactggatatttagggaagggcatttctttgtgcttaggagccatagcctccttcactttggagactcccattacttcaggctgaaggaaaggcggcaccaccacaggggtttgagtaagaggagggatgttttgtgggacgctgttatggatgggcccacggaagggatagactagagact

SEQ ID NO: 998 - DNA, 385 bp, Bos taurus
  Clone ID: 05-LIB2809-031-Q1-E1-B1
cgcctagggcccgggatccagcagaaaggccagaatgggcatatctctctggggatagggcactgctttctggggaacaggcaggactttggactgagaaagggacagcacggactgaggaggaaacatgacagttggaggaagaggctggtgaggctggtgcatccaagactggagcagaggcagaggaaggtgcagattttcaacatcagtgagagtcaggctctggctttcagtaaagggctcaactggatatttagggaagggcatttctttgtgcttaggagccatagcctccttcactttggagactcccattacttcaagctgaaggaaaggcggcaccaccacaggggtttgagtaagaggagggatgttttgtggg

SEQ ID NO: 999 - DNA, 268 bp, Bos taurus
  Clone ID: 05-LIB2809-032-Q1-E1-B9
ggcaatctctctggggataggactgctttctggggaacagcagacttggactgagaaagggaagcacggacgatcgggaaacatgacagttggacgaagagctggtgatgctgtgcatccagactggagcaacgcacaggaacgtcagattttcaacatcagtcagagtcatgctctggctttcagtaaagggctcaactggatatttacggaacggcatttctttgtgcttacgatccataacctccttcaattttggacactccca

SEQ ID NO: 1000 - DNA, 365 bp, Bos taurus
  Clone ID: 05-LIB3057-003-Q1-K1-B1
cggcagtgctgttccatccgcaggtttgcaggaggccgaagccgggctcgcgccggaaccatgtttcgcaaccagtatgacaatgatgtcactgtttggagccctcagggcagaattcatcaaattgaatatgcaatggaagctgtcaaacaaggttcagccacagttggtctgaaatcaaaaactcatgcagtgttggttgcattgaagagagcacagtcagaacttgcagctcatcagaaaaaaattctccatgttgataaccatattggtatctcaattgcgggacttactgctgatgctcgactattatgtaattttatgcgccaggagtgttttggattccaggatttggtatttggaca

SEQ ID NO: 1001 - DNA, 433 bp, Bos taurus
  unsure (375): unsure at all n locations; Clone ID: 05-LIB3057-006-Q1-K1-B9
ggccgccgccatgtcttccggggccagcgtgagcgccttgcagcgcctggtggagcagctcaagctggaggccggcgtggagaggatcaaggtctctcaggcggccgcggagcttcagcaatactgcatgcagaatgcctgcaaggatgccttgctggtgggcgttccagctggaagcaatccctttcgggagcccaggtcctgtgctttactctgaagactgtagagaagaagttggctgaagaatgctttcaagcacaaactgatgaatgcctgcctccaaatttcaagaaaacacttctctaaccacgtgacttctagatatttcacaggaccgttcctgtgacctggtcctttagccaacattctacaganattgatgtttctactcaataaggaaactgggtgaaggtggagattttaaataataatg

SEQ ID NO: 1002 - DNA, 315 bp, Bos taurus
  Clone ID: 05-LIB3057-007-Q1-K1-B1
ggcgctgccgtatggttccgactgggcgggattctgacttataggcgttcagtcataatcccacagatggtagcttcgccccattggctgctcagccaagcacatacaccaaatgtctgaacctgcggttcctctcgtactgagcaggattaccatggcaacaacacatcatcagtagggtaaaactaacctgtctcacgacggtctaaacccagctcacgttccctattagtgggtgaacaatccaacgcttggtgaattctgcttcacaatgataggaagagccgacatccaaggatcaaaaagcgacgtcgc

SEQ ID NO: 1003 - DNA, 424 bp, Bos taurus
  Clone ID: 05-LIB3057-008-Q1-K1-B1
cggacgcgtggggccattcaggcagccctcgatgccgtggcccaggaaggccaatgtcgggtggatgacaaagtgaacttccattttattctgtttaacaacgtggatggccacctctatgaacttgatggacggatgccttttccagtgaaccatggcaccagctcagaggactcgctgctgcaggacgctgccaaggtctgcagagaattcactgagcgtgagcagggggaggtgcgcttctccgctgtggccctctgcaaggcggcctaatgccccgtggggggcactttgcttctccccctcttcccttcattgtgaaagtatatcccccccaatgctggtataaaatgcttcagtacttgtagagcacagctgttctccttcggttctgcagataagcacttaccctcaaccacgcccc

SEQ ID NO: 1004 - DNA, 298 bp, Bos taurus
  Clone ID: 05-LIB3057-009-Q1-K1-B1
tctagatcgcgagcggccgcccttttttttttttttttttttttttttttttttttttgtttttttttaggttttttttttttttttttttttttttttttttttttaaattttaaaaatttaaatttttaaaaaaataaaaattatttaaaaaaaaaaaaaaaggggaaaaaaaaaaaacttttaaaaaaaaggaataaaaaaaaaaaatttagaaaaccctttgaaggggtttaaaaaaaaaaatttgaaacataaattttaaagagttacatttaaatttacattataaaaactt

SEQ ID NO: 1005 - DNA, 345 bp, Bos taurus
  Clone ID: 05-LIB3057-010-Q1-K1-B1
acgctggcagaagggagtcaaagcacggatctttcttccatagaatgagatcacttactcccgattcgaatgcactatttaagccctaactcagccaaacttacttatagcatatggtagcattgtgtgtgcctaaacaaatggagctcctggactcatacctggactgagaacagatactggttgcagtcatcatctacatactcgatgacatctgataactgttaccataacaacgccgggcctacctaggaacccaagatagactgaaactaattgacattatgcttatacagatctaaacaccagtggtcgcctttgactaaaacgcgctactggatctgc

SEQ ID NO: 1006 - DNA, 421 bp, Bos taurus
  Clone ID: 05-LIB3057-010-Q1-K1-B9
gctttttaacagctgatactgtataagacaaagccaaaatgcaaaattaggctttgattggcacttttcgaaaaatatgcaacaattaagggatataatctggatggccgcttctgtacttaatgtgaaatatttagatacctttcaaacacttaacagtttctttgacaatgagttttgtaaggattggtagtaaatatcattccttatgacgtacattgtctgtcactaatccttggatcttgctgtattgtcacctaaattggtacaggtactgatgaaaatctaatggataatcataacactcttggttacatgtttttcctgcagcctgaaagtttttataagaaaaagacatcaaatgcctgctgctgccacccttttaaattgctatcttttgaaaagcaccagtatgtgtttt

SEQ ID NO: 1007 - DNA, 437 bp, Bos taurus
  Clone ID: 05-LIB3057-012-Q1-K1-B1
cgacccacgcgtccgctccaagccagatgctccaatctatcagtgcatggggtgctgcttctccagggcatacgccactccagcgaggtctaagaagacaatgttggtccccaagaacatcacctcggaagctacatgctgtgtggccaaagcatttaccaaggccacagtgattggaaatgtcagagtggagaaccacaccgagtgccactgcagcacctgtaatatcacaaatcctaatagtttgcagtgggccttgctgatgatggctgacttgctcaaaaggaaaaataatttgtccagtgtctatggctttgtgagataaaaccctccttttccttgccataccatttttaacctgctttgagaatatactgcaactttattgcctttctccttatcctacaatataatcagtagtcttgatcttttcattt

SEQ ID NO: 1008 - DNA, 438 bp, Bos taurus
  Clone ID: 05-LIB3057-013-Q1-K1-B1
ccagggcaggcatgggattcagggtgacattgtgtggttccatgagctgagtatggggctcgatggacacctcttcagttcagttcagttcagttgctcagtcgtgtctgactctggagtgctgcagtccatgggatcgcagagttggagccgactgagcgactgaacaacaacgaaccactagggggcaagccaggaccggtttacaacagctttctaagcgctcttgccaagggttaggaccagcacagggcatctggggatccccagaaggagatccgcagctctgggccccacctggcccctctcccctctctgccctgccctgtctgcagcactcctgggaatcctgtatgatgacaaggagaggcaagacttcatcttcaccatctatcactggtggcaggctgtggccatcttcaccgtctacttgggctc

SEQ ID NO: 1009 - DNA, 439 bp, Bos taurus
  unsure (62): unsure at all n locations; Clone ID: 05-LIB3057-015-Q1-K1-B9
atcgcagcgagggagctgctctgctacttacgattccccgacccagaagcaggtcgtcgacnaagtttttagcacggggcgccccacgaacgtgcggtgcgtgacgggcgagggggccaccacgtttagctcatctcttgttattctatttctgatgttttttattttcttattattttttttctgttttttttttttttttttttttttttttttattttttttttatttatttttcttttttttatttttttttttttatttttatttttttttttttttttttttttttttttttttttgtggggggtggttttttttttttttttttatttttttctttttttttttttttttttttttttttttttttttttttttttttttttttattttattattctttattttttttttttttttctttattttcattttt

SEQ ID NO: 1010 - DNA, 315 bp, Bos taurus
  Clone ID: 05-LIB3057-016-Q1-K1-B1
gtgtttctttttgaaacttgaaaggttttatttcggaactgcagacagctttaagagtcgggatacctggcgccatcactgcctgggcgaatcctcacccaggctgcgaggcggtaggagggcagaagagaggccttcagggtcaactttccgcggagagaggcccctgcccgctgcgccctcactggcccttcttgtgggcgttcttgatgatggcgtttttgaacagcgtgacaaggggcgtttggctcttattggaggtcatgaacccgccttatcgcttgaactttggcagtctgccccaaccgaagtgtt

SEQ ID NO: 1011 - DNA, 246 bp, Bos taurus
  Clone ID: 05-LIB3057-018-Q1-K1-B9
ttcccggtcgactccacgcgtccgtccagcccagcctggagatccccatgctgattcctaaagaaaagcccccaattacagttggtggtgacgtgggaggcaggatcgccatcattgtggatgacatcatcgacgatgtagacagcttcctggcctccgcggagaccctaaaggagaggggtgcatataagatcttcgtgatggccacctatggactgctgaccatcaactcttcaatgctgatcg

SEQ ID NO: 1012 - DNA, 352 bp, Bos taurus
  Clone ID: 05-LIB3057-019-Q1-K1-B1
gccaggagaactggccccaagagctgcaacgccatccggagggccaggaagcacccggagaaagtgaagaggatgccagccccgaggtggacaaacggcgctcgaggccaagacaccaccacgggaggagcaggcccgacaggtcctcccaggaggggaatcctcccctcgaggaggagtcacacgtgggcacgggcaactcagacgaagagaaagcccgccatccagcccactttagggctttggaggagggagccgaatatggggaggaagtgaggagacactcagctgcccaagctcctggagacttgcaaggggcacgattcgggggcagaagacgtgggagagcacc

SEQ ID NO: 1013 - DNA, 268 bp, Bos taurus
  unsure (228): unsure at all n locations; Clone ID: 05-LIB3057-020-Q1-K1-B1
caacagcggactccgagaggccagcggacctcggaaccggcagcactggctctcaacgacccacccaccagtctcggaaccatggcggcagtggcggcagcgtcggctgaattgctcatcatcggctggtacattttccgcgtgctgctgcaggtgttcaggtactccctgcagaagctggcatacacggtgtcgagaaccggacggcacgtgctgggagagcgccgncagcgggcccccaactgaggccccagcccccttccctggg

SEQ ID NO: 1014 - DNA, 355 bp, Bos taurus
  Clone ID: 05-LIB3057-021-Q1-K1-B1
gtctaaaccctgcagggcgatctgtgactcaccgtcgtgatgcccaatgatgacagttctacctgatatatccaactagtttcttaggatcatccaacttctggatcattatgcagattgcttaattgcgggtgcagataacgtggactgctatcatattcatcagatccaactgtatgttccccagagggctgcgatgctgttgggcaagcacacgatgtttcgcaaggctgttggatgacatctggaagactgcgcgcttctggagaaactggggcgtcatatctgagatcatgtacactctgttttcacccaggatgacctctgtgagatgagctacatgcttatggccaac

SEQ ID NO: 1015 - DNA, 436 bp, Bos taurus
  Clone ID: 05-LIB3057-022-Q1-K1-B9
aattaccgactcgacccactcgttccacttgatactgcgagcactatattcatgttaccacaaacatcttcttttgatgctctttgggcctggtttctctgtagtgtggtctgtgttggcagtaagccgcagtggaggtgctatgctggcatcttagaagtgttgagggaagaactctgacgtccaacatcaacatcttggtcaagtaaagtcttcagggtgttttgcgcacaaattatagtcagatagctatgcatgtttagagtaaatcttcaatttgtaattttccttagaatttttcaaaatgttgtgacagatatttgtcagaattattggaaatatgttaatgtggatggcattttttcatataaaattatatttagttcttttgagacatggctaatcccattttcatttaatttggtttactaattaa

SEQ ID NO: 1016 - DNA, 189 bp, Bos taurus
  Clone ID: 05-LIB3057-023-Q1-K1-B1
tcgctggaagccagcctacgcggatcatcatttccgcaatgtctgattcacgctacataatgacctttgatcatgtggtcgcactgtcaaactaatctacagtgactgtaattaaagtactctatatacctgatgtccatcataatagcaaactgtgttcaactcataaacactttatataaatcccaa

SEQ ID NO: 1017 - DNA, 266 bp, Bos taurus
  Clone ID: 05-LIB3057-024-Q1-K1-B1
atgatttgatgaatttaggagggaagatcttcctttcctccttgatatctttcgctcagttgtaataaatgatgaaccatcactctttgctttgagatttctggctttggcatcacagcaggaactcagtattctaaataatgggattatttgggattatcattgcagtacttggtctgggatcagttttaaatatatcttgtataaaaactctagtaagcttgtcaggatgactaaggttgcctgaccttgacccattctttgaa

SEQ ID NO: 1018 - DNA, 385 bp, Bos taurus
  Clone ID: 05-LIB3057-024-Q1-K1-B9
gcggcagccggccaagcagcatgaatataccaagggtgtcagttcatttacctggcctgacctggagcctaatttccagcgggaggatctaacaactgaccaacctatgaacacttaagttacaatttcgtgtgtggatatgtatcatcattactcttggatagatacattctcaactttctaggaagccatcacattgttttccaaagtggtggtacaacatgccccccagtactgaatgagaattccagttgcttcatatcctcaccaatgcttggtatggtcagtctttataattctatctattctagtaagtatatagtacaatctcattcagaatttatgtgcatgtctctaagattaattcgatacaaatcctatgttc

SEQ ID NO: 1019 - DNA, 419 bp, Bos taurus
  unsure (45),(93),(147): unsure at all n locations; Clone ID: 05-LIB3057-025-Q1-K1-B1
atcatgtctggtggctccgcggtttaacagaaacatgcggcccanagggatggacccggatggtgtcatcgagagcaactggaatgagattgntgataactttgatgatatgaacttaaaggagtctcttcttcggggcatctatgnctatggttttgagaagccattagctattcaacagagagctattattccatgtattaaagggtatgatgtgattgctcaagctcagtcaggtactggcaagacagccacatttgctatttccatcctgcaacagttggagattgagttcaaggagacccaagcactagtattggcccccaccagagaactggctcaacagatccaaaaggtaattctggcacttggagattatatgggagcaacttgtcatgcctgcattggtggaacaaatg

SEQ ID NO: 1020 - DNA, 314 bp, Bos taurus
  Clone ID: 05-LIB3058-001-Q1-K1-B1
gccatggattccgtcgcgctgatgccgttcctgctgctgctgctgctgcagcctccgtgcgccacccccgcgccgcctgtccgcgaccccttcgccctgcagcttggggacacgcagaactgccagctgcggtgccgagaccgctaccctaaacctcagcttgctcaggaggagctgggggaggaccccattcaatccaggagagcgaaggcgtatgacagggccgtcctgaccagcgcttgcgagcgaagctgccgtcttttctccatctgccgaattcgggccaggagctccaagcccaatgccacccaagc

SEQ ID NO: 1021 - DNA, 441 bp, Bos taurus
  unsure (13): unsure at all n locations; Clone ID: 05-LIB3058-002-Q1-K1-B1
cccacgcgtccgnccacgcgtccgcccacgcgtccggagatgacgtacctggacctgtcccacaacctcatccggggcaccgtgccgctgtcgctggagcggctgtccacgctgcagaagctggacctgagctacaaccgcctgtgcgggccgctccccaagggacacggcgtcatcaagcacgggtgcaagccgtacgcgcacaaccagtgccgcaaagggaccccgctcgcgggctgccaggacctggagtggagtgagtgagccggtggcggccttggtttctctgctctgctctccctcgccggcgtgcttcacgatcgtggtgtgtgtaaggaactaaggacgacggtgcctggtttaggagtttagctatagacgaaagcacgtacggccgcgtgcctggtctagctacgcggcctgggtgatcttgagcagtta

SEQ ID NO: 1022 - DNA, 401 bp, Bos taurus
  Clone ID: 05-LIB3058-003-Q1-K1-B1
ggggtattagccattcagtcatagcaggtaatttgaagatcttgatttgtttcagaatgatgcacattttgtattttccagcttgtctatcacttgtttggggttgtaccagaaaggtctggagaatgattctttgattatgattctctaacaaatgaaaattggacattaaacaacacaaatgatatgtaaaattggctagttcttgcatctgttgggatttttgaccaatgattccgttctttgcagaaacagatttggtgaattcgaatctcagtttgagtaacatatctgattgttctttctaggtggtgggagataatttgatttagtaatggtaccttggtgtgttaaagagttagttttaacatacaagttattctctcctggtgcagatcaaa

SEQ ID NO: 1023 - DNA, 238 bp, Bos taurus
  Clone ID: 05-LIB3058-005-Q1-K1-B1
gttctagatcgcgagcggccgtccttttttttatttagtattttttttttcttaaagtggcgtttgatccaagagagatggttttacctttgttgacccgatgtaaatatgtatctatactggttctaagtgtgttacttcatgaatgcgtcatttggctccaggaatccttgttcactcttgtaagttggtctttgggcactgtatatttttctaaaaacgtgttttggatcctgta

SEQ ID NO: 1024 - DNA, 369 bp, Bos taurus
  Clone ID: 05-LIB3058-006-Q1-K1-B9
gttctagatcgcgagcggccgcccttttttttttttttttttttttttttttatcgtcagagcacacaagctttattcagcaataacggcagtatttatgagtatgagctgtacaacggtggggatgctgtcttcagcacagagtctgagagcaaacaattatggtgacagagctcggcctccgcggccctgctcccttcccagacaggcccaggttgctccccactcctgcacggtggatggggtcccgaccatgggctccctctgtacccacactctctgcacctgacctgccttccccaggccactgggccaaagggagaggggtggactggtcccccaccctgggctccattcagtcctcttccc

SEQ ID NO: 1025 - DNA, 288 bp, Bos taurus
  Clone ID: 05-LIB3058-009-Q1-K1-B1
ccgcgagtaccaaggccggcgacctggtcttcgccaagatgaagggctacccgcactggcccgcccggatcgatgaactcccagagggagctgtgaagcctccagccaataaataccctatcttcttttttggcacccacgaaattgcttttctaggtcccaaagacctcttcccttacaaggaatacaaagacaagtttggaaaatcaaacatacggaaaggatttaatgaaagattgtgggaaatagaaaataacccaagagtaaaggttactggataccaggcaa

SEQ ID NO: 1026 - DNA, 354 bp, Bos taurus
  Clone ID: 05-LIB3058-009-Q1-K1-B9
ggccgccgtcttccggggccgcatgtccatgaaggaggtggatgagcagatgctgagcgtgcagagcaagaacagcagctacttcgtggagtggatccccaacaacgtgaagacggccgtgtgcgacatcccgccccgcggcctgaagatggccgccaccttcatcggcaacagcacggccatccaggagctgttcaagcgcatctcagagcagttcacagccatgttccggcgcaaggccttcctgcactggtacacgggcgagggcatggacgagatggagttcacagaggccgagagcaacatgaacgacctggtgtccgagtaccagcagtaccaggacgccacagccga

SEQ ID NO: 1027 - DNA, 421 bp, Bos taurus
  Clone ID: 05-LIB3058-011-Q1-K1-B1
ctcttagctcatatgcattcatctattcttcacaataaataagagtactccagtgccttggcgatatgttctagcatagagctatacgtatagtgtagttctataaacctatacctcatgacttaccaaagttatcttagtatcaattcctaccataatgagggagcctcccaaatgacccttttctaatccacaatgttccctgggggagtttgccagggtagggctggcatgaggagtgactagcgccctccagaggctcttttcctcgaaaatcaatatagagttgttgactcctctagcttttagcacacctaggccaaagaaagtaaagccagcaatattgcacaagtcacccacccatgacagagtagacatgagtctatgataagatgaactagaattcacatgcaatgcctga

SEQ ID NO: 1028 - DNA, 427 bp, Bos taurus
  Clone ID: 05-LIB3058-017-Q1-K1-B1
gatcttagttttctatatgttgagttttaagccaactttctcactttcctctttcactttcatcgagaggctcttgatttcctctttgctttctgccataaaggtgatgttatctgcatatctgacgtaactgatatttctcttgacaatcttcattccagctcatgctttatccagtacagcattttgcacgatgtactctgcatataagttaaataagccgggtgacaatatacaaccttgacgtactctactcccagttggaaccagtccaaatttggaaatgttctcatagcatatctaaatataaatgtactcatagcatatttaaaatatttttcctttaaaggaaagagctaacaaagtcaatagttcaaaaaggcatatatgtttccaaataataacatatcaatctagatttatattc

SEQ ID NO: 1029 - DNA, 451 bp, Bos taurus
  Clone ID: 05-LIB3058-018-Q1-K1-B1
caaggctcagcggggctgcgcgaggctgtggttaagcgagagaagcgttggtcaactgccactcgaatcacggagacaggaagtccctgccatgcctcacatcgacaacgacgtcaaactggatttcaaggatgtcctgttgaggcccaaacgcagtacccttaagtctcgaagtgaggtggatctcacaagatcctttgcctttcggaactcaaagcagatgtacactgggatccccattattgctgccaatatggatactgtgggcacctttgagatggccaaggtcctctgtaagttctccctcttcactgctgtccataaacactacagcctcgagcagtggaaagagtttgccagccagaatcctgactgtcttgagcatctggctgccagctcaggcacaggctcttcggactttgagcagctggaacagatcctgaacgctatt

SEQ ID NO: 1030 - DNA, 371 bp, Bos taurus
  Clone ID: 05-LIB3058-018-Q1-K1-B9
tcggaaggggccgggagaggccgcgttcagtcggatcccggcagcagctgcagcgcctctcgtcttgtaggctctcctagctatcgccttttcgctttcggaaacatggcctccggtgtggctgactctgatggggtcatcaaagtgttcaacgacatgaaagtgcgtaagtcgtcgacaccagaagaagtgaaaaagcgcaagaaggcggtgctcttctgcctgagtgaggacaagaagaacatcatcctggaagaaggcaaggagatcctggtgggtgacctgggccagacggtagacgacccctatgccacctttgtcaagaatctgccagacaaagactgccggtacgccctctacgatgcaaccta

SEQ ID NO: 1031 - DNA, 191 bp, Bos taurus
  Clone ID: 05-LIB3058-019-Q1-K1-B1
agaaaaaaaaaagaaaatttcagaaacaaaatctccaaattgctcgacacacacactgcgtcattgagctggttgtgactgagtgacctccattcgtggccacacccaacagtgagagctgtgaccacgggtctcaaggaaagtatgcactgttcttgagtattgaaataaagtaatacacttttaatgat

SEQ ID NO: 1032 - DNA, 440 bp, Bos taurus
  Clone ID: 05-LIB3058-019-Q1-K1-B9
acggatgcgtccacgcagccggcgagccgtgttcgtcctttgttttcctttttttttttttttttttttttttttgatgatggtgtatttttttattaccttttctgcatgttaaagcttaaataagctttaggcctttgtatttattttagataatacagtaaaaaaaattattttgccctactgtaattttaaagtgttctgttcaaattttaccatgattcaacaggtttttttccccattgcttttaacatttcctcaaagaatacccagcaaagggccaacctttgtcctctgggctattactgccctgcacagtcagtgtccaacctaagtactttgcagttcattattattgtttggaaaatgttcggggggcactttgtcataggtcaatctggtttgaagtaaagtatagttatggtgagagaacaacagg

SEQ ID NO: 1033 - DNA, 461 bp, Bos taurus
  Clone ID: 05-LIB3058-021-Q1-K1-B9
attctctggagaaaagatcagtaggcagagctctggggaatagagctcaaaggcaaagaaaatgctagttaatagtacattgttaatgttaaattgttacttgaaaagtttctacaatgcttaaaactgctaagtgtggggaaggaaaaaagcaaaattgttttgctttgctacaagaaggggaagactgaaaagttaactgaaacctggatatcagtctcttgaaagattgttagggacttgcatcagcagattaacatctttcactcctttgcaagcttcttaagtggtttatctgaaggtgtgcaatgttcagggactagtttcagaaaagactttcagtaccctaattgtgggcttttaaagtattttaagatttggtacaggcttagatgccctcttctgggtttgtaacatttttgttcacttgatattttgcagttgaaagtttgagcaaagtg

SEQ ID NO: 1034 - DNA, 426 bp, Bos taurus
  Clone ID: 05-LIB3058-027-Q1-K1-B9
ggcagacagaaaaaggttgttaaaggaggacaaactttcagttataagatgaataatggctaaggatctaatgtatagcatggtgactatagttgatgacactgaattttatcactgcaatttgatagagttctcacggcaaagaaagaaagctggtaatggatgtgttattaactcattgaggagaatcctttcgcaatgtaaacatatctcaaactaccacaatgtgcagtttaaatattttgcaattttgtcaattgtacttaaataaattttgtgggaggaagaaaaatatctgaactatatttagatggaaatgacattctgttctttactattcacattctaattagtcctccacttcctacgaactcattcactcattcagctcatttaatgattgaaagtgaaagtgaagtcgctcgg

SEQ ID NO: 1035 - DNA, 288 bp, Bos taurus
  Clone ID: 05-LIB3058-029-Q1-K1-B9
acagtgacacatggggacccacccactaataaaaattgctaacaatgcgggcatcgaccgtgcagcctcatcaaacatttcatcatgacgaaatttcggttccctactgggaatctgcctaatcctacaaatccttacaggcctattcctagcaatacactacacattcgacacaacaacagcattctcctctgttacccatatctgccgagacgtgaactacggctgaatcatccgaaacatacacgcgaactgagcttcaatgttttttatcagcttatatatgca

SEQ ID NO: 1036 - DNA, 344 bp, Bos taurus
  Clone ID: 05-LIB3058-031-Q1-K1-B1
ttttcattttttttgtttttttttttttatcaatttattatttttttttctgtttgcttttttttttttattttatcttttttttatttatttttttatttttttattatttttttttttttttttttttttttttttctttttttttattttttttttttttttttttttattttttttttattatttttttttttatttttatttttttatttttttttttttttttttttttttttttttaatttttttttttttttttattatatttttttttttttttatttttttattttttttattttatttttttttttttattttattttttatttttttttttt

SEQ ID NO: 1037 - DNA, 421 bp, Bos taurus
  Clone ID: 05-LIB3058-035-Q1-K1-B9
gtgcctcacgactgtccaggggccgactgtgttcaggcaggtcgaggggcctcatgtgaggggtgccccaaccagcggctctgcgcttctggagctggtgctgtcgcggacccggccatagaggaaatcaaagaaaaaatgaagaccgtgaaacacaagatcttggtgttgtctgggaaaggcggcgttgggaaaagcacatttagtgcccacctggcccacggcctagcggaggatgaaaacacgcaggttgctcttctagacatcgatatatgcgggccgtcaattcccaagatcatgggattggaaggagaacaggttcaccagagcggctcgggctggtctccagtgttcctggaagacaacttgggggtgatgtcggtgggtttcttactcagcagccccgacgatgctgtcatct

SEQ ID NO: 1038 - DNA, 409 bp, Bos taurus
  Clone ID: 05-LIB3058-036-Q1-K1-B9
cgactcgtccggtgcacgtggcaacgagcagcgttcttgtacctgttatgtgcccgtgaaatcccaccgaggggctggaggacgagagagtcaacttcatccacctgatcctggaagcgctggtggatgggcccccgatgtgggcctcggctcatgtgtcccggcccccaaagaggcccagcaagatggggtttgatgaggtgtttgtcatcagcctggcccgccggcccgaccgccgagagcgcatgctgacttcactctgggagatggagatctctgggcgggtggtggacgctgtggatggccggatgctcaatagcagtgtcatgaggaccctcggcgtggacctgcttcccggctaccaggacccctactggggccgcacgctgaccaagggcgaggtgggctg

SEQ ID NO: 1039 - DNA, 392 bp, Bos taurus
  unsure (357): unsure at all n locations; Clone ID: 05-LIB3058-037-Q1-K1-B1
gggtatcttaatgggatgaatgagtgttcgaatgaataaaaggaacaacgaaatttgatgagctagaacactttgtgaaagtgttctaagttaattgaacttaattgaacttgctggttaattgtatatcctttttgttctggtttttatttttgaaacactttactggaaaaatgcattttgtttttcacctttaattgaatgcaaatccgatggtcatatgagcaaaagagaactctgttcaagtgtgatgcattcaaattacatctatcctaaaggagatggataagaagaaacccaaatttcttggatcacatgaaacagtaaagttaagaatcccattttttaacattttgntactgagaatgaattttttggaaaccacattcaga

SEQ ID NO: 1040 - DNA, 233 bp, Bos taurus
  Clone ID: 05-LIB3058-037-Q1-K1-B9
aaatctgaagaggacgtgggagaagcttctgttggccgctcgggccattgtcgccattgaaaacccggctgatgtcagtgtcatatcctccaggaatactggccagcgagctgtgctgaagtttgctgctgccactggagccactcctatcgctggccgcttcactccgggaaccttcactaaccagatccaggccgcattcaaggagccaaggctttttgtggtcaccgatc

SEQ ID NO: 1041 - DNA, 382 bp, Bos taurus
  Clone ID: 05-LIB3058-040-Q1-K1-B9
catcggcgaaaccctctacattggaggatagccaatggaggatctcacgaccacatccaagggtatttggatatagaggacttccgacgagccacggcagcctcttcagtgatggtggcccgggcggccatgtggaacccgtccatcttcctcaaggagggtccacggtccttggaagaggtcatgcagaagtacatcagatatgctgtgcagtatgacaaccactacaccaacaccaagtactgcttgtgccagatgctgcgagaacaggtggaatcacctcagggaaggttacttcacgctgtccagtcttcccaggaaatttgtgaggcctttggccttggggccttctatgaggagaccacacgagagctggatgccc

SEQ ID NO: 1042 - DNA, 448 bp, Bos taurus
  unsure (18),(398): unsure at all n locations; Clone ID: 05-LIB3058-041-Q1-K1-B1
cggccagaccccctcgtncgttggcaccaggcagtgtatacatgcaattagctgttggaccctgtgacctctggcctcgacaccgcggaggtgtttggcttcctgaacctagtgctctgggtcggcaacctgtggttcgtgttcaaggagacaggctgggccgccccattcctgcgcgctcctcctggtgcccccgagaaacaaccagcgcccggggacgcctatggcgaggcaggctacgggcagggccccggcgggtacgggccccaggactcctacgggccccagggtggctatcagccagactacgggcagccggccagcagcggcggcggtggctatgggcctcagggcgactacgggcagcaaggctacggccctcagggtgcacccacatncttctccaatcagatgtagtctggtcagtgcaagctgggaggaccccatg

SEQ ID NO: 1043 - DNA, 428 bp, Bos taurus
  Clone ID: 05-LIB3058-042-Q1-K1-B1
cggacgcgtggggtcggatgaagagcttcgcttctacagcatccaggagccgagtgaggagagcgaggaggaggtgccgcccgtcccagtggtggtggcggagagccagagcgcgcgcaacttgcgcagcctgcttaagatgccgagcctgctgtccgaggccttctgcgaggacctggagcgcaagaagaaagctgtgtccttcttcgacgacgtcactgtctacctctttgaccaggaaagccccacccgagagctcggggagcccttccctggtgccaaggagtcaccccccacgttcccagtgggcagcccaggctcccccagtgcctactgccggccacggcgggctgacccctcccccgaaggccctgcgactgaacaggacggaaagttcgagtggaatgatggcctcatgctgtcgtccg

SEQ ID NO: 1044 - DNA, 394 bp, Bos taurus
  Clone ID: 05-LIB3058-043-Q1-K1-B1
tcccgactcaacccacccgtataagagcttttttctattagcctcatcggtttcattcttccaggaggagactggtgaggagggtgcggtagctgaggagatgcaggccagcccttggctgaattccctcacggcgaagtgaccccttggcccttgtgtgtgaatagtccatttcttacgctagcactcatacattgcactaatgcgaacactagagcttgcttgcactataacactttatattaaagctatagcagtgctcgagcggttaagatctcacatcactgcaggacacctattaattcacctaatcggaggagctacactcgcactaataagcattaacactacaacagttataattacattgaacattctaatcctactaacaatt

SEQ ID NO: 1045 - DNA, 165 bp, Bos taurus
  Clone ID: 05-LIB3058-043-Q1-K1-B9
ccactcgtccggaggaatatgatggtcttcagcaatacttgcatatgcacagctgataggaacactcaggcaagcttaatatctagcttatagactcaatctaaatggtcacaggcttctactgaatcttcaagaaccttctctgctcattcatgatgtacaatc

SEQ ID NO: 1046 - DNA, 430 bp, Bos taurus
  Clone ID: 05-LIB3058-045-Q1-K1-B1
cggacgcgtgggtctagatcgcgagcgttcgctaccagttgatggactgagaatctgagaaagcaacaaaagatttgtcccaagctgcatgattgctctttctcttcctcccgagtctccttgcaggcccccgccatctcttctttcggccctcccgtcttccattcacaccttccaaggcctgatgcattcataagatgagccccccagtccccttcagggggcctctgccctcctcctccagcccgggtggctcttgtccgttttggtttgttcctgttcgtttgtcatcttgttttggggtgccggggtggccgccggcgctgtcctaggacctgatggggaggggccgaggccctcaggagggccaggcgcgagaggcacgccttttgctgttgcatgcaaccagcctgtgataccctgtgcccat

SEQ ID NO: 1047 - DNA, 456 bp, Bos taurus
  Clone ID: 05-LIB3058-045-Q1-K1-B9
gttgacccacgcgtccgttgccaattacatacagacacaccaactttacacaaatacttatttccaattacacacgcacacacacacacatacaccaacaacacacaaatacctatttccaattacacacacacacacacacacacactggctgttacaactaaaatccgggtgagaaaagacttaatgtccaaattcctattgcaagcaaggatttcatacatatatgtctcctgcacaaagtctgatgtttctggatgaaacagaatttaccatgatctctaaccaccattaaactgagtttcaggatgtggcttgattacacaatactgtcaaactggctaaataaagggcagcgtttttaaaagttgttgctatgccaaagacctaaatttgaggtctttctctctggcaacagctaacagtgtcactcacacctaaaaaagaatgcaagca

SEQ ID NO: 1048 - DNA, 413 bp, Bos taurus
  Clone ID: 05-LIB3058-046-Q1-K1-B1
cccacgcgtccgcccacgcgtccgctttcgcgtgggtcaaaaagcaagcctcagtggatttgggattattgaaatcacacaaagtaatactttggccacctgatgagaagagctgactcatttgaaaagaccctgatgctgggaaagattgagggcaggaggagaaggggacgacagaggataagctggtcggatggcatcaccgactcaatggacatgggtttgggtgaactccgggagttggtgatggacagggaggcctggcatcctgcagcccatggggttacaaagagttggacacgactgagcgactgaactgaactgatgctctctgaacacagtgaactgaaattagaaaagaaaaacagatttgggaaatttacagtgtagaaatgaacactactggatcaaag

SEQ ID NO: 1049 - DNA, 358 bp, Bos taurus
  Clone ID: 05-LIB3058-047-Q1-K1-B1
gccctgcctcaagcagacctgcatgattttcttcgcgcgggtgtgcagaagcggatcgggactggttggccaccagcttgaggagttcctaaaccagagctcccccttctacttctggatcaacggtgaccgcatcgattccctgatggagaatgaccgggagcagagccacgtgatggacgtcatggaggacagcttcacccgggcgtccagcatcatggacgagctcttccaggaccggttcttcctccggaggccccaggacactcagtactactcccccttcagctcgttcccgaaggggtcactcttcttcaatcccaagtcccgctttgcccggaacgtgatgccttttccc

SEQ ID NO: 1050 - DNA, 459 bp, Bos taurus
  Clone ID: 05-LIB3058-051-Q1-K1-B1
ggattcccggtcgaccacgcgtacgccaacaatgaatacttcaacttgtatcaaaacatataatgagtatccacaattctaaaggacatacatgaacattaatattaatatctctgatcctatttattggatcaacaaacctactaggcctattaccccattcattcacaccaacaacacaactatcaataaacctaggcatagccattccactgtgagcaggagccgtaattacaggattccgcaataaaactaaagcatcacttgcccatttcttaccacaaggaacacccactctactaatgccaatactagtaattattgaaactatcaggctttttattcaacctatagccctggatcgtcggttaacagctaacatcactgcacgacacctattaattcacctaatcggaggagctacacttgcactaataagcattagcactacaacagctc

SEQ ID NO: 1051 - DNA, 393 bp, Bos taurus
  Clone ID: 05-LIB3058-051-Q1-K1-B9
ggacaccttcctgaggacttacacagacgccatgcagaattacaatggcaacgacgagaggagccgggcagtggaccacgtgcagctcagcctgagctgctgtggcgtgcagaactataccaactggagcaccagcccctacttcctggagcacggcgtcccctcgagctgctgcatgaatgacacctattgcaacccccaggatctgcacaacctgactgttgccgccactaaagtgaaccagaagggttgttatgatctggtgaccagtttcatggagaccaacatgggaatcatcgctggagtggcttttgggattgcattctcccagctgattggcatgctgctggcctgctgtttgtcccggttcatcacggccaaccagtatgagat

SEQ ID NO: 1052 - DNA, 385 bp, Bos taurus
  Clone ID: 05-LIB3058-053-Q1-K1-B1
cccacgcgtccggcagtgctggccctgtcccccgactacgagggcgtctgggcggatctgcaggagctctggttcctgggcatgcaggccttcacgggctgcgtgcccctgcttccctggctggcccctgccgccctgcgctcccgctggccccaggagctgctgcagctgctgggcagcgtcagccccaactctgtcaagcctgagatggtggctgcctatcagggcgtcctggttgagctggcaagggccaaccggctgtgccgggaggccatgaggctgcaggccggggaggagactgccagccactaccgcatggccgccctggagcagtgcctggccgagccctgagggggcatccactggggacagacctgggggtggc

SEQ ID NO: 1053 - DNA, 352 bp, Bos taurus
  unsure (331): unsure at all n locations; Clone ID: 05-LIB3058-054-Q1-K1-B1
tcgcgcccccttcggttctcgaaagctaattcgtggcatgggccgggccggggaagcggaggaggcgggtctccatagaaacctccacctgtttccggccaggctgtgcaagattaggggctgctgcgggggccaatctcagccagctcgccttttcccggcggcctctgcgggagcggtgggtgttgtacacaatcatcatggcggcggccggagccccggatggcatggaggagcctggcatggacacggaggccgagaccgaggcgcccgcgcggtccctcaactgcgtggaggccgaagccgcggcggtggcggctgccgaggactnctgcgcagcgcgaggcaacct

SEQ ID NO: 1054 - DNA, 453 bp, Bos taurus
  unsure (345): unsure at all n locations; Clone ID: 05-LIB3058-057-Q1-K1-B1
cgaagggcaaggaggcgcccttcaacaacttcaacccgtcctgcctgttccccgcctgccgggactactggacctaccacggctcctttaccacgccgccctgcgaggagtgcatcgtgtggctgctgctgaaggagcccatcacggtcagctccgaccagatagccaagctgcgcactctgtactccagcgcggagaacgagcccccggtgcccctggtgaggaactggcgccctccgcagcccatcaagggcaggatcgtgaaggcctccttcaagtgaggccgctggagctcgccctcttcaggaaaggaagccggccctgcagagcttggtccctcacctnctcttggtgcttctgactccagtatactccgggtccatccccgtgtttccacgcagagcagagcagatgagagacgccatcaccaggaaatcagagctactattccca

SEQ ID NO: 1055 - DNA, 415 bp, Bos taurus
  Clone ID: 05-LIB34-001-Q1-E1-B1
gtcgacgacccgtccgattaataaaagactgcatatgagcaagatgtctatgaaaaggctctcgcttctgctgctgctacagctgacttgctactttagcggtgggagttgtggaaaggtgctggtatggccagtggaatttagtcactggctgaatataaagacaattctggaggaacttgtcacaaggggtcatgaggtgactgttctgatatcttcagcttccactattcctaattccagcaaaccatctactatgaaatttgagacttttcctgtatctttaacaaaaactgattatgagaattttatagaacgtcttcttgaggaatggacgtatgtgtcgaaagattcccttttggtcctatctttcaacagtgagaactttagtttgggaaatgttttgatactactt

SEQ ID NO: 1056 - DNA, 430 bp, Bos taurus
  Clone ID: 05-LIB34-002-Q1-E1-B1
gggccgacccacgcgtccagttacgtactcatggctcggcggctgctaaagccggcctacgggacctccggcggcctgccacgggccaagcgcaagtccgtgcgcaccatcgccattgtgctgactgtcttcgtcctctgctttctgcctttccacgtcacccgcaccctctactactccttccgctcgctggacctcagctgccgcaccctcgacgccatcaacttggcttacaaggtcacccggccgctggccagcgccaacagttgccttgacccggtgctctacttcctggctgggcagaggctcgtgcgctttgcccgggatgccaagccacccacagaccccacccctcccacccaggctcgccaccggctgggcctgcacaggtcctacggaactgacgccgacaagacagaagactccggca

SEQ ID NO: 1057 - DNA, 412 bp, Bos taurus
  unsure (80): unsure at all n locations; Clone ID: 05-LIB34-002-Q1-E1-B9
gcgtcagtcaaatacaaaccctctgttcgtatgatcgtaatattaccgccgtactactactactctcgctccctgtatancagccggcatcacaatgctattaacagaccggaacctaaatacaaccttcttcgacccggcaggaggaggagaccctattctatatcaacacttattctgattctttggacaccccgaagtctatattttaatcttacctgggtttggaataatctctcatatcgtgacctactactcatgaaaaaaagaaccattcggatatatgggaatagtttgggctataatgtcaatcggatttctaggtttcatcgtatgagcccaccatatattcactgtcggaatagacgtcgacacacgagcctacttcacatcagccactataattattgct

SEQ ID NO: 1058 - DNA, 400 bp, Bos taurus
  Clone ID: 05-LIB34-003-Q1-E1-B1
tcagacagaacgtgcgtaccaaaagcaaccgaccatctttcaaaataaaaagagggtcctgcttggagaaactggcaaagaaaagctccctcgatactacaagaacattggtctgggcttcaagactccaaaggaggccatcgagggcacctacattgacaagaaatgcccttttacgggtaatgtctccattcgagggcggatcctgtctggcgtggtgaccaaaatgaagatgcagaggaccatcgtcatccgccgagactaccttcactacatccgaaagtacaaccgctttgagaagcgccacaagaacatgtccgtgcacctttctccctgcttcagggacgtccagatcggcgacatcgtcacggtgggcgagtgccgggccctgagcaagact

SEQ ID NO: 1059 - DNA, 395 bp, Bos taurus
  Clone ID: 05-LIB34-003-Q1-E1-B9
tcagggaccatcaggccttcgaggcgggaatatagacaaattcaagcaacctgcactggggattgcttttcatggccctgaaccccgaaatccaagaaaaagtccaagctgagatcgacagggtgctcgggcaatcacagaaggtgagcacggcctctcgagagtccatgccctacaccaacgctgtcatccacgaggtgcagagaatggggaacatcgtccccatgaacgtgcccagggaggtgacagtggacaccgtcctggctggataccacctggtcaagggcaccatggtgctgaccaacctgactgcactgcacagggaccccgcagagtgggccacccctgacacgttcaatccagagcattttctggaaaatggacagtttaagaaa

SEQ ID NO: 1060 - DNA, 374 bp, Bos taurus
  Clone ID: 05-LIB34-004-Q1-E1-B1
ggcaacagccgtgagctcagcatcaggtcctgctttcccagtctcttccaagctgagcaaacccatcgttccatattactggggctgctgctgggggcaggccggggcccacagctggactcagcacttattcgccaagctcgggctgagcgctggagccagtggtcactccgtggagggctggagacattgccccaggccctccacgcccacctgactagtaggggtgtcagtgttctccaaggccagccagtctgtgggctcagtctccaggcagaagggcgctggaaggtgtctctagaggacagcagcctggaggctgaccacattattagtgccattccagcttcagtgctcagcaagctgctccctgc

SEQ ID NO: 1061 - DNA, 401 bp, Bos taurus
  Clone ID: 05-LIB34-005-Q1-E1-B1
caaggctaaagaaattaatgacaataatggatagtatgaatgatcaagagcttgacagtactgatggtgccaaggttttcagtaagcaaccaggaaggatccagagagtagcaagaggatccggtgtgtcaacaagagatgtccaagaacttctgacccagtataccaaatttgcacagatggtaaaaaagatgggaggtatcaaaggacttttcaaaggtggtgacatgtctaagaatgtgagccagtcacagatggcaaaattgaatcaacaaatggccaaaatgatggatccaagagttcttcatcatatgggtggtatggcaggacttcagtcaatgatgaagcaatttcaacagggtgctgctggcaatatgaaaggcatgatgggattcaataac

SEQ ID NO: 1062 - DNA, 423 bp, Bos taurus
  unsure (411): unsure at all n locations; Clone ID: 05-LIB34-006-Q1-E1-B1
ggcgcttcgacccctatggccatgtggtggcatcagtggccaacgtcatcggtgccatgtgcttcgggcagcacttcccccagagcagtaaggagatgctcagtctggtggagagcagccatgatttcgtggaatccgccagctccgggaatcctgtggacttcttccctatccttaaatacctgcccaacccggctctgcaaaggttcaagagcttcaaccagaggttcctgcagttcgtgcggaaaacggtccaggagcactaccaggactttgacaagaacagcatccaggacatcataggcgccctgttcaagcacagtgaggataactcccgagccagcagtcgcctcatctcccaggagaagactgtcaaccttgtcaacgacctctttgcggctgggtttgacnacatcacaacag

SEQ ID NO: 1063 - DNA, 418 bp, Bos taurus
  unsure (370): unsure at all n locations; Clone ID: 05-LIB34-007-Q1-E1-B1
ggtgtaacctcttattctcaagtgactggaagaaccggtgagtctgtcaggctaccctgcttatatactggagaaatcacaactgcatgctggggccgaggggaatgttcttggtggagctgcagagaagacattatccagactgatggatacaaagtcacttttcagaaggacagacgttatcaactaagaggatatattggcgaaaggaatttgaccttgaccataaagaatgctgacccatctgacagtggcttgtattgctgccgtattgagaaaaaagggtggttcaatgatataataatcactcaagagttgagtataagaaattcctcaggagacatgtaatctgctattcccatctcttcangaatattccaagtttgttgtgatccacagttaaaagctttcacacggt

SEQ ID NO: 1064 - DNA, 410 bp, Bos taurus
  Clone ID: 05-LIB34-008-Q1-E1-B1
aaaggaagcagatttttgaaccttaaacagtacaactggagtatttgtgtgaatgtaccactgggaaaatctaacatgttgatgttaatcaatgtccttctcaccttgtggttttacactgctcatggacaggggaaacattgtaattatccagtaataagacatggacagctgtatcagtcatacagtggatactttccagcacgtgtaaatcaacagtttctctataactgtgatcagtattttgtgcctccttcactatattcctcggattacctgacttgcacagcagaaggatggtttccagaagaaccatgccttagagaatgtattttcaataatttggaaaatggatataccccaagtagtgaaaaaaaagttgtacagggtgaaactgtaagggttcgctg

SEQ ID NO: 1065 - DNA, 404 bp, Bos taurus
  Clone ID: 05-LIB34-008-Q1-E1-B9
caggaaagtaccccaagtgtcaactccaactctcgtggaggtttcaagaagcctaggaaaagtgggtactaggtgttgtacaaagccggaatcagaaagaatgccctgtactgaagactatctgagcttgatcctgaaccggttgtgcgtgctgcatgagaagacaccagtgagtgaaaaagtcaccaagtgctgcacagagtcattggtgaacagacggccatgtttctctgctctgacacctgatgaaacatatgtacccaaagcctttgatgagaaattgttcaccttccatgcagatatatgcacacttcccgatactgagaaacaaatcaagaaacaaactgcacttgttgagctgttgaaacacaagcccaaggcaacagaggaacaactgaaaaacg

SEQ ID NO: 1066 - DNA, 388 bp, Bos taurus
  Clone ID: 05-LIB34-009-Q1-E1-B1
gcaagactctaaagtgagtcatattatgctggataagcgaagtgccactgggttccttgtcctctccctcacaccatgggataaatctgtatcaagacggttcttttttagatttcctctacctttctgctcttaaactgcttctctgctttgagaagcacagctacctgccttcactgaaatatacctcaggctgagatttggggtgggatagcaggtcagttgatcttccgcaggaaggtgcagctctttcatatcagctcaaccacaccgccagtccatttttaagcaactgcagaccatgacaggtgtgttttagctttcagcctttggggttatttgacaaacacatagtcttttgggaagactatagcaatcccaggaattt

SEQ ID NO: 1067 - DNA, 389 bp, Bos taurus
  Clone ID: 05-LIB34-010-Q1-E2-B9
cacgcattcgatcgcgggccgtgccgtggtggtccacgcgggcgaggacgacatgggccgcggcggcaatcaggccagtctggagaacggtaacgccggccgccggcttgcctgctgcgtggtgggtctgtgtggccccgggccctgggcacgccaaacgcacgagcacgcggagcgcaagaagcggcggcgcgagagcgagtgtaaagccgtctgagcgctccacctaggtggtcctgagctccgaccgcgcgccgcagaccccttctatgcgctctgggagcctttccatgccccgactcccctctaagtgcccctagaccgctccacgcccggacttctctccaggctcccgagatcccccctgtgtggctcagggccgccccccg

SEQ ID NO: 1068 - DNA, 363 bp, Bos taurus
  Clone ID: 05-LIB34-011-Q1-E1-B1
acgcgtccgagcagagagcagcacacacagctgaaaggaaactcagaggacggaatcacaaagaaagtggccatggagctaatccaagcttttcatggaaacctgggttctcctgtctatcagcctggtgctcctttatctatatggaacttattcacacggactatttaagaagctgggagttcctgggccaagacctctgccttattttggaaatgttctgtcctaccgaaagggtgtttgtgagtttgatgaagaatgttttaaaaagtatgggaaaatgtgggggatttttgaaggtaaacatcctctgttggttatcacagattcagatgtgatcaaaacagtactagtgaaagaatg

SEQ ID NO: 1069 - DNA, 119 bp, Bos taurus
  Clone ID: 05-LIB34-011-Q1-E1-B9
cccacgcgtccgatagttctagatcgcgagcggccgcccttttttttttttttttttttttttttttttttttttttttttttttttttttttttttttttgttctttgttcttttttt

SEQ ID NO: 1070 - DNA, 350 bp, Bos taurus
  Clone ID: 05-LIB34-012-Q1-E1-B1
acgcgtccgaggaaacgtgggctagttctagatcgcgagcggccgcccttttttttttttttttttttatattttttttttttttattttttttttttttttttaaacctcatggtttcttcacttttatttaggtaatgtaatttaatgcatacattaaactgttaaaaaaatcagtaaatgggatcacaccaaggaaaatctgcatgctatttccactagaaaaatattatctatataaaatttggtccactttcttctcctttaactctgccattcaaatttaaatactttaattttactccagcaaaaatcacatatctgacataataaaatacttcacatcataa

SEQ ID NO: 1071 - DNA, 369 bp, Bos taurus
  unsure (255): unsure at all n locations; Clone ID: 05-LIB34-013-Q1-E1-B1
atctgaacttggcggtcgctcgacgaacacgatgaagttcaaccccttcgtgacctcggaccgcagcaaaaaccgcaaacgtcatttcaatgccccctcccacgtgcgcaggaaaatcatgtcgtctccactctccaaggagctgcgacagaagtacaacgtccgctccatgcccatccgcaaggacgacgaggtccaggtggttcgaggacactacaaaggccagcaaattggcaaggtagtccaagtgtatangaagaagtacgtcatccacattgaacgggtgcagcgcgagaaggctaacggcacgactgtccacatgggccttcaccccagcatgtggtcatcaccaggctaaaactggacaaa

SEQ ID NO: 1072 - DNA, 400 bp, Bos taurus
  unsure (381): unsure at all n locations; Clone ID: 05-LIB34-013-Q1-E1-B9
acgcgtccgactctaatctatatcaacacttattctgattctttggacaccccgaagtctatattttaatcttacctgggtttggaataatctctcatatcgtgacctactactcaggaaaaaaagaaccattcggatatatgggaatagtttgggctataatgtcaatcggatttctaggtttcatcgtatgagcccaccatatattcactgtcggaatagacgtcgacacacgagcctacttcacatcagccactataattattgctattccaaccggggtaaaagtcttcagctgattggcaacacttcatggaggtaatatcaaatggtctcctgctataatgtgagccctaagctttattttcttaattacagtanggggtttaactggaattgt

SEQ ID NO: 1073 - DNA, 341 bp, Bos taurus
  unsure (327)...(328): unsure at all n locations; Clone ID: 05-LIB34-014-Q1-E1-B1
gcgtccgattggaggactggaatggcagaaccagcactgcagattatgcttcattcaaggtgacaggtgaaaatgacaaataccgcctgacatatgcttacttcattggtggagatgctggagatgcatttgatggctacgattttggcgatgattctagtgacaagtttttcacatcccataatggcatgcagttcagtacttgggacagtgacaatgataagtatgatggcaactgtgctgaacaggatggatctggttggtggatgaacaaatgtcacgctggccacctcaatggagtttattatcaaggtgggacttactcannaacatctactcct

SEQ ID NO: 1074 - DNA, 424 bp, Bos taurus
  Clone ID: 05-LIB34-016-Q1-E1-B1
ggaagagcctgtaagtctgtaattcacatctcctgccagcagagaaaagaagaaacatgagcacggcaggaaaagtaataaaatgcaaagcagctgtgctgtgggagctcaataaaccattttccattgaggaggtggaggttgcaccccctaaggcccatgaagttcgtattaagatggtggccacaggaatctgtcgctcagatgaccatgtggttaatggatctctggtcacacgtcttcctgtggtcttaggtcatgagggagccggcattgtggagagcattggagaaggggtgactacagtaagaccaggtgataaagtcatcccactctttattccccagtgtggaaagtgcaatgtttgtaaacacccagaagccaacctttgcctgaaattccagctgaaggagcctcgggggac

SEQ ID NO: 1075 - DNA, 287 bp, Bos taurus
  Clone ID: 05-LIB34-018-Q1-E1-B9
aggcggtctgtgtgtacgtcttgcattctcggggacagtcgaccttgatacagcagtgcggacatgtgataacgacagcttgcgtctggtcgtctcaccgcctatgctgcgctcaactgttgctccgacacggtcaccaacaccaacgcttttctcttgcagcagacgatgttgcgaattatcgatcctaacaagtcatctggatttttatacaacaattcttgggatgacaccactccagaaacttgatttccccactatcaaattttcacactatttcatggctt

SEQ ID NO: 1076 - DNA, 432 bp, Bos taurus
  Clone ID: 05-LIB34-019-Q1-E1-B1
actccagcgccgcaacctcggcgaaaaaaatcctcgtcaagcacgtgacggtcatcggcggtgggctgatgggcgccggcattgcccaggttgctgcagcaactggccacacagtagtgttggtggaccaaacagaggacatcctggaaaaatctagaaagggaattgaggaaagtcttcggaaagtggccaagaagaagtttgcagaaaaccccaagggcgctgatgagtttgtggcgaagaccctgagcagcatatcgaccagcacggatgcagcatctgtggtccacagcacagacttggtggtggaggccattgtagagaatctgcagatgaagaacgagctgttcaagaggctggacaagtttgccgccgaacacacaatcttttgcagcaacacttcctctttgcagatcacaagcctagccaatt

SEQ ID NO: 1077 - DNA, 425 bp, Bos taurus
  Clone ID: 05-LIB34-020-Q1-E2-B9
caaaactttggcacaatgaagtgggtgacttttatttctcttctccttctcttcagctctgcttattccaggggtgtgtttcgtcgagatacacacaagagtgagattgctcatcggtttaaagatttgggagaagaacattttaaaggcctggtactgattgccttttctcagtatctccagcagtgtccatttgatgagcatgtaaaattagtgaacgaactaactgagtttgcaaaaacatgtgttgctgatgagtcccatgccggctgtgaaaagtcacttcacactctctttggagatgaattgtgtaaagttgcatcccttcgtgaaacctatggtgacatggctgactgctgtgagaaacaagagcctgaaagaaatgaatgcttcctgagccacaaagatgatagcccagacctccc

SEQ ID NO: 1078 - DNA, 417 bp, Bos taurus
  unsure (408): unsure at all n locations; Clone ID: 05-LIB34-021-Q1-E1-B1
acctgaataagtgctatgtgattcctctgaacacttccattgtcatgccacccaaaaacctattagagctacttattaacataaaggctgggacctacttgcctcagtcatatctgattcatgaacacatggtcatcactgatcgcattgaaaacattgatcacctgggtttctatatttatcgactgtgccatgataaggaaacttataaactgcaacgcagagaaaccattaaaggtattcagaaacgttcagctgacgtctgtgttacgattcggcattttgagaacagatttgccgtggaaactttaatttgcccttgaacagtcaagaaaaacataatggagagaaatttaataccacagcataaccccaccctttgtattttgtgcagtgattattttttangaaatcttc

SEQ ID NO: 1079 - DNA, 431 bp, Bos taurus
  Clone ID: 05-LIB34-021-Q1-E1-B9
ggttcgggtctgccatgtgccgcttcgtcacggcggccttctacgggaacatgtacgcctccatcatgctcatgacggccatcagcgtcgaccgcttcctggccgtggtgtaccccatccagtccctctcctggcggaccctggggcgcgcttccttcatctgcctggccatctgggccatggccatcgcgggggtggcgcccctgctcctgcaggagcaggccacccaggtgccggggctcaacatcaccgcctgccacgacgtgctcaaccagacgctgctggaaggctactactcgtactacttctccgccttctccgccgtcttcttcttcgtgccgctgaccctttccaccgtctgttacgtgtccatcatccgatgcctcagctcttccacggttgccaaccagaacaagaagtccgggctttgc

SEQ ID NO: 1080 - DNA, 343 bp, Bos taurus
  Clone ID: 05-LIB34-023-Q1-E1-B1
ccgggtcgaccacgcgtctacaggaactcctaggatttgagactcgcggggcgccgggcgctcgtcacgggggcgggcaaaggcatcggtcgcagtattgtcaaggcgctacacgcggctggcgcccgagtggtggccgtgagccggacccaggccgacctggacagcctggtccgcgagtgccccggggtagagaccgtgtgcgtggacctatcgtactgggaggccacggagcatgcgccggggaagtgttgggcctgtggaacctgcggtgaacaatgcaaccgtggcgtttccagagcccttcctggaggtcgacaaggaggcatatgacatgtccttc

SEQ ID NO: 1081 - DNA, 361 bp, Bos taurus
  Clone ID: 05-LIB34-023-Q1-E1-B9
cacgggtccacgcacgcgtctggagactggctccccagagacccctaagcccctacccctgggagactgaaaggtcacgaaaacacagtccctctcccttgaatgggagaggcccagctgtagcctctccggggcatggagtctctggtcgatgtgcccccttaccacataatacacacagtgccccggggtagagaccgtgtgcgtggacctagctgactgggaggccacggagcaggcgctgggaggtgttggccctgtggacctgctggtgaacaatgcagctgtggcgtttctacagcccttcctggaggtccccacagaggcatatgacatgtctttcaatgttaaccttcgggcg

SEQ ID NO: 1082 - DNA, 149 bp, Bos taurus
  Clone ID: 05-LIB34-024-Q1-E1-B1
attttactagaacgggaccgaccgcagatgttaggagccctatttatcagcatcacactatgagtctacttcacacgactacaggcctcagagtacgatgaagcaccctttaccagctccgacggaattctacggccgagctttttttg

SEQ ID NO: 1083 - DNA, 420 bp, Bos taurus
  Clone ID: 05-LIB34-026-Q1-E1-B1
cggacgcgtgggctgagtttgtagaagttaccaagctagtgacagatctcacaaaagtccacaaggaatgctgccatggtgacctacttgaatgcgcagatgacagggcagatcttgccaagtacatatgtgataatcaagatacaatctccagtaaactgaaggaatgctgtgataagcctttgttggaaaaatcccactgcattgctgaggtagaaaaagatgccatacctgaaaacctgcccccattaactgctgactttgctgaagataaggatgtttgcaaaaactatcaggaagcaaaagatgccttcctgggctcgtttttgtatgaatattcaagaaggcatcctgaatatgctgtctcagtgctattgagacttgccaaggaatatgaagccacactggaggaatgctgtg

SEQ ID NO: 1084 - DNA, 413 bp, Bos taurus
  Clone ID: 05-LIB34-026-Q1-E1-B9
ggcgtggagtttttggctgttccatccacatactacaaacaactgcgggagaagctcaagatggccaagatccgggtgaaggagaatattgatatcctagaggagctgaagatcctggtacactacgacgagaaaggctacctcctgcagattttcaccaaacccatgcaggaccggcccacgctcttcctggaagtcattcagcgccacaatcaccagggttttggagccggcaacttcagctcactgttcaaggccttcgaggaggagcaggacctgcgaggcaacctcaccgacatggagcccaatggggttgtgtccggcatgtaagcgccgcaggtccagcaagagccaccgaggccccgcccaccttcgggagcgtggcgcacggtggatcacgctccctcgccctg

SEQ ID NO: 1085 - DNA, 251 bp, Bos taurus
  Clone ID: 05-LIB34-027-Q1-E1-B9
atcgagcagggagctggtggctcttccatccccagaccagccaagcctgtgagtgacaccccagacagaggaaccagagccatgcggagtctcagcggactgctgttgtgacgggcgccatgcctggcattaaagacaagctccttgcccaaatggcccaataccattcaattgcagggaaccttcaactggtcaaggttcaacggaaattggttacattttggcctgtgggcgcaacctcccacatgggt

SEQ ID NO: 1086 - DNA, 223 bp, Bos taurus
  Clone ID: 05-LIB34-028-Q1-E1-B1
tccacccaggcgtcaggatcatcacaggttgcattcgcggcaccttggtgatgcgagtccacatgcattcactctccttctttggcgaggcttatgacggggctaaagacatgtggagagccgacgtctcgaatggatagaagccaacttcaacggtgcagacacatacttccactcccactgtatctatgacgctgccctcagtggacctcggtgtgcctgg

SEQ ID NO: 1087 - DNA, 401 bp, Bos taurus
  Clone ID: 05-LIB34-029-Q1-E1-B1
gcctcagaccacactatctccactcgctcagacctgtggaagattagcgaccatgatttccaatgggataggaaccgtcaccgctggaaaaaggagtatatgtcttctccctttgctgcttattggcctctggggctgtgtgacctgtcatcggagccctgtggaagacgtctgcacagccaaacctcgggacattcctgtgaatcccatgtgtatttaccgttcctcagagaagaaggcaactgagggccaaagctccgagcagaagatccctggggccaccaaccggcgggtctgggaactgtccaaggccaattcccactttgccactgccttctatcagcatttggcagactccaagaataacaatgacaacattttcctgtcacccctgagtatct

SEQ ID NO: 1088 - DNA, 397 bp, Bos taurus
  Clone ID: 05-LIB34-029-Q1-E1-B9
gtcgaccgacccgtccggcccagcagagcaaagagaaaggaagcacgctggtcggaaggggttgtgacaaccccagccatgtggagaggccatggccaaagctcctattgtaagcaacctccaccctggagcatagaggatcaagaccctatgctgatctcctacggttcagtgactgtggttgcgcttcgtcaagccagctgatacctgtgcattctgcaggcatctagattggacgacctgcgagtaaaactggagaaagaaggatattctaacatctcctatgttgttgttaatcatcaaggaatctcttctcgattaagatatgtgcatcttaaaaataaggtttcagaacatattcctgtttaccaacaaggaagaagacaaccaagatgtc

SEQ ID NO: 1089 - DNA, 399 bp, Bos taurus
  unsure (367): unsure at all n locations; Clone ID: 05-LIB34-031-Q1-E1-B1
gcggcaggagggcaaccttgcagtttctccgcggcccaccccagtggctgcagcttcagaatgtggcagcttacaagcctcttactgttcgtgaccatctggggaatttccagcacaccagctcctcctgactcagtgttctccagcagccagcgtgcccaccaagtgctgcggatccgcaaacgtgccaactccttcctggaggagctgcggcccggcaacgtggagcgtgagtgctcagaggaggtctgtgagttcgaggaagctcgggagattttccaaaacacggaagacacaatggccttctggtccaagtatagcgacggggaccagtgcgaggaccggccctcaaggagcccgtgcgacnctccatgctgtggacgcggcaagtgcatcgat

SEQ ID NO: 1090 - DNA, 391 bp, Bos taurus
  Clone ID: 05-LIB34-031-Q1-E1-B9
ccgcccgccgtctgggccgggccgaggatgcggcgcagcgcctcggcggccaggctctctcccgtccggccagcttgctaacttcctcggctccgtccttgtccgccagcgggggccaccgcgtgtccccgcgtcctccgagtcgggtcctccaggcgcgccgggcgctgcccctgtgtgtctcccgctgccagcccgcgccccgtccccgttcggtcatgctgtccctctgcctcatggccgcgctgctgctggccgccgggcccgggccgagcctgggcgacgaagccatccactgcccgccctgctccgaggagaagctggcgcgctgccgcccccccgtgggctgtgaggagctggtgcgagagccgggctgcggctgttgcgccac

SEQ ID NO: 1091 - DNA, 312 bp, Bos taurus
  Clone ID: 05-LIB34-032-Q1-E1-B1
gtcagacatcgtgagccctatgctttactttcttatttacagtatggggtttaactggaagtgtcctagccaactcttccctcgataatgtacttcacgacacatcctacgttgtcgcagatttccactaaggttttatcagtaggagctgtgcttgctactattaggggaattgttcattgactcgcactaatctcaggttatactcgcatcgatatatgtgccataatccacttcgcaattatattcgtgggcctcgatattgccttcttcccacaacactttcgaggactatctggcatgcctcgacga

SEQ ID NO: 1092 - DNA, 396 bp, Bos taurus
  Clone ID: 05-LIB34-033-Q1-E1-B9
aagcagtgtactactgattcatgctctagcatgaaggaaccttgaaaacattttgctcagttcagtgaacgagctcagtcacataagatcacatatttgtatgactgcatttactgtacatgactaccatttccaggtggtgcactggtagggagtccgcctgccaatacaggagatgcaaatagatgagggtttgatacctgagttgggaagatcccctgaatatgaagtggcaacccattccagtattcttgcctgtacggttccatggacggatgagcctgacaggctacagtccatggggttgcaaagagttggacacaactgagctcaagacatgtcaacatgtctactgtacaagaaatgggcagaataagcaaatcaattgttgataga

SEQ ID NO: 1093 - DNA, 417 bp, Bos taurus
  Clone ID: 05-LIB34-037-Q1-E1-B1
ccgggtctacacacgcgtgtctggaaaagcaccgattatatatagatgagactgtgaagaataatatcccaactaagcttcgtgtgctccgttcaattctggagaatttgagaagcaaaatacaaattacaagcggatgtctcagctcagatggaatactgccgcaccccgtgtagtgttacttgcaatattcctgtggtgtctggcaaagaatgtgaggaaatcatcaggaatggacgtgaaacatctgagatgtacctcattcagcctgaggattccagcaaaccatagagagtagagggtgatacgaaaacggaaaaaggaggattgacagtaattcagaggcgtctagatggtagtgttgactttggcaggatatgggatccatatggacaatgatttggaaatattgcaacc

SEQ ID NO: 1094 - DNA, 306 bp, Bos taurus
  Clone ID: 05-LIB34-038-Q1-E1-B1
gcagctgctctctagccgtttgcaggattcagagatctacaaaagctgttcccacgatggagatccgtgtgtatattgcatcttcctctggctccatggcgattaataaaatccagcaagatgtgcttggtttcttataagctaacaatgtatgatttgagcaatgagatgttgcagtcaatgatgaagatcggaagtggatgatagaaaatgtacctgacaacagtcgagcagccacatgatacaccctgccaattcatattttcaatgaaagccagtagcgtggggattatgattccatctttg

SEQ ID NO: 1095 - DNA, 408 bp, Bos taurus
  unsure (338): unsure at all n locations; Clone ID: 05-LIB34-039-Q1-E1-B1
gttcaattctggagaatttgagaagcaaaatacaaaaattagaatcggatgtctcaactcagatggaatactgccgcaccccgtgtactgttacttgcaatattcctgtggtgtctggcaaagaatgtgaggaaatcatcaggaatggaggtgaaacatctgaaatgtacctcattcagcctgaggattctagcaaaccatatagagtatactgtgatatgaaaacggaaaaaggaggatggacagtaattcagaaccgtcaagatggtagtgttgactttggcaagaaatgggatccatataaacaaagatttggaaatattgcaaccaatgcaganggaagaaatactgtggtgtaccaggtgagtattggctcggaaatgacagaattagccagcttaccaatat

SEQ ID NO: 1096 - DNA, 347 bp, Bos taurus
  Clone ID: 05-LIB34-039-Q1-E1-B9
gagattgactaatacctcattctgtttataaaaacagccagtaatttctgtgcaaccttattatgtgcaatatttttaaatcctaagaaatgtgtgcttttgttttcagatggacttatttctttagttctgcacttgttccatgttgtactccatatgagtactaatcctatggatacatattaaaactagtaaatatctcataaaaaaaaaaaaaaaaaaaaaaaaaaaaaaaaaaaaaaaaaaaaaaaaaaaaaaaaaaaaaaaaaaaaaaaaaaaaaaaaaaaaaaaaaaaaaacaaaaaaaaaaaaaaactacaaaaaaaaaaaaggggggggccccccaaa

SEQ ID NO: 1097 - DNA, 416 bp, Bos taurus
  unsure (10): unsure at all n locations; Clone ID: 05-LIB34-040-Q1-E1-B1
cactgtttcncggacctcttcttccacctttcaatatataactctgctaaaaaacatgtggaaaggaaggcagaatcaagtacaagataatgaaaatgtagtaaacgagtactcctcacatctggaaaagcaccagttatatatagatgagactgtgaagaataatatcccaactaagcttcgtgtgctccgttcaattctggagaatttgagaagcaaaatacaaaaattagaatcggatgtctcaactcagatggaatactgccgcaccccgtgtactgttacttgcaatattcctgtggtgtctggcaaagaatgtgaggaaatcatcaggaatggaggtgaaacatctgaaatgtacctcattcagcctgaggattctagcaaaccatatagagtatactgtgatatgaaaa

SEQ ID NO: 1098 - DNA, 416 bp, Bos taurus
  Clone ID: 05-LIB34-040-Q1-E1-B9
acaatatttaaaagcagaagcacgtcagttaggatttccttctgcataaggtttttttgtagtgtaatgtcttaatcatagtctaccatcaaatattttaggagtatctttaatgtttagatagtatattagcagcatgcaataattacatcataagttctcaagcagaggcagtctattgcaaggaccttctttgctgccagttatcataggctgttttaagttagaaaactgaatagcaacactgaatactgtagaaatgcactttgctcagtaatacttgagttgttgcaatatttgattatccatttggttgttacagaaaaattcttaactgtaattgatggttgttgccgtaatagtatattgcctgtatttctacctctagtaatgggctttatgtgctagattttaat

SEQ ID NO: 1099 - DNA, 417 bp, Bos taurus
  Clone ID: 05-LIB34-041-Q1-E1-B9
cgggtcgacgcacgcctctacactggctcgacccacccgccatgctccccccagcgctcgtcttgctgttggggtttctctgccacgttgctatcgcaggacgaacctgccccaagccagatgagctaccgttttccacggtggttccactgaaacggacctatgagcccggggagcagatagtcttctcctgccagccgggctacgtgtcccggggagggatccggcggtttacatgcccgctcacaggactctggcccatcaacacgctgaaatgcatgcccagagtatgtccttttgctgggatcttagaaaacggaacggtacgctatacaacgtttgagtatcccaacaccatcggcttttcttgccacacggggttttatctgaaaggagctagttctgcaaaatgcactg

SEQ ID NO: 1100 - DNA, 396 bp, Bos taurus
  Clone ID: 05-LIB34-043-Q1-E1-B9
acgaacgagaaaggaggagggcgcttcaggcgaaagcactgcagacgccattatcctctgtttctctgctgcaccaacctcgacgtcttgtctacttcccgcctatttgcggcctataggctactacagcactagggtgtcagttggtcccgcccagaacacttcagttctgccctggaaggatatatttaataactgattcgtgtgtcccttgaatacaagaaaatggaaactgaacagccagaggaaacctttcccaacactgaaaccaatggcgaatttggtaaacgccctgctgaagatatggaagaggaacaagcttttaaaagatctagaaacactgatgagatggttgaattacgcattctgcttcagagcaagaatgctggggcaatg

SEQ ID NO: 1101 - DNA, 405 bp, Bos taurus
  Clone ID: 05-LIB34-044-Q1-E1-B1
ccggcgtgacccacccgccatgctccccccagcgctcgtcttgctgttggggtttctctgccacgttgctatcgcaggacgaacctgccccaagccagatgagctaccgttttccacggtggttccactgaaacggacctatgagcccggggagcagatagtcttctcctgccagccgggctacgtgtcccggggagggatccggcggtttacatgcccgctcacaggactctggcccatcaacacgctgaaatgcatgcccagagtatgtccttttgctgggatcttacaaaacggaacggtacgctatacaacgtttgagtatcccaacaccatcagcttttcttgccacacggggttttatctgaaaggagctagttcctcacaatgcacttaggaagggaa

SEQ ID NO: 1102 - DNA, 336 bp, Bos taurus
  Clone ID: 05-LIB34-047-Q1-E1-B1
ataactgcctaccaggcacctcctcagaatatgaccctccggagaacgtcctgggcctgatctcaggttggggtcgaacaaatgtcaaaagtcatgttattaagctcagaggggcaaagctacccgttgctcccttatccaaatgccgggagatgaagggggtcaatcctggaatagatatcagttcttttgttttcactgagaacatgatctgtgccggtaatgacaagggtgttgacagctgtgaccgggacagtggtggggcctttgctgtacaggaccctaaggaaaacaagcccaaattctatgttgctggtttggtgtcctggggccccc

SEQ ID NO: 1103 - DNA, 426 bp, Bos taurus
  Clone ID: 05-LIB34-047-Q1-E1-B9
cggcgccaactgaagcgccgcgtctgtgccgacatgctgcgccgcgctctgctctgcctggccctgaccgcgctattccgcgcgggtgccggcgcccccgacgaggaggaccacgtcctggtgctccataagggcaacttcgacgaggcgctggcggcccacaagtacctgctggtggagttctacgccccatggtgcggccactgcaaggctctggccccggagtatgccaaagcagctgggaagctgaaggcagaaggttctgagatcagactggccaaggtggatgccactgaagagtctgacctggcccagcagtatggtgtccgaggctacgccaccatcaagttcttcaagaatggagacacagcttcccccaaagagtacacagctggccgagaagcgggtgatatcgtgaactggctg

SEQ ID NO: 1104 - DNA, 428 bp, Bos taurus
  Clone ID: 05-LIB34-048-Q1-E1-B1
ccagcaacccaactcagacgctgctgcgccagcagctgaacgcatccctgcagctggcggagaagttcagcaggctgtacgaccagctgctccagtcctaccagcagaagatgctcaacacgtcggccctgctcaagcagctgaacgagcagttcacctgggtgtcccagctggccaacctcacgcagagcgacgaccagcactacctgcaggtcttcacggtgaattcccacaactccgaccccagcatcccgtctggcctcaccaaggtgattgtgaaactcttcaactccttccccatcacagtgacggtcccgcaggaagtctccagtcctaacttcatggaatgtggcagagaaagcactgcagcaataccgccggaagagcaggaggagtgaggcgtgaaagttgcttttgcaagtatcggg

SEQ ID NO: 1105 - DNA, 442 bp, Bos taurus
  unsure (114): unsure at all n locations; Clone ID: 05-LIB34-050-Q1-E1-B1
ttccgagtcgacccacgcctccggaacatgaagatcctattcgtcgccgccctggttgtgggctccgtcttcttcctgctgttgcctggaccatccgcggccgatgagaagaanaatgggcccaaagtcactgtcaaagtgtactttgacctgcgaattggagatgaagatataggccgggtggtcatcggtctctttggaaaaactgttccaaaaacagtggataattttgtggccttggctacatgagagaaaggatttggctacaaagacagcaaattccatcgtgtgatcaaggacttcatgatccagggtggaaatttcacccggggagacggcactggaggtaagagcatctactgtgaacgcttccccgatgagaacttcaagcttaaacactatgggcccggctgggtgagcatggccaacgcgggcaaagaca

SEQ ID NO: 1106 - DNA, 448 bp, Bos taurus
  Clone ID: 05-LIB34-050-Q1-E1-B9
ggatccacccacgcgcccgtagaaaggaaagcagaatcaagtacaagataatgaaaatgtagtaaacgagtactcctcacatctggaaaagcaccagttatatatagatgagactgtgaagaataatatcccaactaagcgtcgtgtgctccgttcaattctggagaatttgagaagcataatacacaaattataatcggatgtctcaactcagatggaatactgccgcaccccgtgtactgttacttgcaatattcctgtggtgtctggcaaagaatgtgaggaaatcatcaggaatggaggtgaaacatctgaaatgtacctcattcagcctgaggattctagcataccatatagagtatactgtgatatgaaaacggaaaaaggaggatggacagtaattcagaaccgtccagatggtagtgttgactttggcacgaaatgggat

SEQ ID NO: 1107 - DNA, 236 bp, Bos taurus
  Clone ID: 05-LIB34-051-Q1-E1-B1
catcaatgactacggcacccattacataacgtctggatcgatgggtggtgtctatgagtatatcctggtgcttaacagagaaaaaatggaaacagctggtgttaccagcgctgaaatccagaaatgctttggagtctctttgggcattgagtatgagtattcagaggcgatacaaattaaaggaagttcatcattaggaccctgtaaaaaatctggagatggcaaactaactgaaa

SEQ ID NO: 1108 - DNA, 246 bp, Bos taurus
  Clone ID: 05-LIB34-051-Q1-E1-B9
gcttcatcccacccctggagaagtcatatgggaccaggcccagaatcctgaccggcaactctcgagtagaccttcaggagattaacaactgggtgcaggcccagatgaaagggaaagtcgctaggtccacgagggagatgcccagtgagatcagcattttcctcctgggcgtggcttacttcaaggggcagtgggtaacaaagtttgactccagaaaaacttccctggaggatttctacttggatg

SEQ ID NO: 1109 - DNA, 303 bp, Bos taurus
  Clone ID: 05-LIB34-055-Q1-E1-B1
gacccacacgtcagctgggtttataccaaaataggggagggacccctcgattggacatgataacagcatcattctatgcagtttcagagcaatcacagctctactgtacgtatgtttttatttactgactcacgtagtctacgacattaacatgatttccctccacaaacagcatacgggtaggatgacaatttccccttactgatagcagtaacttttccaccaacactagtcgtgttatcgacgagaatactatcactcacgccactagctatcagtgttagaataaggccgtgacggtga

SEQ ID NO: 1110 - DNA, 348 bp, Bos taurus
  Clone ID: 05-LIB34-055-Q1-E1-B9
acgacggtcccgggagccgcggcccccagcgcgcccggcctccgcctggagctccagctccccgaatgcactttacccgagttcctccctgagcccccacaggatggcggatggaggaagccccttcctaggtcggagggactttgtctacccttcctcagctcgagaccctagtgcctctgatccagggggcagtcctgccaggaaggaagagaagaagaggaaggccgcccggctcaagtttgacttccaggcccagtcccctaaggaactgactctgaagaagggtgacattgtctacatccacaaggaggtggacaagaactggctggagggagagcaccatgg

SEQ ID NO: 1111 - DNA, 364 bp, Bos taurus
  Clone ID: 05-LIB34-056-Q1-E1-B1
gtttacaagccgttggctgggaacaactccttctatggcagcaaggcagtctttaagtgcttgccacaccacgcgatgtttggaaatgacaccgttacctgcacggaacatgggaactggacgcagttgccagaatgcagggaagtaagatgcccattcccatcaagaccagacaatgggtttgtgaaccatcctgcaaatccagtgctctactataaggacaccgccacctttggctgccatgaaacgtattccttggatggaccggaagaagtagaatgcagcaaattcggaaactggtctgcacagccaagctgtaaagcatcttgtaagttatccattaaaagagctactgtgatatatg

SEQ ID NO: 1112 - DNA, 224 bp, Bos taurus
  Clone ID: 05-LIB34-057-Q1-E1-B1
cagcctcctcagtgcattgcaacagatgaacttaggaagtgtaaagggtcaacattatttccacctggggggagaccagcacataagattgaatatgaccataacaccaacaaaagttaccaatgtcgaggaaaatcagaacacaagcactcaatctgtataaatggagaatgggatcctaaagtagactgcaatgaagaagcaaaaatacaactatgcccacc

SEQ ID NO: 1113 - DNA, 227 bp, Bos taurus
  Clone ID: 05-LIB34-057-Q1-E1-B9
acaaaactttggcacaatgaagtgggtgacttttatttctcttctccttctcttcagctctgcttattccaggggtgtgtttcgtcgagatacacacaagagtgagattgctcatcggtttaaagatttgggagaagaacattttaaaggcctggtactgattgccttttctcagtacctccagcagtgtccatttgatgagcatgtaaaattagtgaacgaactaa

SEQ ID NO: 1114 - DNA, 223 bp, Bos taurus
  Clone ID: 05-LIB34-058-Q1-E1-B1
tgggaacattggtcagtcagctggggcgttaacatcctgatgatgagaaccgccgaatgcacaagattgcatcagtctgattagtcagtggatcaacacccaatgggtcccagtggccacagattgagacatagtgatcgacacgtcatgcctgtcctgggatttggaatctttgcacctcgagaggttcctaagagtgaagctctggaagtcaccaaatttg

SEQ ID NO: 1115 - DNA, 207 bp, Bos taurus
  Clone ID: 05-LIB34-059-Q1-E1-B1
tgatttcttgcaacttcgaaaaatttaaaaccatgaaacatctattactgctacttttctgtgcttttatagttcaggcccaatttcctactgactatgacgagggacaagatgacagacctaaggtaggtttgggtgcccgcggtcatcggccctatgacaagaagaaggaagaggcccccagcctgagacctgtgccccctccca

SEQ ID NO: 1116 - DNA, 260 bp, Bos taurus
  Clone ID: 05-LIB34-060-Q1-E1-B1
cccgggtgcccccacgcatccgacaaaactttggcacaatgaagtgggtgacttttatttctcttctccttctcttcagctctgcttattccaggggtgtgtttcgtcgagatacacacaagagtgagattgctcatcggtttaaagatttgggagaagaacattttaaaggcctggtactgattgccttttctcagtatctccagcagtgtccatttgatgagcatgtaaaattagtgaacgaactaactgagtttgca

SEQ ID NO: 1117 - DNA, 270 bp, Bos taurus
  Clone ID: 05-LIB34-060-Q1-E1-B9
ggtcgacccacgcgaccgcgaacgcgtgggggaacatatctcaatataataaaggccatatatgacaaacctacagctaacatcatcctcaacagtggaaagctgaaagcatttcctttaagatcaggaacaagacaaagatttccactctcaccagttttagtcaatatacgtttggcatcactagctatgggaatcagacaagagacagaactaaaatggatccaacttggaaaggaagttatacggtcactatttgcagatgatatg

SEQ ID NO: 1118 - DNA, 351 bp, Bos taurus
  Clone ID: 05-LIB34-061-Q1-E1-B1
acggaagggccccaccatggcgggcctgctgcatctcgttctgctcagcaccgccctgggcggcctcctgcggccggcggggagcgtgttcctgccccgggaccaggcccaccgtgtcctgcagagagcccgcagggccaactcattcttggaggaggtgaagcagggaaacctggagcgagagtgcctggaggaggcctgctcactagaggaggcccgcgaggtcttcgaggacgcagagcagacggatgaattctggagtaaatacaaagatggagaccagtgtgaaggccacccgtgcctgaatcagggccactgtaaagacggcatcggagactacacctgcacctg

SEQ ID NO: 1119 - DNA, 182 bp, Bos taurus
  Clone ID: 05-LIB34-062-Q1-E1-B1
agattgggagaagaaattttaaggcctggtactgattgcctttctcagtatctccagcagtgtccatttgatgagcatgtaaaattagtgaacgaactaactgagtttgcaaaaacatgtgttgctgatgagtcccatgccggctgtgaaaagtcacttcacactctctttggagatgaatt

SEQ ID NO: 1120 - DNA, 412 bp, Bos taurus
  Clone ID: 05-LIB34-063-Q1-E1-B1
actattaaaggttgttaacattgcattcatcgaccttccagccccatcaatcatttcatcatgatgaaatttcggttccctcctgtgaatctgcctattcctagatatcctcacatgcctattcctagcaatacactacacatccgtcacaacaacagcattctcctctgttacccatatctgccgagacgtgaactacggctgattcatccgatacatacacgcagtcggagcttcaatgttttttaactgcttatatatgcacgtatgacgaagcttatattacgggtcttacacttttctagaaacatgaaatattggagtaatccttctgctcacagtaatacccacagcatttatacgatacgtcctaccatgaggacaaatatcattctgaggagcatcagtcatc

SEQ ID NO: 1121 - DNA, 345 bp, Bos taurus
  unsure (74),(237): unsure at all n locations; Clone ID: 05-LIB34-064-Q1-E1-B9
gggctcctggtgtctgggttctgctccaaggtccactgcctcccagagaatgtgaccccagaagaacagcacanaaggacgtctgtggatggccactcattagcctccagcaacactgacttcgccttcagcctctacaatcagttggctttgaacgacccaatagaatgtatctctccctctgacacccatagcttggactcctgtccctgggggctcattgacacactgtgacanagatcctggaacgtctcaagttcaacctcacagagactcccgagacagaaatccaccagggcttccagcacctcctgcagacgttcaatcagcccagcaaccagctgc

SEQ ID NO: 1122 - DNA, 221 bp, Bos taurus
  Clone ID: 05-LIB34-065-Q1-E1-B1
cgcgcagcgcggcgcccagagccggttcggcgcgtcgactgcccagagtccgcggccgcggcgccccgagaagccaagcagccatggcctatcacagcttcctggtggagcccatcagctgccacgcctggaacaaggaccgcacccagatcgctatctgccccaacaaccacgaggtgcacatctatgagaagagcgggaacaagtgggtccaggtgcac

SEQ ID NO: 1123 - DNA, 254 bp, Bos taurus
  Clone ID: 05-LIB34-066-Q1-E1-B1
aggtcacggctgtcgtaatggctacctcatcactcttgcacacgctaactgtcagtttcaacaggccctttctgctttccatattctgcaaagagactcagagcatcatctttttgggcaaagtcaccaaccccaaggaagcctagagctcccctcctccctaaggagctgggtgcccaggtccctggaagcagcctggccccctctgctcatccctggaaggtgacagcgacagtgctaggggctccaggtgc

SEQ ID NO: 1124 - DNA, 181 bp, Bos taurus
  Clone ID: 05-LIB34-066-Q1-E1-B9
aacgtcaggttctagatcgcgagcggccgcccttttttttttttttttttttttttttttttttttttttttttttttttttttttttttttttttttttttttttttttttattttttttttatttttttgttttttttttttccctaaagggttccggaaaaaggaaaaactttttttt

SEQ ID NO: 1125 - DNA, 237 bp, Bos taurus
  Clone ID: 05-LIB34-067-Q1-E1-B1
ttgaaaaaacagggtctgcaatcacctgacagtgtacagaaaagctcccctctttgtgtagctgacagggccttttggcggaggagaatgtcattgaatcttgacagtgacgtttgcctccagctgcctgacaggcagcaggtcagcagctcaaccccacagaagccagcaccaagtgaagctgaaaaaataaggccaaaatgtgaaaatgaccttcaaattaaatatatgaaattg

SEQ ID NO: 1126 - DNA, 239 bp, Bos taurus
  Clone ID: 05-LIB34-068-Q1-E1-B9
atgggtagcgctggaagtcgcaagtccactaaagtgagtcgtaatgggcggggccgggctcgtggtgggagagtttggcggcgacgaggcgtgcgtggtgactctggagaactcggctcacatcttctggtggaaagctgctaggaacacgatgagtctgcagtggactgcagtcgccaccttcctctatgcggaggtcttcgctgtgctgctgctctgcattcccttcatttctccca

SEQ ID NO: 1127 - DNA, 176 bp, Bos taurus
  Clone ID: 05-LIB34-069-Q1-E1-B1
atcggatttctaggtttcatcgtatgagcccaccatatattcactgtcggaatagacgtcgacacacgagcctacttcacatcagccactataattattgctattccaaccggggtaaaagtcttcagctgattggcaacacttcatggaggtaatatcaaaatggtcctcctgct

SEQ ID NO: 1128 - DNA, 261 bp, Bos taurus
  Clone ID: 05-LIB34-070-Q1-E1-B9
gggtcgagcacgcgtccgcagccagtcctttcatcagagcacatggcagcctttggggtgtttggtctctgccagattcatgcctttgtggattatctacgcagcaagttgaatccacagcaatttgaagttcttttccgaagtgtcatctccctagtgggctttgtccttctcaccattggagctctcctcatgctgacaggaaaaatatctcccctggacggggcgtttctactcactggttgggacccttccctatgc

SEQ ID NO: 1129 - DNA, 408 bp, Bos taurus
  unsure (393): unsure at all n locations; Clone ID: 05-LIB34-071-Q1-E1-B1
cggacgcgtgggttgtgactgacatcacagcaaggacagctgggaaagatctgtcactggtgattgtggatccagagaagtgcttcagtgctccaaatcctctaagaaggaaacagagggcggcaaatagagaacaggccaaggaaaagaagaagcagcagaaacaaccagaggccaacacaggggccatggtgaccagggtagatgtggaagagtccatcgtgctttggggtttctaggcactggtagatctgcagctgcacacagaagcccaggctcgaattgtgcagagctggaaagagctggctgacttggcatgcgcgttcacaaaggctgtggctgaagcgcccttcaagaagctccgagatcaaactagtttctccttctgcctgnagagtgactgggctg

SEQ ID NO: 1130 - DNA, 417 bp, Bos taurus
  Clone ID: 05-LIB34-072-Q1-E1-B1
tgcatatgaggatgatgattgtgacataagtgggactttgtgacttactttttttcatttctatgtggggaggactgggaagctagatggactatgagacacttgattttggtgctaaagttccccagttcatatgtgacatcttaaaaaataacaatatatgagagagaaaagcttaatgtcataactcatgtaatgggtgagcagttaatggtattcattccacatacaatatctgtgtaaaacgatttcctgtagaattagcattaatggtttttgcacgataataccgtaagtctatccttagagcactcacgccatgcattattccctgtgttttaaacttcatataactttcagaaattggagagcagaaattttgcttgtcactgcacatcaatactgaaaagcttattt

SEQ ID NO: 1131 - DNA, 327 bp, Bos taurus
  Clone ID: 05-LIB34-073-Q1-E1-B1
actcttctgactgtgggtgtattactgcacaactgtcatgttcatgctttcagtgccgagtatggagctgcctctgtctgaattagaacgaagtgcacatggcctgtcgccgtagtcgctcatctctgtgctgcatttccttcacggaactgcatttcacaactgctgatcagcctctgccacgacctgtggcctgagggtttcccgttggctgccagactgtatctgcataaacgatttcacatcagcgacgacttcctgtaatactcaaaacagctcattggtgcagagcccatgggcctgactggaatgacggggaatacctga

SEQ ID NO: 1132 - DNA, 273 bp, Bos taurus
  unsure (229): unsure at all n locations; Clone ID: 05-LIB34-074-Q1-E1-B1
atgagatctaccataaggcagatgctagttataaggcattaagtaagcaaatagtgccccgagctactagagaagaaaaatcccactaaagatgaaaaggcttatgattttcaaggtcaaatcaagcaggttttacctgttaaacccatcagaaccatactaggaatgtcaatgatagtttttatagtttttggaaacactttggtctctggattgtaattagcaatanataaaagcaagatatcaaaccacccgccttgtaacttggaaggc

SEQ ID NO: 1133 - DNA, 408 bp, Bos taurus
  Clone ID: 05-LIB34-075-Q1-E1-B9
cgcgtcagggaaatgccggcacctggaatcccggccgcctcgagcccggaagtgctgggacctggaactccggtcgccccgagcccggaagtgctggcacctggaaccccggccgccccgagcccggaagtgctggcacttggaatactggaagctctggatcttcaagttttaggccagatagctcaggtcatgggaacattacgccttccagtccagactggggcacctttagagaggaaggaagtgtaagttcagggacatagcaagagttccacacaggtaaacttgtcactactaaaagagataaagagcttctgattgataatgataaggtcacctctggtcacacaactaccactcgtccttcatgctctaaagtcattacaaagacagttacaaatgccg

SEQ ID NO: 1134 - DNA, 286 bp, Bos taurus
  unsure (15),(28),(37): unsure at all n locations; Clone ID: 05-LIB34-077-Q1-E1-B1
cccatcacaggttancgtccactctcangatgctgancaccgacaggacagtagtcaagggtaggccgtcacatcgggcttccctgctggctcagtcggtaaaggatcagcctccagtgcgggagactgcctgcaggagcccaggcaggtgccatctgtggcccagaatgtaccctggagcaggaaatggcaatccactccagtattctggcttgggaaatctcaaggacagcgcagcctggtgggctacaaactgtggggtcaaagactcagacatgagttagcg

SEQ ID NO: 1135 - DNA, 445 bp, Bos taurus
  unsure (311): unsure at all n locations; Clone ID: 05-LIB34-077-Q1-E1-B9
gggaaaactgggaaaatcttcagatagcctcgggcaggccgtacaacccttccatgtcaaagccggacgcctggggagtgaccaaaggaacagccgagcttatgcagcagaaggaagccacaacggagcagcagctgagagagctcttcgaaaaacagaagttcaagtctgcacagtagcctcgatggaaaccatttttagtgacttcctccaagcttgggccacagttccaaaactaaggaaaagatagttaaaaggcaatgcttatacaaatgccagcttacgcgtgaagattgacaggaactgaacanaacaattataaataacacttgaccattttttacgagtatgtatttagaacttggaagcaaaatgaataaaaagtaaatcttaaactggcttactaagtaaaccaggtacacggtattaaggaaatcactgtggc

SEQ ID NO: 1136 - DNA, 451 bp, Bos taurus
  unsure (75),(240),(292),(414),(442): unsure at all n locations; Clone ID: 05-LIB34-078-Q1-E1-B1
cctatagtacgtcgaatcagccgtctgggccgggccgaggatgcggcgcagcgcctcggcggccaggctctctcncgtccggccagcttgctaacttcctcggctccgtccttgtccgccagcgggggccaccgcgtgtccccgcgtcctccgagtcgggtcctccaggcgcgccgggcgctgcccctgtgtgtctcccgctgccggcccgcgccccgtccccgttcggtcatgctgtcnctctgcctcatggccgcgctgctgctggccgccgggcccgggccgagcctgngcgacgaagccatccactgcccgccctgctccgaggagaagctggcgcgctgccgccccccgtgggctgtgaggagctggtgcgagagccgggctgccgctgttgcgccacttgcgccctgngcaaagggatgccctgtggggtgtacancccccgctg

SEQ ID NO: 1137 - DNA, 366 bp, Bos taurus
  Clone ID: 05-LIB34-079-Q1-E1-B1
gagagacatcctttcccagctgggtatcaagaaaatcttcaccagcgatgcggacttctcaggaatcacaaatgaccacaagctggcagtttcccaggtgatccacaaggccgtgctcgacgtgggcgaggagggcacggaaggagctgctgtcacggctgtcataatgtttacttcattaccgttgcacgcgctaaatatcagtttcaacaggccctttctgctttccatattctgcaaagagactcagagcatcatctttttgggcaaagtcaccaaccccaaggaagcctagagctcccctcctccctaaggagctgggtgcccaggtccctggaagcagcctggccccctctgctcatccct

SEQ ID NO: 1138 - DNA, 367 bp, Bos taurus
  Clone ID: 05-LIB34-080-Q1-E1-B1
tcttacttagagatagagaatgggctgtggaacagattcagtttgcatttggtttgttaaatttataaggccataaaacaattaggtaaaacagaaagcttctatgaatctatttgtatgtacattaccagaaacttccaggagttcctgtcaattcgcaacttgttgttacaccagtacgcggttaatgctgacatacgatagattaaaattttatgttaagctatcaactgttctcttgggaactgaacttttcctctggggctttgggctgacatttcatctgactttttatagagtgccaggggaccagatggattaagcctaccctaacttcaagcattaatgaatgcgattttgcttacat

SEQ ID NO: 1139 - DNA, 450 bp, Bos taurus
  Clone ID: 05-LIB34-081-Q1-E1-B9
gacccacgcgtcagaaaatacttaaaatggcatatcacacttaaaataaacataattctttaatattatccaatatcaattattactcccctgctactgctgctgctgggtcgcttcagtcgtgtccgactctgtgtgaccccatggacggcagccaccaggctcccccatccctgggattctccaggcgggaacgctggagtgggttgccatttccttctccagtgcatgaaagtgaaaagtgaaagtaaagtcactcagtcgtgtccaactcttaggctcctccatccatgggaatttccaggcaaagtactggagtggggtgccattgccttctccgattattcccctacgtggtgcctaaacttaaaaaatttttttctgaattaggatgcattgtagacacaatgtctgtgcatggcatttaattactttatctctaagtctctc

SEQ ID NO: 1140 - DNA, 287 bp, Bos taurus
  Clone ID: 05-LIB34-084-Q1-E1-B1
gcgtccgacaaaaattttattaatattttgaacaggttcagctattactgaaactggtaatttctaaacttaaattggggtaaatggctagagtgcagaaggatgtcatcattgaggattatgaatagaagactgaagaattaacagccacccctcagacgaaggaccaggtgcagggtcgactctttctggatgttgtaatcagaaagagtgcggccatcttccagctgcttgccggcaaagatgagcctccgctggtcaaggggaatgccttccttatcctggat

SEQ ID NO: 1141 - DNA, 433 bp, Bos taurus
  Clone ID: 05-LIB34-084-Q1-E1-B9
ttcctgcaacttcgaaaaatttaaaaccatgaaacatctattactgctacttttctgtgcttttatagttcaggcccaatttcctactgactatgacgagggacaagatgacagacctaaggtaggtttgggtgcccgcggtcatcggccctatgacaagaagaaggaagaggcccccagcctgagacctgtgccccctcccatcagcggaggtggctatcgggctcgtcccgccacagcaactgtgggccagaagaaagtggagagaaagccccctgacgctgatggctgcctgcacgcggacccggatctgggtgtgttgtgtcctacaggatgtaagttgcaagatactttggtaagacaggagagaccaatccgaaagagtatagaagatttacgtaatactgtggactctgtttcccggacctcttct

SEQ ID NO: 1142 - DNA, 418 bp, Bos taurus
  Clone ID: 05-LIB34-085-Q1-E1-B1
acccaggcgtccgcaacctcgagttttggatctggtgggaccagcatgtttggcagcacaaccacagataatcacaaccctatgaaggatattgaagtaacatcctctcctgatgatagcattggttgtctatcatttagccccccaaccttgccgggaaactttcttattgcaggatcgtgggctaatgatgttcgatgctgggaagttcaagatagcggacagactattccaaaagcccagcagatgcacacgggacctgtcctagatgtctgctggagtgatgatgggagcaaagtatttacagcctcatgtgataaaactgctaaaatgtgggacctcaatagtaaccaggcgatacagattgcacagcaacgatgctcctgtcaaaacagtacattggttcaaagcacaaaac

SEQ ID NO: 1143 - DNA, 476 bp, Bos taurus
  unsure (9): unsure at all n locations; Clone ID: 05-LIB34-086-Q1-E1-B1
cacgcgtgncgccagcctgctaccaaagattgaaactatgagagaaaaagtactgacttcatctgccagacagagactcaggtgtgccagtattcaaaaatttggagaaagagctttaaaagcatggtcagtagctcgcctgagccagaaatttcccaaggctgagtttgtagaagttaccaagctagtgacagatctcacaaaagtccacaaggaatgctgccatggtgacctacttgaatgcgcagatgacagggcagatcttgccaagtacatatgtgataatcaagatacaatctccagtaaactgaaggaatgctgtgataagcctttgttggaaaaatcccactgcattgctgaggtagaaaaagatgccatacctgaaaacctgcccccattaactgctgactttgctgaagataaggatgtttgcaaaaactatcaggaagcaaaagatgccttcctgggctcgtttt

SEQ ID NO: 1144 - DNA, 395 bp, Bos taurus
  Clone ID: 05-LIB34-086-Q1-E1-B9
cgtcaagggaaaccgactgtttaattaaaacaaagcatcgcgaaggcccgcggcgggtgttgacgcgatgtgatttctgcccagtgctctgaatgtcaaagtgaagaaattcaatgaagcgcgggtaaacggcgggagtaactatgactctcttaaggtagccaaatgcctcgtcatctaattagtgacgcgcatgaatggatgaacgagattcccactgtccctacctactatccagcgaaaccacagccaagggaacgggcttggcggaatcagcggggaaagaagaccctgttgagcttgactctagtctggcacggtgaagagacatgagaggtgtagaataagtgggaagcccccggcgcccccccgtttcccgccaaggggccgggccg

SEQ ID NO: 1145 - DNA, 413 bp, Bos taurus
  Clone ID: 06-BOVMS1-001-Q1-E1-B5
acaaaaaataaaccaacagcaacaaaccagagcccgtccatgtcagccacaccaatagtttcatgttcattcttggccactggagtcagttttattatgagcaatgtaaggctggtaacctttaaattatttggttgatgtggaaaattggtgatgtaacattgtttctaggtctttttcattgcctttttattctgatgttaggttaatcactttgaagctatagttatgctgtaacatttagcatggcttcacaccaggttagtgtagccaatgaggaaaaaattaccataatgacagcagttgtcccagtgtgacagctgtattgctcagagcttttccttacacctagaatataaaatataaaaacggggagaagtgtgataaacaggtggatttcagttacacaatag

SEQ ID NO: 1146 - DNA, 455 bp, Bos taurus
  Clone ID: 06-BOVMS1-003-Q1-E1-B5
ccataatctcacagcccagatctcaaaatgttaatgaaggacaaaacgttctcttttcttgtgaaatcagtggtgagccatcgcctgaaatcgaatggtttaaaaacaacctgccaatttctatttcttcaaatatcagtgtaagtcgctccagaaatgtatattctcttgaaatccgaaatgcatcagtaagtgacagtgggaagtatacaattaaggccaaaaatttccatggccagtgttcagctactgcttccttaacagtccttcgaattccacctaaaattgaagctcttccctctgacatcagcattgatgaaggaaaagttttaacagtagcctgcgcttttacgggtgagcctaccccggaaataacatggtctcgtggtggaagaacaattcacgatcaagaacagcgagggcgattccatattgaaaacacagatgacctgacg

SEQ ID NO: 1147 - DNA, 399 bp, Bos taurus
  unsure (33),(136),(264): unsure at all n locations; Clone ID: 06-BOVMS1-004-Q1-E1-B5
tccatagcccacctcttacagtatgaaccatangacatcagtgacactgcagctatgattatacagattaccatgacttacgcttcgactcctacatgtgggcgtaacatcagaggtggggccaggtgtgtgcacnacccgtgtcagtgtatgagcatgtggcactaccatgtcaaataccagtgcgcatgttactctcctctgatgacctattacactcatgacctgtgccctctctacgactaacaccagacgcaatcccangccatctaaaccacacaacccttatatcgtcccgtccacgcttacattactgtcaatgctcatcactttgcaggtccatccacagtttcatacccattgaccctgagttagtcccactaaagtactttgaaaaat

SEQ ID NO: 1148 - DNA, 232 bp, Bos taurus
  Clone ID: 06-BOVMS1-004-Q1-E1-B9
ccgggccgaccacgcgtccgagaagacgaatctgctcgcggcgcaggcggctgacctcgagccaccgcgcagcagctgctctccaaccatcagcgttgccgctgccgcaaactgacacactgtttataatgtgtacatacattgtttacctcattttgttatttttaaaacgaagccctgtggaaggaaatggaaaacttgaagcattaaactcagccgttctgttttgctg

SEQ ID NO: 1149 - DNA, 380 bp, Bos taurus
  Clone ID: 06-BOVMS1-005-Q1-E1-B5
aaaaaatcttctatgaaaatgatttgaaaaacggtggacgcactacatgatgaaagcttacgtaatcttgcatgcaacgtcatgggtcttcgagattgtcagctaacttcaattcatcggctgtcgatttacaacgtcgtgactgggaaaaccctggcgttacccaacttaggcgccttgcagcacatctccctttcgccatctggcgtaataccaaataggcccgcaccgatcgcccttcccaacatttgctcagcctgaattggtaatgggacgcgccctgtaacggcgcattaatcgcggagggtgtggtggttacacgcaacgtgactgctacacttggcagtgccctagcgccggctcctttcgctttcttctct

SEQ ID NO: 1150 - DNA, 328 bp, Bos taurus
  Clone ID: 06-BOVMS1-006-Q1-E1-B5
cgcgtccgaaatcaataaattggtgggtttaaaaattagcagaaatttttacataaagcaaaagcctttcctaagaatttaatgatgtaaatgtattctcacagtgtgaatttgaaaattcaagggcctaggatgagatgatacacatttttaaatgaacggtaatttcttcactaagttgttttccttccaaagtgtttacaccttaagccttaacatatatcttcactcagaaaacagttttattgtcatatcataataggaagaaaatctcttttggaatattacactaatgtaagtttgtacagatcatattcctaagatgtgt

SEQ ID NO: 1151 - DNA, 355 bp, Bos taurus
  Clone ID: 06-BOVMS1-007-Q1-E1-B5
agtagacatgactgacgatgatctgatcaatatgcatgacactttttagcatctgtcaattacaagtttcgaactacagcatgtaacagaatctataaatgacatgaacacaaatattacaacactgctccccttgagaaacaaaatgaacgaaaatttatttacctcttttgataaccctgatgattttaggtctcactctcgtaacccttatcgtactactcccaaggctaccattcacaccatcatgacgactaatgagcaatcgcttgtgtacgctccaactctgaatacttcaccgatgtatcaagacatgtaatgagtagccacagatctgaaggacagacatgaacat

SEQ ID NO: 1152 - DNA, 338 bp, Bos taurus
  Clone ID: 06-BOVMS1-008-Q1-E1-B5
ccacgcgtccgctgatatcgagttctcaggtaccaaacagctagcataagttgctagactgacgccaagaacaattatgggagatgatgctccaagaacaatagcatgtgctcatatatgccgcttaggcatgtgcaaggataaatctgctatgagaacatatctgcataccgacggacccagtttccacatcggtgcagaatgtggtaaagcttgtgtcgagagctccgcgctatgtcgacaccatctggtccatactgcagagaactgcatcagtgcacgtaccaatgatgctggaaacgcttttcactggacttcagtttgcgcagacatgtgcg

SEQ ID NO: 1153 - DNA, 244 bp, Bos taurus
  Clone ID: 06-BOVMS1-008-Q1-E1-B9
atgcgacgtcatagctcttctatagtgtcacctaaattcaattcactggccgtcgttttacaacgtcgtgactgggaaaaccctggcgttacccaacttaatcgccttgcagcaaatccccctttcgccagctggcgtaatagcaaaaaggcccgcaccgatcgcccttcccaacagttgcgcagcctgaatggcaaatgggacccgccctgtaccggcgcattaagcgcggcggttgtggtgg

SEQ ID NO: 1154 - DNA, 366 bp, Bos taurus
  Clone ID: 06-BOVMS1-009-Q1-E1-B5
atgcgacgtcatagctcttctatagtgtcacctaaattcaattcactggccgtcgttttacaacgtcgtgactgggaaaaccctggcgttacccaacttaatcgccttgcagcacatccccctttcgccagctggcgtaatagcgaagaggcccgcaccgatcgcccttcccaacagttgcgcagcctgaatggcgaatgggacgcgccctgtagcggcgcattaagcgcggcgggtgtggtggttacgcgcagcgtgaccgctacacttgccagcgccctagcgcccgctcctttcgctttcttcccttcctttctcgccacgttcgccggctttccccgtcaagctctaaatcgggggctccct

SEQ ID NO: 1155 - DNA, 179 bp, Bos taurus
  Clone ID: 06-BOVMS1-010-Q1-E1-B5
gggtcgaccacgcgtccgaataagaggagctacacttgcactaataagcattagcactacaacagctctaattacattcaccattctaatcctactaacaattctagagtttgcagtagctataatccaagcctatgtattcactctcctagtcagcctatatctgcatgacaacacat

SEQ ID NO: 1156 - DNA, 414 bp, Bos taurus
  unsure (293): unsure at all n locations; Clone ID: 06-BOVMS1-012-Q1-E1-B5
ccaggacatcattgtctatcacgaacttgtacaaccatcaggtaaaaactggtgtgaagaagatgtggagaatggaggatgtgaatacctctgcctgccagccccacagattaatgaccactctccaaaatacacctgttcctgtcccaatggatacaatctagaggacaatggccgagaatgtcacaggatcaatgtgaccacagcagtgtcggaggtcagtgttccccctaaagggacttctgctgcctgggccatccttcccctcttgctcttagcaatggcagcagtangtggctacttgatgtggcggaattggcaacataagaacatgaaaagcatgaactttgacaatcctgtgtacttgaagaccactgaagaggacctatcaatagacattggtagacacagtgc

SEQ ID NO: 1157 - DNA, 169 bp, Bos taurus
  Clone ID: 06-BOVMS1-012-Q1-E1-B9
ctgatcaacaccaagaagaagctagagacagacatcactcaaatccaaggagaaattgggggcattatccaagaagctcgcaacgcaaaagagaaagccaagaagggcatcactgatgcaaccatgatggctgaagagctaaagaaggagcaagacaccaatgcccaac

SEQ ID NO: 1158 - DNA, 469 bp, Bos taurus
  unsure (422): unsure at all n locations; Clone ID: 06-BOVMS1-014-Q1-E1-B5
ctgaggcggattctcagtagacaaagcaacccttacccgattcttcgctttccattttatccttccatttatcatcatagcaattgccatagtccacctactattcctccacgaaacaggctccaacaacccaacaggaatttcctcagacgtagacaaaatcccattccacccctactataccattaaggacatcttaggggccctcttactaattctagctctaatactactagtactattcgcacccgacctcctcggagacccagataactacaccccagccaatccactcaacacaccccctcacatcaaacccgagtgatacttcttatttgcatacgcaatcttacgatcaatccccaacaaactaggaggagtactagccctagccttctctatcctaattcttgctctaatcnccctactacacacctccaaacaacgaagcataatattccgaccactc

SEQ ID NO: 1159 - DNA, 207 bp, Bos taurus
  Clone ID: 06-BOVMS1-014-Q1-E1-B9
tggacccggaacatgtgggagcctttgtggatgccgtgcacaaacactctcgcctgcttcgacagaagtgagcatgtcccttttccctgaagtacctctgacacagatgattgtgtccaggagaagaaaagttcaagagttgcagccatgcaaaaaaacaaccaatacgcaaaatggagtaataacgaaaaagaacaaaaaagaata

SEQ ID NO: 1160 - DNA, 419 bp, Bos taurus
  unsure (411): unsure at all n locations; Clone ID: 06-BOVMS1-017-Q1-E1-B5
gtcggggaattgttttttgcactttgacataaatactcttcagtatctgattagttctctgaataaattagcatagttatttttttaattcacgtttacatttctaagtagttgaccagtagaagaaataggaagctcttattgcctatttggtcataatgaaaataatttataaaatgttgtccttcaaaagtttaatagtacttctgtttaggaactttaatttcagctactatttcttaatatatttcacaaattcacacaaaaaatgtttatatagcagtcttaaagattagtagtggaatttggctgtggtccaggcggctctccttatagagaatttgatctgttcagtgtgagcagtttgctgttagccagagctatttatggcaaacacatgcttttgtatcntgtcatag

SEQ ID NO: 1161 - DNA, 410 bp, Bos taurus
  Clone ID: 06-BOVMS1-020-Q1-E1-B9
ctcaatgcaggaatgagcactcgacaagccttgttattcaatttcctttctgcatgttcctgctatgttgggctagcttttggcatcttggtgggcaataattttgctccaaatattatctttgcccttgctggaggcatgttcctctatatttctctggcggacatgtttccagagatgaacgatatgctgagagaaaaggtaactggaagaaaaaccgatttcaccttcttcatgattcagaacgcagggatgttaactggattcacagccattcttctcatcactttgtatgcgggagaaattgaattggagtaataagaagtgaaagatggtggtgttaatgaaggcatttaataaataaaaacagctccaaatggatttttaagctgatcctatttagttaaaag

SEQ ID NO: 1162 - DNA, 428 bp, Bos taurus
  Clone ID: 06-BOVMS1-021-Q1-E1-B5
ctcaggctgagaagtactcgcagaaggaagacaaatacgaggaagagatcaaggtcctttctgacaagctgaaggaggctgagactcgagctgagtttgcggagaggtcagtaactaaattggagaaaagcattgatgacttggaagacgagctgtacgctcagaaactgaagtacaaagccatcagcgaggagctggaccacgctctcaacgacatgacttccatataagtttctttgcttcacttctcccaagaccccttcatcgagctggatgtcccacctctctgacctctgcagtttgtctgttctccagctgaccctgattctttcttttcacatcctgccttaaggccaggtacacactgtgcttcctgttgtacagaagctcttcacttcagtgtaaaataaacactatgtaagctggtt

SEQ ID NO: 1163 - DNA, 443 bp, Bos taurus
  Clone ID: 06-BOVMS1-022-Q1-E1-B9
aaccattatactaggaactattattgtcataatcagttctcactgactacttgtctgaatcgggtttgaaataaatatactcgccatcatccccatcataataaaaaatcacaacccacgagctacagaagcatcaactaaatattttttgactcaatcaacagcctcaatactactaataatagccgtcatcattaacctaatattctcaggccaatgaaccgtaataaaactatttaacccaatagcctcaatacttataacgatagccctagctataaaactaggaatagccccatttcacttctgagtcccagaagtatcacagggcatccccctatcctcaggccttatcctactgacatgacaaaaactagcacctatatctgtactttaccaaatcttcccatcaattaacctaaacttaattctaaccctaacag

SEQ ID NO: 1164 - DNA, 213 bp, Bos taurus
  unsure (86): unsure at all n locations; Clone ID: 06-BOVMS1-023-Q1-E1-B5
atgcgacgtcatagctcttctatagtgtcacctaaattcaattcactggccgtcgttttacaacgtcgtgactgggaaaaccctgncgttacccaacttaatcgccttgcagcacatccccctttcgccagctggcgtaatagcgaagaggcccgcaccgatcgcccttcccaacagttgcgcagcctgaatggcgaatgggacgcgccctgt

SEQ ID NO: 1165 - DNA, 230 bp, Bos taurus
  Clone ID: 06-BOVMS1-023-Q1-E1-B9
atgcgacgtcatagctcttctatagtgtcacctaaattcaattcactggccgtcgttttacaacgtcgtgactgggaaaaccctggcgttacccaacttaatcgccttgcagcacatccccctttcgccagctggcgtaatagcgaagaggcccgcaccgatcgcccttcccaacagttgcgcagcctgaatggcgaatgggacgcgccctgtagcggcgcattaagcgc

SEQ ID NO: 1166 - DNA, 93 bp, Bos taurus
  Clone ID: 06-LIB188-001-Q1-E1-B9
acttgcgctcagggggcgcgatgatcttgatcttcattgtgctgggtgccagggcagtgatctctttctgcatcctgtccgcgatgccggggt

SEQ ID NO: 1167 - DNA, 380 bp, Bos taurus
  Clone ID: 06-LIB188-002-Q1-E1-B9
gccatgggcgcgggataccactccacctttcctcaaggtggtctcataattctggaatggcaggtcccgctgatacaaaatgaagacagacaacacaacgtttactctgtagagacatcctaactcctactatgcatgcatggtgatcttgaatgcaactcgtcctaaaaacttgtcacggtcattctgggtttttaggttgggtgatccatcgatcttgcactcaaccattacttctcttacgtcagcatcactaccatagccgacctgaacggcaactagtggctgcacgtagttcccatgcagttttttctcatagtatggaaaatattttaaatctaacgttccattggaaggataacttggtataaatgctgtgc

SEQ ID NO: 1168 - DNA, 441 bp, Bos taurus
  Clone ID: 06-LIB188-003-Q1-E1-B5
gccggatacaggcagacagacaagacacacaactcactctctgagcctaggaacccctgcccgggcaggcactggtcagggccaagagactgcatcccctcccttggctctgaccctccagcccacagtgtccccatgtccatccgcagaggctctctcctcggggcctggatgccgggcccagcacaggccatgagcaagcagaagatggctagacaagaaaacctccagaggacccctgcccacccctaaaggggaaggcaggaacaggcagccggtgccatcctgccgtccatccgcggtcacacgattgcccggaacaggaaggagaagacggcccccagcgccaggcccagagacagaaagaaggccatgatggctccagctgtctctgcctcagccggcttcactttcttgggcccaaagcacatgcacagactg

SEQ ID NO: 1169 - DNA, 428 bp, Bos taurus
  Clone ID: 06-LIB188-005-Q1-E1-B5
acgtgaataaagaaattaaaaatgccctcaaggaggtgaaacagataaagacccaaatagaacaaaccaatgaagagcgcaaattactgctcagctccctagaggaagccaagaagaagaaagaggacgccctgaatgacaccagggattctgaaaacaagctgaaggcgtcccagggggtgtgcaatgagaccatgacagccctttgggaggaatgtaagccctgcctcaagcagacctgcatgaagttctacgcgcgggtgtgcagaagcggatcgggactggttggccaccagcttgaggagttcctaaaccagagctcccccttctacttctggatcaacggtgaccgcatcgattccctgatggagaatgaccgggagcagagccacgtgatggacgtcatggaggacagcttcacccgggcg

SEQ ID NO: 1170 - DNA, 431 bp, Bos taurus
  Clone ID: 06-LIB188-007-Q1-E1-B5
gatacatggtaaagatgtcaaggatcatggaacctttggcgtcctgaggcttcttgactgtttcgggggctgggcgtatggaaacccggaggtcgaactttttgcaggagactttgcctttgagcttggcatggtacacggtcactaccgacaaggtgccttgtcctttcccttcagcttttactgtgaaacgctcattttccttagtctcttctgagcgcaggaggctggcatattcccataggatacgatgcctgaccgcagagttgcggctgggcagttgggtggacacatccaggttcagctccttgtgatcaggaacatccgtctggtattgggccaaggcttggaacaccatgaaagtggcctgcgttgagccataaccaactccaaaataaccccggctcgttgagccagcgcacgacacgagg

SEQ ID NO: 1171 - DNA, 411 bp, Bos taurus
  Clone ID: 06-LIB188-008-Q1-E1-B5
cgggatacgagaccacagtctgtttttaaagtgctacccaggaatacaatcacggtcgggttaaattcatcaccacgcttgatcatcaagccaaacctctccgcatacctggaaacccttttgttttcttcttaaaaaaaaaaaaaaaaaattgtagctttgatataacactggggaggggggaactataagcctaaattataaatggcacattactggtcatttggaagctgggggaatggggctgtgctgtgctcagtcatgttcaaccccttgcaaccccatggactgtagcctgccaggctcctctgtccatgggatttcccaggcgagaacactggagtgggttaccatttcctcctccagggtgaatgcggcagtttgttgcattttgactgcttcctcatctgg

SEQ ID NO: 1172 - DNA, 373 bp, Bos taurus
  Clone ID: 06-LIB188-009-Q1-E1-B5
accaaaagaccttcctcctgatactgcgctgctggacctgcaaaacaacaaaataactgagatcaaagatggagactttaagaacctgaagaaccttcatacactgattctcatcaacaacaaaattagcaaaatcagccctggggcatttgctcctttggtgaaattggaacgactttatctttccaagaatcaactgaaggaattgccagagaaaatgcccaaaactcttcaggagctgcgtgtccatgagaacgagatcaccaaagtgcgaaagtctgtgttcaatggattgaaccagatgatcgtcgtagaacttggcaccaacccgctgaagagctcaggcattgaaaatggagcctttcagggaatg

SEQ ID NO: 1173 - DNA, 399 bp, Bos taurus
  Clone ID: 06-LIB188-010-Q1-E1-B5
ctgtttggaggcccgggtggtctccacgttgcgggtgatggtgctgccgtctgccttccagaccacggtcacgctacccgggtagaagtcgctgatgagacacaccatggtggccttgttgccgttgagctcctccgtggagggcgggaacagggtgaccgagggtggggacttgggctgacccaggacggtcagtgtggtcccgctgccgaaaacacccatacggctactactgtcataagttacacagaaataatccgcctcatcctcagcctggagcgagctgatggtcagggtggctgtgttgccagacttggagctggagaatcggtcggggacccccgacggtcgatcactctcagcatagatgatagttctgaggcccgatcctgggacttg

SEQ ID NO: 1174 - DNA, 392 bp, Bos taurus
  Clone ID: 06-LIB188-010-Q1-E1-B9
gccagcccggcgggatacgaacagttgctccagtcctaccagcagaagatgctcaacacgtcggccctgctcaagcagctgaacgagcagttcacctgggtgtcccagctggccaacctcacgcagagcgacgaccagcactacctgcaggtcttcacggtgaattcccacaactccgaccccagcatcccgtctggcctcaccaaggtgattgtgaaactcttcaactccttccccatcacagtgacggtcccgcaggaagtctccagtcctaacttcatggagaatgtggcagagaaagcactgcagcaataccgccggaagagccaggaggagtgaggcgtgaaagttgcttttgcaagtatcggggcgtctgcacccacttgcccctg

SEQ ID NO: 1175 - DNA, 424 bp, Bos taurus
  Clone ID: 06-LIB188-011-Q1-E1-B5
acttcacagggtcagtcttgtcttcagtgggcgtggcgtagcagttcttcaacaccaggttaaatcgggacgtgtcccctctctccaagatggtgcccacatagagcatggattcaacagacagcatgactgcagtcccttcataaggagacgtgtagtcctggtcttgaaagagggccatcctgacagtgaactctccctccccatccacagtgatgttcagggaacttacgatgggctgcagggccatttgaaggctcactttcatgtccagtgggtaggcacactggaagttgatgctgaggatggtgtctctgatgatgaaatcgttgactaaggaaagcgtgtttatgtagatggcatgggtctggtttctctccagaatgtttccgcaggcaccagcctgggtgggattggtcacaga

SEQ ID NO: 1176 - DNA, 419 bp, Bos taurus
  Clone ID: 06-LIB188-012-Q1-E1-B5
actgatacatataactatacttatgaattctacatcgacgtctggggccaaggactcctggtcaccgtctcctcagcctccaccacagccccgaaagtctaccctctgagttcttgctgcggggacaagtccagctccaccgtgaccctgggctgcctggtgtccagctacatgcccgagccggtgaccgtgacctggaactcgggtgccctgaagagcggcgtgcacaccttcccggctgtccttcagtcctccgggctctactctctcagcagcatggtgaccgtgcccggcagcagctcaggacagaccttcacctgcaacgtagcccacccggccagcagcaccaaggtggacaaggctgttgatcccagatgcaaaacaacctgtgactgttgcccaccgcctgagctccctgg

SEQ ID NO: 1177 - DNA, 355 bp, Bos taurus
  Clone ID: 06-LIB188-012-Q1-E1-B9
actcctggttggaggtcaaggccacgatgcggtccaggtcttccaccagctgcttgaaggtgggtctctgagaggggaccgcgtgccagcaatctctcatcatcatgtagagctcgttggtgcagttactgggcttgtccatacgatgaccctccttcagcagcttgaaaagctcctccacggggaccccagggtatggggagccgcccagagtgaagatttcccagaggagcaccccaaaagaccacacgtcgctctggtgggtgtagattcggtcaaacaaggcctccggtgccatccatttgacgggcagtcggccgttggttgtctttttatagtagtcgatgtggtggat

SEQ ID NO: 1178 - DNA, 424 bp, Bos taurus
  unsure (395): unsure at all n locations; Clone ID: 06-LIB188-013-Q1-E1-B5
acagtattaaaaatgctattactcgggtattaattttgttgttgtttagtcgctaagttgtttctgactcttttgagaccccacagactgtataccgctaggctcctctgtccatgggacttcccaggcaaggatactggagtgggttgccatctcctcccctaggggatcttcccaactgagggactgaacctgtgtctaatgcatcgcaggtggagtctttaccactgagccaccagggaagcccacttcttttgttcatctcctcttattagttaacagggaaagtaaaaaaagggggtctgtaagaatctttcattcttgttttcaacttcctgtgatacagtatcttctcaaagggtttgaaaggagcacatctccttgtttagactganaagactggaaatctcttctgtgcacccaa

SEQ ID NO: 1179 - DNA, 370 bp, Bos taurus
  Clone ID: 06-LIB188-014-Q1-E1-B5
actgcctcacccctaacctcagtcatgtgttccaagaacttctgtccgtttatttatttggttttggtaacattgaattcgttttgactatgctgggtctttgctgctcgctggaagttgctaggacctctggactgcagtctcccatctcttgctgacctcttgttgacctctgcagaatcctggttggtgggagcttgttagttccttgttccttacccggacctcctgtggtaagtgttttctctcctctgcggcctggtaagggtgggtgggcattggcatcccaaaggtggctagaagtcaatgatttaggcaggcttgtgaatagatatgggagaaggcaatggcaccccactccagtatcact

SEQ ID NO: 1180 - DNA, 434 bp, Bos taurus
  Clone ID: 06-LIB188-014-Q1-E1-B9
acggataagatgcagtatggtctccacgtcctccccagcgaggagtctctcgctctgccccagggcggggtcccctggctggaaggagccagcatccatgggaagctgatcagtgtttctcagaatccgcactcacacccttggaactccccccgtgtcacttgttctactgccctaaagggctttgtgcatccccaccccccagattctgaaagaagaatgacgagaaattgggacttagaggcactggggttctacactaactcaacacgactatgagacaagaaaggggacacagaatgggtgagcaaacatcgtcacaaaggtggtgggtgttttgaatactggatggtgtccagggctgccctcagccctctgggcattgatgtcgatattgatgtggaacacggaggcaagagaagccgcctgacccc

SEQ ID NO: 1181 - DNA, 331 bp, Bos taurus
  Clone ID: 06-LIB188-015-Q1-E1-B5
actggcccagagggtcgtgtggagactggcgttctctacactgccagggtggacacctttgctccagtcagggatccaactgaagttgaagcggtggccatgcaccatgaagcatcgagtcacacccttcctgcggaccatgtgggctttacatgtcaaagtcgtgtctgtcaactggttcagtctcggcatggtgcccggaaccggcagcaataattcagccatggacactgctggcttcatacctcaggtgattatcttgaagcatacacgacgggtcaggccaggcatagcacctgtactggtctgtcacaaatctcacattacttgc

SEQ ID NO: 1182 - DNA, 319 bp, Bos taurus
  Clone ID: 06-LIB188-016-Q1-E1-B5
agacatgcattctataaaatcaatcactttgcacacatgtaagagtaatgttccaaaataagtaggaaactgctatacttctaagcaggggaggaaaagcacttccattttggtcttttttcttccagtagattatactttcaattaacagcattaacggtatcataaaaaaatgcactgctttttaaattcctgaacttcaatacaaattaatataataatattggtgtcttttgtgatgcaaacatctaccatctacattcatcagtgtaactgagcctcgttatcgataacctggtccaggttgggtatatccctg

SEQ ID NO: 1183 - DNA, 455 bp, Bos taurus
  Clone ID: 06-LIB188-016-Q1-E1-B9
gccatggcggcgggatacataattaattagatttagttacaacagaggtgatttcaatgggaatttcttatactgtcctacttattaaaaaaatttttatcatttgctcccaaatctgttatatcaaaatgtatttttgaattatacatttaattatgtcactttcagctaatttatttcataaatattagagatctcattttaaattattttatgaatatttccaaaacatgttttccaattattatttttatagtgaagacaaataattgacctatatttatatataaatattctctgcacagtaatatttttttaaagagaataatacggaaagtgcaaaagctcaggctctctagggcaaagccaaaaatcaaaaaagcaaaatttaattatgcctcctgattttttactttttgaattttattttctcccctcatctatttttttaaatg

SEQ ID NO: 1184 - DNA, 226 bp, Bos taurus
  Clone ID: 06-LIB188-018-Q1-E1-B5
acacagacaacaccaggcaccaatgtcacaaggaggcaagagtgacgggaaagagcagcctggagccccagatgaacccccccccctcttcttcaagagtgagtgtgggaggggacggggcctggagtgttgagggggcagccttagaacacgtcggcttagtaggcgtggttagagatgaagagggactcgctggctgcagcccctgccttaccacttggggtgt

SEQ ID NO: 1185 - DNA, 371 bp, Bos taurus
  Clone ID: 06-LIB188-019-Q1-E1-B5
acttgctggtcaggtaaagggaaatctcagtcttggagagttgatttagtgtgtttaccttgtcagggtcattagggtcaacagctccttccccaagaaaagattccacattaggcacctcctccagcagctccagcagttcattcagtaagtcgtttttttcaggtgcaatcgcatcttggtgctccagcaagagtgaatgtgtgttgatgatttcttcaattgaaatataaatgactggcttgctgactgtcaccacatctgtgtatttatccatattaaacttttcttctggttcagggacattacatgcttctttgaaatatttcctgaactcctgatacgtctctgataaataactgttcatagag

SEQ ID NO: 1186 - DNA, 303 bp, Bos taurus
  Clone ID: 06-LIB188-020-Q1-E1-B9
gccatgggcgcgggatacctgtgtggtggggatgactgaagccccgcgacagcccaagcatcgaggacggctgctccgtgctccagctaacagttctccgcagtcagcccgcggctaacagccccctgtgcccgtccccgggaggatgacattagcgctgcccgccccacccgctcttttgttagtttagtttcctacgcattacctggctttcccggctagtcgctctttatagccaaagaaatgaacattccaaggatttggaagtggaatctatgatgtgaaacactttgcctctcgagt

SEQ ID NO: 1187 - DNA, 399 bp, Bos taurus
  unsure (312): unsure at all n locations; Clone ID: 06-LIB188-022-Q1-E1-B5
catgggggcgggatacagacacattcagatgcagctgcagaaagaggggtccagtgatctgaagtcacatagcgggatgcagcattactcagtccccacaaggcagctgtctcaaactttaggaaccgtgagagacacatcagagccctggtcactgtcaccacttgcagcctgggtgtaggtctgtcttttttcacctgagcgcttcttcctccagatcacagctccagccaccacagctactacgaggagaaccaggccaacaatgatgcccatggtgaggaaggaggtctgaagaggttcccatctcanggtgaggggctcctgaagcccttcgtgctgcacatggcacgtgtatctctgctcctctccagaaggcaccaccagggccgcccactt

SEQ ID NO: 1188 - DNA, 170 bp, Bos taurus
  Clone ID: 06-LIB188-022-Q1-E1-B9
acctctttgacaagcacaccctgggacacagtgagagctaagcctcaggctggtttcccacagccacaggggtgacttccctggtcaccaaggcagtgcatgcatatttgggttaccttcatcttttctataagttgtaacaaaacatctacttaagttctttctttagt

SEQ ID NO: 1189 - DNA, 430 bp, Bos taurus
  Clone ID: 06-LIB188-023-Q1-E1-B5
gccgccggataccgtgccttatttttgacactctcctggtcgtcatacgccacccactggttgcccttggtggcataggggacctgctggtcacggaatctgtgggtggtggctccgtggaggaagtcacagatctcataataggcaaggatccctttctccttggtgaactggcctggaattcctggccctgagatgggggctcccacatctgtcttggaagaggccagagtgtagctcctcccaaaagtggggatacccatcaccagcttattggctggagcccccagcctcagcatgtagctcacagcgtagtcagcgttactgaatctgtcagaacttgcatcttcctggcctcgaaacagggggctgtggtgtccgactgtctggcgccaggctccgtgaaagtcataggtcaaaaggctgatga

SEQ ID NO: 1190 - DNA, 258 bp, Bos taurus
  Clone ID: 06-LIB188-023-Q1-E1-B9
gctgtctgataccggtttgggactcatcttggtaacactgtgccagtattgatcaattattgcaccagcgcttcagaaaatgaagaggagctccgggaagatatcttacaggcacttgactctttcttgctacggtgtccaagagacatctcaccatattgtgctgacattttaaatctcactttggtatatataagttatgacccgaattttacggaccatatgggtgaagaaactgatactgatcactcctgatca

SEQ ID NO: 1191 - DNA, 426 bp, Bos taurus
  Clone ID: 06-LIB188-025-Q1-E1-B5
gggatacatgggatcgtatatctgccggcccaggccaaagacctgaccactctggttggcaccctgtgtgtagcccatctgcagggacatggaggaattatcacatttgtctgtccccagctttgtgtcataaatgtgccgccgggtccctggagccgtcatgcccacctggctggcacacttatttgtgcccatctggaggctgatggtcgagtggtccatggggggcaggatatggtttttggggtcatacagatgccgtctggtgccataagctgtcataccggactggctggcacatttgttggtgcccatctggagcccaatgacgcactggcccgccttcatggtggcatcatcaaagtttcgctcctgcttctctgagtatttgacgccaatgtccacaccactctgcaacccctttgt

SEQ ID NO: 1192 - DNA, 411 bp, Bos taurus
  Clone ID: 06-LIB188-026-Q1-E1-B5
acagaaaaaagcatccttggaaacctgacacttgtaggatcggggtcagtcagccagcaggtaggtgacacaggtaggacctggagcccagacctagggcctcttctccactgagctttgccccaaacccctcagtgcttgattcattcagaccagctaggcttgagctccgtaagtcataaaattaacttaaatctgatacattggagaagaggaaccatgattaattaccatcctgtttgtggagaagaaacaatgttcgagcggccgcccgggcaggtcaacagtcgggcgccagtggatgcgttcaaagagtgccacctggcccaggtcccttctcatgctgtcgtggcccgaagtgtggatggcaacgaagacttgatctggaagcttctcagcaacgctcaggat

SEQ ID NO: 1193 - DNA, 442 bp, Bos taurus
  unsure (18): unsure at all n locations; Clone ID: 06-LIB188-027-Q1-E1-B5
atactcccgaccgccatngggcgccgggatactggcgcaacacaggcgattgctattttacactgctgcacatcattccaccatcggaggtagcatattagatgagtatcctgccacactaacaacctgtgtgctctctgcgagaagaacagcatccaacctgtgaaagtctaacggactgcaacataatcggactgcaggtatcccaaatcacacaccaagtgtccatttatcagatggcactaacaatggaaatcagtcgcgggtctaccctctccaagataaatgcgttagctgcgctgtcaacacgtatgaagaggcttgtctggctaataacgctcatgaggtttatcatccaccggacactcgacatttctcaagtgttcatcacgtataagtcccgggaaaatgatcatgcaacttagcaccaaaaacctttcaa

SEQ ID NO: 1194 - DNA, 355 bp, Bos taurus
  Clone ID: 06-LIB188-028-Q1-E1-B5
acttcaactggacacagtcactctaccccctccagggagctgtggctaaattcttctctgccagctgtgttccctgcattgatacacaagcataccccaacctgtgtcaactgtgcaagggggagggggagacccactgtgcctgctcctcacgggaatcatacttcggttattctggtaccttcacgtgtccgcacgacggggctggagacgtaacttctgttaaagagacgacagtgtctgagaacttgccagataacgctgacatggaccagtatgaccttcactgcctgaacaacagtcgggcgccattggatgcgttcaaggactgccacctggcccatgtcccttctca

SEQ ID NO: 1195 - DNA, 473 bp, Bos taurus
  Clone ID: 06-LIB2809-003-Q1-E1-B5
actgtgaaatgtggacaggcacccctccaacagtcttgaaaacacgcagctgtgttactcataggaatattcatcttgcaaagtgtttcctcacacgtgctgcccgtggaccccgctgtcgccgtcgccgccctgcagctgcagctgcatctgtgcctgcatccgcgcaatcatctcctgcatgcggcggagctcagcttccttctccagcagtatctggtctttattcatgtcctcattttctactttcctgccgcctctcttgagcctctcggaccggaagttctcatagtgcaggtcctgggtcacctcctggagatcctgcatgtgagtgatgagcatcgtcctcagcttcaggaagtcgttgtgctccgggttctccacctccacgacgccccaagggtagaggcggcctctgaccttcttgcctttggcttcaatcagctgattggattcaaccacagagaaaggga

SEQ ID NO: 1196 - DNA, 447 bp, Bos taurus
  Clone ID: 06-LIB2809-004-Q1-E1-B5
ccatggccgccggatacagcagaaaagcctgaatgggcatatctctctggggatagggcactgctttctggggaacaggcaggactttggactgagaaagggacagcacggactgacgaggaaacatgacagttggaggaagaggctggtgaggctggtgcatccaagactggagcagaggcagaggaaggtgcagattttcaacatcagtgagagtcaggctctggctttcagtaaagggctcaactggatatttagggaagggcatttctttgtgcttaggagccatagcctccttcactttggagactcccattacttcaggctgaaggaaaggcggcaccaccacaggggtttgagtaagaggagggatgttttgtgggaggctgttagggatgcgcccagggaagggatagactagaaactgtgtctgggcaaaagggtgga

SEQ ID NO: 1197 - DNA, 468 bp, Bos taurus
  Clone ID: 06-LIB2809-004-Q1-E1-B9
ggaagccatggccgcgcgatacaaagaagcaaaacgaggtagccacggggcagaggagttccaggaacagaaagaggacagaagcagcaaagacagcaggtgttcacaacttctcacagagccactgatccagcttctcagaacagagtgctttatgggccaaccagtagttaattcctactttatccagaatcttcttgacacacataatgtcatcagtaagatcatcatccaggaacttgtcacaggagatgttacagatgttgcttgagtgagggttctggtcgtctttgcaccaaattttattatttatctggaagagtccatattctgtgctgtcattgttttgtacagaatcgaggtggacggtgaggaagccgctgtggctggaaccgtgttggcagatggggagcccgtgaacctccacagcgcctcaaagggcgtttgatcagtctttcacaagtcaga

SEQ ID NO: 1198 - DNA, 401 bp, Bos taurus
  Clone ID: 06-LIB2809-005-Q1-E1-B5
acgcgttctcagtcgtctttcccaacctagcccagcttcaccatggtggacgccttcgtgggcacctggaagttagtggacagcaagaatttcgatgactacatgaagtcactcggtgtcggttttgctaccaggcaggtgggcaatatgaccaagcctaccacaatcatcgaagtgaatggggacacagtcatcataaaaacacaaagcaccttcaagaacacagagatcagcttcaagctgggagtcgagttcgatgagaccacagcagatgacaggaaagtcaagtccatcgtgacgctggatggcggcaaacttgtccacgtgcagaagtggaatggacaagagacatcacttgtgcgggaaatggttgacgggaaactcattctgacactcaccca

SEQ ID NO: 1199 - DNA, 246 bp, Bos taurus
  Clone ID: 06-LIB2809-006-Q1-E1-B9
actccttggccatggcggccagcgacatctccctgctggacgcccagagtgcccccctgagagtgtatgtggaggagctgaagcccacccctgagggcgacctggagatcctgctgcagaaatgggagaatgatgagtgtgctcagaagaagatcattgcagaaaaaaccaagatccctgcggtgttcaagatcgatgccttgaacgagaacaaagtccttgtgctggacaccgactacaaaaagt

SEQ ID NO: 1200 - DNA, 439 bp, Bos taurus
  Clone ID: 06-LIB2809-010-Q1-E1-B5
ccgggatacctgttgaaattatggaaagcctttcagccattgagaaaccaattaaaggcaccattaggaaaattgaaaattttcaaattgaggaacagcagcaaccagaggatgaaccccaggataaaatcaacccctttgcccaaacaaagtctcaagtcaatcccttccctgggcccatccataaaagcctcccacaaaacatccctcctcttactcaaacccctgtggtggtgccgcctttccttcagcctgaagtaatgggagtctccaaagtgaaggaggctatggctcctaagcacaaagaaatgcccttccctaaatatccagttgagccctttactgaaagccagagcctgactctcactgatgttgaaaatctgcaccttcctctgcctctgctccagtcttggatgcaccagcctcaccagcctcttcc

SEQ ID NO: 1201 - DNA, 283 bp, Bos taurus
  Clone ID: 06-LIB2809-010-Q1-E1-B9
ccatggccccgggatacctggcactggtgggaacgtgatatacagaactaaatacttgctgggcaatcaagctatagtgaaaccatgggcctggctgtatgatgcctggaaggatgatgggggctttggcctctggccctggcaccaccctaagttagggaaagaatggagaattggtggcctaagatagttctttaccaagagtctctggacatttttattcacctttttatctactatgtgccaggcaccttcttaggcactaaggatggaaaggaatggt

SEQ ID NO: 1202 - DNA, 439 bp, Bos taurus
  Clone ID: 06-LIB2809-011-Q1-E1-B5
acttgtacatgtgtaagtgggggttgtctactgagtaaggaatactgtttttaaggttctaaatctaaattcagatgatgcattaatgacccaagaactcagatctgatggtgtctgaatttctaacagtccttgctttgtgggtatgcggacaacttatctggatgccttacatcttttcgaaacagtgttgcctctgaacgtgctctgctcccaccctgctccctctttggagcccctttgcaccgcagagcctgcacaaatggctggtataaaagggggcctggctagagaatgatcagtgtaactgtatgcaggattcctttctgggcttcattttggaaactttgcttaaggctacttttcataattgcccacatttgatagatggtagaaagaactttgaaagtatttgaattcatactaatacatttttttt

SEQ ID NO: 1203 - DNA, 455 bp, Bos taurus
  Clone ID: 06-LIB2809-012-Q1-E1-B9
cccgagcggccatggggcgggatacaccagctggaaattgttcccaatagtgctgaggaacgacttcacagtatgaaagagggaatccatgcccaacagaaagaacctatgataggagtgaatcgggaactggcctacttctaccctgagcttttcagacaattctaccagctggatgcctatccatctggtgcctggtattacgttccactaggcacacaatacactgatgccccatcattctctgacatccctaatcccattgactctgagaacagtgaaaagactactatgccactgtggtgaatagtcaagtgaattctgatgtgattccacagttatggtctttgatggttctgaaaattccatgctctacatgtcttttcatctatcatgtcaaaccattctatccaaaggcttcaactgctgttttagaatagggcaatctcaaattg

SEQ ID NO: 1204 - DNA, 404 bp, Bos taurus
  Clone ID: 06-LIB2809-014-Q1-E1-B9
gcatactcccgaccggcactggcggcgggatacaacacgtagggagtaacctttgtctcatgttgaagccatggcttcatatctttctgatgctgataaacagtcttgaaatactggggcaatgcgaatttcaggtgacgctggctgatttttttcacagtatttaggcgattcttctcttcgtcattcaattcagtttgcgtattgaatacttctgttgactccatgtcaacggtcttcgttgaattttcctcactggtggagagctgctctctgtacaaagtgggagtaatgggaacagcatttctcgtaacctgatcgcatgggttcagagcagttgaaccttgatacagatactgaacatactggcggaacttctgacaaaactgagtgatttcatacag

SEQ ID NO: 1205 - DNA, 418 bp, Bos taurus
  Clone ID: 06-LIB2809-017-Q1-E1-B5
gccatgggcgcgggatactctgtgaatggtgagagactgggcacctacatgggccataccggagctgtgtggtgtgtggacgcggactgggacaccaagcatgtcctcactggctcagctgacaacagctgtcgtctctgggactgtgaaacagggaagcagctggccctgctcaagaccaattcagcagtccggacctgtggctttgactttgggggcaacatcatcatgttctccacagacaagcagatgggctaccagtgcttcgtgagcttctttgacctgcgggatccaagccagatcgacagcaatgagccctacatgaggatcccttgcaacgactccaagatcaccagtgccgtttggggacctctgggagagtgcatcatcgcaggccacgaaggtggagagctcaacc

SEQ ID NO: 1206 - DNA, 412 bp, Bos taurus
  Clone ID: 06-LIB2809-019-Q1-E1-B9
accccagatggaaattgttcccaatagtgctgaggaacgacttcacagtatgaaagagggaatccatgcccaacagaaagaacctatgataggagtgaatcaggaactggcctacttctaccctgagcttttcagacaattctaccagctggatgcctatccatctggtgcctggtattacgttccactaggcacacaatacactgatgccccatcattctctgacatccctaatcccattggctctgagaacagtgaaaagactactatgccactgtggtgaagagtcaagtgaattctgagggactccacagttatggtctttgatggttctgaaaattccatgctctacatgtcttttcatctatcatgtcaaaccattctatccaaaggcttcaactgctgttttaga

SEQ ID NO: 1207 - DNA, 363 bp, Bos taurus
  Clone ID: 06-LIB2809-021-Q1-E1-B9
acagcaaaaaggcctgaatgggcatatctctctggggatagggcactgctttctggggaacaggcaggactttggactgagaaagggacagcacggactgacgaggaaacatgacagttggaagaagatgctggtgaagctggtgcatccaagactggagcagaagcaaatgaatgggcagattttcaacatcagtgagaatcaggctctggctttcagtaaaaggctcaactggatatttagggaagggcatttccttgtgcttaagagccataccctccttcactttggagactcccattacttcaggctgaatgaaaggcggcaccaccacaggggtttgagtaagaggacggatgtttt

SEQ ID NO: 1208 - DNA, 372 bp, Bos taurus
  Clone ID: 06-LIB2809-023-Q1-E1-B5
gcgacgggcccgggatacacttaactggaaaatccctggacagaggagcccggtaggctgcagtccatggggtcgctaagagtcggacaagactgagcgacttcactttgacttttctctttcatgtattgcagaaggaaatggcaacctactccagtgttcttgcctggagaatcccagggatggcggagcctggtgggctgccatctatggggtcgcacggagttggacacaactgaagcgacttagcagcggcaacagcaagcttaattgggaaacaaatatttgcaccaaagcaagaagttgttgcagaatgcttgagttaagttgggtgggaagagaggctgagagaagagctggtgtgttctctgc

SEQ ID NO: 1209 - DNA, 404 bp, Bos taurus
  Clone ID: 06-LIB2809-023-Q1-E1-B9
gggatacagaagaaaggcctgaatgggcatatctctctggggatagggcactgctttctggggaacaggcaggactttggactgagaaagggacagcacggactgaggaggaaacatgacagttggaggaagaggctggtgaggctggtgcatccaagactggagcagaggcagaggaaggtgcagattttcaacatcagtgagagtcaggctctggctttcagtaaagggctcaactggatatttagggaagggcatttctttgtgcttaggagccatagcctccttcactttggagactcccattacttcaggctgaaggaaaggcggcaccaccacaggggtttgagtaagacgagggatgttttgtgggaggctgttatggatgggcccagcgaacggat

SEQ ID NO: 1210 - DNA, 211 bp, Bos taurus
  Clone ID: 06-LIB2809-025-Q1-E1-B5
agcagaaaggccagaatgggcatatctctctggggatagggcactgctttctggggaacaggcaggactttggactgagaaagggacagcacggactgaggaggaaacatgacagttggaggaagaggctggtgaggctggtgcatccaagactggagcagaggcagaggaaggtgcagattttcaacatcagtgagagtcaggctctggc

SEQ ID NO: 1211 - DNA, 373 bp, Bos taurus
  Clone ID: 06-LIB2809-027-Q1-E1-B5
gggataaagccaaaaggcctgaatgggcatatctctctggggatagggcactgctttctggggaacaggcaggactttggactgagaaagggacagcacggactgaggaggaaacatgacagttggaggaagaggctggtgaggctggtgcatccaagactggagcagaggcagaggaaggtgcagattttcaacatcagtgagagtcaggctctggctttcagtaaagggctcaactggatatttagggaggggcatttctttgtgcttaggagccatagcctccttcactttggagactcccattacttcaggctgaaggaaaggcggcaccaccacacgggtttgagtaagaggagggatgttttgtggg

SEQ ID NO: 1212 - DNA, 400 bp, Bos taurus
  Clone ID: 06-LIB2809-028-Q1-E1-B5
attgtggaaagcctttcaagcagtgaggaatctattacacgcatcaatcagagacttgagaagtttcagagtgaggaacagcagcagagagaggatgaactccaggataaaatccacccctttgcccagacacagtctcgagtcgatcccttccctggcccatccctaacagcctcccacaaaacatccctcctcttactcaaacccctgtggtggtgccgcctttccttcagcctgaagtaatgggagtctccaaagtgaaggaggctatggctcctaagcacaaagaaatgcccttccctaaatatccagttgagccctttactgaaagccagagcctgactctcactgatgttgaaaatctgcaccttcctctgcctctgctccagtcttggatgca

SEQ ID NO: 1213 - DNA, 420 bp, Bos taurus
  Clone ID: 06-LIB2809-028-Q1-E1-B9
ggataatggtcaaagagttatccaggatagattttcacccaccatggggcgccatcgttcaaatcagctcttcaatggccatgggggacacatcatgcctcccacacagtcgcagtttggggagatgggaggcaagtttatgaaaagccagattagcttgaggcctgctcagtctttcctaatgaataaaaatcaagtgccaaagcttcagccccaaataactatgattcctcctagtgcacaaccaccacgcactcaaacgccacctctgggacagacacctcagcttggtctcaaaactaatccaccacttatccaggaaaagcctgccaaaaccagtaaaaagccaccaccgtcaaaggaagaactgcttaaactaactgaaactgttgtaactgaatacctgaatagtgggaatgc

SEQ ID NO: 1214 - DNA, 364 bp, Bos taurus
  unsure (169),(336): unsure at all n locations; Clone ID: 06-LIB2809-029-Q1-E1-B5
acagcagaaaggcctgaatgggcatatctctctggggatagggcactgctttctggggaacaggcaggactttggactgagaaagggacagcacggactgaggaggaaacatgacagttggaggaagaggctggtgaggctggtgcatccaagactggagcagaggcanaggaaggtgcagattttcaacatcagtgagagtcaggctctggctttcagtaaagggctcaactggatatttagggaagggcatttctttgtgcttaggagccatagcctccttcactttggagactcccattacttcaggctgaaggaaaggcggcaccaccacangggtttgagtaagaggagggatgttttg

SEQ ID NO: 1215 - DNA, 405 bp, Bos taurus
  unsure (378): unsure at all n locations; Clone ID: 06-LIB2809-031-Q1-E1-B9
acagcagaaaggcctgaatgggcatatctctctggggatagggcactgctttctggggaacaggcaggactttggactgagaaagggacagcacggactgaggaggaaacatgacagttggaggaagaggctggtgaggctggtgcatccaagactggagcagaggcagaggaaggtgcagattttcaacatcagtgagagtcaggctctggctttcagtaaagggctcaactggatatttagggaagggcatttctttgtgcttaggagccatagcctccttcactttggagactcccattacttcaggctgaaggaaaggcggcaccaccacaggggtttgagtaagaggagggatgttttgtgggaggctgttanggatgggcccagggaagggatagacta

SEQ ID NO: 1216 - DNA, 269 bp, Bos taurus
  Clone ID: 06-LIB2809-032-Q1-E1-B5
cctcaatgggcatatctctctggggatacggcactgctttctggggaacacgcaggaccttggaatgacacagggacagcacatgattgacgagggcccatgacagttcagggaccgtgctggtgccgcttgtccatcctttatcgatacacacgcacccgctggtgcacatctccaacatcaatcatcatctcgctcttgctttcactcgacggctcaactggatatccaggcattgccacctcttagttctcacgacccctctcctc

SEQ ID NO: 1217 - DNA, 391 bp, Bos taurus
  unsure (354): unsure at all n locations; Clone ID: 06-LIB3057-001-Q1-K1-B9
caggcccggcgcctctacgtgggcatcatccccttcggcatcactgaggaggccatgatggatttcttcaatgctcagatgcgccttggggggctgacacaggcccctggcaaccctgtcttggccgtgcagattaaccaggacaagaactttgccttcttagagttccgctcagtggatgagaccacccaggccatggccttcgacggcatcatcttccagggccagtcgctgaagatccgcaggcctcacgactaccagcccctgccgggcatgtcggagaacccttctgtctacgtgcctggagttgtgtccaccgtggtcccagactctgcgcacaagctgttcatcggngggctacccaactacctgaacgacgaccaggtgaaag

SEQ ID NO: 1218 - DNA, 356 bp, Bos taurus
  Clone ID: 06-LIB3057-003-Q1-K1-B5
ggtaattattactactctcgctccctgtattagcagccggcatcacaatgctattaacagaccggaacctaaatacaaccttcttcgacccggcaggaggaggagaccctattctatatcaacacttattctgattctttggacaccccgaagtctatattttaatcttacctgggtttggaataatctctcatatcgtgacctactactcaggaaagaaagaaccattcggatatatgggaatagtctgggctataatgtcaatcggatttctaggtttcatcgtatgagcccaccatatattcactgtcggaatagacgtcgacacacgagcctacttcacatcagccactata

SEQ ID NO: 1219 - DNA, 432 bp, Bos taurus
  Clone ID: 06-LIB3057-003-Q1-K1-B9
tggtgaagtgtgtttcttgaaatcatcaccaccatggacagcaaaggttcgtcgcggaaagggtcccgcctgctcctgctgctggtggtgtcaaatctactcttgtgccagggtgtggtctccacccccgtctgtcccaatgggcctggcaactgccaggtatcccttcgagacctgtttgaccgggcagtcatggtgtcccactacatccatgacctctcctcggaaatgttcaacgaatttgataaacggtatgcccagggcaaagggttcattaccatggccctcaacagctgccatacctcctaccttcctacccctgaagataaagaacaagcccaacagacccaccatgaagtccttatgagcttgattcttggggtgtcttgctctcctggaatgacccctttctatcacctagtcaccgaggtg

SEQ ID NO: 1220 - DNA, 441 bp, Bos taurus
  Clone ID: 06-LIB3057-005-Q1-K1-B5
cggacgcgtgggcgggtttgccgccaggacacaggtgtcgtgaaaaccaccgttaaacctaagccaaaatgggaaaggagaagacccacatcaacatcgttgtcattgggcacgtagattcagggaagtctaccacgactggccatctgatctacaaatgtggcgggatcgacaagagaacaattgaaaagttcgagaaggaggctgccgagatgggaaagggctccttcaaatatgcctgggtcttggacaaacttaaagctgaacgtgagcgtggtatcaccattgatatctccctgtggaaatttgagaccagcaagtactatgttaccatcattgatgccccaagacacagagacttcatcaaaaacatgattacaggcacattccaggctgactgtgctgtcctgatcgttgctgcttggtgtggtgaatttgaag

SEQ ID NO: 1221 - DNA, 408 bp, Bos taurus
  Clone ID: 06-LIB3057-005-Q1-K1-B9
ttccttaccttccaatttaccttgcatggtttcatcctttagtctttttccttgacctatttttcttctcatctttcctccattcttaatttctgtatattttaaatattttttaccttttattttttttttttatatattttccttttttattttttttttttttttattttctttttattataattttttattttttttttttattttctgtcttttactccttttatattttttttttttattttttttttcatttttttttttaattttttctttttttcttttttccttttcttttttatttttttaatttttctttttttttttttttttttcttcatatatttttttttttttttttttttttttttttttttttatttttttatttttattttttttttt

SEQ ID NO: 1222 - DNA, 413 bp, Bos taurus
  Clone ID: 06-LIB3057-006-Q1-K1-B5
gttctagatcgcgagcggccgccctttttttttttttttttttaaaatttatttctgaagggctttatttttttaatcagtatacattatattaagtatagaatttccttaaaaattaacaaatacctctaagtttcaccgttaggacattgatatggagaaggaaacatctggctcttttgactttttacatttattcaagttctaaatagattctcctgttacggttcttctgtgctatttttgtccaagttgtcacagctgttttatgaactgtgtaccattaaaaagttcactgcaaccatataaaatatgcttgccttgtttcccctttatgtagtcaaccagattttgatattcaatgtacttgcctccttccaccacaaaaacaattgcctcttggaatggatttt

SEQ ID NO: 1223 - DNA, 361 bp, Bos taurus
  Clone ID: 06-LIB3057-007-Q1-K1-B5
gatcaccacacgactcacggacctgtggcacagctcaccagctatgatggctgcaggcccccggacctccctgctcctggctttcgccctgctctgcctgccctggactcaggtggtgggcgccttcccagccatgtccttgtccggcctgtttgcgcaacgctgtgctccgggctcagcacctgcatcagctggctgctgacaccttcaaagagtttgagcgcacctacatcccggagggacagacatactccatccagaacacccaggttgccttctgcttctctgaaaccatcccggcccccacgggcaagaatgaggcccagcagaaatcagacttggagctgcttcgcatctcact

SEQ ID NO: 1224 - DNA, 365 bp, Bos taurus
  Clone ID: 06-LIB3057-008-Q1-K1-B9
cactaaccagatccaggccgcattcagggagccaaggcttctggtggtcaccgatccgagggctgaccaccagcccctcacggaagcctcttacgtgaacctgccaaccattgccctgtgcaacacggactctcctctgcgctacgtggacattgccatcccgtgcaacaacaagggagcgcactcagtgggtctgatgtggtggatgctcgcccgggaagtcctgcgcatgcgtggcaccatctcccgagagcacccgtgggaggtcatgccggacctctacttctacagagatcctgaggagattgaaaaggaagagcaggcagcagctgagaaggctgtgaccaaggaggagtttcaaggtg

SEQ ID NO: 1225 - DNA, 267 bp, Bos taurus
  Clone ID: 06-LIB3057-009-Q1-K1-B5
acccacgcgtacggcgctttcccccccttaaacacccccctaccccaccccacccccgcggacgctacaccgcgactagtaaaagggaccggtgcccgcacccttgaagcctatggcgcgggcccgggtggagccaacgcacgtgcagatcttgacggtagtagcaaatattcaaacgagaactttgaaggccgcaatggacaacggtcccatgtaaacagcagtagaacatggagcactcgatcctgacagatgggcgatcgccga

SEQ ID NO: 1226 - DNA, 350 bp, Bos taurus
  Clone ID: 06-LIB3057-010-Q1-K1-B5
ttcgaggcacgagccacgcgtgcgatcgcgagcggacgacctttctttttttttattgtccgacggttctctgctcccgcctcggatgctgtggttcgggaagagcggggaagatgcggcccttggacatcgagcagctggcggagccggacgaggtggacgcgctggagcccgcagaggacttcgagcagatcctgctgccggtcatcaacgagatgcgcgaggacatcgcagaactcttccgtgagcaccgccgggcctacctggggcaccggagcaagctgtgccagatggacatatgctcatccggacaaagacgccggtggaggccttggaggaaaacgcgctca

SEQ ID NO: 1227 - DNA, 410 bp, Bos taurus
  Clone ID: 06-LIB3057-011-Q1-K1-B5
cacttccggcctgggagcgcgcgcggttgattcgtccttcctcagccgcgggtgctcgcagctcggaaatggcgggatttggtgctatggagaagtttttggttgaatacaagagtgcagttgagaagaaactggctgagtacaaatgtaacaccaacacagcaattgaactgaaattagttcgttttcctgaagatcttgagaatgacattagaactttctttcctgagtatacccatcaactctttggggatgatgaaactgcttttggttacaagggtctgaagatcttgttatattatattgctggtagcctatcaacaatgttccgtgttgaatatgcatctaaagttgatgagaactttgactgtgtagaggcagatgatgttgaagggaaaattagacaaatc

SEQ ID NO: 1228 - DNA, 354 bp, Bos taurus
  Clone ID: 06-LIB3057-011-Q1-K1-B9
cgagactgctggctctcccttccttgagcttggagcctcagcagcgatgcgtttcttgactgtcgcgttcctgttcctggcactcagtgcctccgccctggccgagccggtgaaattcaaggactgcggttcttgggtcggagttataaaggaagtgaatgtgagcccatgtcccacccagccttgcaaactgcacagaggacagtcttacagtgttaatgtcacgttcaccagtaatactcagtctcaaagtagcaaggctgtggtacatggcattgtgatgggcatcccagttccctttcccattcctgagtctgatggttgtaagtctggaatcagatgccccatcgaaaa

SEQ ID NO: 1229 - DNA, 436 bp, Bos taurus
  Clone ID: 06-LIB3057-012-Q1-K1-B9
gtcgtcgtggtcgcgcgctcagtccctctactactctagaggccccctcaccatggcgggcatcctgtttgaggatatttttgatgtaaaagacattgacccggaaggcaaaaagtttgaccgagtgtctcggctgcattgtgagagtgaatctttcaagatggacctcatccttgatgtaaacattcagatttaccctgtagacttgggtgacaagttccggttggtcatagctagtaccttatatgaagatggtactctggatgatggtgaatacaaccccacagatgataggccttccagggctgaccaatttgagtatgtcatgtatgggaaagtgtacaggattgagggagacgaaacttctactgaagcagcaacacgcctctctgcctacgtgtcctatgggggcctgctcatgaggctgcaaggtgat

SEQ ID NO: 1230 - DNA, 294 bp, Bos taurus
  Clone ID: 06-LIB3057-013-Q1-K1-B5
gaacgaagggaagaaaagtgaccgagaggccgctgaacatcctcgccccggcgcggcgggagccggccgaagcagctttcccgtgccagagcctcagcctgcctggaagatgccgagactgtgcagcagtcgttcgggccccctgctgctggccttgcttcttcaggccttcattgaaagtcgtggttggtgccttgaaaaccacccatgtcaagaacttaacaacgaaaggaacctggttgccttcattccggccttgaaaccccaacttttccgccaaacccccgtgtttcc

SEQ ID NO: 1231 - DNA, 448 bp, Bos taurus
  Clone ID: 06-LIB3057-013-Q1-K1-B9
cggacgcgtgggaatgactcgaccctcttcactctggctaagatgatgccaggctgggagatttactctgacgctgggaaccatgcctccatgatccaagggattcgaaacagtggagtgccaaagtacatcttccgccacaacgatgtcagccacctccgggaactgctgcagaggtccgaccctgctgtccccaagattgtcgcctttgaaactgtccactcaatggacggggcagtgtgcccgctggaagagctgtgtgacgtggcccacgagtttggagcaatcaccttcgtggatgaggtccacgcagtggggctctacgggctgcaaggcggagggattggcgatcgggatggagttatgccaaaaatggacatcatttctggaacacttggcaaagccattggctgcgttggagggtacatcgccagcacgagttccctga

SEQ ID NO: 1232 - DNA, 452 bp, Bos taurus
  Clone ID: 06-LIB3057-016-Q1-K1-B5
cgacgcacgagtcacgcgtgagcggacgcgtgggttatgccctatgtatttttttgacaaggcttttttgggacgacagtgaatgattagcaacatacaatagtggtccaactctctaaataacaatcactagacaaactggacaccctctcacatgtgcacaaatctgcatggaaaagtactaatgttttagactggactgtgtgcttttttccccctttctagtgtattaagaaatgacatgcactttaatttgccaaaagcaacggttgtattctggcagcaacatgctacttctattacatagtaaagtgaataccaaaagcaacggttgtattctggcagcaacatgctacttctattacatagtaaagtgaataccagaactacaaaggcaggaggtgtaagtgagtttttattgggaagggaagttgtcaacttaaacagcagca

SEQ ID NO: 1233 - DNA, 370 bp, Bos taurus
  Clone ID: 06-LIB3057-019-Q1-K1-B5
gcgggtgcgcgggtcgcctctctgagttatccagttccatccttgtcgctgcggcgacgcccgcattctccgtcgccatgactgaacagatgacccttcgtggcaccctcaagggccacaacggctgggtgacccagatcgctaccactccccagttcccggacatgatattgtccgcctctcgagataagaccatcattatgtggaagctgaccagagatgagaccaactatggtatcccacagcgtgctcttcggggtcactcccactttgttagtgatgtggtcatttcctcagatggccaatttgccctctcaggctcctgggatggaaccctttcgcctttggggatcctcaacaacggggcaac

SEQ ID NO: 1234 - DNA, 413 bp, Bos taurus
  unsure (272): unsure at all n locations; Clone ID: 06-LIB3057-019-Q1-K1-B9
gcgggtgcgcgggtcgcctctctgagttatccagttccatccttgtcgctgcggcgacacgccgcattctccgtcgccatgactgaacagatgacccttcgtggcaccctcaagggccacaacggctgggtgacccagatcgctaccactccccagttcccggacatgatattgtccgcctctcgagataagaccatcattatgtggaagctgaccagagatgagaccaactatggtatcccacagcgtgctcttcggggtcactcccactntgttagtgatgtggtcatttcctcagatggccaaattgccctctcaggctcctgggatggaacccttcgcctttgggatctcacaacgggcaccaccactcgccgatttgtaggccataccaaagatgtgctgagtgtggc

SEQ ID NO: 1235 - DNA, 408 bp, Bos taurus
  Clone ID: 06-LIB3057-023-Q1-K1-B9
gctttgtgcacataaataagaaactatattgatgttaccacaaacatcttcttttgatgctctttgtgcctggtttctctgtagtgtggtctgtgttggcagtaagccgcagtggaggtgctatgctggcatcttagaggtgtggagggaagaactctgacgtccaacatcaacatcttggtcaagtaaagtcttcagggtgttttgcgcacaaattatagtcagatagctatgcatgtttagagtaaatctccaatttgtaattttccttagaattttgcaaaatgttgtgacagatatttgtcagaattattggaaatatgttatggtggatggcattttttcatataaaattatatttagttctgttgagacatggctaagcctattttcattttaatttggttt

SEQ ID NO: 1236 - DNA, 315 bp, Bos taurus
  Clone ID: 06-LIB3057-024-Q1-K1-B5
tcccgaatcgacccactcgtacgcggactcgtattcaaccaccataatactttatcatcccttgctcgcactcactccacatgaatgttttaacatctgccagataatttacacatataatacattaattctacccaaaactatcccactatatcattcagaacatttcttgagacccaagtattatgatcatacaagctctattgatcccatttgaggcattgtgatcaccaattatgacaataccattattttagagattcaagtgcatcatccatcatccaattcgattattgaaattatccggacacatta

SEQ ID NO: 1237 - DNA, 312 bp, Bos taurus
  Clone ID: 06-LIB3057-025-Q1-K1-B5
gcgcgggagaccgactatccgaggccaacctaggctcccgcggcgctgccatatcgtccgtctggtctggattctggacttataggcgttcagtcataatcccacagatggtagctactccccattgtctcctcaaccaagcacatacaccaaatgtctgaacctgcggttcctctagtactgagcaagattaccatggctacaacacatcatcagtagggtcaaactaacctgtctcacgaccgtctaaacccacctcacgtgccctattagtgggtgaacaattcaacgcttggtgaattctgcttcaca

SEQ ID NO: 1238 - DNA, 415 bp, Bos taurus
  Clone ID: 06-LIB3057-025-Q1-K1-B9
cgacccaggcgtacgcgggcgatggacaggtttagcagcacgttctcatttgacgtgcggtgcatctctaccggggcgggtgccttttaaggcggaggcacaccatgatccggacattcagccgtgaagcacgtgcacatagatggcttggtcggtattaaacactatcaaacattaccaggaagacggacacggaactgaggtggttcaaggagtgcttttgggccttgttgtagaagatcgactcgagattaccaactgctttcctttccctcagcacactgaagatgatgctgactttgatgaagtccaatatcagatggagatgatgcggaacctgcgccatgtaaacatcgaccacctacacgtgggctggtaccagtccacatactatggctcgatcgtcacccgggcc

SEQ ID NO: 1239 - DNA, 454 bp, Bos taurus
  Clone ID: 06-LIB3058-002-Q1-K1-B5
gccgacttcccttgcctacattgttccattggccagaggctgttcaccttggagacctgatgcggttatgagtacgaccgggcgtggacggaattcggtcctccggattttcaagggccgccgggggcgcaccggacaccgcgcgatgtgcggtgctcttccggccgctggaccctacctccggctgaaccgattccagggttggcgggccgttaagcagaaaagataactcttcccgaggcccccgccggcgtctccggacttcctaacgtcgccgtctgccgccacgtcccggctcgggaaatcttaacccgattccctttcgggtgacgcgcgtgatcgcgctatctgccgggtttcccccgtcccttaggatcggcttacccatgtgcaagtgccgttcacatggaacctttctcctcttcggccttcaaaagtctcatttgaatatttg

SEQ ID NO: 1240 - DNA, 413 bp, Bos taurus
  Clone ID: 06-LIB3058-003-Q1-K1-B9
ttttcgacccgtttttagcaaaatgctggactggatgagttacaagctgaactcaagtgcagggagaagtgtgaacaacctcagatatgcagaggataccactgtaatggaagaaagcaaagaggaactaaagggcttcttgagggtgaaaagaggaaagggaaaaagctggctggaaactcaccattcaaaaaactaaaaccatggcatctggtcctaccacttcaaaggaaatagaaggggaaattttgaaccaatgataaattttgctttcttgggctccgaaataactgatgatggtgattttcgccatgaaatgaagacatttgctccttagaagaaaagctgtgacctacctaggcagcatattaaaaagcagagacatcactttgccaacaaaggtctgtctagtc

SEQ ID NO: 1241 - DNA, 436 bp, Bos taurus
  Clone ID: 06-LIB3058-004-Q1-K1-B5
aatctgatgagcaatatgcttgccatcttggttgccagaatcagctgccatacgcagaattgagacaagagcaactcatgtccctgatgccaaaaatgcatctactcttccctctaactctggtaagatcattctggagtgatatggtggactctgcacagagcttcataacctcttcgtggactttttatcttcaagctgatgatggaaaaatagttatattccagtctaagccagaaatccagtatgcaccacagttggagcaggagcctacaaatttgaaagactcatcactaagcaaaatgtcctatctgcaaatgagaagttcacaagcacataggaactatcttgaagatggagaaagtgatggctttttaagatgcctgtctcttaactcggggtggattttaaccgggactcttgtcctctctgtgat

SEQ ID NO: 1242 - DNA, 375 bp, Bos taurus
  Clone ID: 06-LIB3058-007-Q1-K1-B5
agactcaaatgggctcctgtttacacccagcgttaactggcggaggcggcaacgtgctcggggctgcggtcagcagatgctgaccagtgagcatcttgcagagtgcgaagccgccagctgatgtcgcggtactaacgctggacagcttgtaatgctcagacgaggaagaggatgaagaggagtatgacgacgtcaagtaccaggaggggaaccggacaatgcgccaatgctgctttcagaacggtttactatcatcctgcgtaatattctactgtgtgatgacagcgcgtactgtcactttgctggtgctgacatcttcaacgcgcacacgcgggcgctgagcactgaagccggagtgttcgagccccttaatca

SEQ ID NO: 1243 - DNA, 291 bp, Bos taurus
  Clone ID: 06-LIB3058-008-Q1-K1-B5
cggacgcgtgggtcgcgagcggccgcccttttttttttttttttttttttttttttttttttttttttttttttttttttttttttttttttttttttttttttattttttttttttttatttttttttttttttttttttttttttttttttttatttttttttttttggaaaaattttttgggaaaaacattttttatttaaaaaaaaaatttgtcaaaactttggaaacaaagttttttggtggggtattttaaaaaatgactaacaaaaaggagtgggggagtgccc

SEQ ID NO: 1244 - DNA, 357 bp, Bos taurus
  Clone ID: 06-LIB3058-008-Q1-K1-B9
caaattgtaaaaacttcatataatagtcttatttgatgaataaaatatttaaaaccctaaaaggtgacaagcagttatttgtaatgacaaactcttaactgatttgcctaaggattttagcattaaaagatttgctgctttgtaattgtcttttggaaatgtgtttattttctttggagtatgaatctttagtatctaaaacaatgtaatttgggggaattcctggtggtccagtggttaggacttcacgctttcactgccaagggcccgggttcagtccctggtcggggaactaagatcctgcaagctgtgcagcaccaccgaaaaaaagagagtgtaaatttgtcctggtactat

SEQ ID NO: 1245 - DNA, 407 bp, Bos taurus
  Clone ID: 06-LIB3058-009-Q1-K1-B5
ggcgcgtgccggccaggcctcccgctcgcctagtccgcgttcctcggcgcccctcgtccgcgcctgtcccgcgcctcccgtctgcgcaccccagccgcccgccaggcccccagccgctctccaggccgccaggccccgcgcccgacacccaggacaggcacgcgccccgcaggccgcccgccgcccgcgccgccatgggggtagagggctgcaccaagtgcatcaaatacctgctcttcgtcttcaatttcgtcttctggctggcaggaggtgtgatactgggcgtggccctgtggcttcgccatgacccgcagaccaccaacctcctgtatctggagctcggagaccggcccgcccccaacaccttctatgtgggcatctacatccttatcgccgtgggtgctgtg

SEQ ID NO: 1246 - DNA, 416 bp, Bos taurus
  Clone ID: 06-LIB3058-011-Q1-K1-B5
gagataccagttatatcccctcatttctgaaccttgattgcaaaataaatagggcatggagcaaactaaaaaaaaaaaaaaaaaaaaaaaaaaaaaaaaaaaaaaaaaaaaaaaaaaaaaaaaaaaaaaaaaaaaagaagaaaaaaaaaaaaaaaaaaaaaaaaaaataacataaaaataaaaagataaacgacaaaaactaatagaataatcataaaattatctttttatccccgccccaccaactatcgccttaaaaaagcatatattactagaaaaataatatagagttgttgactcctctagcttttagcacacctaggccaaagaaagtaaagccagcaatattgcacaagtcacccacccatgacagaatagacatgagtctatgataagatgaactaaaattcacatgc

SEQ ID NO: 1247 - DNA, 423 bp, Bos taurus
  Clone ID: 06-LIB3058-013-Q1-K1-B5
cagattagcaaatacttagcccaggacatttgagatcaaattgaaaatggaaagttttctcataagcccttagaggcagatctgaacaagcatacatagaagagggaaaggagagagtgaaaataaaacttaacattatgcagatttatgccttatttttcagcattgttgtgttttatgttggttctctcaacctggttatgcttcttattagatctgtatagtatggttaattagtgagttggatttatatttaagctacaattaatcttatctctatgatatttatttctatgccttttttaactactttgaatttttagatgatttattcaatctttagagcatcacaacggcaatatgtattgcccttaaaacactgcagacaaatatactatgagtgcaccattttaatccttacta

SEQ ID NO: 1248 - DNA, 413 bp, Bos taurus
  Clone ID: 06-LIB3058-014-Q1-K1-B9
cggacgcgtggggcaagtttacagtttcataccaattacccaaaacctaattaccaacagaccacagacctcctacttttatagacttgaatattgaattaatttcaattaggtttgatatttatttcatgttttcttatctaaagtttcctggaataaagttcaatattcaggaaaagaaagaaaaaaaaaaacccaaatgcttgagtttaagccatcttcaaaagaaacttgccttctaaatcattgtgtttcagaacattaagtgactataggtattgggtattagtgatggtaaactttgtgttgttctttatgaaatgatacatataactgttgggtgcatcagtgcttttaaagggggctgcataatataatagggttaactatgtatattcatgttaagaattaac

SEQ ID NO: 1249 - DNA, 414 bp, Bos taurus
  Clone ID: 06-LIB3058-015-Q1-K1-B5
gtggaaagatgggcagctgcaatcacagcctgaagagctggagcccaccttggatggggctgcagcccgggctttctacgaagccttgattgaagatgagagcagcacccctgaaacccagagagctcagcctgggcctgccagtaagagaaagaggaagaaaagaagaacgatgagggagactgcagcaggagcatcaggaggacatggacaaaggagatcccttgaggcaaaggacaagatgacccagcagatactgagggcagcccaggagggggacctagcaaaactaaaaaggctgttggatccccatgaggcaaggggagctggagggaatatcaatgctcgggatgctttctggtggacccctctgatgtgtgctgcccgagcaggccagagggcagctgtgcgcta

SEQ ID NO: 1250 - DNA, 88 bp, Bos taurus
  Clone ID: 06-LIB3058-016-Q1-K1-B5
gtggctttgaagaactattccaaatactttgtttaccaaactcatgaggagagggaacatgctggtagactgatgtagctgcataacc

SEQ ID NO: 1251 - DNA, 345 bp, Bos taurus
  Clone ID: 06-LIB3058-016-Q1-K1-B9
gccgtaattacaggattccgctcacagggggatgcatcacttgcccattactgacccggggaacacccactccactaatcccaatactagtaattattgaaactatcagcctttttattcaacctatagccctcgccgtgcggttaacagctaacatcactgcaggacacctattaattcacctaatcggaggagctacacttgcactaataagcattagcactacaacagctctaattacattcaccattctaatcctactaacaattctagagtttgcagtagctataatccaagcctatgtattcactctcctagtcagcctatatctgcatgacaacacat

SEQ ID NO: 1252 - DNA, 343 bp, Bos taurus
  Clone ID: 06-LIB3058-017-Q1-K1-B9
acgctagatcgcgagcgggcagacctttattggcttttccctctcgccacacgctccccagagactgttgtaaaggttttcctctcttggtggctgtggcaacttgccgacagcttgttttaaacttttatccggatagctttttgatacttgaatatttttaagttttatacagattctaattctttcttttcctaagaagattcatatacccactaagatgttagaatgtactctgtggacaagctgagtccacaactgcatctcgtctttcttcaagcgccagccctttttccatcgggagccgatcctgaagtctacttggcaccctgaatttgtgggg

SEQ ID NO: 1253 - DNA, 449 bp, Bos taurus
  unsure (434): unsure at all n locations; Clone ID: 06-LIB3058-018-Q1-K1-B5
aagatctaggcacaactttctggtgggaaggttatctcacaattgtggtgttgaggaggtaggggctcatctgagagtcccacgtcctgggtaggtgtcctggctctgtcctggccagctgagtgaccttagacaggtcatttcattcgttggtctcagtttccttatccataagagaagatattgtataccctggggaccaccagcttgtcttcagtgtccaaaaaacccaacagtaaccttatgtttagctgcaacaagggcttccctagcggctcagatggtaaagaatccacctgcaatgcaggagacccgggttcgatccctgggtcgggaagatcccctggagaggagttggcggcccacttcagtattcttgcctatagaattccatggacaaaggagcctgtccatggcgggctatagtccatggngtcgcaaagagttgg

SEQ ID NO: 1254 - DNA, 464 bp, Bos taurus
  Clone ID: 06-LIB3058-019-Q1-K1-B5
ctttgactactctgcgagtgaatttggcttaaatttcaacccaaccacctggttcattgacttgatgtgttggctggggctagccactgaccgcaaacgggcaaccaagcagatgatcgaagcccggaaagcccggactggagacgggagcgcctgactctggatcctccatctgcgcccgctgtcaacgacgcctccgttcatggcctttgttactacacttctcttgttcattggatcgtgggagggggcgcaagctggggagagaacagaatccacgcagtttgggggttttttttcgttggtctcaaaataatgtcaagatacaaactatcaatgaaaagaattttttaaaagtcagtgtaactatgctttaacactagaacgcggacatgtgatttaatctctgtagctacaacatgtcattcaaacatacatcgtcatgtgctggtacttgtacgtga

SEQ ID NO: 1255 - DNA, 395 bp, Bos taurus
  Clone ID: 06-LIB3058-020-Q1-K1-B9
gcgagcggccgccctttttttttttttttttttttttttttttttttttttttttttctatgattatgtattttttattacctttctgcatgttaaagcttaaataagcttcaggccttcgtatttattttagataatacagtagaaaaaattattttgtcctactgtaattttaaagggttctgttcaaattttaccatgattcaacaggtttttttccccatttcttttaacatttcctcaaagaatacccagcaaagggccaacctttgtcctctcgtctattactgccctgcacagtcagggtccaacctaagtactttgcagttcattattattgtttggaaaatgttctgggggcactatgtcagaggtcaaactgttatgagtaaagt

SEQ ID NO: 1256 - DNA, 468 bp, Bos taurus
  Clone ID: 06-LIB3058-021-Q1-K1-B5
cggacgcgtgggtgattatggagttttgtaatttagcagaactcttactggtagaaaaagaaaaaaatagacctgaattatgtgtaactttttggaaagttaaatttgattcaaaacagttgtccctgaaatacagttccattgtaaagttgtacagaaagttatagattctattgtgacactgggacttggagtgggtcacctatcatttggcattcgagtttcacagtaatttctagtgattctgcccattctgatcagggcttttagacacttggtatgttggggcttgttgccactgaaaagctcgtgaccacagacggccacagtgtcttcctccaaggaaactcgaagccagaaaagaacattcttggtcgagataactgggttatgacagcatgcaaaggtccactgctcatagaccacctgtgactccagccccttcccctatagcagcatgtttagtgg

SEQ ID NO: 1257 - DNA, 318 bp, Bos taurus
  Clone ID: 06-LIB3058-022-Q1-K1-B9
gcgccatgtgctgctcagacagcgtgtgctgggcattatggtgaagaccatgctgactggggaccctgctggtaagagtggccctaagacgcctatgactgatcacgggtgcatggatgaaccctactgtgatacactgatcacgaaccctatctgtgcacagagcggtgcgatgccagagcattctgacatgccatatccggtacacacagcgcatgaggtcttcttggtcgctggatctggaatgtgaatgatgctatgcaaagaccttgagttatacatatataaatgatacatgatggattctaatgggtcagt

SEQ ID NO: 1258 - DNA, 414 bp, Bos taurus
  unsure (365)...(367),(377): unsure at all n locations; Clone ID: 06-LIB3058-023-Q1-K1-B5
caaagcccctctgactgatgtttctcacaggtggtgatgtgtagggtcccttgtctttactctttcgttctgtctactggaactttctccaatgaaggaaaagtgttacatctgctccatccagtatggtagccaccagccacaggtggctattgaacacttgaaatgtgactggtgtgactgatttcatttcactttaattaatttaaactcgaatggccatctaagcttagtgcttaccatattggacaggacacttctatgctctagagcatgtagaactcatgcatttgtagaatttatttgaactctcaatttgctacttggggccacatctattcagcacccttgaaacttggacctgnnnactccatttnaaaaaattgtgaggtgctgtggaatcagttcagaata

SEQ ID NO: 1259 - DNA, 237 bp, Bos taurus
  Clone ID: 06-LIB3058-024-Q1-K1-B5
cccggctcgacccactcgtccgctgtactgccccatccgtaggcgtttttgggcagcgacacctacccatagatgtccgtctgtaatagcctgctggacaggggcatcttccttcaccttagcaatcatcacgaatttggccgcctactggccaccttccggtactacacagaccacctgcactctgacctatgtcagatcttttacaacccactggactggtaagagcattatatt

SEQ ID NO: 1260 - DNA, 409 bp, Bos taurus
  Clone ID: 06-LIB3058-024-Q1-K1-B9
catcagcatagattcctgtctacttgtcctttggctattcataaatttccccgcccttttcttttttttccagcctaagtaaccacacaattttaggcctcaatttttttttttctgtgaaggaacttgaagtgatgcatgtgtgaatttaagataccgaagtcttaaagtgacctgtacatgaaggaaaccgtaagatgagaaataaagaaagcctttgtaaggtggttgtaaaagccttatatgcaaaccttttaatatgtgtgtttactgcaagtgccatacttgtacagtgttaagaaggtaacatgggttacctttgcaccagcttcagtgttaaagctcaccctgttctttgaagcacccatgtgagtattagaagaattggccgcagttgcttagtttacat

SEQ ID NO: 1261 - DNA, 432 bp, Bos taurus
  Clone ID: 06-LIB3058-025-Q1-K1-B5
caaatctgaaaatgttcaagacttgctgctgttggatgtcactcctctttcccttggaattgaaactgctggtggagtcatgactgtcctcatcaagcgcaatactaccattcctaccaagcagacgcagactttcaccacctactctgacaaccagcctggtgtgctcattcaggtttatgaaggtgagcgtgccatgaccaaggataacaacctgcttggcaagtttgaactcacgggcatacctactgccccccgtggtgttcctcagattgaagtcacttttgatattgatgccaatggcatcctcaatgtttctgctgtggataagagcacaggaaaagagaacaagattaccatcactaatgacaagggccgcttgagcaaggaagacattgaacgcatggttcaagaagcagagaaattcaaagc

SEQ ID NO: 1262 - DNA, 319 bp, Bos taurus
  Clone ID: 06-LIB3058-026-Q1-K1-B5
ttcccggctcgacccatcgtccgcatttattactgccagagatttctatacagtttcctattttcatattgaggcatgtgacttttgtaattcaagtaagcatctgagttaattcatgatgtttgcccttttaataaaatataatggtagagttcatttcgaatgcaagttgcctttattataaatttgagtccgtctcggttatataatatcttgcatgataacctagctagctttttagcatttgccatatttatccaaaattaacttttcctgtaaaacattcatatcttatacagttccatttattttctaatgt

SEQ ID NO: 1263 - DNA, 416 bp, Bos taurus
  Clone ID: 06-LIB3058-026-Q1-K1-B9
caagaactccaataaatttaaacacaaggatgttccaacaaaactggtggcaaaagctgttcccttgccgatgactgtccgtggacactggtttttgagcccaagaactgagtatacagtagcagtgcagactgcctcaaaacaagttgatggtgattatgttgtgtctgaatggagtgaaattatagaattctgcacagcagactattcaaaagttcatctaacacaactgttggagaaggccgaagtgattgcatgacggatgctcaaattttctgttctttatcgtaaccagcacaaagaatattttgactacattcgagaacatcatgggaatgctatgcagccctctgtcaaggataacagtgtcagccatggctctcctatcagtggaaaattagaaggcatcttcttta

SEQ ID NO: 1264 - DNA, 260 bp, Bos taurus
  Clone ID: 06-LIB3058-027-Q1-K1-B5
caaaatctcttatgctttatgcttaaggacagatggttgatcataaaagttgtgttcgttcatattaaactgggggaaaatgtttagtttctcctattcagaaattgcaaaataggaaaagatatggaaaaacccctttccctccctcagtgtacatagttcagatctttctttgttccgtttataaactttatccatgttcgtcagtctgtttttgacttctctgctagtgttacaggtgaaaataaatcattaacttg

SEQ ID NO: 1265 - DNA, 402 bp, Bos taurus
  Clone ID: 06-LIB3058-028-Q1-K1-B9
gtgggaaattctttagtcgaagctctgactttattgcacaccagagagttcacacaggggaaaggccttttgtgtgcagcaaatgcgggaaagatttcatcagaacctcccaccttgttcggcaccaaaaagttcacactggagagaggccatatgaatgcaatgagtgtgggaaatcatatagcttaagctcccacctcattaggcaccagaaagttcatgctgcaagaaggctttaggagtgcttttaacacagcaggactcacgggaagagctctgtgacttcctgtagagagggagacgtcaaatcatgtgttgaaccgtgtatgtctagacactgccagttgaaagagagtttatgaacgccatgtacaggggaagctttcagaagctatgttgcac

SEQ ID NO: 1266 - DNA, 443 bp, Bos taurus
  Clone ID: 06-LIB3058-029-Q1-K1-B5
atttccatctgaggcttcaccaggatgaccttgaattccatatttctactaacattctgttcataattatttgtttattctctaagaagatagactgcctctcaagctctcctcttttctttctgaatccttactagaatcacctctaacatctatagttctaccaatattgttctcacagtaactcaggcttttattagcatgtatctcaaaaactcctccaagcctctgctcactacccagtttgcaaagccccttccacatttttaggtattgatacagcagcaggctatttcttggggtaccagaatcagaaaggaaaaggaatgatctgtattaaaaatatatgtataaaatcataaggataggaaaaagatccagttggtagccctagaaaatatatcagcatttgaaaactcataaaatttaaaacataaactctg

SEQ ID NO: 1267 - DNA, 321 bp, Bos taurus
  Clone ID: 06-LIB3058-032-Q1-K1-B9
cgccgccagcactatcactcccgccgttctgcgccgtcttcatgcctcatctataggtgcttctttctttccctctcttgtatcttattttattatctttatttattttttttttatattttttttattattatattattttttatttttattatatttattttaattttattatatttctttattattattttttttattttaattttttatttttttttatatttttatttttatttttatttttttttatatttaattatatttttttattatttcttatttatttttttttttttttatatttttattttatttttt

SEQ ID NO: 1268 - DNA, 411 bp, Bos taurus
  Clone ID: 06-LIB3058-034-Q1-K1-B5
ccaatttcttgaagggcacactctgccttatctcacacgagaaaaaagaccatctgaataggcctataactattaaagacattaaatgagtaattaataaccttccaaagcaggaaacagcaggcccagataagttcactggtgaattcttcaggaagaattctgaacatttaaggaaggaattataccaattctttacaatctcttccagaagctagaagcagaaggaatacttcataactcattatatgtagccagcattcccttaataccaaaaccaaagacattacaagtcaaggaaactacagaccagttatctcttgtgaacatagatgcagaagtgctcaattaaatattagcaaattgaacccaacaatgtttaaaaataattatacaccacaaccaggtgga

SEQ ID NO: 1269 - DNA, 441 bp, Bos taurus
  Clone ID: 06-LIB3058-036-Q1-K1-B5
tctgagctcgcatcatgccggttaaaggtggcaccaagtgcatcaaatacctgctcttcggatttaacttcatcttctggcttgccgggatcgcggtcctttctgttggactatggctccgattcgactcgcagaccaagagcatcttcgagcaagaaaataatgattccagcttctacacaggcgtctatattctgatcggagccggtgcgctcatgatgctggtgggcttcctgggctgctgcggagccgtgcaggagtcccagtgcatgctgggattgttcttcagcttcctcttggtgatatttgccattgaagtagctgcagccatctggggatattcccacaaggaggaggtgatcaaggaagtccagaagttttacgaggacacctacaacaagctgaagaacaaggacgagccccagcgggagacgctgaagg

SEQ ID NO: 1270 - DNA, 400 bp, Bos taurus
  unsure (152): unsure at all n locations; Clone ID: 06-LIB3058-037-Q1-K1-B5
ggcctggctagagaatgatcattgtattcgtttgcaggattcctttctgggcttcattttggaaactttgcttagggctatttttcttaattgcccacatttgatggagggtagaaggaattttgaatgtatttgatttattattattattnttttttttttagattaaaggatggttgtagcatttaaaatggaaattttttcttctggttagctagtatactgagtgtattctctgtaagtgtagctcaaatgggtcatcatgaaaagttcaagaaagctcgatgtcaaagttatatgggtgcgtaaggacatggcctgtcctaccaattcgcccctgacttgtctttcgaccctgtgcaagttaattaactatcatgtgcctcagttttccttctgt

SEQ ID NO: 1271 - DNA, 427 bp, Bos taurus
  Clone ID: 06-LIB3058-038-Q1-K1-B9
gtttggacgtccgcgaagatgcatttctttccaatggagattaaccccgagatgctgaacagagcgctgacccggctgggggtcgccggccagtggcgcttcgaggatgttctgggactggaggaggagtctctgggctcggtgccagcgccggcctgcgcgctgctgctgctctttccgctcacggcgcagcatgagaacttcaggaaaaaacatattgaagagctgaagggacaagaagtcagtcccaaggtgtacttcatgaagcagaccattggcaactcctgtggaaccatcggactcattcatgcagtggccaataatcaggacaaactggagttcgaggatgggtctgttctgaaacagtttctttctgaaacagagaagttgtcccctgaagacagagcaaagtgctttgaaaagaatg

SEQ ID NO: 1272 - DNA, 440 bp, Bos taurus
  Clone ID: 06-LIB3058-039-Q1-K1-B9
gagaaattatgtccaggccttcgctttttcccacctatgcccagactgtggcctccctgctgccctctccccatgccaatcgccacccactgctcactgtttcctctatcccactcttttctaaccccagctgacatctcccgtgcttcccccataacctactgattcccaccttttgatttcagcatctcttctaccagacccccacgaagtccccacactggcgtcacaaccccccttaggatgaaaatgaggaatagtcaacgtaacgcccaaacgtggctctttaatccccttctaattctgaatatttcgcgtgggtttactataatgtctattaatacatagcctcaatgatgagaggataagaaaaaaaaagaaaatttcagaaacaaaatctccaaattgctcgacacacacactgcgtcattgagctggtt

SEQ ID NO: 1273 - DNA, 204 bp, Bos taurus
  unsure (33),(69),(82),(88),(129),(150),(152),(159): unsure at all n locations; Clone ID: 06-LIB3058-041-Q1-K1-B5
ccggctcgacccactcgtccggcagtggtttanggatacactttgcgattcggacgacacactgacaancacgcgggctggnaaaaancacaagacacggcgcaaggcggaccggcacacagagaaaangcacgccagggaccacacagnanccgcccngcaaggagacacggaccagaaagaaagagacgccaacacgaggga

SEQ ID NO: 1274 - DNA, 327 bp, Bos taurus
  Clone ID: 06-LIB3058-042-Q1-K1-B9
ggacccactcatgcgcgggcgcgtgggcattaaatgaattcctccctggccgagctgtctcggaactagtccggagacctgggggcgcgagtggccctacatgagctctacaagtatatcaacaaatactatgaccagatcatcactgccctggaggaggatggcacggcccagaagatgcagctgggctatcggctccagcagatcgcagcagccgtggaaaacaaggtcacggatctgtaggctctgcaagagcgcgggccggccgtgccccaaccctgcctggacaagccctggactgcgtgggaagagaccggcttcttagat

SEQ ID NO: 1275 - DNA, 417 bp, Bos taurus
  Clone ID: 06-LIB3058-043-Q1-K1-B5
atttattggatcaacaaacctactaggtttattaccccattcattcacaccaacaacacaactatcaataaacctaggcatagccatccccctgtgagcaggagccgtaattacaggattccgcaataaaactaaagcatcacttgcccatttcttaccacaaggaacacccactccactaatcccaatactagtaattattgaaactatcagcctttttattcaacctatagccctcgccgtgcggttaacagctaacatcactgcaggacacctattaattcacctaatcggaggagctacacttgcactaataagcattagcactacaacagctctaattacattcaccattctaatcctactaacaattctagagtttgcagtagctataatccaagcctatgtattcactct

SEQ ID NO: 1276 - DNA, 433 bp, Bos taurus
  Clone ID: 06-LIB3058-044-Q1-K1-B9
cgcgatccgaaggatcggggagcgcgggtcgcgagtgcggagctcggttttcggagcgtggctagcagctggcacgatgggcggggagcaggaggaggatcggttcgacggcatgttgctggccatggcgcagcagcacgagggcggcgtgcaggagctggtgaacactttcttcagcttccttcgacgcaaaacagacttctttgttggaggagaagaaggcatggcagaaaagcttatcacacagaccttcaaccaccacaaccagctggcacagaaggcccggcgggagaagcgagctcggcaggagactgagcggcgggagaaggcagagcgggcagccaggttggccaaggaggccaagtcagagacctctgggccccagatcaaagaactgactgatgaggaggctgagaggctacagctggaaatt

SEQ ID NO: 1277 - DNA, 439 bp, Bos taurus
  unsure (411): unsure at all n locations; Clone ID: 06-LIB3058-045-Q1-K1-B5
ctgagctggtaaagaatccacccacatttcaagagacctgggcttgatccataagttgagaagatcccacggcaaagggaatgactacccactccagtattatggcctggagaattccaaggatacagcccatagggtcgctgaatcagacacaactgagctactttcactttcactttcaagtggattatatagaatatatatttttaaaggtacgttttatgatttttttgttttagttttacaagaacagtcataagggcatatgcagatacacttcaaaataagtttatataggatcactgaatcaatcacattcacttgagcgaaaaatatgaaagtcagtgtcctacagaacctgtatgcctgtgcaccaaaaagcatgtataaaagccttaattccattgattntaaaagtaaactcttgaggaataaaacc

SEQ ID NO: 1278 - DNA, 391 bp, Bos taurus
  Clone ID: 06-LIB3058-046-Q1-K1-B9
cgcggtttctggatgttaagaacgcggttggccaatcgcaagccagaagatgaaggttctgtgggttgccgtggtggtcgcgcttctggcaggatgccaggcggatatggagggagagctggggcccgaggagcccctgactacgcagcagccccgggggaaggacagccagccttgggagcaggcgctgggccgcttctgggattacctgcgctgggtgcagaccctgtctgaccaggtgcaggaggagctgctcaacacccaggtcattcaggaactgacggcgctgatggaggagaccatgaaggaagtgaaggcctacaaggaggagctggagggacagctaggccccatggcccaggagacacaggcccgcgtgtccaaggagctg

SEQ ID NO: 1279 - DNA, 408 bp, Bos taurus
  unsure (77): unsure at all n locations; Clone ID: 06-LIB3058-047-Q1-K1-B5
ctttatcagggagttgactctgtttgttacagtgatcacagaagagcagagagaattgtaggcttaaatacatgctntagagtttccatgaaggaaaacaggggcaataactttgaaaccttgtcagcagtttctgcccaccccacacactctttttcattaaatggaggtgagacaggatagtcacagtccactgtggtgccacattttccaataactaaggaacaagtgaatgcagctgtttgtagttggaattatatgttcatatggtgaaaacagggcttccttggtggctcagtggtaaagaattggcctgcaatgcaagagacacaggagacgcagtttcgatccttaggtcgggaaaatcccctggagagggaaaaggcaatccactccggtattcttttc

SEQ ID NO: 1280 - DNA, 425 bp, Bos taurus
  Clone ID: 06-LIB3058-047-Q1-K1-B9
attgaagttgagaaaatgacgatctcatttcaggtgaactgtcccgagtccatgtaaccaggctctaaagggagctgcattcactccatgttccttctcttgctttgcttttcccctataccgaccctcataaagacaaaccaaaccaccagagcaacctattacaaacctaccagaagggaaacgtggcagcagaagctaatggagaagaacccaaggcaagctggcccagacatttagccatgcaccattctgttaccttgcgagtctgataataaacttgctgctgacctgctgtgctcacagtagattctaaactggactaattattgtggggttttaatgagaagcctaagtttggaaatccttaagcagtgatgttgaaaaaaaaaatgaagctctgaacagtttaaaggtaacaatcc

SEQ ID NO: 1281 - DNA, 444 bp, Bos taurus
  Clone ID: 06-LIB3058-048-Q1-K1-B9
tgacagccagagtcctggaaggggtcctatgttgaaacatctctcaaggaaggtggggacaagaagcaggattcttttgtactttgtacataggctacacatttgtgtaaacagtttttgaataaaatatttttttttttcgtaaaaaaaaaaaaaaaaaaaaaaaaaaaaaaaaaaaaaaaaaaaaaaaaaaaaaaaaaaaaaaaaaaaaaaaaaaaaaaaaaaaaaaaaaaaaaaaaaaaaaaaaaaaaaaaaaaaaaaaaaaaagggggggccgttttaagggtcccaagtttacttccccgggcttgcaacgtaaaagtttttttatggggcccccaaatttaaattaatgggccgggttttaaaaacgttggaacgggaaaaaccttggggttccccaattaaatccctttggaaaaaatcccctttttgccagggggg

SEQ ID NO: 1282 - DNA, 321 bp, Bos taurus
  Clone ID: 06-LIB3058-049-Q1-K1-B5
gatgaaggagcagacaggcagcatttgtcagtacctgatgatacgcgccaagaggaagctgggcaaccacctgccctccaggctgtcggggcaggtggtgctgcgccgcgcccgctcgttgccctccgtgccgctgtcctgcgccgcctacagcgaggtgctgcccagctggatgcgcaacagcctgtcgctgggggatgtactggccaaatgggaggagtgccagcggcaactgctgctcgggctcttctgcaccaacgtggccttcccgccggacgccctgcgcatgcgcgtcccttgccgcccggcccccgagccccc

SEQ ID NO: 1283 - DNA, 368 bp, Bos taurus
  Clone ID: 06-LIB3058-049-Q1-K1-B9
cacggccgttacctgaccgtggcttccttcttccgaggccgcatgtccatgaaggaggtggacgagcagatgctggccatccagagcaagaacagcagctacttcgtggagtggatccccaacaacgtgaaggtggctgtgtgtgacatcccaccccgcgggctgaagatgtcctccaccttcattggcaacagcacggccatccaggagctgttcaagcgcatctcggagcagttcacggccatgttccggcgcaaggccttcctgcactggtacacgggcgagggcatggacgagatggagttcaccgaggccgagagcaacatgaacgacctggtgtccgagtaccagcagtaccaggacgccac

SEQ ID NO: 1284 - DNA, 402 bp, Bos taurus
  Clone ID: 06-LIB3058-050-Q1-K1-B9
cagccatgttccggcgcaaggccttcctgcactggtacacgggcgagggcatggacgagatggagttcacagaggccgagagcaacatgaacgacctggtgtccgagtaccagcagtaccaggacgccacagccgaggagggcgagtttgaggaggaggccgaggaggaggtggcctagggcgcctccatcacttcacttccgcaccctactaggaggctaacctttgaccaccaagaatccctgcttcacctcccagcctgactcacctctgaccctacaaccttgcacctcttccctgggccaaccgttgacctttgagccccactttatccccgcccttgagctccccacgttgaacacaccctccctcatgagccctgcttttcacttccgaccccac

SEQ ID NO: 1285 - DNA, 447 bp, Bos taurus
  unsure (386): unsure at all n locations; Clone ID: 06-LIB3058-051-Q1-K1-B5
aacgagcgcgcgcagtacatcgagttctcgaagcccttcaagtaccagggcctgaccattctggtcaagaaggagatcccccggagcacgctggactccttcatgcagcccttccagagcacgctgtggctgctggtggggctgtccgtgcacgtggtggccgtgatgctgtacctgctggaccgcttcagccccttcggccggttcaaagtgaacagcgaggaggaggaggaggatgcgctgactctgtcttcggctatgtggttctcctggggcgtcctgctcaattcaggcatcggggaaggcgcccccagaagcttctcggcgcgcatcctgggcatggtgtgggcggtgttcgccatgatcattgtggcctcttacaccgncaacctggcagccttcctggtgctggaccggtcccgaagagcgcattaccgggatcaacga

SEQ ID NO: 1286 - DNA, 375 bp, Bos taurus
  Clone ID: 06-LIB3058-054-Q1-K1-B5
cttatcctcttttcattgtaggctatgtattaatagacattatagtaaacccacgcgaaatattcagaattagaaggggattaaagagccacgtttgggcgttacgttgactattcctcattttcatcctaaggggggttgtgacgccagtgtggggacttcgtgggggtctggtagaagagatgctgaaatcaaaaggtgggaatcagtaggttatgggggaagcacgggagatgtcagctggggttagaaaagagtgggatagaggacccctccccgtcctcactggggccggcacccagtccggcagcgattcgggaaaagcgagtgtgctggtcagtgggtttctgggaggaagcagggtgggtggttatc

SEQ ID NO: 1287 - DNA, 418 bp, Bos taurus
  Clone ID: 06-LIB3058-054-Q1-K1-B9
gccgaaggcgaagaaggaagcccctgctcctcctaaagctgaagccaaagcaaaggctttgaaggccaagaaagcagtgttgaaaggtgtccacagccacaaaaaaaagaagatccggacgtcgcccaccttccggcggcccaaaacactgcggctcaggaggcagcccaaataccctcggaagagcgcccctaggagaaacaaacttgaccactatgccatcatcaaattccccctcaccaccgagtcagccatgaagaaaatagaagacaacaacacactggtattcattgtggacgtcaaggccaacaagcaccaaattaaacaggctgtgaagaagctctatgacattgacgtggctaaggtcaatactctgatcaggcctgatggagagaagaaggcatatgttcgactggct

SEQ ID NO: 1288 - DNA, 325 bp, Bos taurus
  Clone ID: 06-LIB3058-056-Q1-K1-B5
gcaaacccttctgttttattatttactcattatcgcctttcaacagctgtgctgtaacacatgtagatgcctgaacttgaattaatatacaaatcagtaatgtattctctatcttcacatttcgttctctacactacattattaatgggttttgtgtactgtaaagaatttagctgtatccaactagtgcatgaatagatcctctcctgattatttatcacgtatccccttagccaggtggatattatccttgtggtttgtgacccaactaagtcctacttggaaacatgctttaagaaacgatgggggaatgctttctgtgaac

SEQ ID NO: 1289 - DNA, 360 bp, Bos taurus
  unsure (34): unsure at all n locations; Clone ID: 06-LIB3058-056-Q1-K1-B9
tacgcctgcagtaccgggccggacaccacgcgtncgacccaattttgacactgcatcaccggtgttcacgtctcaaaggctatttggtgttacacagcttttatgagggaactgtgtctaggttcaccttagctatcatagcacgcccttcagtggagtattgtactaaactcaagctatagctttttatatacccctgccctcagggttccccaaatgtcggtgggccctacaacttcattctttacacccacaccaacctggagcactctgattgagccttcatggcagacaatgggggcctctttgaaaatatgcacagaaaccatgctattgaacgcccgacatatactaacctgt

SEQ ID NO: 1290 - DNA, 286 bp, Bos taurus
  Clone ID: 06-LIB3058-057-Q1-K1-B5
cagatatgagtacagtgttgatagcaaagtagtaataaaatgaggagaaaaaaaacaaaacaggagagtccagggtttgcctagctggcttatgttagttccaaattcctcacaatatttgtatttatctactttaatatcaataactaaggacttcagggacttccttggcagtccagtggttaagactgtgcacttccactgcagggggtgtgggttcaatcccttgtcagagagctaagatcccacatgctgtgggagtgtggccaaaaaataaaaatatttt

SEQ ID NO: 1291 - DNA, 388 bp, Bos taurus
  Clone ID: 06-LIB34-003-Q1-E1-B5
tgcccacatcccgctctcgcaggcagacatgagggcagagagaacttccttcctcctggccctggggctcctggtggctgggatccgcagtgtccactgcctcccagagaatgtggtggtgaaggaccagcacagaagggtggatggccacacgttagcctccagcaacaccgacttcgccttcagcctctacaagcagttggctttgaagaaccccaataagaatgtcatcttatccccgctgagtgtctccatagccttggccttcctgtctctgggggcccgtggctccaccctgacagagatcctggaaggtctcaagttcaacctcacagagattcaggagaaagaaatacaccatagctttcagcacctcctgcaggcgctc

SEQ ID NO: 1292 - DNA, 417 bp, Bos taurus
  unsure (369): unsure at all n locations; Clone ID: 06-LIB34-004-Q1-E1-B5
cggacgcgtgggtggcccaccagtttccagccctcacttcagaacagaagaaggcactctcagaaactgcccgacgcattgttgccaatgggaaggggatcctggctgcagatgagtccgtaggcacgatggggaaccgcctgcaaaggatcaaggtggagaacacggaagagaaccgccggcagttccgcgaactcctcttcactgtggacagctccgtcagccagagcatcgggggtgtgatcctcttccatgagaccctctaccagaaggacggccagggaaaactgttcagagacatcctcaaggaaaaagggatcgtggtgggaatcaagttagatcaaggagttgctccgcttgcaggaacanacaaagaaaccaccgttcaagggcttgatggcctttctgaacgctgtg

SEQ ID NO: 1293 - DNA, 414 bp, Bos taurus
  Clone ID: 06-LIB34-005-Q1-E1-B9
aaatcgctgagcctgtcacctgtgttccaggagcggaaccagcaatgtcgtcctcagccatgccagacgtacctgccccactcaccaatttgcagtttaaatatactaagatcttcataaacaatgaatggcatagttcagtgagtggtaagaaatttccagtctttaatcctgcaactgaggagaaactctgtgaggtggaagaaggagataaggaggatgttgacaaagcagtgaaggctgcaagacaagcttttcagattggctctccatggcgtactatggatgcttcagagagaggacggctgttaaacaagttggctgacttaattgaaagagatcatctgctcctggcgacaatggaggcaatgaatggtggaaaactattttccaatgcatatctgatggatttaa

SEQ ID NO: 1294 - DNA, 312 bp, Bos taurus
  Clone ID: 06-LIB34-006-Q1-E1-B5
gataaaggtgcctgcctgcgaccacagattgaaactacgagagatgaagtattgacctcatcggccatacacagactcaggtgtgccagtattcatcaatttggagaaagagctttagttcgcatggttagtaacgcgcctgagccacagttgtcctattgccgagtctgtaaaacttaccaaactagtcacagatctcgttcaagtccatcaagcatgctgtcatggtgatcgagctgaatgcgcacatgacacggcacatcgagcttgatacatacatgatccacaacatcatatcgccactgttctgac

SEQ ID NO: 1295 - DNA, 407 bp, Bos taurus
  Clone ID: 06-LIB34-007-Q1-E1-B5
aggacgcgtggggcaaaaacaggggctcaaacagctctctggaagaaacaggacagctcatcaaatccttcaaaagcaggtggtgtgggtgcctgcgcgccagagtctcttgatataaacatggctgccatgccaaacaacactctgaggatcgtgctggtagggaagaccggaagtgggaaaagtgcaactggaaacaccatcctcggggaaaaagtattcgagtctaagattgctgcggaagctgttaccaaaacttgtcagaaagcggtccgggaatggaaggggagagagcttcttgttgttgacaccccagggctctttgacaccaaggagaccctgaacaccacctgcagggaaatcagccgatgtgtcctcgcctcctgtcccgggctcaagccatcgtc

SEQ ID NO: 1296 - DNA, 389 bp, Bos taurus
  Clone ID: 06-LIB34-007-Q1-E1-B9
gacaggcttaaggggtcactgtcaaccaggacaaaaacagttgggatctgaatgcgtttgcatgtctccagaagaagactgtggccattattcagaagaaatctgtgtgcttgatacaacatccagcgattactttacttcatctgcttgtaagcttttggctgagaaatgtttaaataatcagcaactccattttgtacatattggttcatgcgaagagggtccacagttaaaatggggtctggaaaggataaaactttcatccagtagcacaaagaatgaatcctgtggctatgacacctgctacaactgggaaaaatgttcagccaccacctccaagtgtgtctgcctgttaccctcccagttgcaccatgggcggagaccaactc

SEQ ID NO: 1297 - DNA, 417 bp, Bos taurus
  Clone ID: 06-LIB34-008-Q1-E1-B5
agttggtccgcggggagcccaatgtctcctacatctgttctcgctactaccgggccccagagctgatcttcggagccaccgattacacctcatccatcgatgtgtggtcggctggctgtgtactggctgagctcctcttgggccagcccatcttccctggggacagtggggtggaccagctggtggagatcatcaaggtgctggggacaccgagccgggaacagattcgcgagatgaaccccaactacacggagttcaagttcccccagattaaagctcatccctggacaaaggtgttcaaatcgcgaacgccgcccgaggccatcgcgctctgctccatcctgctggagtacaccccctcctcgaggctctcgccgctggaagcctgcgcccatagcttcttcgatgaactgcgat

SEQ ID NO: 1298 - DNA, 403 bp, Bos taurus
  Clone ID: 06-LIB34-009-Q1-E1-B5
actcccaacacccccaacagcagcagcagcagcagcagcagcaacaaagcaaagtcaaagcaaccctggcgtgacacgcttggctgacctctgctgcctgctcacactggcaggaactctgtctcttcagagactcagccttcgaacacgatttcatgctgggtctttgcgccagacctagaaactgtgggacatactgatgttcatttaaaaattggattccactacagactcttccacctgattgtgaaagaaccctgggagccaggtgatctttccgtccgcagagttagtaaacctctgtgctacacactgcttcctaacacttactaaacagggaaatggattgcgcgcttcacgaagaatagcttgggtgatgactgctcttgctgggcccatgatc

SEQ ID NO: 1299 - DNA, 379 bp, Bos taurus
  unsure (333): unsure at all n locations; Clone ID: 06-LIB34-010-Q1-E1-B9
cccgcattcgatcgcgggccgtgccgtggtggtccacgcgggcgaggacgacatgggccgcggcggcaatcaggccagtctggagaacggtaacgccggccgccggcttgcctgctgcgtggtgggtctgtgtggccccgggccctgggcacgccaaacgcatgagcacgcggagcgcaagaagcggcggcgcgagagcgagtgtaaagccgtctgagcgctccacctaggtggtcctgagctccgaccgcgcgccgcagaccccttctatgcgctctgggagcctttccatgccccgactcccctctaagtgcccctaaaccgctccacgcncggacttctctccaggctcccgagattcccctctgtgtgcctcaac

SEQ ID NO: 1300 - DNA, 378 bp, Bos taurus
  unsure (325),(361): unsure at all n locations; Clone ID: 06-LIB34-010-Q1-E2-B5
attacagcaaggttttaggaaaacctaccacactatgtgagattatggggaaagctgacatgtggttgtttcgaagttactgggattttgaatttcctcagccctatttacctaatactgaatttgttggaggactgcactgcaagcctgcaaagcccctacctaaggaattagaagagtttgttcaaagctctggaaaagatggagtcgtggtgtttactctggggtcaatgatcaaaaacctctcagaagaaaagtctaatatgattgcatcagcccttgcccagattccacagaaggttctgtggagatacacaggaaaaanaccagaaacattaggagccaatacccgactatatanatggattccacagaatg

SEQ ID NO: 1301 - DNA, 181 bp, Bos taurus
  Clone ID: 06-LIB34-012-Q1-E1-B5
atagttctagatcgcgagcggccgcccttttttttttttttttttttttttttttttttttttttttttttttttttttttttttttttttttttttttttttttttttttttttttttttttttttttttttttttttttttttttttttttttttttttttttttttttttttttggag

SEQ ID NO: 1302 - DNA, 417 bp, Bos taurus
  Clone ID: 06-LIB34-012-Q1-E1-B9
cgactacaatggggagcggacactggatggttttaagaagttcctggagagtggtggccaggatggggccggagatgatgacgatctagaagatcttgaagaagcagaagagcctgatctggaggaagatgatgatcaaaaagctgtgaaagatgaactgtaacacagagagccagacctgggcaccaaacccggcacctcccagtgggctgcacacccagcagcacagcctccagacgcccgtagaccctcccagcgagggagcgtcgattggaaatgcagggaacttttctgaagccacacttcactctaccacacgtgcaaatctaaacccgtcttcctttgcttttcaacttttggaaaagggtttatttccaggccagcccagcccagcccatcttggggggcccttttttt

SEQ ID NO: 1303 - DNA, 416 bp, Bos taurus
  Clone ID: 06-LIB34-013-Q1-E1-B5
ttcgccggtcgacccacgcgaccaagctgaagctatttaacatcagtgtcttggctcccaactggctcccaattcctggtgaaactcctaaagggagactgttaaatcatgaaattaatcaccatccttttcctttgttccaggctgctaccaagtttaacccaagagtcttctcaagaaatcgactgcaacaaccaggatgtatttaaagctgtggacgctgctctgacaaaatacaacagtgaaaacaagagtggcaaccagtttgtattgtaccgcataaccgacgttgccagaatggataatcctgacacattttattccttgaagtaccaaatcaaggagggcgactgtccatttcaaagtaacaaaacttggcaggactgttactacatggactctgcacaagctgccac

SEQ ID NO: 1304 - DNA, 380 bp, Bos taurus
  unsure (342): unsure at all n locations; Clone ID: 06-LIB34-014-Q1-E1-B5
aacactgcttcacatgttttattttgtcatacattcttctagaactgggttcatttttccagttttgtagaaaaatagatgttccagccaccatttacttaactgtctagtctttaagaccaagcaatatgttttctggaaagatgaataagtctcacaactagctcatttttaaaaaattctttgaaacaaagaaataacttttttttttttttaactcccaaagcacagtatttcaacagcagcagccaacatggggttttagcagcttaacttgaccccctaaataaagctttgtataaaccagtgattttactacaaaaacactgtccttgaaagaanagagtggcagtcagacatcaatgcaaaacttggaatga

SEQ ID NO: 1305 - DNA, 303 bp, Bos taurus
  Clone ID: 06-LIB34-014-Q1-E1-B9
gtcccggtcgacccacgacgtccgactcggattacctgacttgcacagcagaaggatggtttccagaagaaccatgccttagagaatgtattttcaataatttggaaaatggatataccccaagtagtgaaagaaaagctgtacagggtgaaacagtaagggttcgctgctattatggctacagtcttcaagataatcagaacacaatgacctgcacagagagtggctggtctcctcctcccagatgcatcagtgtcaaaaatactggatgttctcaaccacctcaaatagaccatggaacca

SEQ ID NO: 1306 - DNA, 418 bp, Bos taurus
  Clone ID: 06-LIB34-015-Q1-E1-B5
ccaaactaaaacctgcattcatcaagccctatggcacagtgacagctgcaaattcttctttcctgaccgatggtgcgtctgcagtgctgattatggcagaggaaaaagctctggccatgggttataagccgaaggcatatctgagggatttcatgtacgtgtcccaggatccaaaagatcagcttttacttggaccaacgtatgctactccaaaagttctggaaaaggcaggattaacaatgaatgatattgatgtttttgaatttcatgaagctttctcaggtcagattttggctaatttgaaggccatggattctgattggtttgcacaaaactacatgggtagaaaagccaaggttggattgcctcctttggagaagtttaacaactggggtggatcactgtctctgggggcacc

SEQ ID NO: 1307 - DNA, 235 bp, Bos taurus
  Clone ID: 06-LIB34-016-Q1-E1-B5
ccgtccctaccctgcctgatccctgggtcgccttcctcagatccctttctctcagacagcgccaggacggggtggggccagggttggggccgagccccacagttgccaccctcgcctcacctttttttgtataatttaataagccaaacggtcacactaaaaacaaataaaatgaaaacaaaaaaaaacacaagatcacgaaacataacaagtgcacaaagacagtaaacaaact

SEQ ID NO: 1308 - DNA, 406 bp, Bos taurus
  unsure (384): unsure at all n locations; Clone ID: 06-LIB34-016-Q1-E1-B9
agagcatcctaggagaaaggtcagtcagttcagtcgctcagccctatccgactctttgcgaccccatgaatcacagcacgcaaggcctccctgtccatcaccaactcccggagttcactcagactcacgtccatcgagtcagcgatgccatccagccatctcatcctctggcgtccccttctcctcctgcccccaatccctcccagcatcagagtcttttccaatgagccagctcttcgcatgaggtggccaaagtactggagtttcatcttcagcatcattccctccaaagaaatcccagggctgatctccttcagaatggactggttggaactctttgcagtccaagggacactcaagagtcttctccaacaccacagttcnaaagcatcaattcttcgggact

SEQ ID NO: 1309 - DNA, 392 bp, Bos taurus
  Clone ID: 06-LIB34-017-Q1-E1-B5
cagagaaacaagcgtggatctctgccaaggtccatccaaactggagtggtgttcgcagaccccatgttagtgtgttcctttcttaagccctttgctctggagtaacttctccagcttcagctcaactcacagcttctccaagcatcaccctgggagtgttttcagacttttctcatacatgggagcagtaggttatctattcttcaaaatattccatgccaatcagtattttaaatgaagtgattctaacttgtgatttggattgggatccatagggaagcacatgcaccaaccaagatacaaaatgtcttgaaatgatattaccaaaattttaagtaggaaagttacctgaacacttctgcttccacttaactgactggcccgcaatattg

SEQ ID NO: 1310 - DNA, 291 bp, Bos taurus
  Clone ID: 06-LIB34-017-Q1-E1-B9
ccctttttttttttttttttaacaacatgaagattttgttattataaattttgaaacaaaatggaggaattttcacataatatttataaccttcaaagtacaatattaatacatgtctgtcagttagaaataacagcagtttgttaggctacagagtttaacataaaaccaatttacaaatgtgaaaagcagtagtggtccaatattcaccattacacatgaatctgtttcttccagaaatttttttaaaaattaaaacttcagtatcatgaaatattaaaataacaccac

SEQ ID NO: 1311 - DNA, 390 bp, Bos taurus
  Clone ID: 06-LIB34-018-Q1-E1-B5
agggcgaagaacgcggttggccaatcgcaagccagaagatgaaggttctgtgggttgccgtggtggtcgcgcttctggcaggatgccaggcggatatggagggagagctggggcccgaggagcccctgactacgcagcagccccgggggaaggacagccagccttgggagcaggcgctgggccgcttctgggattacctgcgctgggtgcagaccctgtctgaccaggtgcatgaggagctgctcaacacccaggtcattcaggaactgacggcgctgatggaggagaccatgaaggaggtgaaggcctacaaggaagagctggagggacagctaggccccatggcccatgagacacaggcccgcgtgtccaaggagctgcacgcagccc

SEQ ID NO: 1312 - DNA, 325 bp, Bos taurus
  Clone ID: 06-LIB34-019-Q1-E1-B9
ccgtaccaagaccctggtgaagaactgtattgtgcttatcgacagcacaccgtaccgacagtggtacgagtcccactatgcactgcccctgggccgcaagaagggggccaagctgactcctgaggaggaagagattttaaacaagaaacgatcaaagaaaattcagaagaaatacgatgagaggaaaaagaacgcgaaaatcagcagtcttctagaggagcagttccagcagggcaagcttcttgcatgcatcgcttcaagaccaggccagtgtggccgagcagacggctatgtgctagagggaaaagagctcgaattctatctg

SEQ ID NO: 1313 - DNA, 383 bp, Bos taurus
  Clone ID: 06-LIB34-020-Q1-E2-B5
actgcacccttctattcagcaatgggtctgaagtatatctggccattgggaatgctgagtgatagatggtacaaaattactgtgagtccgaactaccacaacccgagctacctataactgaatttattggatgactgcactgcaatcctgcgaagcccctacctaaggaattagaatagtttgttcaaagctctggaaaagatggagtcgtggtgtttactctggggtcaatgatcaacaacctctcagaagacaagtcgaatatcattgcatcagcccttgcccagattccacagaaggttctgtggagatacacaggaaaggaaccagacacattaggaaccagtacccgactatagtaaagtggattccacagcaatgat

SEQ ID NO: 1314 - DNA, 418 bp, Bos taurus
  Clone ID: 06-LIB34-021-Q1-E1-B5
gaagtgtaagttcagggacaaagcaagagttccacacaggtaaacttgtcactactaaaggagataaagagcttctgattgataatgagaaggtcacctctggtcacacaactaccactcgtcgttcatgctctaaagtcattacaaagacagttacaaatgccgacggtcgcacagaaacgaccaaagaagtggtaaagtctgaagatggttctgactgcggtgacgcggacttcgactggcaccatacttttccttcgaggggtaacctagatgatttctttcatatagacaaggatgatttcttcacccgtagttcacacgagtttgatggtaggacaggcttagcagccgaatttgcagccttaggggaatcgggctcttccagtagtaaaacttcaactcacagcaaacagtt

SEQ ID NO: 1315 - DNA, 427 bp, Bos taurus
  Clone ID: 06-LIB34-022-Q1-E1-B5
tacagtgtgtctgaaggtggattaaatgtcactctcaccatccggctacttatgcatggaaaggaagttggcagtatcatcggaaagaaaggagaatcagttaagaagatgcgcgaggagagtggtgcacgtataaacatctcagaagggaattgtcctgaaaggattatcactttggctggacccactaatgccatcttcaaagcctttgctatgatcattgataaactggaagaggacatcagcagctctatgaccaatagcacagctgccagtagacccccagtcaccctgaggctggtggtcgctgctagtcagtgtggctctctcattgggaaaggtggttgcaagatcaaggaaatacgagagagtagaggggctcaggtccaagtggcaaggggatttcgtccccaactcaacttgagcg

SEQ ID NO: 1316 - DNA, 409 bp, Bos taurus
  Clone ID: 06-LIB34-022-Q1-E1-B9
cggacgcgtgggcggatgatggcggccggcacggccttaggcttggccctgtggctactactgccgccagtgggcgtgggaggggcagggcccccgccgatccaggacggcgagttcacgttcctgctgcctgcggggcggaagcagtgtttctatcagtccgcgccggccaacgcaagccttgagactgagtaccaggtgatcggaggtgctgggctggacgtggatttcagtctggagagccctcagggagtgctgctggtcagcgagtcgcgcaaggcagacggtgtgcacacggtggagcccacggaggccggggactacaagctgtgctttgacaactccttcagcaccatctcggagaagctggggttctttgaactcatcgttgacagcctgcacgatgagg

SEQ ID NO: 1317 - DNA, 202 bp, Bos taurus
  Clone ID: 06-LIB34-024-Q1-E1-B5
gcacgagaaggaggtgatacaggacgtggtggcagaaaaatgaagaggatcctggttttcctccttgctgtagcctttgtgcatgctctacagagaggccgagattatgagggagatgaagtctgcaaggaccttgccagcctgggaacagatgacgtcagatcgttgtcgatggtccgacggagcagagcctttccgagtg

SEQ ID NO: 1318 - DNA, 413 bp, Bos taurus
  Clone ID: 06-LIB34-025-Q1-E1-B5
gcctcgagcagggagctggtggctcttccatccccagaccagccaagcctgtgagtgacaccccagacagaggaaccagagccatgcggagtctcagcggactgctgttgttactgactgcctgcctggcagtaaacgccagctccgtgcccacattgcccgatgacattcaagtgcaggagaacttcgacctgtctaggatctatgggaagtggttcaatgtggccgtgggctccacctgcccatggctgaagaggttcaaggagaagatgaccatgagcacagtggtgttgaaagcggggccgacgagcaaggagatcagcgtcaccaacactcacacgcggaaaggtgtctgtgaatcgatctctggtacttatgagaaaacaggcactgatgggaaatttccccaacac

SEQ ID NO: 1319 - DNA, 418 bp, Bos taurus
  Clone ID: 06-LIB34-026-Q1-E1-B5
cccatgtgcatgatggacaatcagggtggggctccaaattactaccccaatagctttagtgctcccgagcatcagccttctgccctggaacacaggacccacttctctggggatgtacagcgcttcaacagtgccaacgatgacaatgtcactcaggtgcggactttctatttgaaagtgctgaatgaggagcagaggaaacgcctgtgtgagaacattgcgggccatctgaaagacgcacagctttttatccagaagaaagcggttaagaacttcagcgatgtccatcctgaatatggctcccgcatccaggctcttttggacaaatacaatgaggagaaacctaagaacgcagttcacacctatgtgcagcatgggtctcacttgtctgcaacggagagagctaatctctgagggt

SEQ ID NO: 1320 - DNA, 403 bp, Bos taurus
  Clone ID: 06-LIB34-027-Q1-E1-B5
tccagtcctttggccacctcatgcgaagagttgactcattggaaaagactctgatgctgggagggattgggggcaggaggagaaggggacaacagaggatgagatggctggatggcgtcactgactctatggacatgagtctgagtgaaccccgggagttggtgatggacagggaggcctggcgtgctgtgattcatggggtcgcaaagagtcgggcgcgactgatctgatctgaagattaatattagcttgtctttcagttttgtcttgttataaacattttgagattttctgaaatgttccttcaggctttgattgatagagttcctcctcttttattcctgtttacttggtgaaagcaagaaaaaaacctggatgcagaatttccaaaatactctttcag

SEQ ID NO: 1321 - DNA, 347 bp, Bos taurus
  Clone ID: 06-LIB34-028-Q1-E1-B5
gattgagagccatatactctccttggtgacatgccgcaactagacacgtcaacatgactgacaatgatcttatcgatattcttgaccctttttatcatctttcagctaagggttcagaacacaacttttatcacaatccagaactgacaccaacaaaaatattaaaacaaaacaccccttgagaaacaaaatgaacgaaaatttatttacctcttttattacccctgtaattttaggtctccctctcgtaagccttatcgtactattcccaagcctactagtcccaacatcaaagcgactagtaagcaatcgctttgtaagcctccaacaatgaatacttcaacttg

SEQ ID NO: 1322 - DNA, 355 bp, Bos taurus
  Clone ID: 06-LIB34-028-Q1-E1-B9
aaccctgacctatgacagtgaatcgataatggcactctccatcacgcggggccttctgctgctggaagccctgtgctgcctgccccccatctccctggctggagttcgcgcggggacacgctgtcgacgatacacatcatacatcccaccaggaaacagcgtgccataagattgcgcccaacgtggccaactttgccttcaacatataccaccatttggcgcatcagtcgaacaccagcaacatcttcttctcccccgtgagcatggcatcagcctttggaatgctctccctgcgagccaacggcaacactcacactgagatcctgaagggcctgcgtttcaacctcacggagct

SEQ ID NO: 1323 - DNA, 421 bp, Bos taurus
  Clone ID: 06-LIB34-029-Q1-E1-B5
ggcagcgccgcgcaccgccatggccaaggagtggggctacgccgaccacaacggtcctgaccattggcatgaacttttcccgaatgccaagggagagaaccagtcgcccattgaactgaacactaaagagatcagccacgacccttccctgaagccatggacagcatcctatgacccaggctctgccaagaccatcctaaataatgggaagacctgcagggttgtgtttgatgatacttatgacaggtcaatgctgagaggtggtcccctcgccgcgccataccggctccgccagttccacctccactggggctcctcggacgatcacggctcggagcacagcgtggatggagtcaagtacgcagcagagctccatttggttcactggaattcagagtataacagttatgcaactgctctg

SEQ ID NO: 1324 - DNA, 393 bp, Bos taurus
  Clone ID: 06-LIB34-030-Q1-E1-B9
ggcagctgcagctgaggagctcctgggccagcatcttgtgcagggagtgatcagtgttcccaaggggatccgtgcggccatggagcacgctggcaagcaggagatgctgctgaagccgcacagccgcatccaggtattcgagggcgcagaggacaacctgccggaccgggacgctctgcgtgctgctctggccatcaggcagctggccgaaggcctgaccgctgacgatctgctgcttgtgctcatctcaggggggggctcagccctgctgcccgcccccatcccacctgtcacgctggaggagaagcagacgctaaccaagctgctggcggcccggggagccacaatccaggagctgaacaccatccggaaagccctgtcccagctcaaggg

SEQ ID NO: 1325 - DNA, 371 bp, Bos taurus
  Clone ID: 06-LIB34-031-Q1-E1-B5
cacttcgacccctatggccatgtggtggcatcagtggccaacgtcagcggtgccatgtgcttccggcagcacttcccccacagcagtatggagatgctcattctggtggatagcacccatgatttcgtggcatccgccagctccgggaatcctgtggacgtcgtcccgatccatagatacctgcccaacccggctctggacaggttcaatagcttcaaccagaggttcctgcagttcgtgcggcaaacggtccaagaccactagcaggactttgacacgaacagcatccaggacatcatatcgcgccctgttcaagcacagtgaggataactcccgagccagcagtcgcctcatctcccaggataagactg

SEQ ID NO: 1326 - DNA, 311 bp, Bos taurus
  Clone ID: 06-LIB34-032-Q1-E1-B5
gatggtttccataataactatgccttataaaatgtattttcaacaatttggaatatggatatatcccaagtcttgtaagaaatgctgtacaaggtgacacagtatgggttcactgctattaacgttacagtcctcatgataagcaagatactgtgacctgcacatatagtggctggtctcctcttcccagttgcatccgtgtcagctatactggatgttcgcaagcacctcaactataccatggtaacattaactcatctacctctgcagaagacctgacacaattacatgatcacatgctgtatgcacat

SEQ ID NO: 1327 - DNA, 423 bp, Bos taurus
  Clone ID: 06-LIB34-032-Q1-E1-B9
ggagattcttaattcctgctcggattgtgatgagatccagttcatggaagatggatcctggtgcccaatgaaacccaagaaggaggcatctgaggtttgccccccgccagggtatgggctggatggcctccagtatagcccagtccaagagggcaatccatcggagagtaagaagaaggttgaagttattgacttgacagtagaaagctcatcagatgaggaggacctgcccccgacgaagaagcactgtcctgtcacgtcagctgccatcccggctcttcctggaagcaaaggagtcctgacatctggtcaccagccatcttcggtgctgcggagccctgctatgggcacgctgggcggggatttcctgtccagtctcctactacatgagtacccgcccgccttccccctcggggctgatat

SEQ ID NO: 1328 - DNA, 398 bp, Bos taurus
  Clone ID: 06-LIB34-034-Q1-E1-B5
cctaaccatacttacgaatcagagttccacgtgagccagaacgagagggtgattgtacccatgatgagcctttacctggaaaccccttacttccgggacgaggagctgggctgcacgctggtggagctcacgtacaccagcaacgacagcgccctcttcatcctccccgatgagggcaaaatggaggacctggaagccaaactgaccccggagacgctgacgcggtggcgaaactccctgcagcccagacttatacatcgactcaggctgccaaggttttccatctccagccactaacagctgaaagacatcctttcccaactggggtatcaagaaaatcttcaccagcggatcggacttttcaagaatcacaggtgaccacaagcggggagtttccc

SEQ ID NO: 1329 - DNA, 425 bp, Bos taurus
  Clone ID: 06-LIB34-034-Q1-E1-B9
aaggccaaaaccagcccaggcacctcagtaccctcagaggcctcacccactgccaccccggagtcttccacatccttcccgtcagcccctgcctcaggcatgtcccaccccccacctactgccagagaagacaaaagcccatcggaggaatctgcccccacgacgtccccggagtctgtgtcaggctctgttccctcttcaggtagcggcgggcgagaggaagacgcagcctccacgctagtgacgggctctgagtatgagacaatgctgacggagatcatgtccatgggctacgagcgagagcgagttgtggctgccctgagagccagctacaacaacccccaccgagctgtggaatatctactcacgggaattcctgggagccccgagccagaacacggttctgtccaggagagccaagtttc

SEQ ID NO: 1330 - DNA, 292 bp, Bos taurus
  Clone ID: 06-LIB34-036-Q1-E1-B5
tctagatcgcgagcggccgccctttttttttttttttttttttttttttttttttttttgtttttttttttttaatatttggtatataatactcagctttaattcggagcaagtggaaggaggaaacgggggtccaggaaaaaaaggcaggtggggcagacctgatagtgagattacaaagagaggagccaccaagcggcagggtgggagcacaggacacagtgcagcacgtacgtcaagacaattgcaaagcaagacaagggacaggaccaggcgataagccaaggacaaa

SEQ ID NO: 1331 - DNA, 316 bp, Bos taurus
  Clone ID: 06-LIB34-037-Q1-E1-B4
gtgctcccaagacccagtgggggcacagttgctctcagatctctttaccaacagaaaggagaacattagtctcacgttttccgaagactgtctttacctaaatatatacacccctgctgacttgacgaagagaagcaggctgccggtgatggtgtggatccacggaggaggtctcatggtgggcggggcatcaacatatgatgggctggtcctctctgcccatgaaaacgtggtggtggtgaccattcagtaccgcctgggcatctggggattcttcagcacaggggacgagcacagtcgggggaactggggccac

SEQ ID NO: 1332 - DNA, 413 bp, Bos taurus
  Clone ID: 06-LIB34-037-Q1-E1-B9
acacgggcggcgcacggccattggccggtcgggccgcggcggcttcaaggacaccacccccgacgagcttctctccgccgtcatgaccgcggttctccaggacgtcaagctgagcccggcccagctgggagatatctgcgtgggaaacgtgcttcagcctggggccggagcgaccatggcccgaattgcccagtttctgagtgacatcccggagactgtgcctttgtcagctgtcaataggcagtgttcgtcggggctccaggcggtggccagcatagctggtggcatcagaaatgggtcttatgacattggcatggcttgtggggtggagtccatgtccctagctgacagagggaaccctggaaatattacttcacgcctggtggagaaggagaaggctaaagactgcctgg

SEQ ID NO: 1333 - DNA, 255 bp, Bos taurus
  Clone ID: 06-LIB34-038-Q1-E1-B5
atttaattatcagaagaacagtaaggactctaatacattgaccaagaacatagtggaactaatgagaggggattttgccaaagctaacaacaatgataatacatttaaacaaatatcagaagatctgagaagcagaattgagatcctgaggcgcaaagtcatagaacaagtacaacgtatcaacgttctgcagaaaaatgtcagggatcaactggtagatatgaaacgattggaagtggacattgagattaagat

SEQ ID NO: 1334 - DNA, 413 bp, Bos taurus
  unsure (296),(404): unsure at all n locations; Clone ID: 06-LIB34-038-Q1-E1-B9
gccacacgttagcctccagcaacaccgacttcgccttcagcctctacaagcagttggctttgaagaaccccaataagaatgtcatcttatccccgctgagtgtctccatagccttggccttcctgtctctgggggcccgtggctccaccctgacagagatcctggaaggtctcaagttcaacctcacagagatccaggagaaagaaatacaccatagctttcagcacctcctgcaggcgctcaatcaacccagcaaccagctgcagctgagcgtgggcaacgccatgttcgtgcangaggagctgaagctgctggacaagttcatagaagatgcccaggtgctgtactcctctgaggcctttcccgacaacttcagggatttctgagctgcaggagtctaatanatgactatg

SEQ ID NO: 1335 - DNA, 431 bp, Bos taurus
  Clone ID: 06-LIB34-039-Q1-E1-B5
aggacgcgtgggttgatatcggggaagcccccaaaggacaagacatggaaacagaagctcaccagaacaagctagaagaaatgattaatgagctcgcagtggcgatgacagctgtgaagcatgaacaggaatacatggaagttcgagagagaatacacagagcaatcaatgacaacacaaacagcagagtggtcctttggtccttctttgaagctcttgttctagttgccatgacattgggacagatctactacctgaagagattcttcgaagtccggagggttgtttaaaagccttttccccataatcccaaattcataattcactgtttaccataataatgtcattagtttctatgtttttattttctgaactatatcttcacagcttgtttctttgtgattaatagatactgggggaaaacacttttt

SEQ ID NO: 1336 - DNA, 324 bp, Bos taurus
  Clone ID: 06-LIB34-040-Q1-E1-B5
cagatgactactagcacgtcgaaccaacttagctctacccccaacaatcaacttaattggagaactatttgtagtaatgtcaaccttttcatgatctaacattacaattattctaataggagtaaatatagtaatcaccgccctatattctcgatacatgctaattagaacccatcgaggaaaatatacctaccacattaataatatctcgccttcctttacacgggaaaatgcactcatatcattacacatcctagccctactactccgaaccctaagcccagaaattattctaggaactctatactacagggaaagcggaaa

SEQ ID NO: 1337 - DNA, 419 bp, Bos taurus
  Clone ID: 06-LIB34-041-Q1-E1-B5
agggcgcgatgagctgggagctgctgctctggttgctggcgctgtgcgcgctgctggcgctcgtggtgcagctactgcgcttcctacgtgccgacgcggacctcaccctgctgtgggccgagtggcaggggcgacgaccagaatgggagctgactgatatggtggtgtgggtgactggagcatcaagtgggattggagaggaactggcttaccagctgtccaaactaggagtttctcttgtgctgtcagccagaagaatgcatgagttggaaagggtgaaaagaaagtgccttgagaatggtaatttgaaagaaaaagatatactcattttgccccttgacctgactgacagaagttcccatgaaatggctaccaaagcagttctccaggagtttggcagaattgacattccggtcaag

SEQ ID NO: 1338 - DNA, 357 bp, Bos taurus
  Clone ID: 06-LIB34-043-Q1-E1-B5
cccacgcgtccgcccacgcgtccgggggcgggaatctaatcagcatttatagaatattttcttctactacatcaaaatacacatttttaagctcagacgaaagtttgattgaggtagacaacattatgggtcacaattcaaagagaagaaatcctacaaagcattttctcagactgcaaatcaatgaagctaggcagtaatggaaaaaagaaaaaaagctggaaatatcaaaatatttgcaggtggaactacacactgccaaatagcatgtgggtcaaagaggtcccagacaatttttaaaatgtcttgaactagtgattcactaatttgtacaaacacacacgagattatgggaca

SEQ ID NO: 1339 - DNA, 183 bp, Bos taurus
  Clone ID: 06-LIB34-046-Q1-E1-B5
gggtcgacccacgcaaccgaattgcgtagctttcgtggtttggtgttctgtttatttactaagcgggcaggttacaggtgtgttgcaggagtcctgaagttttgctgccatatacgttttttctttttcgaaaatttttggtttgtcagactcgctaagttattttcatgcagcaagggtttt

SEQ ID NO: 1340 - DNA, 425 bp, Bos taurus
  Clone ID: 06-LIB34-048-Q1-E1-B9
aactttgccaaccaggttctcagctatggagctgaactggatgcagatcacccgggatttaaagatcctgtataccgagcaagacggaagcaattcgctgacattgcctacaactatagatatgggcagcccattcctcgagtggaatacacggaggaagaaaaaaaaacatgggggacggtattcaggaccctgaagtccttgtataagacccatgcttgctatgagcacaaccacattttcccccttctggaaaagtattgcggcttccgtgaagataacattccccagctcgaagaggtttctcagtttctgcagagttgcactggtttccgcctccgaccagtcgctggcctgctttcttctcgggatttcttgggtggcctggctttccgagtcttccactgcactcagtacatcagaca

SEQ ID NO: 1341 - DNA, 437 bp, Bos taurus
  Clone ID: 06-LIB34-049-Q1-E1-B5
agattttacaagcagaataaataaactaagagattcactatttaattatcagaagaacagtaaggactctaatacattgaccaagaacatagtggaactaatgagaggggattttgccaaagctaacaacaatgataatacatttaaacaaatatcagaagatctgagaagcagaattgagatcctgaggcgcaaagtcatagaacaagtacaacgtatcaacgttctgcagaaaaatgtcagggatcaactggtagatatgaaacgattggaggtggacattgatattaagatccgatcttgcaaagggtcatgcagtacagctttagaacataaggtacatctggaggactataaaaatcagcagaagcaacttgaacaggttattgccataaacctacttccctctagagacattcaatactttacattgataa

SEQ ID NO: 1342 - DNA, 451 bp, Bos taurus
  Clone ID: 06-LIB34-050-Q1-E1-B5
cggggtcacccacgcgtccggtaaaaccggagccgaggcttgggttccttctctggagaactctggaagttggatctgagcatatcctgcttgcagttggacggctgcgtgactccagtctcagccagttcttgctctcacagctgaggcccgctgcaggcaggttgctgacccccaaggactcttatgggggaggggagtgtgatatctgcaatggccgttcttggttaaaccagttccagagggactggatggacaaaacggatgggaaggaggacctgtgtgctgtccagtgcgtgcttctgagaaatgtctgctgacgagactgaagccactgccagcacccaggtgacggcagaggaaccggtacagcagcccagtgtggtggaccgcgtggccggcatgcccctcatcagctccacctgcaacatggtgaccgccgcctacacgt

SEQ ID NO: 1343 - DNA, 233 bp, Bos taurus
  Clone ID: 06-LIB34-051-Q1-E1-B5
ggcggctctggatccactgcccacaccccgctctcgcaggcagacatgaggacagagagaacttccttcctcctggctctggggctcctggtgtctgggttctgctccagggtccactgcctcccagagaatgtgaccccagaagaacagcacaaagggacgtctgtggatggccactcattatcctccagcaacactgacttcgccttcagcctctacaagcagttggcttt

SEQ ID NO: 1344 - DNA, 233 bp, Bos taurus
  Clone ID: 06-LIB34-052-Q1-E1-B5
gcttaataaagtaagcttgaaattcattattttatcatgaaaacttttttgccttaccagaccagttaatatgtgcactaacaagcacgactattaatctgctatcatgatacaatgtacggacttgaatatggcacatgttccttagagccaggaattgaaactgaagtagtgggtaagttaggaacaaaacatcactgattcaagctagccgaactgtaagaaactcaagc

SEQ ID NO: 1345 - DNA, 242 bp, Bos taurus
  Clone ID: 06-LIB34-052-Q1-E1-B9
ggagcgtctgggtcagggtttggaccatgtcccggctggtggaatgtgtccccaacttctcagaggggaacaatcaggaggtgattgatgccatcgctcgagcagtggcccagaccccgggctgcacgctgctggacgtggacgccggcccctccaccaaccgcactgtctacaccttcgtggggcgccctgaggacgtggtggagggggccctgaatgccgcccgcactgcccaccggctc

SEQ ID NO: 1346 - DNA, 214 bp, Bos taurus
  Clone ID: 06-LIB34-054-Q1-E1-B5
aaatgctacgaccaaattttcgtccagtgggacttgcttcatgttccctgcctcaagattcttctcagcaaaggcctgggactgggcattgtggctggctcacttctggtaaaactaccccaagtgtttaaaatactgggagccaagagtgccgaaggattgagtcctcaatccgtaatgctagacctagtggcattgactgggaccatggcca

SEQ ID NO: 1347 - DNA, 358 bp, Bos taurus
  Clone ID: 06-LIB34-055-Q1-E1-B5
cggacgcgtggggcaataactacagagaagaactacatactactgtagtgatgatgttcaagtttctggtacgtttattgtacattttaagacagaatcatttggtggtaaaaaatgaaaatgcagtaaagctgaagcaagaaaaaaaaaaaaaaaaaaaaaaaaaaaaaaaaaaaaaaaaaaaaaaaaaaaaaaaaaaaaaaaaaaaaaaaaaaaaaaaaaaaaaaaagggaagaaaaacaaaaagataaaaagaaaaaaaaaaaataaaaaaaaaaaaaagggggggccccccaagaggttcaaatttaattaacggggaaaggaaattcaaaacccctcaaagggggcccccaaa

SEQ ID NO: 1348 - DNA, 342 bp, Bos taurus
  Clone ID: 06-LIB34-056-Q1-E1-B9
tggagctacttccaggacgctccgtggccccgcgagtccgagtgcgggggccgcgatgcactccctactcggcctgctcctggtcttcgccggcagcaccttcgccctgtacttgctgtccacgcgactgcctcgcgcgtcgacactggtctcagccgaggagtctggagatagaacgttttagccggcgctttgtttgggccctggctggggcttctgctgtgctgcgtgctgacctcagtgggtgccacaggctgctacctgctctccagtgtttttggcaaacagctggtggtcttctactttcctgacaaagtggccctgctgcagaagaaggtggag

SEQ ID NO: 1349 - DNA, 223 bp, Bos taurus
  Clone ID: 06-LIB34-058-Q1-E1-B9
agtatctcttgtaggactactaatataccgatcccacctaatatcctcccttctatgcttagaaggaataatgctatccctattcgttatagcagccctaacaatcctcaactcacattttacattagctagcataatacctattatcctactagtcttcgcagcctgtgaagcagccctaggtctatctctactagtaatagtatcaaatacatatggtacc

SEQ ID NO: 1350 - DNA, 205 bp, Bos taurus
  Clone ID: 06-LIB34-059-Q1-E1-B5
ttccttcctcctggctctggggctcctggtgtctgggttctgctccagggtccactgcctcgcagagaatgtgaccccagaagaacagcacaaagggacgtctgtggatggccactcattagcctccagcaacactgacttcgccttcagcctctacaagcagttggctttgaaggaccccagataagaatgtcagtcttctccc

SEQ ID NO: 1351 - DNA, 211 bp, Bos taurus
  Clone ID: 06-LIB34-059-Q1-E1-B9
ggttctgaaaccctagaggacgcaactgtgagtgtctctgtcctagcctctcaacttgctttcctgtgtccagtgagtatcttcctgcctgaatgggcgctttatcctactggtgctgaggaaggcagggtctgtacagctgttccagtctaggaggatagcactgcagactccagtactagcctgtccagagcagcaagtgagaggaaat

SEQ ID NO: 1352 - DNA, 238 bp, Bos taurus
  Clone ID: 06-LIB34-060-Q1-E1-B5
actccgggatgactccatccatcagtggttcactgtctgtggctctgccttcctcaccatgtctccgtccctggattttcctcccctatatttcactagccctggtgcattttttggctcaactggatggacatatacttacgtacctaccagttggccatgatgtcttgtctttcattttttaactttacataacactacccatcaaaccctatatctgcaaactcatcaacaaaac

SEQ ID NO: 1353 - DNA, 372 bp, Bos taurus
  Clone ID: 06-LIB34-061-Q1-E1-B5
acccactaataaaaattgtaaacaatgcattcatcgaccttccagccccatcaaacatttcatcatgatgaaatttcggttccctcctgggaatctgcctaatcctacaaatcctcacaggcctattcctagcaatacactacacatccgacacaacaacagcattctcctctgttacccatatctgccgagacgtgaactacggctgaatcatccgatacatacacgcaaacggagcttcaatgttttttatctgcttatatatgcacgtaggacgaggcttatattacgggtcttacacttttctagaaacatgaaatattggagtaatccttctgctcacagtaatagccacagcatttataggatacg

SEQ ID NO: 1354 - DNA, 267 bp, Bos taurus
  unsure (20): unsure at all n locations; Clone ID: 06-LIB34-063-Q1-E1-B5
cacgcgtcagaaccccatcntacttatggcaaatgaagtgggtgacttttatttctcctcaccttcccatcagctccgcttaatccaagggtgtgtttcgtccaaatacacacaagaatgagaatgcccaaccgttttaagatttgggaaaagaacattttataagcccggtaccgattgccttttcacagtaactccagcagtgtccatttgatgagcatcttaaattaattaaccaactaactgaatttgcaaaaacatgttttg

SEQ ID NO: 1355 - DNA, 396 bp, Bos taurus
  unsure (11): unsure at all n locations; Clone ID: 06-LIB34-064-Q1-E1-B5
aaaacccacanaactttggcacaatgaaatgggtgactttaattcccctctccttcctctcagctctgcttattccaggggtgtgtttcgtcgagatacacacaagagtgagattgctcatcggtttaaagatttgggagaagaacattttaaaggcctggtactgattgccttttctcagtatctccagcagtgtccatttgatgaacatgtaaaattagtgaacgaactaactgagtttgcaaaaacatgtgttgctgatgagtcccatgccggctgtgaaaagtcactttacactctctttggagatgaattgtgtaaagttgcatcccttcgtgaaacctatggtgacatggctgactgctgtgagaaacaagagcctgaaagaaatgaatg

SEQ ID NO: 1356 - DNA, 213 bp, Bos taurus
  Clone ID: 06-LIB34-065-Q1-E1-B5
gagaagatggcgatgaagatgttggtgatatttgtccttggaatgaaccactggacttgtacaggtttcccggtgtatgactatgacccggcttccctgaaggaggctctcagcgcctctgtggcaaaagtgaattcccagtcactgagcccctatctgtttcgggcgtttaaaagctcagttaaaagagtcaacgccctggacgaggacagc

SEQ ID NO: 1357 - DNA, 248 bp, Bos taurus
  Clone ID: 06-LIB34-066-Q1-E1-B5
accccacaaaactttggcacaatgaagtgggtgacttttatttctcttctccttctcttcagctctgcttattccaggggtgtgtttcgtcgagatacacacaagagtgagattgctcatcggtttaaagatttgggagaagaacattttaaaggcctggtactgattgccttttctcagtatctccagcagtgtccatttgatgagcatgtaaaattagtgaacgaactaactgagtttgcaaaaac

SEQ ID NO: 1358 - DNA, 235 bp, Bos taurus
  Clone ID: 06-LIB34-067-Q1-E1-B5
acctcgactcttagcttgtcggggacagtaaccgggacccgtgtctactcctgttgcctgcgcctgctgacccgtagccaccatgcgtgagtgcatctccatccacgttggccaggctggtgtccagatcggcaatgcctgctgggagctctactgcctggaacacggcattcagcccgatggccagatgccaagtgacaagactattgggggaggagacgactccttcaacacc

SEQ ID NO: 1359 - DNA, 128 bp, Bos taurus
  Clone ID: 06-LIB34-068-Q1-E1-B5
tgctgaaagatgacgccacggataaggacttatcggacctggtgtccgagatggagatgatgaagatgatcggaaaacacaagaacattatcaacctgctaggcgcctgcacgcagggcgggcccctg

SEQ ID NO: 1360 - DNA, 211 bp, Bos taurus
  Clone ID: 06-LIB34-069-Q1-E1-B5
cgcttcctcctttcctcaggcatcaaagcagagaccacgggaacctagttcaccaggctcgatgctggaggccccgccatgacatccctaaggccccttctgatgctggccctgctggcgtgggttgttgtggctgaccaagagtcctgcaagggccgctgcaccgagggcttcaacgccaccagggatgtgtcagtgctgacgaagctct

SEQ ID NO: 1361 - DNA, 245 bp, Bos taurus
  Clone ID: 06-LIB34-070-Q1-E1-B5
gggcgaccacacgtccgctttcctcaggcatcaaagcagagaccacgggaacctagttcaccacggctcgaggctggaggccccgccatgacatccctaaggccccttctgatgctggacctgctggcgtgggttgttgtggctgaccaagagtcgtgcaatggccgctgcaccgacggcttcaacgccagcaagaagtgtcagtgtgacgagctctgttcttacgaccagagctgcggtgccga

SEQ ID NO: 1362 - DNA, 396 bp, Bos taurus
  Clone ID: 06-LIB34-071-Q1-E1-B5
agcttcatgccagaattttcctctatatttatgcggtagttatataaccctaactgtaaatatggggctaggttgaaatactctctatattgtattttacaaagcttcagggaatttttcattcaaattggcatgccctgtttgccaaattaaattaatcattactgtaagtctgttgaaatagggaaaactctcattttgctcttcatcttaccttattgcatatattttattaaagagttgtgttcaatttgggcaataaaccgaacataatggcaacaggcttttctttgggaacaaaatttgaaaaatatgcaaacttatttctttaaatgatgaatggcatcctattgagtctgagggggtaatttccacaaagataaactcttacaacat

SEQ ID NO: 1363 - DNA, 362 bp, Bos taurus
  Clone ID: 06-LIB34-071-Q1-E1-B9
cccgggccgacccacacgtcagctctcacatccatacatgaccacaggaaaaaccatagccttgactagatggacctttgttggcaaagtaatgtctctgcttttgaatattctatctaggctggttataactttccttccaaggagtaagcgtcttttaatttcatggctgcagtcaccatctgcagtgattttggagcccaaaaaaataaaatctgacactgtttccatgtttccccaactaatttccaataaggtattaaaataaatttaacctcaacaagaacaacaagggaaaaaaacttaagaatggcaatgccaatttccaaaaggcacaaaagctttcctggccaattaaccaa

SEQ ID NO: 1364 - DNA, 441 bp, Bos taurus
  Clone ID: 06-LIB34-072-Q1-E1-B5
actcgcgggccgacccacgcgtctacggacgctcgggcaaggtcatctttcatgtctactctgaagatcttaagaattgtcaggaattccttgacttaccagaagtcatcaattggaaacagcatctgcagatccaaagtacacagtccagcctgaatgaagtaatacaaaatcttgcagccacgaaatccttcaaagtcaagcgatcaaaaaacattctctacatggcatctgagacaataaaggaactgactccgtccttgctggatgtaaagaacttaccagttggcgatggcaaaccaaaggccatcgacccagagatgtttaagctctcatctgtggatcctagccacgcagctgtggtgaacagattctggcttttcggtggcaacgagaggagcctgaggttcatcgagcgctgtatccagagcttccccaaaa

SEQ ID NO: 1365 - DNA, 410 bp, Bos taurus
  Clone ID: 06-LIB34-073-Q1-E1-B5
aggggctgtgcccaggccctgaggggatttggggcccgcgtcatcatcacggagattgaccccatcaacgcacttcaagctgccatggagggctacgaggtgaccaccatggatgaggcctgtcaggagggcaacatctttgtcaccaccacgggctgtactgacatcattcttggccagcactttgaacagatgaaggatgatgccattgtgtgtaacattgggcactttgacgtggagatcgatgtcaagtggctgaacgagaacgctgtggagaaggtgaacatcaagccccaggtggatcgctacttgttgaagaacggacgccgcatcatcctgctggccgacggccggctggtcaacctgggctgtgccatgggccatcctagctttgtgatgagcaactccct

SEQ ID NO: 1366 - DNA, 363 bp, Bos taurus
  Clone ID: 06-LIB34-074-Q1-E1-B5
ataattgttggcgttaacaaaatggattccactgagccaccctatagccagaagagatacgaagaaattgttaaggaagtcagcacctatattaagaaaattggctacaaccccgacacagtagcatttgtgccaatttctggctggaatggtgacaacatgctagaaccaagtgctaatatgccatggttcaagggatggaaagtcacccgtaaggacggcaatgccagtggaaccaacctgcctgaagcctctggattgcattctgcaaccaactcgccaaattgacaaacccttgcgtttgcttctcaagaatgtcaataaaattggtggaatgggaacggtcccggtggttcttttgaa

SEQ ID NO: 1367 - DNA, 367 bp, Bos taurus
  unsure (40),(43),(49): unsure at all n locations; Clone ID: 06-LIB34-075-Q1-E1-B5
tacaacaccctaaagtgagtcgtattaaggtggacgtgtngangttcangcagatgacagaggccctggggcccagcaccatcagagacatggctgtggcaaggccggagatgcacgtaaaattgctgcagagcctgggcctaatatccaccctcatcaccgatggttccacgcccatcaacctcttcaacacagccttgggtttgctggggctcggggctgaggcccaacccccagccaagaagcccaccgggggacccagcgtccaagagggcttgcttcccatctccacggctgctcccctagctcttggttacaaccaggttgtgccttacctccgtactgcactgacaaataaaaccgacac

SEQ ID NO: 1368 - DNA, 400 bp, Bos taurus
  Clone ID: 06-LIB34-076-Q1-E1-B5
actcaggtgtgccagtattcaaaaatttggagaaagagctttaaaagcatggtcagtagctcgcctgagccagaaatttcccaaggctgagtttgtagaagttaccaagctagtgacagatctcacaaaagtccacaaggaatgctgccatggtgacctacttgaatgcgcagatgacagggcagatcttgccaagtacatatgtgataatcaagatacaatctccagtaaactgaaggaatgctgtgataagcctttgttggcaaaatcacactgcattgctgaggtagaaaaagatgccatacctgaaaacctgcccccattaactgctgactttgctgaagataatgatgtctgcaaaaactatcaggaagcataagaatgcctcctgagctcgttt

SEQ ID NO: 1369 - DNA, 382 bp, Bos taurus
  Clone ID: 06-LIB34-076-Q1-E1-B9
ccggctcgacccaaacgtcaggcggtggtgaacaaggacactgacttcatgctgaatgaactcagacgcaagaagtcctgccagatacgcctcggcaggtccgctgggtggtacatccccatgggcaagcgttatcacgaattgcctgatccacacgaatcaattcagagagctgcggccaacgtcgtctctgccacctgtgtcacatgtgcggatcaatcatcatttcccagactctgtcaactgtgtgcggcgaaaggtacagagacgtgtgcctgctccaattacgaaccatacttccgcgactcaagggccttaacatgtctgatggacggcgctgtggatcgtgcctctgtctcacattcaacggtactctacaatc

SEQ ID NO: 1370 - DNA, 388 bp, Bos taurus
  Clone ID: 06-LIB34-077-Q1-E1-B5
tattatgaatgaggtggtacagaatcttgcagccactaaatttgttaaggtcgagcacacacagtgcattctgtatgtgatgccggagacagcgaggaaacttcttccttccctgccagagacaaagaacttacctgttggatatggcgcacccaaagccattaaccaggagatgtttaagctctcatcaatggatcctacccatgccgctttggtgaataaattctggcattttggtggcaacgagaggagccagaggttcatcgagcgctgtatccgggccttccccaccttctgccttctggggcctgaggggacccctgcctcctggtccctgatggaccagacgggagagatccggatgggggcaacgctgccccagtaccgt

SEQ ID NO: 1371 - DNA, 450 bp, Bos taurus
  Clone ID: 06-LIB34-078-Q1-E1-B5
agtcgtactactctagcgacccttcgcagactcccaccgccacaggcctcgggccagcggcgaggagctgcctcccccagcccccgtcccgcggcccccatccgcgccgaaccccgcgccacgggcccggcgccatgagtgtgctggggcaactgagacaggaggccgagcagctcccgttccagatccgggatgcccgatgaccatgtgtggattcaacactgacccatatcacagctgggctggacccagtggggagaatccaaatgacgacacggaggaccctccgtgcgcacctgcccaacatctatgccatgcactgggggacagactcaatgctgctggtcagcgcctcgcacgacggcaagctcatcatttgggacagctacaccatcagcagggtccactccatcccgctgcgctcctcctgggtccttacctgtgcctact

SEQ ID NO: 1372 - DNA, 447 bp, Bos taurus
  Clone ID: 06-LIB34-078-Q1-E1-B9
agtcgtcttacagctaaaagtttcaaaacacaacttttatcacaatccagaactgacaccaacaaaaatattaaaacaaaacaccccttgagaaacaaaatgaacgaaaatttatttacctcttttattacccctgtaattttaggtctccctctcgtaacccttatcgtactattcccaagcctacgattcccaacatcagaccgactagtaagcaatcgctttgtaaccctccaacaatgaatacttcaacttgtatcaaaacaagtaatgagtatccacaattctaaaggacaaacatgaacattaatattaatatctctgatcctatttagtggatcaacagacctactaggcctattaccccattcattcacaccaacagcacaactaacagtaaacctacgcaaagccatcaccctgtgagcaagagcggtaattacagga

SEQ ID NO: 1373 - DNA, 380 bp, Bos taurus
  Clone ID: 06-LIB34-079-Q1-E1-B5
cactaataagcatttgtaaacaatgcattcatcgaccttccagccccatcaaacatttcatcatgatgaaatttcggttccctcctgggaatctgcctaatcctacaggtcctcacaggcctattcctagcaatacactacacatccgacacaacaacagcattctcctctgttacccatatctgccgagacgtgaactacggctgaatcatccgatacatacacgcaaacggagcttcaatgttttttatctgcttatatatgcacgtaggacgaggcttatattacgggtcttacacttttctagaaacatgaaatattggagtaatccttctgctcacagtaatagccacagcatttataggatacgtcctaacatg

SEQ ID NO: 1374 - DNA, 264 bp, Bos taurus
  Clone ID: 06-LIB34-079-Q1-E1-B9
cgtcagcggacgcgtggggtaataacatttttatatatcatgttactagaagtggtcagagtgagatcctctgtattcgttcattgctttcttcagcatgcctggcatatgttgctagccgaggacaactgctgcatcttagaggaaagatttggtagttattgccgaactacatgtgggattgcagatttcctgaataattaccatgccagtgtagacaaagatctaagaactttggaaggcatcttatatcaagttgagaac

SEQ ID NO: 1375 - DNA, 381 bp, Bos taurus
  Clone ID: 06-LIB34-080-Q1-E1-B5
agggcagcgcagcgatgggaatctacgatgatgtctgggctgacatcacctcccagatggcctcgattctgagcccgctgaccctcttgctgctgctgctgctggctggggacacagtcacctcacatatgatggtccgcccagggaacttacatcaaggggatagtgacagagattgccagagaggaggtattcacgatggagattctattcaacgtatagaggactctcgcagcttgctgataagtacactgaatgtcctgctagccactgtcaataagcctttcagtcagcatgctattgatgcgttctaatcaactatccaacgcactgctgatcccttgtgcctggagcccgtcacctcatggtctgactcaggaa

SEQ ID NO: 1376 - DNA, 414 bp, Bos taurus
  Clone ID: 06-LIB34-081-Q1-E1-B5
aggacgcgtgggtggctcccaacgtgcctgcggccgaaccggtcccggagtcacctaaaggcgtccgggccgtgctcttagggccgcccggagccggcaagggtacccaggcacccaaattggctaaaaacttctgtgtctgccatttggctaccggagacatgctgagggccatggtggcttccggctcagagctgggacagaagctgaaggcgactatggatgccgggaagctggtgagtgatgaaatggtcttggagctcattgaaaagaatttggagacccctccatgcacaaatggttttcttctggatggcttccctcggaccgtgaggcatgcagaaatgcatgatgacctcatggagaagacgaaagagaagcttgactctgtgattgaattcagcatcccagact

SEQ ID NO: 1377 - DNA, 385 bp, Bos taurus
  Clone ID: 06-LIB34-082-Q1-E1-B5
accagcaccaccctgcgatacgggctcctgattcccatgaaataaccggaagttgaagagaaacttcatgaagaaattgacaaggtgattgggccaagccgaatccctgccgtcaaggacaggctggacatgccctacctggatgctgtggtacatgagattcagcgattcatcgacctccttccctccaatctgctccacgaagcaacccaggacacagtgttcagaggatatgtcatccccaagggcacagtcgtaattccgacgctggactctgtcttacacgataggcaagagtttcctgaaccagagaagtttaaaccagagcactttctgaatgaaaatggaaagttcaagtacagtgaccattttaacgcgttttctg

SEQ ID NO: 1378 - DNA, 432 bp, Bos taurus
  Clone ID: 06-LIB34-082-Q1-E1-B9
agcatgaaaggaaggagacaacaaaaggaacatttgaaggggaatatgggtaaataatgagatgaaacttgagggaaagctctttgaatgctttttctcaagccttcaacactttttcttaaccttcaacaattaacatctcactattctcctgtggtctgatagaaacagacacattctttcaagagcagagcagtatcctgtaatcctagaccttttcatgacacttggaaaagaaatatcacaccctctgaatgcccataataaaatacctttgttgactatccatatacaacttgccaacatggtgtgcatttaacaagaagaatcccacaaatgtattttaatttccccaggaaaaatgtatggacctgagactagaacgaaaacgaagagatgcagaaagaatttgggggaatccatcattgtgcc

SEQ ID NO: 1379 - DNA, 259 bp, Bos taurus
  unsure (164): unsure at all n locations; Clone ID: 06-LIB34-083-Q1-E1-B5
ccacgcaatccgaattcagctgggtgctcctcttgagtcagccctatccacgggagagatgttttccgtgaaggacctctgcctggtcctgagtttggtgggtgcaattaagacagaagatggtagtgatcctcccagtggtgactttttaactgaaggaagangggtgcgtggcccaagacttgtggaaagacagcaatctgcctgcaaagagacaggctgggccttctgctctgatgaagactggaatacaaaatgc

SEQ ID NO: 1380 - DNA, 408 bp, Bos taurus
  Clone ID: 06-LIB34-083-Q1-E1-B9
aggaaagtcccacccactaataaaaattgtaaacaatgcattcatcgaccttccagccccatcaaacatttcatcatgatgaaatttcggttccctcctgggaatctgcctaatcctacaaatcctcacaggcctattcctagcaatacactacacatccgacacaacaacagcattctcctctgttacccatatctgccgagacgtgaactacggctgaatcatccgatacatacacgcaaacggagcttcaatgttttttatctgcttatatatgcacgtaggacgaggcttatattacgggtcttacacttttctagaaacatgaaatattggagtaatccttctgctcacagtaatagccacagcatttataggatacgtcctaccatgaggacaaatatcatt

SEQ ID NO: 1381 - DNA, 418 bp, Bos taurus
  unsure (338): unsure at all n locations; Clone ID: 06-LIB34-084-Q1-E1-B5
aggacgcgtgggcgacccacgcgtccggttattgcccaactacctgtggaattgcagatttcctgaataattaccaaaccagtgtagacaaagatctacgaactttggaaggcatcttatatcaggttgagaacagaacatcagaagccagagagctggtcaaagcaatccaaatcagctataaccctgatcaaccatcaaagccaaataacatagagagtgctaccaagaattccaagagtatgatggaagaaattatgaaatatgaaacactgatatcaacacatgaatcaacaattcgatttttgcaagaaatatataactcaaatagtcaaaanatcgttaacctaagagataaagtggtccagcttgaagcaaactgtcaagagccttgtcaagatacagtgaaaatacatga

SEQ ID NO: 1382 - DNA, 400 bp, Bos taurus
  Clone ID: 06-LIB34-085-Q1-E1-B9
ccgggccgacccaagcgtcagctcgggacttcgaggtgtgactttcctgctgaggctggaaggagaggaccagtttctggaggtggctgaggccccagaggccacgcaagccaccttcccggtccaccgggctgggaactacagctgcagctaccggacccacgcggcaggcaccccctcggagcccagtgccacagtgaccatagaggagctagacccgccgccggcgcccacgctgacagtggacagggagtcggccaaggtcctgaggccgggctcgtctgcctcgctcacctgcgtggcgcccctgagcggcgtggacttccagctgcggcggggcgcggaggagcagctggtaccccgggccagcaccagtccggaccgcgtcttcttccggctg

SEQ ID NO: 1383 - DNA, 477 bp, Bos taurus
  unsure (8): unsure at all n locations; Clone ID: 06-LIB34-086-Q1-E1-B5
gggtggancacacgtccgcgaatggtttagcaccaggcgccccacgaacgtgcggtgcgtgacgggcgagggggcggccgcctttccggccgcgccccgtgtcccgggacgaagggctctccgcaccggaccccggtcccgacgcgcggcgggggcgcgccgcgccgcgccccgggggacgcgggcgacggcccgccggcggggacggcgggggaccggctatccgaggccaaccgaggctcccgcggcgctgccgtatcgttccgcctgggcgggattctgacttagaggcgttcagtcataatcccacagatggtagcttcgccccattggctcctcagccaagcacatacaccaaatgtctgaacctgcggttcctctcgtactgagcaggattaccatggcaacaacacatcatcagtagggtaaaactaacctgtctcacgacggtctaaacccagctcacgttccctatta

SEQ ID NO: 1384 - DNA, 369 bp, Bos taurus
  Clone ID: 07-BOVMS1-002-Q1-E1-B3
aaccatatccattatgtgctcagcttccgttgcaagatacagagtcaaggtgtttaagtaattgctaattttcagactatgacacgcgtcaaggcttgagaattagttgtgaacaggagttttccattaactagacattctggccaaagatttaattacggcgaatggccaacataagcagatttcaaaattacaatctgtcagatagggaccaatcccagatgattcggtgactgttagcatctacaattcggtatccaaggttctttcactaaacttgtctagaattcagacctgtattcatgtggtggcaaacccttctctagcactgtatggcaatgtaggttgcactgtgctgcttaagtgaag

SEQ ID NO: 1385 - DNA, 377 bp, Bos taurus
  Clone ID: 07-BOVMS1-003-Q1-E1-B11
aaactccggggcaagaaaaccaaattgaaggaaaaaccaatgcccaaggtgaaacgcaaaagaagaaagattaaggaaaaggccaagttaacttgttcaaccaagggaaccaaaagaagcagaaccaaggaaaccaaaaggcaaggaacccgggaacaaattttgaactggaaggcctacaatcaaaaacttaacattggatctggaacattcatggcaattctgataaccttgacaacctttgcgagacctaacttgctcatatcaaagccgtcccttttggtccattgccctggacctgtgataactatggactagttctcttctcagttgtggctgaatgtaacgtgtacaataaatcatctcttttgctgtct

SEQ ID NO: 1386 - DNA, 420 bp, Bos taurus
  Clone ID: 07-BOVMS1-005-Q1-E1-B11
tatggctgatgatgcagatgaggtatccttcaaagatggagatgccattgtcaatgttcaagctattgatgaaggttggatgtacggcactgtgcagaggactggcaggactggcatgctcccagccaactacgttgaagctatttagacacttcaaagcatcaatcctgtctacatgacctacaaatcttgttagtatttcagtttagactctccactattctccaagttctcaaactgcctaatagtttttgttatgatttacggttgcaccatcccttaatttgtttctacacatacctaaataattcaccagtgtattagtacaattaatctatccaattattaaactagacttacctctattttctggacttgcacataaaacctgagacaacattaaacccataggtttttttt

SEQ ID NO: 1387 - DNA, 378 bp, Bos taurus
  unsure (370): unsure at all n locations; Clone ID: 07-BOVMS1-005-Q1-E1-B3
aacaaaacaagcttccagacccactcttgcatcacctactcttgaagaaaaagaagaagaaaagaagaaagctgagaagaacgtgacttctgaaacaaaaaagaaagacaaagaagatgtcaaaatgaaaactgagaaggaaactgccatggatgtgaaaagaaaagagcctagcaaagccccagaaaccaaacaagggacaataaaagttgcagcacaagcacctactaaaaaagaggaaaagaaggaagattccaagaaaacaaaaacacctacagaagaactacccaagggaaaaaaacaggaaaagaaagaacaacacgtggaaccagcaaagtccacaaagaaggaacagtcagctccaagtganaaacacat

SEQ ID NO: 1388 - DNA, 254 bp, Bos taurus
  Clone ID: 07-BOVMS1-006-Q1-E1-B3
gtcggccacccgtccgggctaattcagtaaattggtgggtttaaaattttgctgcttttttacataaagcttatgcctttcctaggaatttaagatgtaaatgtattctcacatgtgaatttgaaaattcaggggcctattatgagatgatacacatttttaaatgaacggtaatttcttcactaagttgttttccttccaaagtgtttacaccttaagccttaacatatatcttcactcagaaaagaatttta

SEQ ID NO: 1389 - DNA, 419 bp, Bos taurus
  unsure (40),(67): unsure at all n locations; Clone ID: 07-BOVMS1-007-Q1-E1-B11
gtcgaccgacccgtccgcccaaatcagactgagggaaganggaggaaaattccctggatccctgcanggttaatttattcaaaaaggaaatcgaaaaatactcaacatgcaaaaatcttgtggagaaaatgaaagaaaaccacagaacatgccaaaggctgaggaagaccgccctttggaagctgtaccacaggaggcagaaggaaatcctcaaccttctgaagaaggtgtaagccaggaagcagaaggaaaccttagaggagggctgactcagcctggtcagggatataaagaggactctcctgttaggcatttggaccctgaagaaatgataagaggagcagatgagttggaaaggcttaaggaagagataagaagagtaagaaacaagtttgtgatgatgcattggaagcaaagac

SEQ ID NO: 1390 - DNA, 444 bp, Bos taurus
  Clone ID: 07-BOVMS1-007-Q1-E1-B3
gtccgactaaaaattttatatccagagattcaaatcctctccttaacaaaatgttcataattaacatcttaatactaattattcccatcctattggccgtagcattccttacgttagtggaacgaaaagttctaggctatatacaactccgaaaaggtccaaatgtcgtaggtccatatggcctacttcaacccatcgccgatgcaatcaaacttttcattaaagaaccactacgacccgctacatcttcagcctcaatatttatcctagcacctatcatagctttaggcctagccttaaccatgtgaattcccctaccaataccctatcctcttatcaacataaacctaggagtcctatttatactagccatatcaagcctagccgtatactccattctctgatcaggctgagcttccaactcaaaatacgcactaatcggag

SEQ ID NO: 1391 - DNA, 470 bp, Bos taurus
  unsure (386)...(387): unsure at all n locations; Clone ID: 07-BOVMS1-008-Q1-E1-B3
ggtcgaccgacccgtccgggcaaccagaagttacgtgtatgtgagtattctcattcttcccaaattgcctttgaagtgtgaaaaaccattcttaccaagtagactactattcagcttctgctgttcctggcccactgttgaccctctaaggatgatgtacttagactttttcagttatgtgacccccccttttggaatggtgattttaaatgtgtgagtgcatgcatacatactcagatatttgcacccccacccactcccatctcccaaaagctagaacactgccaactaatctgttgtatgggtcctttagaaacacgtaattaacacttaaggatgggtgctgctaattctttgtgaaaatccaaatattgttaagggaccanngagatggcactaccccccgatttttcatcaaaaaatacacttgtttatgtaaacagatctttcaatattcatagtgacttttc

SEQ ID NO: 1392 - DNA, 378 bp, Bos taurus
  Clone ID: 07-BOVMS1-010-Q1-E1-B3
ggccgggctcaagggttcaagcataagttcgccttgaaggcaacttcataccccttcaatagggtcacctaaattcaattcactggccgtcgttttacaacgtcgtgactgggaaaaccctggcgttacccaacttaatcgccttgcagcacatccccctttcgccagctggcgtaatagcgaagaggcccgcaccgatcgcccttcccaacagttgcgcagcctgaatggcgaatgggacgcgccctgtagcggcgcattaagcgcggcgggtgtggtggttacgcgcagcgtgaccgctacacttgccagcgccctagcgcccgctcctttcgctttcttcccttcctttctcgccacgttcgccggctttccccg

SEQ ID NO: 1393 - DNA, 444 bp, Bos taurus
  Clone ID: 07-BOVMS1-012-Q1-E1-B3
ctggaagtcgaacatggcacgaaagagatcaagatatgtcttctccgactactatgaagaagcccgaaaagccattgttcagctctacatctccacaagattcctccccaagactgagcactttcccccagcaccaccatcccggaatacctggagttgcacacagtgtcatctcaactcggactccacctccgccctcaccgctgccatttccaacacaagctattcttccgccagccccatcgagctacttctctcatccaacaatcagatatcctccccacctgaatcctcaggatactctgaagaactatgtaccttcttatgattcatccagtccgcaaaccagccagtcctggtacctgggctagcttggttcctttccaagtatcaaataggacacccatcctaccggcaaatgtccaaaattacggtttgaacata

SEQ ID NO: 1394 - DNA, 412 bp, Bos taurus
  Clone ID: 07-BOVMS1-014-Q1-E1-B3
atcaggttcctcttgatctatgcgctacaatatttccaagctgcatatgtaaatttagatgtctgcggattaagctttgacaactgtgcatgtcattgagaagtcgagtatgccactttgcatttgcatctactcggttatttttagtcatagacatagcggagttcattgcactatcgaatgtcagtattgcctttatttcaggcttgatgatacttttacgtgtgattatacaatcatgatacaggttaagggacggggaatccccgagactgctgtggggacgttgtagtagaatctcgaagctgcaccgactgtactctaatgtggcgatttgtctatccgttttgcataatttcagcttctatagaatatatgtacatatttctgtgtaatctatattttggggaaa

SEQ ID NO: 1395 - DNA, 443 bp, Bos taurus
  Clone ID: 07-BOVMS1-017-Q1-E1-B3
ctccagtatactccgggtccatccccgtgtttccacgcagagcagagcagatgagagacgccatcaccaggaaatcagagctactattcccaggatctgatgtgagagcgcttggcctctgtgataacaccttgcctataaaagtagcatttctagtaaggtttcaaagaagaagaagaagcagggtgaggagagtaaagacagggaaaaagtgcctcctgggcaccttttctgtgtcatcttaaatttcacagaacttccgtttaccctttttctatgatgcgttatccatcctaaagaaatactgagtacttctatacgtgggcgtagaggagtctgcagattctgtagcagaaattaaagtgactgtgaacatcaagaatggagatgattatgcattttaacccttaaataaaccaataagaagtgcatcatttattaac

SEQ ID NO: 1396 - DNA, 388 bp, Bos taurus
  unsure (44),(60): unsure at all n locations; Clone ID: 07-BOVMS1-018-Q1-E1-B3
caacgcgtccgggcatatattacgggtcttacacttttctaganacatgaaatattgggngtatccctctgctcaaagtaatagccacagcatttataggatacgtcctaccatgaggacaaatatcattctgaggagcaacagtcatcaccaacctcttatcagcaatcccatacatcggcacaaatttagtcgaatgaatctgaggcggattctcagtagacaaagcaacccttacccgattcttcgctttccattttatccttccatttatcatcatagcaattgccatagtccacctactattcctccacgaaacaggctccaacaacccaacaggaatttcctcagacgtagacaaaatcccattccacccctactataccat

SEQ ID NO: 1397 - DNA, 407 bp, Bos taurus
  Clone ID: 07-BOVMS1-019-Q1-E1-B3
gggtcgacacacacgtccgtttataatgtgtacatacattgtttacctcattttgttatttttaaaacgaagccctgtggaaggaaatggaaaacttgaagcattaaactcagccgttctgttttgctgcgtaaaaaaaaaaaaaagaaaaaaaaaaaaaaaaggggggctgagatcgaggagctgagggccaccctgaagcagacagataggagcaggaagatcgcagagcaagagctcctggatgccagtgagcgtatccagctcctgcacacccagaacaccagcctgatcaacaccaagaagaagctagagacagacatcactcaaatccagggagagatggaggacattatccaggaagctcgcaacgcagaagagaaagccaagaaagccatcactgatgc

SEQ ID NO: 1398 - DNA, 408 bp, Bos taurus
  Clone ID: 07-BOVMS1-020-Q1-E1-B3
aatgtaaatggtcattttccttaagctataaagagagccctatggtgctcaatctgtacatgttattgtcataaaatgcatactgttggatacaaaccactgtgaacttttttgttttaaagggattgcttttttttctttcattgtcttaatgtacaaactagtttttatagctatcaacattaggagtaactttcaactttgccagcatcactggtatgtatatttaattaaagcacactttcgcctacggtatacttaaaatgacaattaaagccattattttaaatgtttgtgacttttttcctgaagccaaagtttctgttgaaatatatattgacactcccctaagtaagtacaaagtggcatggttgtgtaaacctgtcacctttgtggggattcaaaaac

SEQ ID NO: 1399 - DNA, 434 bp, Bos taurus
  unsure (275): unsure at all n locations; Clone ID: 07-BOVMS1-023-Q1-E1-B3
gtccggaatttaatgctgcgtaaaacatttgacctttatgcaaatgtccgaccatgtgtctcaatcgaaggctataaaaccccttaccatgatgtaaatattgtcaccattcgagagaacacggaaggagaatacagtggaatcgagcatgtgatcgtggatggagttgtgcagagtatcaagctcatcaccgaggcagcgagcaagcgcatcgcggagtttgcatttgaatacgcacggaacaaccaccggagcaacgtcacagccgtgcacanagccaacatcatgcgaatgtcagatgggctttttctgcaaaaatgcaaggaagttgcaagaaactgttaagatattaaatttaatgagatgtaccttgatacagtatgtttgaatatggtccaagacccgtcccagtttgatgttcctgttatgccaaa

SEQ ID NO: 1400 - DNA, 394 bp, Bos taurus
  Clone ID: 07-LIB188-001-Q1-E1-B3
acatgttcctggctgagtctcgggctgctggttgtcgttggccttcatcagctcctggaatctacaaagcgcatgaggcccattcacaaggtagagatgggaacctcgagtcaaaacgacgtcgagatgagctggattcctcaagaaactctgaaccaaatcaataaagcttcaccaagaaggttgcccaggaaacgggcacagaggagatcagtgggatctgatgagtaaatgttcctttgtacaaaaattcggtctttacttaacccgccctaatgtttttcggcctgatgggaattattgcagagaagacatatcaccatagaaggcggctactacttacgtgtggactgagcaatccgagtctgtggcgatcatattgctgaacatgcac

SEQ ID NO: 1401 - DNA, 434 bp, Bos taurus
  unsure (390): unsure at all n locations; Clone ID: 07-LIB188-002-Q1-E1-B3
tggccgcgggatacatgaacaataaacatagatgagaaaaatcagttgcactgaaacacttcagccaactgtagaacagagagggtgtggacactgagagggcaggggtggcaattccagaccagcttccctcaaagggctcgtggtccaagcccaaaaccagagggtgctctgggcaggaccgtgcagtgcagactctgggcaggcagacaagaaggaccagtcacaacagggactgctgctgggcacgagtttattagcttctggcctctcgctcctgcttgatgaagttgatcagcccattggtggaagaatcgtgagaagtcactgggctgctcccgtcaagctcaagttcaattttcctagccagctgctttccagctccactcnccactggtcaaagctgttgatgtcccagatgatgccctgaacga

SEQ ID NO: 1402 - DNA, 207 bp, Bos taurus
  Clone ID: 07-LIB188-003-Q1-E1-B11
accggctgcagtccaaatatgaccctcataacgaagcggggctccgaagctggattgaaggactcactgggctctccgttggcccatacttccacaagggtcttaaggatgggatcagattgtgcacactcattagtaaactggagtcaggctcaatccctaagattaaccgctccatgcagaactggcaccatctagaaaacctct

SEQ ID NO: 1403 - DNA, 235 bp, Bos taurus
  Clone ID: 07-LIB188-004-Q1-E1-B3
tgacccccggctgattgattccacctccaagagcagttcaatggggtccccggtgaaaggtggtgggccaacaaggtttctgaaaacaaggatttctgacatgggggctgccctggaaacaaccaattattcaaaccaccaacaacttttgtgacgatgtttgctcaccaatccggtgtcccctttcttgtctcaaagacttgttaatttacagtaaaccccaattgcctctaat

SEQ ID NO: 1404 - DNA, 397 bp, Bos taurus
  unsure (290): unsure at all n locations; Clone ID: 07-LIB188-005-Q1-E1-B3
tggcggcgggatacaagaataattaagtattttgcacaaaggaaatttgttgatgatccagtagaactgatgcccatagaacgcagtttcttaaggattttgttttgcttctttgagggaagcggccatcgtcattgtcagttcagctgggggttccttccttcatgctgaggacctgtgtctttgaagttgctgacgtcctcggaatcccaggcaggctggtgaatgctcaggggctcccatggaggcatctggtggcctcgggccccctttgcttgtaggaggcttancaagttccttgtcgcttcttcccactgggcatactccctcagctgctccttcaggctctcctcctcatgaagttgtggggactctgccacactcttttttcccatta

SEQ ID NO: 1405 - DNA, 372 bp, Bos taurus
  Clone ID: 07-LIB188-006-Q1-E1-B3
ggccgcgggatacacgcgcagcaaacactgggctgtcggacacttaatgggaaaaaagagtgtggcagagtccccaaaacttcatgaggaggagaccctgaaggagcacctgagggagtatcccagtgggaagaagcgacaaggaacttgctaagcctcctacaagcaaagggggcccgaggccaccagatgcctccatgggagcccctgagtattcaccagcctgcctgggattccgaggacgtcagcaacttcaaagacacaggtcctcagcatgaaggaaggaacccccagctgaactgacaatgacgatggccgcctccctcaaagaagcaaaacaaaatccttaagaaactgcgttctatgggcatc

SEQ ID NO: 1406 - DNA, 175 bp, Bos taurus
  Clone ID: 07-LIB188-007-Q1-E1-B3
tccaaagaatatagctttagatgtccttgaaaatatctagcatacggacgagatattggcaggccataaccaatatcgagccaatggggcagctcgggtaggctccaagctaagtctcggagcagttgaacacatgtagtctaaaatgcgatctatttttcggagtggaacccca

SEQ ID NO: 1407 - DNA, 429 bp, Bos taurus
  Clone ID: 07-LIB188-008-Q1-E1-B3
gcgggatactcctggtactgccactcggtgtcagctcgcacgtcactcagctgggcttcgataccactgatcagcgcctggatctgcgccagctgggctccgaagcgagcctccgtttccgccagtgtgccttccagggcggctttcatgctgagctgagactgcagctcgatctccagaccctggagggtgcgccgcaggtcggtgacctccgtcttgctgatctgcagctgctccgtgtggccagcgacctccctgttcagctcctcggtctggctgatgaaccaggcctcagcatccttccggttcttctcagcaatgacctcatattggcttctcatgtcactcaggatcttggctaggtcgatgcccggagcagaatccacctccacactgacctggccacccacctggcccttcagcacactc

SEQ ID NO: 1408 - DNA, 401 bp, Bos taurus
  Clone ID: 07-LIB188-009-Q1-E1-B11
accaggtggagcggacgcggacaggggcaagcttctctgtgcgcttcgtgaaggccgtgcaacatggcaggcccatctttatctgccaggcctccttccagaaggcccagcccagccccgtgcagcaccagttctccatgcctgctgtgcccccgccggaggaggtggttggccgtgaggacttcattggccaatttttaagggacccggagctccaggagaggtaccagagaggccccaggcagcttcagagaaccaggtgactgccggggggcctgctgtctaccacacaagccctgaggaagccttgaacagatgctgctctcaactggcctcagtgcttgacttggctcactctccacttcctccccacctctgacccaaaagaccatcatatatat

SEQ ID NO: 1409 - DNA, 389 bp, Bos taurus
  Clone ID: 07-LIB188-010-Q1-E1-B3
acaggagttgggagatgatcaggagagagatcaatggcagatactaaaggaagcttttgctggggatgatgtcatcaaaaacttcgctgaaagacaatacggaagctgtgcatgctagtaagccaattgacctgtacctgactctgcctgtctggggcgagtggggtggtataagcctgaagcccaatgccaagaccagacgccggtttctcattaaagcccctgagggtccaccaacgaaagactagaatttgccaaacttgaataacaatgacaagcggattacccatgcaacaacccatcacgtgcaggtgcatccacatccattcacacaccatcaacaatttaggacgaccatccagaaccccgtacgatctacatggtacacc

SEQ ID NO: 1410 - DNA, 249 bp, Bos taurus
  Clone ID: 07-LIB188-011-Q1-E1-B11
ccatggaggcgggatacggctggatccagtccaagtaggaggtgacgcgggtgtagatgccgggccggttgggcttcgcgcaaccatcgccccagctgaccacccccgcctgcagccaggtgccattcaccttgcagaccaggggccctccagagtcgccctggcagaagttcctcccgctgtccccagcacacagcatgtcctcccgcacgatggggacgttgtcccccgtggacaggccagagtggt

SEQ ID NO: 1411 - DNA, 358 bp, Bos taurus
  Clone ID: 07-LIB188-012-Q1-E1-B3
gccataggggcgggatacatcctgattggagcaaaagaactctcctgcacatcttcaggctggtcacctgcggtccctcagtgtaaagcattgtgtctgagaccagagatagaatatggaaggttatctgtggagaaggttagatatgttgaacctgaaataattactatccagtgtgagtctggctatagtgtggttggttctgaaaatatcacttgctcagaggacagaacctggtacccggaggtgcccaagtgtgagtgggagtatcctgaaggctgtgaacaagtagtcacaggcaggaaactcttgcagtgcctctcaaggccagaggaggtgaaattggccctggaagtgt

SEQ ID NO: 1412 - DNA, 374 bp, Bos taurus
  unsure (29): unsure at all n locations; Clone ID: 07-LIB188-013-Q1-E1-B11
tggccgccggatactgcgccagatcgtanagcacgttggtgcgtggcgggttggtgatgtccaggtagtaggtgagggccgtgcggtaggaggtggggcaggggaaggggtgcttcttgttggactcctcatcaatgttgttcacggacatgatgatgtccaagtcggcacccaggatctcgccaagctggttcaccagggcagagtcattaaccggataaacagccacatggtccccagactcatacctgattttggagtccgagatgtctaattccaggtgcatgaggtgccgctcggttccctggttcagcttccggttggtggtgacaacacccaggaatgggttcttggcgtcgaacgggggtttctgg

SEQ ID NO: 1413 - DNA, 215 bp, Bos taurus
  Clone ID: 07-LIB188-013-Q1-E1-B3
acgtgatcaggcataggcatcctatggccaaacctaccaatcgggtcccacggcagcatgatctttaccttgatgcctcatcaaacctgtctgagcatcatatggcgcacggcggtgtccacatagtacataacagggacctcactgtgcattatgacgctatccacattcttcaagaatttaaccctcagtcctcgacgtttcccagacaccac

SEQ ID NO: 1414 - DNA, 228 bp, Bos taurus
  Clone ID: 07-LIB188-014-Q1-E1-B3
gccaaggccgcgggatacatgctgaatataactgaatatatgcttatccctacggacactcctgcataaaaggaataacccaaatagggtcaaaggactggacaattgttccaatgcaaatttccagccccctaaaaaacacggttttgttttcacagtatgaattccctgaaatctgggacaaagtaacttagtgaaatgaagtcctccctcaacaactcggtccct

SEQ ID NO: 1415 - DNA, 374 bp, Bos taurus
  Clone ID: 07-LIB188-015-Q1-E1-B11
tggctggcaatggagtgacctcacagctggaactgggccctgggtcgtcatcttggttactggtccatctgcagctaatatacctaatccagaagtgcagtccattggaagggacactgaaatggacctcctgtgccaccagggttccagaagcgcgaagtctgtttaccttgtagtgggatatccttggcggcttgcttctcccacttgcagtcaaagctggcagagcttttctaactcctaaaatgttccctctaccagtatttctaaacatgttgcactttccttcacaggcatttggggtttttttggtgccctcctatctcctggaaagggaatggaagcagaagtgggacatgcagggctctgccatc

SEQ ID NO: 1416 - DNA, 351 bp, Bos taurus
  Clone ID: 07-LIB188-015-Q1-E1-B3
gataccgcttccagaagggaagcaggggacgagtccacgtggggaggaaggtgacaaagagcgagttatggaacatgagcccgacagatctgacgaaagtctcggtgtccttgggaatggagcgctccaggcagccaatacgtttctcaaacaggatgtaggaaatagcttccaaggcaaagaaatagaattggtgagcgatgtcaggcacgtggtcccccgaggcactctctgcccgcagctgtttcagttgattcatgaagtcattgatcacctcgttcagaacatccgtgtagagcgcatcctcggctggcttcagcatccgctggttcagagtctggcgcaaccggt

SEQ ID NO: 1417 - DNA, 310 bp, Bos taurus
  unsure (258),(271),(304): unsure at all n locations; Clone ID: 07-LIB188-016-Q1-E1-B3
ccattaccgccggatgaccattttgaccgtgaagatgtggctttgaagaactttgccaaatactttcttcaccaatctcatgaggaaatggaacatgctgagagactgatgaatctgcaaaaccagcgaagcggtcgaatcctccttcaaggtatcaagaaaccaaaccgttatgaattggaaaattggctgactggcatggtatgttcaaattttaaaaatccaaccagttgttgccatcctgaatactgtctgcangccatgtctacanggctcctgcctccaagtcccctccccttttcanggcctc

SEQ ID NO: 1418 - DNA, 410 bp, Bos taurus
  Clone ID: 07-LIB188-017-Q1-E1-B11
gaaaatttccaaacaggattgattccccctttgggaacttcacaagggggccctaggcaaacccatataggtagccaaacccaggagggttgattggcacgctggaaaaaaaattccatgacaaaggcacttttacctcattagggagctgagagttgactgggagtgtaagaggggtgaggaggaattatttcaatagaggtgttatttgcagactgctgagagaaatgaagagaattcacctacaccgggccatctgcaggatcagtaagggctgctgtatgtctctgctgccgcaacgggactgtaatgtatgcatcataaccagaaaggcctgcagcgcataggcccagcgcacctgcagcaattttggagccgtatcctcactcaacgagcaccacaatggaggt

SEQ ID NO: 1419 - DNA, 372 bp, Bos taurus
  Clone ID: 07-LIB188-017-Q1-E1-B3
gccacggggatcattaacctggacaaattcactcgagcccctccagggagctgtggctaaattcttctctgccagctgtgttccctgcattgatagacaagcataccccaacctgtgtcaactgtgcacgggggagggggagaaccagtgtgcctgctcctcccgggaaccatacttcggttattctggtgccttcaagtgtctgcacgacagggctggagacgtggcttttgttaatgagacgacagtgtttgagaacttgccacataaggctgacagggaccagtatgagcttctctgcctgaacaacagtcgggcgccagtggatgcgtacatcgagtgccaactggcccaggtcccttctcatgctgt

SEQ ID NO: 1420 - DNA, 393 bp, Bos taurus
  unsure (44),(50),(387): unsure at all n locations; Clone ID: 07-LIB188-019-Q1-E1-B11
acacctaagactctgaccatccagttgagccaaaaaatgccaangggtanggaaatataggggaggaaaatccagggaaggagacatggggaggaaggcagagccacagacagtgaaccactgaaggatggcgccatcctgtgacttcctgtctgtgaccacaaacggaggaggaaggagcaccccagataagtccctcacctcccagcatgccgatccctttctccatcaggcacatacattctttcctcctactctgattgctcagagatgggccccacctccccagccctctgcagggcttcctctgacctcttcccttccccagagcagggtctcagttgccaggcaatcaagccaaggtgggcttgtccttgcaggtcctcncgctgg

SEQ ID NO: 1421 - DNA, 397 bp, Bos taurus
  Clone ID: 07-LIB188-019-Q1-E1-B3
gccaaggccgcgggataccaagagcaccggtggagccccaaccttcaatatcacggtcaccatgactgccaagacgctagtcctgctgatgggcaaagaaggtgtccacggcggtatgatcaacaagaaatgttatgaaatggcttctcacctgcggcgttcccagtactcctcctgggtgtccctccccctccatatctcaccggccctccagagccacccccaaagagatgccttgagattctcaatgcagccatgccttggggctgccttggtgctgccacacttcaggctctcctccttccacaactttctgtggctttacagcaccttgggagccaacagagactacgtcgagagggcaccggtggcccgacagcctggtctggcatggggc

SEQ ID NO: 1422 - DNA, 411 bp, Bos taurus
  Clone ID: 07-LIB188-020-Q1-E1-B3
gccaccgggctactgtggcactccatgaaattagacgttatcagaagtccactgaacttctgattcgcaaacttcccttccagcgtctggtgcgggaaattgctcaggacttcaaaacagatctgcgcttccagagtgcaccaatggggccttgccagaaggcagttaaggccaactggttggcccttttgaagacaccaacctgtgtgctatccatgccaaacgtgtaacaattatgccaaaagacatccagctagcacgccgcatacgtggagaacgtgcttaagaatccactatgatgggaaaaacattacactctgtaaaaaaaaaaaaaaaaaaaaaaaaactcgtgtccgcacggaaaattgcgattgacagaggctatgacatcgcccagatatcccgacacct

SEQ ID NO: 1423 - DNA, 394 bp, Bos taurus
  Clone ID: 07-LIB188-021-Q1-E1-B11
tggccgcgggatactcccagctgcactacttacacgtcttccttcgtcttcacctaccctgaggctgactccttccccagctgtgcggctgcccaccgcaagggcagcagcagcaacgagccttcctctgactcgctcagctcacccacgctgctggccctgtgagcgggcagagaggggaggcagtgggcgtgcacgtggccactgcctgagttggcgcattacagagaggagaaacacgtcttccctcgagggttcccatagacctagggaggaccttatctgtgcgtgaaacacaccaggctgtgggcctcaaggacttgcaagcgagcatccccgtgtggactcaagtccttacctcttctggagatgtagcaaaacgcatggagtgtgt

SEQ ID NO: 1424 - DNA, 410 bp, Bos taurus
  Clone ID: 07-LIB188-022-Q1-E1-B3
ccggatacaccggatagattttcgcatacaaacagatatacaattagcacacaaacaatgagaccaccttcagcccacatactttttcagaaaagggtacagcgagctcagagctctgacacaggacagtgcacaaagtgctaaagcagatactgactgaccacgtgctagatgctgcaatgagacacgagctgtcaacaatcctgtctcctaacactgggcacgagtgagcccatggggcatctgtgaagatctgccttccggtttctcatggcaacatctggatgctctcatcacagtgttggggcattttatccatggttcctccttgagtttggaaaagtcacagtgggcaaggctgatagcagcaacccttacgtaaccagtgtcacaactgcacaattccgtaa

SEQ ID NO: 1425 - DNA, 423 bp, Bos taurus
  Clone ID: 07-LIB188-024-Q1-E1-B11
gtcttaattaggaaaattataagtgcatatacatcttttcattgatatgatttcaaagtagaaattgtttctcaaaaggagttgttacttgttgttttttttttttttaaaagcacactgcgtacaggagactgccttctccgggagcattttcacatattgtgggagatgccatttatacactacacaatacactatttatcacatttatcactgagcccatcactgcgcacaggcggagagtccaccgaggttgcacgagtacactctctgggagatttcaccttgtgaaagtcactgggctccctatgggacataaaagtgtttctcaaggagatttctacaggataggagatttcccaccgcaaatgcacagggatctcgagcccacagttctcatccagctacaaaagggggtatcac

SEQ ID NO: 1426 - DNA, 389 bp, Bos taurus
  Clone ID: 07-LIB188-024-Q1-E1-B3
accggctggggcatggcaggcggctctggcttcccacccttctgttcagagatgggggtggtgggcagtatttcatctttgggttccacaatgctcacgtgatcaggcagaggcttcttagggccaatcttaccagtcgggtcccaaggcagcatgatctttaccttgatgcccagcacaccctgtctgagcagcacatggcgcacggcggtgtccacatagtatttaacagggtccccactgtggatcatgaggccatccacaaacttcatggatttagccctctgtcctcgaagtttcccagacaccacgacctcgcagcctttggccccactctccatgatgaaccgcagcacaccatagcaggccctccgcacagcaaagcctcc

SEQ ID NO: 1427 - DNA, 315 bp, Bos taurus
  Clone ID: 07-LIB188-025-Q1-E1-B11
tttgcacccaggacctttgctggtgatccagtagagctgatacctatacagcgcagtttcttagccgattttgttttgcctctttgatggacgcggccatcatcagtgtcagttcagctgggggttccttccttcaggctgaggacctgtgtcttctcagttgctgacgtcctcggtctcccacgcaggctggtgaatgcacaggggctcccatggcggcatctggtggcctcaggccccctttgcttctacgaagcttagcatgttccttgtcgccttcgtcccactgggcattctctctcatctgctccttca

SEQ ID NO: 1428 - DNA, 349 bp, Bos taurus
  unsure (12): unsure at all n locations; Clone ID: 07-LIB188-025-Q1-E1-B3
gggacacaacantaatttgaaaaaccaaatgttaaagcccagatgcccactgttgaacgactctctatgacaagatatttcaacctctttcctggcaactgaaaataaaaatcacaggaaattcaaccatttatcagcttcaagaagcatttttatcagcacagcatccatgtttaaccttttgtctttcaattaaagtgaaaacatatgaactgttctttggggtcctctaagaaagaatagaatttcaattaaaacaatggatggatggaaataaagtagaagaagaaaactggattttcttgttatattgcatataatgcctgcactttactgagtgaagagaact

SEQ ID NO: 1429 - DNA, 425 bp, Bos taurus
  Clone ID: 07-LIB188-026-Q1-E1-B3
tggccgcggcatacccccatccaatttccacttgacattgatatctttggggtagaaatcattcaccaagcacacgacagagacagttccggtcttcagctgctcatcagatggtttgaagaggaagacggatggctcagcatcagaccttttgatctctaccttggttccttggccgaaagttcgaggaacatatgtaccaaaagaccttcctcctgatactgcgctgctggacctgcaaaacaacaaaataactgagatcaaagatggagactttaagaacctgaagaaccttcatacactgattctcatcaacaacaaaattagcaaaatcagccctggggcatttgctcctttggtgaaattggaacgactttatctttccaagaatcaactgaaggaattgccagagaaaatgcccaaaa

SEQ ID NO: 1430 - DNA, 141 bp, Bos taurus
  Clone ID: 07-LIB188-027-Q1-E1-B3
cccgaccgcctagggcgcgggatacctcagcataaccttccgcctcccacttgcgcttggtgatctgagcctccgtgtccgccgcggtccaggagcgcaggtcctcgttcagggcgaggtaatctctgccgtcgtagccgt

SEQ ID NO: 1431 - DNA, 372 bp, Bos taurus
  Clone ID: 07-LIB188-028-Q1-E1-B3
cgccatggacgcgggatagcaaaagaccttcctcatgatactgcgctgctggacctgcaaaacaacaaaataactgagatcaaagatggagactttaagaacctgaagaaccttcatacactgattctcatcaacaacaaaattagcaaaatcagccctggggcatttgctcctttggtgaaattggaacgactttatctttccaagaatcaactgaaggaattgccagagaaaatgcccaaaactcttcaggagctgcgtgtccatgagaacgagatcaccaaagtgcgaaagtctgtgttcaatggattgaaccagatgatcgtcgtagaacttggcaccaacccgctgaagagctcaggcattgaaaat

SEQ ID NO: 1432 - DNA, 423 bp, Bos taurus
  Clone ID: 07-LIB2809-001-Q1-E1-B3
ggccgccggacacagcacaaaagccaaaatgggcatatctctctggggatatggcactgctttctggggaacaggcaagactttggactgagaacgggacagcaccgcctgaggatgaaacattacacttggtcgcagatgctgctgatgctggtgcatccattactggatcatacgcatctgaaggtgcagattttcaacatcactgagagtcacgctctggctttcagtaaagggctcaactggatatttacggaacggcatttctttgtgcttaggagccatagcctccttcactttggagactcacattacttcaggctgaaagcattgcggcaccaccacaggggtttgagtaagacgacggatgttttgtgggacgctgttatggatgggcccaatgaacggatagactatatactg

SEQ ID NO: 1433 - DNA, 455 bp, Bos taurus
  Clone ID: 07-LIB2809-003-Q1-E1-B11
tgctcgccgtagccatggccaggcgatacacgaccctggagggacaggatgtggccaagtttatgaactggatggcggatgaatttaactatcccctgggcaatgtgcatctcttgggatacagccttggggcccatgctgctggtattgcaggaagtctgaccaataagaaggtcaacaggataaccggcttagatccagctggacctaacttcgagtatgcagaagctccaagtcgcctttctcctgatgatgcggattttgtagacgttttacacacattcaccagggggtcaccaggtcgaagtatcggaatccagaaaccagtagggcatgtggacatttaccctaacggaggcactttccaaccaggatgtaacattggggaagctctccgtgtgattgcagagagaggccttggagatgtggattagctagtgaagtgctccatgaac

SEQ ID NO: 1434 - DNA, 482 bp, Bos taurus
  unsure (450): unsure at all n locations; Clone ID: 07-LIB2809-003-Q1-E1-B3
gcgggatacaccagaaaggactgaatgggcatatctctctggggatagggcactgctttctggggaacaggcaggactttggactgagaaagggacagcacggactgaggaggaaacatgacagttggaggaagaggctggtgaggctggtgcatccaagactggagcagaggcagaggaaggtgcagattttcaacatcagtgagagtcaggctctggctttcagtaaaggactcaactggatatttagggaagggcatttctttgtgcttaggagccatagcctccttcactttggagactcccattacttcaggctgaaggaaaggcggcaccaccacaggggtttgagtaagaggagggatgttttgtgggaggctgttacggatgggcccagggaagggatagactagagactgtgtctgggcaaaggggtggattttatcctgnagttcatcctctgtttgctgctgtccctcact

SEQ ID NO: 1435 - DNA, 393 bp, Bos taurus
  Clone ID: 07-LIB2809-004-Q1-E1-B3
gccggatagaccaagctaatgggacaggatgtggccaagtttatgaactggatggcggatgaatttagctatcccctgggcaatgtgcatctcttgggatacagccttggggcccatgctgctgggattgcaggaagtctgaccagataagatggtcaacaggataaccggcttagatccagctggacctaacttcgagtatgcagaagctccaagtcgcctttctcctgatgatgcggattttgtagacgttttacacacattcaccagggggtcaccaagtcgaagtatcggaatccagacaccagtaggccatgtggacatttaccctaacggaggcactttccaaccaggatgtaacattggggacgctctccgtgtgattgcagagag

SEQ ID NO: 1436 - DNA, 244 bp, Bos taurus
  Clone ID: 07-LIB2809-007-Q1-E1-B3
tccttggccatgacggccagcgacatctccctgctggacgcccagagtgcccccctgagagtgtatgtggaggagctgaagcccacccctgagggcgacctggagatcctgctgcagaaatgggagaacggtgagtgtgctcagaagaagatcattgcagaaaaaaccaagatccctgcggtgttcaagatcgatgccttgaacgagaacaaagtccttgtgctggacaccgactacaaaaagt

SEQ ID NO: 1437 - DNA, 246 bp, Bos taurus
  Clone ID: 07-LIB2809-008-Q1-E1-B3
actttttgaagtcggtgtccagcacaaggactttgttctcgttcaaggcatcgatcttgaacaccgcagggatcttggttttttctgcaatgatcttcttctgagcacactcatcattctcccatttctgcagcaggatctccaggtcgccctcaggggtgggcttcagctcctccacatacactctcaggggggcactctgggcgtccagcagggagatgtcgctggccgccatggccaaggagt

SEQ ID NO: 1438 - DNA, 233 bp, Bos taurus
  Clone ID: 07-LIB2809-013-Q1-E1-B11
aatcccaagaagctaggcgtctttgccccaacccctgactttgtggacgtggaaaaaatcaaggtcaatttcatgaccatgcagaagatgtattccccagaaaagaaggtcatgctgctgctcagagtctgcaagctcatctataccgtcatggagaacaactcagggaggatgtacggagcagatgactttttgccagtcctgacctatgtcataccacaatgtgacatgct

SEQ ID NO: 1439 - DNA, 135 bp, Bos taurus
  Clone ID: 07-LIB2809-016-Q1-E1-B11
agctaacacgtctctgagccctgggccctgtagtgacaatggacatgtaaggactaatctccaggggtgcatgaatggcgctctggacttttgacccttgctcgatgtccctgatggcgcttttaatgcaacagt

SEQ ID NO: 1440 - DNA, 427 bp, Bos taurus
  Clone ID: 07-LIB2809-017-Q1-E1-B11
gccatgggtacgggatactgccaaagaccaaatttatcaatggtattaccagaagtggaagcagcattagcagagattcctggagtcaggagtgttgtgttgtttggagtagaaactcatgtgtgcatccagcagacagctctggagctcgttggccgaggtatcgaggttcatattgtcgtggatgccacatcatcgagaagcatgatggacaggatgcttgcccttgagcgtcttgctcgaaccgggatcattgtgactacaagtgaggctgttctgctacagctggtggctgataaagaccatccaaaattcaaggaaattcagaatctaattaaggcgagtgccccagagtcgggtctgctttccaaagtataagacatgtgaaagactggtatgctactcaatggtaagatgacaggactgt

SEQ ID NO: 1441 - DNA, 429 bp, Bos taurus
  Clone ID: 07-LIB2809-017-Q1-E1-B3
gccaagggcgcgggatacattgaaactttctacaacccaaagagattctgatttattttcaggacaactttccacattggtaggtcgatgagggatgacaaagggtaagacgtccaaccacccagtgcaggcatcaggggtttggctctggtttttacaactagtcaacaccacgaagtactgcgttgggatgggaacactggtgttgactgcatagtctgcaatttcatctggagcatcaaaatggccatcataatcataatcaaatactggtccactaaccacattgactccatttctttccatagcgtattttacaatgagaacactatggaagtaattccacatggttttgaatgcttcatacatagggaccaaattacttgtaattaaagcatcatattgactattggaagttctattatttgc

SEQ ID NO: 1442 - DNA, 423 bp, Bos taurus
  Clone ID: 07-LIB2809-019-Q1-E1-B3
cctggagagatagtggaaagcctttcaagcagtgaggaatctattacacgcatcaataagaaaattgagaagtttcagagtgaggaacagcagcaaacagaggatgaactccaggataaaatccacccctttgcccagacacagtctctagtctatcccttccctgggcccatccctaacagcctcccacaaaacatccctcctcttactcaaacccctgtggtggtgccgcctttccttcagcctgaagtaatgggagtctccaaagtgaaggaggctatggctcctaagcacaaagaaatgcccttccctaaatatccagttgagccctttactgaaagccagagcctgactctcacggaggttgaaaatctgcaccttcctctgcctctgctccagtcctggatgcaacagcctcaccag

SEQ ID NO: 1443 - DNA, 333 bp, Bos taurus
  unsure (285): unsure at all n locations; Clone ID: 07-LIB2809-020-Q1-E1-B11
ttaaaattttctttttaaatttgaaagccaacaactctgccctttataatgctaacctcatgttcttatttcttctcctatcttctttctcttctgttcccattatccttccctttgttttgtccctgtcaccttcctttctccttctcctcattgcccccaggcaagcaggtggtcagtcattggtgggtttccagcttccaaagcctagacaaccctgctgtagtctcaaactagtggtctttgccccggctgaccctttccttgagctgtctgagtttttanggtggatggctcaagctagagatatgacagaatcttctgggaagggcc

SEQ ID NO: 1444 - DNA, 361 bp, Bos taurus
  Clone ID: 07-LIB2809-020-Q1-E1-B3
cccagatggaaattgttcccaatagtgctgaggaacgacttcacagtatgaaagagggaatccatgcccaacagaaagaacctatgataggagtgaatcaggaactggcctacttctaccctgagcttttcagacaagtctaccagctggatgcctatccatctggtgcctggtattacgttccactaggcacacaatacactgatgccccatcattctctgacatccctaatcccattggctctgagaacagtgaaaagactactatgccactgtggtgaagactcaagtgaattctgagggactccacagttatggtctttgagggttctgaaaattccatgctcgacatgtcttttca

SEQ ID NO: 1445 - DNA, 379 bp, Bos taurus
  Clone ID: 07-LIB2809-021-Q1-E1-B3
aacttaaagaagaagctgagggtgagggtgcgtcggaattcaatcatgcctccaggggcgtctggggataaggacagttcttccgccaggcctgcacacacgtcctgtagcagcttctcattccagaactttgacagctgcttctgcgtggtcttgagggctgagatggttctgtccgccattccgccatagcagagggctagctcctttacctgcatgcttcctggctggaacaggactctcatgccgcacgtcaccttggctatgtcatcttctctccggcttgcctgcttgaatgctgagaaaaactcatcctccctgctgtacgggatctcaatggagagcagtatctcctctggacccagcagggtctttctgt

SEQ ID NO: 1446 - DNA, 303 bp, Bos taurus
  Clone ID: 07-LIB2809-023-Q1-E1-B3
ctaataacttatactgccacacacaaaacatatggtccacaaaaacattctcctttccttctgaacgttttacgatgtattgttatcattaaccaatcttttactattaaacttaaatggccaattgagacaaacagttctgagaccgttcttccaccactgattaagactggggtggcaggtattggggataatattcatttatccttctgagctttctgggcagacttggtgaccttgccagctccagctgccttcttgtccactgcgtctgatacacccacatcgactgtctgtctcatg

SEQ ID NO: 1447 - DNA, 366 bp, Bos taurus
  Clone ID: 07-LIB2809-025-Q1-E1-B3
agcagaaaggccagaatgggcatatctctctggggatagggcactgctttctggggaacaggcaggactttggactgagaaagggacagcacggactgaggaggaaacatgacagttggaggaagaggctggtgaggctggtgcatccaagactggagcagaggcagaggaaggtgcagattttcaacatcagtgagagtcaggctctggctttcagtaaagggctcaactggatatttacggaagggcatttctttgtgcttaggagccatagcctccttcactttggagactcccattacttcaggctgaaggaaacgcggcaccaccacacgggtttgagtaagaggagggatgttttgtggg

SEQ ID NO: 1448 - DNA, 377 bp, Bos taurus
  Clone ID: 07-LIB2809-027-Q1-E1-B11
gtgaaagtggaggttgtctactgagtaaggaatactgtttttaaggttctaaagctaaattcaaatgatgcattaatgacccaaaaactcagatctgatggtgtctgaatttctaacagtccttgctttgtgggtatgctgacaacttatctggatgccttacatcttttctaaacagtgttgcctctgaacgtgctctgctccctccctgctccctctttggagcccctttgcaccccagagcctgcagaagtggctggtataaaatggggcctggctagagaatgatcagtgtagctgtttgcaggattcctttctgggcttcattttggaaactttgcttagggctatttttcttaattgcccacatttgatgg

SEQ ID NO: 1449 - DNA, 360 bp, Bos taurus
  Clone ID: 07-LIB2809-028-Q1-E1-B3
tgtcacctaaatcgtatgtgtatgatacagaccgttatgtgtcacttgtagccgcgttctcacgacacgcggtcgaagcctaattgtgtagcatctggcttactgaggcagagcctatgcacgctctcgtgaagtgccgtcatgtcggtttggttggacgaaccttctgagtttctggtaacgccgtcgcgcacccggaaatggtcagcgaaccaatcagcagggtcatcgctagccagatcctctacgccggacgcatcgtggccggcatcagcggcgccacaggtgcggttgctggcgcctatatcgccgacatcaccgatggggaagatcgggctccccacttcgggctcatgagcg

SEQ ID NO: 1450 - DNA, 343 bp, Bos taurus
  unsure (43): unsure at all n locations; Clone ID: 07-LIB2809-029-Q1-E1-B3
atacagcagaaaagcctgaatgggcatatctctctggggatanggcactgctttctggggaacaggcaggactttggactgagaaagggacagcacggactgaggaggaaacatgacagttggaggaagaggctggtgaggctggtgcatccaagactggagcacaggcagaggaaggtgcagattttcaacatcagtgagagtcaggctctggctttcactaaagggctcaactggatatttagggaagggcatttcgttgtgcttaggagccatagcctccttcactttggagactcccattacttcaggctgaaggaaaagcggcaccaccacaggggtt

SEQ ID NO: 1451 - DNA, 408 bp, Bos taurus
  Clone ID: 07-LIB2809-030-Q1-E1-B11
acattgagttcttccagctctcttgcaagggccagagccaccaggcaggcaaggatgaggaccttcatggctcttgtcttccttttaggaaacgaggacaaagtaaacatgaagttcttcatctttacctgccttttggctgttgcccttgcaaagaatacgatggaacatgtctcctccagtgaggaatctatcatctcccaggaaacatataagcaggaaaagaatatggccattaatcccagcaaggagaacctttgctccacattctgcaaggaagttgtaaggaacgcaaatgaagaggaatattctatcggctcatctagtgaggaatctgctgaagttgccacagaggaagttaagattactgtggacgataagcactaccagaaagcactgaatgaaatc

SEQ ID NO: 1452 - DNA, 130 bp, Bos taurus
  Clone ID: 07-LIB2809-030-Q1-E1-B3
ggcctgaatgggcatatctctctggggatagggcactgctttctggggaacaggcaggactttggactgagaaaggggcagcacggactgaggaggaaacatgacacttggacgcacacgctggtgacgc

SEQ ID NO: 1453 - DNA, 446 bp, Bos taurus
  Clone ID: 07-LIB2809-032-Q1-E1-B11
gccattagggcgggatgcccaactatctgtgatcctatggatatagccctccaggctcctctgttcatggaattctcaaggtaagaatactagagtgggttgccatgccctcctccaggggattttcccaacccagtgatcaagcctgagtctcctgcattggtagaggggttccttaccactagcaccacctgggaagccccatttgttttctgatttttgcaaattaaatcagaatattggatgaagggaaaaatgatgtttctgatactagccacatttaccgagggcttacttcgcaattcaaaatggctcagacggtaaaccgtctgtctacagtgcgagagacctgggttcgattcctgggttgggaaaatcctctgcagaaagaaatgttgcctggaaaatcccatgaacagaggaccccggtaggccatagtccatgg

SEQ ID NO: 1454 - DNA, 452 bp, Bos taurus
  Clone ID: 07-LIB2809-032-Q1-E1-B3
gcctagggcccgggatactgttgcattaaaaacgccatcagggacatcgagcaagggtcaaaagtccagagcgccattcatgcacccctggagattagtccttacatgtccattgtcactacagggcccagggctcagagatgagttagcttcaagggggtacaaagaagcaaaacgaggtaaccacggggcagaggagttccaggaacagaaagaggacagaagcagcaaagacagcaggtgttcacaacttctcacagagccactgatccagcttctcagaacagagtgctttatgggccaaccagtagttaattcctactttatccagaatcttcttgacacacataatgtcatcagtaagatcatcatccaggaacttgtcacatgagatgttacagatgttgcttgagtgacggttctggtcgtctttgcaccaaattttaatattt

SEQ ID NO: 1455 - DNA, 273 bp, Bos taurus
  Clone ID: 07-LIB3057-001-Q1-K1-B3
ggacccagttcaccagacgactcatggtcctgtggacagctcaccagctatgatggctgcaggtaagctcgctaaaatcccctccattcgcgtgtcctaaaggggtaatgcggggggccctgccgatggatgtgttcagagctttgggctttagggcttccgaatgtgaacataggtatctacacccagacatttggccaagtttgaaatgttctcagtccctgcagggaaaggtaggtgggggctgtcaggagatcaggcgtctagctccct

SEQ ID NO: 1456 - DNA, 354 bp, Bos taurus
  Clone ID: 07-LIB3057-005-Q1-K1-B3
gcgagcggccgccctttttttttttttttttttgacatcgctacagagtctgtttttatttaaggggaggcccattagagccaagcatgcattacaaagctataaagctcagagaagtttgccagggaatggatcattaagaaccatctcagaaatggataggatgaatgtgggcttagcagttgttgttgtagatgattctgcaattcaagagcttaaggtaagtgtcaatcttgcttgaatccctgcgcaggcagtggagcaggttataaaaagcggaataacgtgcatcttcatccttagtttgcagggacgggagtcctgaccacacagggtagggctcagtctcttttg

SEQ ID NO: 1457 - DNA, 374 bp, Bos taurus
  unsure (235),(272),(317): unsure at all n locations; Clone ID: 07-LIB3057-006-Q1-K1-B11
cgagccccgaggggctctcgcttctggcgccaagcgcccggccgcgcgccggccgggcgcgacccgctccggggacagtgccaggtggggagtttgactggggcggtacacctgtcaaacggtaacgcaggtgtcctaaggcgagctcagggaggacagaaacctcccgtggagcagaagggcaaaagctcgcttgatcttgattttcagtacgaatacagaccgtgaaagcggngcctcacgatccttctgacctttggggttttaagcangaggtgtcagaaaagttaccacagggataactggcttgtggcggncaagcgttcatagcgacgtcgctttttgatccttcgatgtcggctcttcctatcatt

SEQ ID NO: 1458 - DNA, 417 bp, Bos taurus
  unsure (385): unsure at all n locations; Clone ID: 07-LIB3057-006-Q1-K1-B3
cgggttacccctgcagcgacgccccctggtcccaccggtaccactgctgctcccgcccggtcgtttctcggccgcgcaatgggcacccgcgacgacgagtacgactacctcttcaaagttgttcttattggagattctggtgttggaaagagtaatctcctgtctcgatttactcgaaatgagtttaatcttgaaagcaagagcaccattggagtagagtttgcaacaagaagcatccaggttgatgggaaaacaataaaggcacagatatgggacacggcagggcaagaacgataccgcgctataacatcagcatactatcgtggagctgtaggtgccttattggtttatgacattgctaaacatctcacatatgaaaatgtanagcgatggcttgaagaacctagagatcacgct

SEQ ID NO: 1459 - DNA, 414 bp, Bos taurus
  Clone ID: 07-LIB3057-009-Q1-K1-B3
catggaccgcagcgagcaaggtctgctgagaacagacccagtacctgaggaaggagaggatgttgctgccacgattggtgccaccgagactctgtcagaggaggagcgagaggagctgagaagagaacttgcaaaggtagaagaagaaatccagactctgtctcaagtgttagcagcaaaagagaagcacctagcggagccctttgtttatcaccatctgtgacagtaaccatttcagtgtcatggttattatgctacttatagctacttatttttcaccagattaaaattttagttttggaggaaattataaggtaacattctaaatcaagtatattgtattatcaataggttgaaatttgaacactgtcctcaaacgttcagttccaaagccctgaaagtttttttagatct

SEQ ID NO: 1460 - DNA, 411 bp, Bos taurus
  unsure (380): unsure at all n locations; Clone ID: 07-LIB3057-010-Q1-K1-B11
ccgaattgaaataagttctttatacagtggtctctctgaatcagttcagagatgggatgggggagaattgctttctaggtttcaaacttctatgcattagtgcagatgttgtgaatgtgtaaagatattagtaatttgattatttctatgtatgtttttaaaagaatcgtttgttctttttgagatattataccttttttttggcattctaccattgtagtctaaacctaaaacttttatgcctcaatttagactatattttttaaaggagcacctctctgtggtgcagagaactttttaaaaagtcccattaagatctgagtcttggtactaagtgttctgtataatttgtggatgcttgatgcttgtcctccctgcangaggccttgcgtgggcaaatgcatattctag

SEQ ID NO: 1461 - DNA, 224 bp, Bos taurus
  Clone ID: 07-LIB3057-010-Q1-K1-B3
gcatgttcacaatcctaccaagtacaggctgtgagaacacgacaccccttgataaggaccaggccagaacagcatcaggcggtatgaccacacattcacttctgccatctgacctcaaacacatctaaataggagctaaaatggaattgatgtgacattccatatttgacagctgacatgtatgaaatcgtggctcaaatatacggtgacatttaaagactatc

SEQ ID NO: 1462 - DNA, 378 bp, Bos taurus
  unsure (271): unsure at all n locations; Clone ID: 07-LIB3057-011-Q1-K1-B3
agacaataaagatttactacagggcaaggatttactcatcgcttactatgatgtggactatgaaaagaatgctaaaggttccaactactggagaaacagagtaatgatggtggcaaagaaattcctggatgctgggaagaaactccattttgctgtagctagccgtaaaacctttagccatgaactttcagattttggcttggaaagcactactggagagattcctgttgttgctgtcagaaccgcaaaaggagagaagtttgtcatgcangaggagttctcgcgtgatggcaaagctcttgagagattcctggaggattactttgacggcaacctgaagagatacctgaagtctgagcctatccctgagagcaatga

SEQ ID NO: 1463 - DNA, 430 bp, Bos taurus
  Clone ID: 07-LIB3057-013-Q1-K1-B3
agccgccgggttgaaaggaacgtggcctttttcttttcccggcatggcctgtgcctggggagttttttcaaggtgcctccgaaaaggggagtcctctggcaaaaatgtcactttgcctgctgtgttcaaggctcccattcgacccgatattgttaactttgttcacaccaacttgcgcaaaaacaacagacagccctatgctgtcagtgaattagcaagtcatcaaaccagtgctgagtcttggggtaccggcagagcttgggctcgaattcccagggttcgaggtggcgggactcaccgttccggtcaaggcgcttttggaaacatgtgtcgtgggggccgcatgtttgcgccaactaagacctggcgacgttggcaccgcagagtgaatacgacgcagaagcgatacgccatctgctctgcactggct

SEQ ID NO: 1464 - DNA, 429 bp, Bos taurus
  Clone ID: 07-LIB3057-014-Q1-K1-B11
cggttcttggaattcttaaccaccttggccggcaaaggttcgtcgcaaaaggggtcccggctgctgctgctgctggtggtgtcaaatctactcttgtgccagggtgtggtctccacccccgtctgtcccaatgggcctggcaactgccaggtatcccttcgagacctgtttgaccgggcagtcatggtgtcccactacatccatgacctctcctcggaaatgttcaacgaatttgataaacggtatgcccagggcaaagggttcattaccatggccctcaacagctgccatacctcctcccttcctacccctgaagataaagaacaagcccaacagacccaccatgaagtccttatgagcttgattcttgggttgctgcgctcctggaatgaccctctctatcacctagtcaccgaggtgccgggtatg

SEQ ID NO: 1465 - DNA, 262 bp, Bos taurus
  Clone ID: 07-LIB3057-015-Q1-K1-B11
cgcgagcggccgccctttttttttttttttgcaattacagagtggtattcagttaacagaacagcaattattcgtgtaagctgcatcatagacaactgaagatgaaaaaactaccatccccatatataactaatttgtgctgtgcaccaacaagaacctgctttaaatttccatgccaatttacaacccccctgtacacaacttactccttttaaagaaataaaaattgaaatgtaaagctttttaatatttgtttttaaac

SEQ ID NO: 1466 - DNA, 303 bp, Bos taurus
  Clone ID: 07-LIB3057-015-Q1-K1-B3
ggcgtttggctttattgaaagaggcgatattgtaaaggagatattctttcactatagggaatggaagggtgacttagaagccttacagcctggagatgacgtggaattcacaatcaaggaccgaaatggtaaagaagttgcaacagatgtcagactgttgccttaaggaacagtcatttttgaagatatcagcattgaacattttgaaggaactgtaaccaaagtcatccccaaagtacccagtaaaaaccagaatgacccattgccaggactcatcaaagttgattttgtgattcctaaaga

SEQ ID NO: 1467 - DNA, 231 bp, Bos taurus
  Clone ID: 07-LIB3057-017-Q1-K1-B3
gttctagatcgcgagcggccgctcgcgatctgaacagaggtgcgcccgttgctgataggtgccatagcttagccccagcgtcccccgcctgcccagactcagcggcaccaccccgttgcctgcaagccttcaccccactccccgccccgggcaccccatgatggtgaggtgtgttcaccgagacctcagtgggctggatgcggagaccctgctcaagggccgatgggtcca

SEQ ID NO: 1468 - DNA, 426 bp, Bos taurus
  Clone ID: 07-LIB3057-018-Q1-K1-B11
cgaatcgaccgacgcatacacgcgagcgtgggtgcgccgctcgactattttacctatccacatgcatccttgtcactgctgcgactggtgcattcttcgtctccatgactgaacagatgacccttcttggcaccctcaagggccacaacgactgggtgacccatatcgctaccactccccagttcccgaacatgatattgtccgcctctcgagataataccatcattatatggaagctgaccagagatgagaccaactatggtatcccacaacgtgctcttcatcgtcactcccactttgttagttgatgtggccatttcctcagatggccaatttgacctatcaagctcctgtgatgtaacccttcacctttggtatcatcacaacgggcaccatcactctccgatttgtaagccataccaaata

SEQ ID NO: 1469 - DNA, 449 bp, Bos taurus
  Clone ID: 07-LIB3057-018-Q1-K1-B3
atcaaatttgacactggtaacctgtgcattgtgactggaggtgctaacctgggaagaatgggtgggattacaaaccgggagaggcatccaggttcttttgatgtagttcatgtgaaagatgcgaacggcaacagctttgccacacggctctcaaacattttcgttattggcaaaggcaacaaaccgtggatctctcttccccgtggaaagggtattcgccttactattgctgaggagagagataagagattggcagccaaacagagcagtggataaaatgatctctatgtgatgtgattggaaaagtctttgtatttaaagatattaccaagtgattaattgttaatttattttaattgggctttttttttatattattttatcttttttattcttcttatttttttttatcttttttttttttgttacttaattttattttattttct

SEQ ID NO: 1470 - DNA, 356 bp, Bos taurus
  Clone ID: 07-LIB3057-019-Q1-K1-B3
gaaaagtgaccgagaggccgctgaacatcctcgccccggcgcagcgggagccgcccgaggcagcttccccgtgacagagcctcagcctgcctggaagatgccgagactgtgcagcagtcgttcgggcgccctgctgctggccttgctgcttcaggcctccatggaagtgcgtggttggtgcctggagagcagccagtgtcaggacctcaccacggaaagtaacctgctggcgtgcatccgggcctgcaagcccgacctctccgccgagacgccggtgttccccggcaacggcgatgagcagccgctgactgagaacccccggaagtacgtcatgggccattttccgctggggaccc

SEQ ID NO: 1471 - DNA, 249 bp, Bos taurus
  Clone ID: 07-LIB3057-020-Q1-K1-B3
taaaacctatcatacttttatgacttcttcaattcacatataaccgtactttgaaactttaaattttggtacaaaatcaatactcctcctatttatcttatacatctattcctatcatttacatatcatatcatataattctctatgtaacctcatactttcactcactccacattatcacttcatccaccttcttaatttacagattcttccgccaattaaaatttcattttacttctaaccaccact

SEQ ID NO: 1472 - DNA, 434 bp, Bos taurus
  Clone ID: 07-LIB3057-021-Q1-K1-B11
aggaacttgaccaagaaaatgaatcagcgttggaaaatggaattaaaaatgaggaaaatacagagccaggtgctgaatctgctgagaatgctgatgatcccaacaaagatacaagtgaaaatgcagatggccaaagtgatgaaaacaaggaggactatacaatcccagatgagtatagaattggaccatatcaacccaatgttcctgttggtatagactatgtgatacctaaaacagggttttactgtaagctgtgttcactcttttatacaaatgaagaagttgcaaagaatactcattgcagcagccttcctcattatcagaaattaaagaaatttctgaataaattggcagaggaacgcaggcagaagaaggaagtttgagatgtgctagaagcttaatgatttcaaggaaaatatggggtcttgttttaa

SEQ ID NO: 1473 - DNA, 383 bp, Bos taurus
  Clone ID: 07-LIB3057-021-Q1-K1-B3
cgacttctggaaggcatggagatgatatttggccaggttattcctggagccaaagagactgagccctaccctgtgtggtcaggactcccgtccctgcaaactaaggatgaagatgcacgttattctgctttttataacctgctccactgcctgcgcagggattcaagcaagattgacacttaccttaagctcctgaattgcagaatcatctacaacaacaactgctaagcccacattcatcctatccatttctgagatggttcttaatgatccattccctggcaaacttctctgagctttatagctttgtaatgcatgcttggctctaatgggtttcatcttaaataaaaacagactctgtagcgaaaaaaaaaaaacaaaaa

SEQ ID NO: 1474 - DNA, 431 bp, Bos taurus
  unsure (395): unsure at all n locations; Clone ID: 07-LIB3057-022-Q1-K1-B3
gtcttaaacagctgagaaaactgatgtttcaagaacaaagacttttatgggaataattgaaaattgtgtagaacagtatgattaaccctcaggtttatcacccagctttaacatgaatagttaaaacaagggttttatattaaagacataaagtggcaaatattacaaattttggttttaaagctgtctccatccttcatacacctgggagattgatattgaccatccataactgttggaaaagattcgaagaattctgtaagtgggcttgctgttctcatcttgtctttgcagacccggaagtccacattcccctggagaatctacagcagtttcctgccttcaattcctacacctgctcctctgattctgctttgggttccaccagcactganggccgtggggcgctctccctttctcctcttaacaaa

SEQ ID NO: 1475 - DNA, 404 bp, Bos taurus
  Clone ID: 07-LIB3057-025-Q1-K1-B3
cggacgcgtgggcgccgggttgagaggagcgtggccttctcctctccccgccatggcgggtgctcgtccactgatatcagtgtactccgaaaagggggagtcctctggcaaaaatgtcactttgcctgctgtgttcaaggctcccattcgacccgatattgttaactttgttcacaccaacttgcgcaaaaacaacagacagccctatgctgtcagtgaattagcaggtcatcaaaccagtgctgagtcttggggtaccggcagagctgtggctcgaattcccagggttcgaggtggcgggactcaccgttccggtcagggcgcttttggaaacatgtgtcgtgggggccgcatgtttgcgccaactaagacctggcgacgtttgcaccgcagagtgaatacga

SEQ ID NO: 1476 - DNA, 426 bp, Bos taurus
  unsure (247),(335),(337),(352): unsure at all n locations; Clone ID: 07-LIB3058-004-Q1-K1-B11
gtagatttgtacttagcaaatgtaaacgcacccaaatggaaaactgtgtagataccatatccgctgaaatagcatttatcttactgggttgactggaaaggaatggaaaatacagtcacacaagcaccaatggtacccggatctgagtcattgctctaaacactggcaacattgtctcagccccctgaggcaaacagacagctttcgatttgacagaagtctttctgcagacagaggagtgctgcanagtacacacactcacacccacaggcacacagacacgctcaccgacacgagattgagccctcgatcttgcgtttctggatggatcagangntagtagttgctatangaaaggcaatgtctatttcagggattgtaaagtagttaagcattggttcaaaagttttttaaaataaatttttt

SEQ ID NO: 1477 - DNA, 370 bp, Bos taurus
  Clone ID: 07-LIB3058-004-Q1-K1-B3
cgattctgggagacgtccgcccctactgggcccccatactccaccccagggccccctgatgacgactaggaggagggggcacccaccacacctcaagctgaaggtgccatggacacctgttaaagagggacgagtggccgagcttgagcagcacggggaccgggacggtccatgccaagcagtgggcatgtatacagcagagacggcgctgggggttcaggcactgagtctccctggcatcggaaataggctccttgcctcagagccctcattccagttccaagccgagaaggttttggggcagagtctgcccagattgaggtgctctcccaaggagtgatacatatgatattatgtatatatttacagc

SEQ ID NO: 1478 - DNA, 372 bp, Bos taurus
  unsure (17),(26),(195): unsure at all n locations; Clone ID: 07-LIB3058-007-Q1-K1-B3
cagctaccgagccgcangtggcggcnggcgcggggctcggcccgagctcgggagatggggaaactgaggcacggagctggacagtgactcagatacctaccaggagctgcccggtgcggagccgagtgctcacgggactcagctgacccaagcgcaaatccactgtcgtttcctggctttgttaccttggcacangataggaaccttcagggctctccacagaggccaccaaaatgtcatattttggggagtatttttggggagagaagaaccatggctttgaagtcctgtaccacaccgtgaagcaagggcccatcttcaacaaggagctggcagacttcatccgggagagggccaccatcgaggagacct

SEQ ID NO: 1479 - DNA, 418 bp, Bos taurus
  Clone ID: 07-LIB3058-008-Q1-K1-B3
ggcagggcttgcagggctgtaggagctgagctttccgtgttgtagctaattaggaagcttgatttgctttgtgagggaacaattgaaacctctttccaaggaccatttttagtgcccccagccttacttctgcattactgggcatagtgttagctttctggacccagggactcttggtaactataacttaggaaagtcatttctcagtcacaaagcatgtgctgtgctagctgtccaagctgtggagacccctcacctagaaaaaaaaattgactaccaaaaaggactggagcactgtgggttccacatgctgccactacatttaaaaacacaaagctttgtccaccatcctttgaaaacgttgcccatcattaaatcttctcatcactggagcaaatgaaaccctgtgtggttgggt

SEQ ID NO: 1480 - DNA, 323 bp, Bos taurus
  Clone ID: 07-LIB3058-009-Q1-K1-B11
gagatacacagatcagattcactatttttgcctattacccactctgacatctgatcttgggcctgtgtcgttccggtggcccttgtcagaagattcctcacccttatagatgtacaggtcttaccagaggcggctgtcactactgatgaagcgcaggggaaggacagccagccttacgagcaagccctgggccgtttctgggattacctgcgctgggtgcagaccctgtctgaccaggtgcaggaggagctgctcaacacccaggtcattcaagaactgacggcgctgatggaggagaccatgaaagatgtgaaggcctacaa

SEQ ID NO: 1481 - DNA, 421 bp, Bos taurus
  Clone ID: 07-LIB3058-010-Q1-K1-B11
ctccgtccaaaacatgtctgaaggaggagatggccaagggcgaggcgtcggagaagatcatcatcaacgtgggcggcacgcgacatgagacctaccgcagcaccctgcgcaccctaccgggcacccgcctcgcctggctggccgatcccgacggcgggggccggcccgagtccgatggcggtggtgcaggcagcagctgcggcgggggctgtgagttcttcttcgaccggcacccgggcgtctttgcttacgtgctcaactactaccgcacgggcaagctgcactgccccgccgacgtatgcggccccctctttgaggaggagctcaccttctggggcatcgacgagaccgacgtggagccctgctgctggatgacctaccggcagcaccgcgacgccgaggaggcgctcgacatcttcga

SEQ ID NO: 1482 - DNA, 433 bp, Bos taurus
  unsure (368): unsure at all n locations; Clone ID: 07-LIB3058-010-Q1-K1-B3
cggacgcgtgggcaattttaggagccatcaacttcattacaacaattatcaacataaagcccgccgcaatgtcacaataccaaacccctctgttcgtatgatccgtaataattaccgccgtactactactactctcgctccctgtattagcagccggcatcacaatgctattaacagaccggaacctaaatacaaccttcttcgacccggcaggaggaggagaccctattctatatcaacacttattctgattctttggacaccccgaagtctatattttaatcttacctgggtttggaataatctctcatatcgtgacctactactcaggaaaaaaagaaccattcggatatatgggaatagtttgngctataatgtcaatcggatttctaggtttcatcgtatgagcccaccatatattcactgtcggaat

SEQ ID NO: 1483 - DNA, 412 bp, Bos taurus
  Clone ID: 07-LIB3058-011-Q1-K1-B3
ggtagactcagaagggacctgagctgtcttacgagttatcattcagtcactcagttgtgtctgactctttgcagccccatggactgcagcacactaggcttccctgtccttcaccgtctcctggagcttgtgcaaactcgcgtccattgagtcggtggtgccatgcaaccatctcatcctttgtcgtccccttcttccaccttcagtctttcccagcatcagggtcttttccagtgagtcagctcttctcatcaggtggccaaagtattggagcttcagcttaagtatcagtctttccaatgaatattcaggactgatttcctttatgatggactggtttgatcttgccgttctagggactctcaagactcctccaacaccacagttcaaaagcatcaattctttggtgctc

SEQ ID NO: 1484 - DNA, 421 bp, Bos taurus
  Clone ID: 07-LIB3058-012-Q1-K1-B3
tttaatgttgggttaaaaaacaaaaagctgattggtctttattcagggaaagattttacgggtatgactgtaggcggctcttttgatgtaaagagtggttttgctttctcccccaaagtgatttcaacaacatttaaggagatgtaaaatcgttaccaaaaaaacacttgatatttgttttcagcgaagtatacaatataagcttccaggctgcatatagggagaagatggaaaaggttctgtaagaaaccaatcaagatcaaggaaagtgaagtaatccataccttgtgttttgttttgacttaataatataacaaataaccaacccttccccaaaaactttctatgtatacatacacacatatacacatatgaacagagttaatcaactgaaagtgtttccttcatttctgatatagaa

SEQ ID NO: 1485 - DNA, 441 bp, Bos taurus
  Clone ID: 07-LIB3058-013-Q1-K1-B11
ccggattcccggtcgaccacgcgtccggtagagacaatctgactcattcttgtgcatctatcgtgcttgaatcggtcagatttgcgcatagcaccatcagtcttatgtcatatactctttaggacaacctgttgaaaaacttaaccatttctttgaaggtgttgaagcccgggtagcacacggtataagagacgaggcagtgagctatcaacttgcgtttaacaagcatgaactccgaaaagctattaaagagtatcctggaaaagaagtgataaaaggtctcgataacctatacaagaatgttgataaacatttatgtgaagaggagaacttacttaaagtggtgtggcactccatgcaggatgaagttattcgccagtacaagcattttgaaggttgatagctcgctgttaccctggatctggtgttacaatggaattc

SEQ ID NO: 1486 - DNA, 449 bp, Bos taurus
  Clone ID: 07-LIB3058-015-Q1-K1-B3
gtcgacacacgagcctacttcacatcagccactataattattgctattccaaccggggtaaaagtcttcagctgattggcaacacttcatggaggtaatatcaaatggtctcctgctataatgtgagccctaggctttattttcttatttacagtagggggtttaactggaattgtcttagccaactcttccctcgatattgttcttcacgacacatactacgttgtcgcacatttccactatgttttatcaataggagctgtatttgctattatagggggatttgttcattgattcccactattctcaggttatactctcaacgatacatgagccaaaatccacttcgcaattatatttgtaggcgtcaatataaccttcttcccacaacactttctaggactatctggcatgcctcgacgatactccgactacccagatgcatacac

SEQ ID NO: 1487 - DNA, 317 bp, Bos taurus
  Clone ID: 07-LIB3058-016-Q1-K1-B3
agaatatgcagcaggaccatttgccctcttcttcatagcagagtacgcaaatattatgataataaatatctttacagcaattttattcctaggaacatcccacaatccacacataccagaactctacacaatcaattttaccattaaatccctactgctcacaatatccttcctatgaatccgagcatcctaccctcgatttcgctatgaccaactaatacacttactatgaaaaaattttctacctctgacactagccctgtgcatgtgacacgtatccctacccatgcttacatcaggcatcccaccacatacat

SEQ ID NO: 1488 - DNA, 427 bp, Bos taurus
  unsure (338): unsure at all n locations; Clone ID: 07-LIB3058-017-Q1-K1-B3
actatataagataccatgcagtgttttcctagactatatagagcattgtatcacctccctgctaagtctgttgaaaataggttttgaccaatttagagaaccatgcaaaatatattacctttgtaagattttttaatacacaaaattaagaaattaatattaccttaaatgtgaagtttatcctcatcattttaaatccatataactgtactttgcatatttataaaatatagtgggaaaagatgtgggaaggtttatgtgtgatttactattcatgtttttacatagcctgatttttatgtggaaaaaatattagcaacttgttcctcaacacaatntattctaaacatttcaaaaaaagaattacatagttacacttccatttcatgctgaactataattttttaatgtaacatgggtaagtttt

SEQ ID NO: 1489 - DNA, 439 bp, Bos taurus
  unsure (359): unsure at all n locations; Clone ID: 07-LIB3058-018-Q1-K1-B11
ccaagctcctgacacccagatgggctgcgccccctcgccacacgcgccccacagactcttgtaaaggttttcctctcttggtggcggtggcaacttgccgacagcttgttttaaactttgatccggatagctttttgatacttgaatatttttaagttttatacagtttctaatttttttttttcctaagaagattcagatacccactaagatgttagaatgtactctgtggacaagcggtgtccacagcggcatctcgtcttcctccacgcgccagccctctttccatcgggagctgctccggaagtctcctgggcacccggaattgggggggaggttgggaacaggctgaaggtggnggcgcccgccccagagcaggtagagggaccgaccccgccctgctcacacactccacgcccctgtgctgaagccagcacgt

SEQ ID NO: 1490 - DNA, 397 bp, Bos taurus
  unsure (369): unsure at all n locations; Clone ID: 07-LIB3058-019-Q1-K1-B11
aggggctcggcccggtacctggcaagaaaatacaatcgcaacgagacctacatacgagagaacttcctggttcttgatgtcttttttgaagccctgacctctgaggccatggagcagcgagcagcctacggcctgtcagccctgctgggagacctcgggggacagatgggactgttcatcggggccagcatcctcacattgctggagatcctcgactacatctatgaggtgtcctgggaccgactgaagcgggcgtggcgtcgccccaagacccccctccggacctctactgggggcatctccactttggggcttcaggagctgaaggagcagagtccctgcccaagccgaggccgtgctgaaggcggnggtgccagcagcctgctccccaaccacc

SEQ ID NO: 1491 - DNA, 436 bp, Bos taurus
  Clone ID: 07-LIB3058-019-Q1-K1-B3
acggtcccttaattggatgattacagcaacaaaattcttctgaagcctttctccacaatcctgagctgtggatgtccataatattataacggatttaagctgtgaagcctcaaaacatcacaactagattagcatcggtgttctcagatttgggaaaactgcctaattaacattaccctatagtggaattactcaaatttgaattcacctatgaaacatacaaatcaaagtaacagtataaatgtgaaatgcagatgacaagcctggaaaggtaaactgtgaatcttcatttctaacattgatccaagtttctatattgggtcaatatatcgtatttaagtggtgtttaaaaagggtagcctactgaaactatgaggatgacatcaaaacccccattatacaaatgcactttttaacgcacaaacaagggcactat

SEQ ID NO: 1492 - DNA, 387 bp, Bos taurus
  Clone ID: 07-LIB3058-021-Q1-K1-B3
gaagataggtacctatttggagataggtattattaatacatacccatttcacatatgagaaaaatgaggtgcattagcaacttaaggattaaagagcttatccaaggttacacatctagaatggaatggaaagaatacacggaggaactatataagaaagatcttaatgaactggattaccgtgacggagtggttagtcacccagagccagacattctggagtgtgaagtcaaatgggctttaagaagcactgctgttaataaagctagtagatgcagtcaaattccagcagaactactcagatccctaaaggatgatgccatcaaggttctgcattcattatgtcagcaaatctggaagacccagcaatggccacaggactggaaa

SEQ ID NO: 1493 - DNA, 392 bp, Bos taurus
  Clone ID: 07-LIB3058-022-Q1-K1-B3
tcgctactatcaagaagctaaaagctcaaagatcatggagtccttcaaaaacatggttcctcagcaagccctcgtgattcgaaatggtgagaaaatgagcataaatgcggaagaggttgtcgtcggagatctggtggaagtgaaaggaggggatcgaattcctgccgatctcaggatcatttctgcaaatggctgcaaggtggataactcctcactcacgggagaatcatagccacagaccaggtcttcggatttcaccaatgaaaatcctctggagacacggaacattgcctttttttcaactaactgtgttgaaagcactgcacgtggcattgtcgtgtatactggggatcgaaccgtgatgggcagaattggcacgctggcttttgggc

SEQ ID NO: 1494 - DNA, 286 bp, Bos taurus
  Clone ID: 07-LIB3058-027-Q1-K1-B11
cccggtccgcccacgccttccggacctttccttaaacccaaccggccctattgaccaggaaaaattttaagtgttaatagctaagggaatgataaaggattgcatcaaaattaatgaaaggtagagaaagtaatgattaaatggaaatttatagaagtgaatgcatatattggaaaaaatgatatatcaaaaataataagataagcttttaccctaagaatgtataaaaagaaaattaaacccaaagtaagcagaagaaaaaaaaataataaggcagaaatcagtg

SEQ ID NO: 1495 - DNA, 395 bp, Bos taurus
  Clone ID: 07-LIB3058-029-Q1-K1-B11
cggacgcgtgggctgacttgttccgtggcaccctggaccctgtggagaaagcccttagggatgccaaactggacaagtctcagattcatgatattgtcttggttggtggctcaacccgtatccccaagattcagaaacttctccaggacttcttcaacgggaaagaactgaataagagcatcaaccctgatgaggctgttgcatatggtgcagctgtccaggcagccattttgtctggagacaaatctgaaaatgttcaagacttgctgctggtggatgtcacttctctttcccttggaattgaaactgcttgtggagtcatgactggccttattaagcgcaatactaccattcctaccaagcagacgcagacttttaccacctactttgacaac

SEQ ID NO: 1496 - DNA, 425 bp, Bos taurus
  Clone ID: 07-LIB3058-031-Q1-K1-B11
aaagctatagagacaataaaaagattagtgtttagcagggtttgagtagggagagatatgaatagagtgcagagaatttttagggcagtgaaactactctgtaatgatactataatgatggatacatgtcattatacatttgttctaactcacagaattacagtactaagagtaaaccataataggctttgggtaactatttgtcaatgtatattcattgactgttaacaaatgaaccattctagtgagtattgtcttattttgttgatctatatttttgtttaaatttagtgtattattttttttttttttttattttttttatatttattgtttattttattatttttttttatttttattttattattttttttttttatttattgttttattaatttatgttattttattttttttttttt

SEQ ID NO: 1497 - DNA, 340 bp, Bos taurus
  Clone ID: 07-LIB3058-031-Q1-K1-B3
cgctgggctagatgaagcacaagctggaatcaagattgccgggagaaatatcggtaggctcagatatgcagatgacaccacccttatggcagaaagtgaagaggaactaaaaagcctcttgatgagagtgaaagagaagagtgaaaaagttggattaaagctcaacagagctgaagtactgaagttcttcagtactttagaaaaccaagtgtttattttttttttttttttttttttttttttatttttttttatgtttattatttttttttttttatttttattttattatgatttttttttgttttaagttttttttttttattcatttttttttttt

SEQ ID NO: 1498 - DNA, 405 bp, Bos taurus
  Clone ID: 07-LIB3058-032-Q1-K1-B3
cggacgcgtgggtacttcctgtttctcttggatgttttactctatgtgtataaaagagaggtttgcaaactactttatgaatgataaataaaaggtttagttcacctgatgttgatgtaacctatctaaacacagaaatcaaaaaatatgaaaggattacaacatgtgattctaattaggcttttgattatattgttttaactatgttatatatatgtgtgaatgttattgatatatattaaaaaattttttattttattttttaaatatttatattcttttaatttatattcttttttatattcattatatcaaggtttttttttttgtttaatatttaagtttttttatataattttattttatattttgatatttttattttttgtataattttttttattt

SEQ ID NO: 1499 - DNA, 416 bp, Bos taurus
  Clone ID: 07-LIB3058-034-Q1-K1-B11
aaaagcccatgtttgttgtgtcagagcattttgttagtcccacacgtctgctgtggtcacagtgccagggcctcagatttcctccagtatttgcttctgatgagtaacaatggtctgtatgtaaacaaggaagatagaatattgctgattttgctggtatgtttttgtgtaaaagagctgcttcagagtgtggctatatgtgagagatgcccccggcttctccccgaggaccgtgctctgctccccaagttggtatggagcttacacgttacatgtgatttcagttctgtgcattttggggtctgttttggttaacctccaatggttgtcctgttgcccttccgtgtggactcactcctgtctgatggcccctggctgcctgctttgatcacctgggcaggataaccaccatcatc

SEQ ID NO: 1500 - DNA, 240 bp, Bos taurus
  Clone ID: 07-LIB3058-034-Q1-K1-B3
aaagtgtaaatttgcatctctttgggttcttttgctttcacatacacttttaggaaaatagctgttaaattaaccttttaagatttcaaaaatatatatacatatatatattttaaaaattaatatttaatgagtgaatgaatgaaagtcactcagtcgtgtttgactctttgtgaccccagggactacacagtccatggaattctctaggtcaagatactataatgggtaaccttttca

SEQ ID NO: 1501 - DNA, 409 bp, Bos taurus
  unsure (29)...(30),(46): unsure at all n locations; Clone ID: 07-LIB3058-035-Q1-K1-B3
taaaactggcaattacgtttgagtgaatnntgtggggaaatgtgtngggaatatattatctctatagaatgaatatatatatatagttcatatatacactttatgcatgtatatatatgttcattctcaagtgttactaaattaaaattctgctggacccttaatatggccagtgaatctaatgcttataaactggtaattaaaagtatccatcttataatgagtgtggtaagtgttacccttattctaaatttgcatttgtgacagttccttttgtggttaagatatactctactctattaccatgcaaaagtatattctgaggtggcagcctatgagttcactaccctgaccactgtgcctggcgtcatcagatacaaaggtgctaagatccaacttttggatcttc

SEQ ID NO: 1502 - DNA, 461 bp, Bos taurus
  Clone ID: 07-LIB3058-036-Q1-K1-B11
accggtctcggctgacccacgcgtccgcggacgcgtgggcggacgcgtgggcggtcgcgcgttgtgaaactggcctcttggtccgaagaaaggccaagtggctggtatagcacattccgtcgagggaaaaagctcttctacgtggatgccgatggggccgcagtgagcgtggtacagctgaccttactgaagttgcctgatggcacgcaccgtctgagcttcacattcacctgccagaactcggccgactggctggacgaacctgcaggtgaccacagccgctctgcccagttactccgggccaatggggaggaggtatccttcaaccagatggcagccgccaccatcacagtcccctacgatggctgcaggctccggaagggacagtcgaagaccctctttgagttcagctcctcccgagtgggatttctgcccctgttggacgtggcagctgctgactt

SEQ ID NO: 1503 - DNA, 421 bp, Bos taurus
  unsure (40): unsure at all n locations; Clone ID: 07-LIB3058-036-Q1-K1-B3
gaggaaatcaataacccatctcttacattaaaattcatangacatcagtgatactgaagctatgagtatacagattatgaggacttaagcttcgactcctacataattccaacatcagaattaaagccaggggagctacgactattagaagtcgataatcgagttgtactaccaatagaaataacaatccgaatgttagtctcctctgaagacgtattacactcatgagctgtgccctctctaggactaaaaacagacgcaatcccaggccgtctaaaccaaacaacccttatatcgtcccgtccaggcttatattacggtcaatgctcagaaatttgcgggtcaaaccacagtttcatacccattgtccttgagttagtcccactaaagtactttgaaaaatgatctgcgtcaatattat

SEQ ID NO: 1504 - DNA, 340 bp, Bos taurus
  unsure (78),(234),(279): unsure at all n locations; Clone ID: 07-LIB3058-037-Q1-K1-B11
ccacgcgtccgcccgaactccacattgttcttttcacctttttccctcgggaaccccgaaccccacaggggccgtggncaccgcttgaagaagagtcgcacgcggggaagaggatggactcgggctctggggccagagcagctgctgagagcctgtgaagccatcactgctgggaaagtggacctgagcagctggcgggagaagattgcccgggatgtggccggggccacctgnggtaacggctccggggaggaggaggaagacgaggaccgggcccgncgtcctggtggagcaagcaactgactccgcgatggagcccgcaggccccgggcgggaacgc

SEQ ID NO: 1505 - DNA, 351 bp, Bos taurus
  Clone ID: 07-LIB3058-039-Q1-K1-B3
ggaagatgctaattgcataccaccctcttccctcattgaagaatgtatatagagatatgtctctgaaccaggcattattttaaaagatttgcttccatatcaattctgttgccttgctctgaggtttggtcttcccgggctctcagccagagaccagcaagtgttgggaagcacttggtacccagactaagctactgtaggagtgcacacgtggcagctcccattatgcctcctgttttacatggaaaatgttcatcgaaaggcaacagcccccagtagtaccagcaatgtagtgacctcagactctcaaactcgccactagaacgtggctggcaaaatgtatgtgttact

SEQ ID NO: 1506 - DNA, 346 bp, Bos taurus
  Clone ID: 07-LIB3058-040-Q1-K1-B11
ccactcgtccggagtcgatggcataacacaaatgagacaatagtcatatcatcagagatgcagaatgagagaagaatgaaagtggggctaaaagaatatttgaagaaacaatggctgaaaacactcaaatttgataaaagacacatgtacagatttaagaaggtgagtggctcatcaaagataaaacctaagaaatccacaccaagtcaaaaataatttaatttgtgaaagttaagagaaagaaaaagatgaaagcaaccagagaaaaatgatatattatctataggaatatcagtttcttgtgaaaaaaaaaaaagaacctagactatttgatcaacctaacaat

SEQ ID NO: 1507 - DNA, 403 bp, Bos taurus
  unsure (68): unsure at all n locations; Clone ID: 07-LIB3058-043-Q1-K1-B3
gcggagcggagcggcggtgggcgcagcttgcgtgttgggcgcggagcaggggtgcagcttgggttccncccgacacccctccccctcaaacgcgagccccaccccttcgccggccaggcccacccggacgaactatcccctgcggcgcgagcccggggcggctccgggcgcccctccagcagaaccccccaccatgggcagccagagctccaaggctccccggggcgacgtgaccgccgaggaggcagcaggcgcttgccccgccaaggtcaacggacaggagaacggccacgtgaaaagcaatggagacttatcccccaaaggtgaaggggagtcgccccccgtgaacggaacagaggaggcagccggggccactggtgatgctatcgagccagcaccccct

SEQ ID NO: 1508 - DNA, 378 bp, Bos taurus
  Clone ID: 07-LIB3058-044-Q1-K1-B3
ggacgacccacgcgtccgactctagatcgcgagcgccgccctttttttccttttttttattctagtttttattatgttactgcgattattttttttgttttcatcattatctctacattgttattctttatgacaaccataccaaccgcctgcaggaagcttctaaccttttcaagagcatctggaataacagaatggctgcgcaccatctctgtgattctgttcctcaacaagcaagatctgctggctgagaaaatccttgctggaaaatcgaagattgaggactactttccagaagttgctcgctacactactcctgacgatgcgactcccgagcccagagaagacccacgcgtgacccgggccaagtacttcatt

SEQ ID NO: 1509 - DNA, 422 bp, Bos taurus
  unsure (386): unsure at all n locations; Clone ID: 07-LIB3058-045-Q1-K1-B11
gtgatcgagatggtggatggggagccttcttacttcaatgagccacccctcaaagccatgaagatgatccgggacaacctgccaccccgactgaagaacctgcacaaggtgtcaccgtccctgaagggcttcctggaccgcctgctggtgcgtgacccggcccagcgagccacagcggccgagctgctcaaacacccgttcctggccaaagcgggccctcccgccagcatcgtgcccctcatgcgtcagaaccgcacccgatgaggcctggtgtcacccccacccctgaaccaaagagccccctgggtcacccctgcccggccagaggccagtggggggccggcccccgctcctcccagccccggagacactccgtgtggcgccgncctccttgccaggggggtgtgcgggaccctactact

SEQ ID NO: 1510 - DNA, 427 bp, Bos taurus
  Clone ID: 07-LIB3058-045-Q1-K1-B3
atggccgccttacgtgccctgctgcctttcgtccgcgccccgctgcggccctggctctgctgcccggtgcagcgctccttcgcctcgagcgcagcctttgagtacatcatcacagcaaagaagggaaggaacagcaacgtggggttgatccagctgaaccgccccaaggccctcaatgcgctctgcaacggcctgatcgtggagctcaaccaggcactgcaggccttcgaggaagacccagccgtgggggccattgtcctcacaggcggggagaaggtatttgcagctggagccgacatcaaggaaatgcagagcctcacgttccagaactgttactctggcgggtttttgagccactgtgaccagctcacacgtgtcaagaagccagtcatagctgctgtcaatggctatgcccctggtagtggct

SEQ ID NO: 1511 - DNA, 339 bp, Bos taurus
  Clone ID: 07-LIB3058-046-Q1-K1-B3
gccatcccgtggcataaacccagatgttgctgtggcatatggtgccgctgtccaggctggtgtgctctctggtgatcaagatacaggtgacctggtactgcttgatgtatgtcccctgacacttggtattgaaactgtgggaggtgtcatgaccaaattgattccaaggaacactgtggtgcccaccaagaagtctcagatcgtgtatacagcctctgataatcaaccaactgttaccatcaaggtctatgaaggtgaactacccctgactaaagacaatcaccttctgggaactttcgacctgactggaatgcctgctgcaccccgtggaatcccaca

SEQ ID NO: 1512 - DNA, 418 bp, Bos taurus
  Clone ID: 07-LIB3058-051-Q1-K1-B11
gtgaaccttatgtaactagccatgctgaagagcagtggaggggagaagggttggaagaggaagccctgagcaggacagcaaaacagtacagtgacagtttgggccttgcactcagatctagtctcatacttaccaatgtagttttgagcatggtttttcacctctctgtggtactttatttcttcttatgtaaaatagaattagtgatatctttttgcaatgatgagtgggggtgggaatataaggatttaatgggattatttgtgtaaattgcttggaacagatgtggggtatgctgaatgctatatgaactgtagctgttgataatgatgttaaccttgacaaggatttaaaaaacatagttaactaaaggtacttaacattttatattgtcaataaagatgttggggtttgcaaa

SEQ ID NO: 1513 - DNA, 437 bp, Bos taurus
  Clone ID: 07-LIB3058-052-Q1-K1-B11
ccgaattcggaaactggctgaccagtgcacaggtcttcagggcttcttggttttccacagctttggtgggggaactggttctgggttcacctccctgctgatggaacgcctctcagttgattatggcaagaagtccaagctggagttctccatttacccagccccccaggtttccacagctgtcgttgagccctacaactccatcctcaccacccacaccaccctggagcactctgattgtgccttcatggtagacaatgaggccatctatgacatctgtcgtagaaacctcgacattgagcgcccgacatatactaacctgaataggctgataggtcaaattgtgtcctccatcactgcttccctgaggtttgatggcgccctgaatgtggatctgacagagttccagaccaacctggggccctattcccgcattc

SEQ ID NO: 1514 - DNA, 381 bp, Bos taurus
  Clone ID: 07-LIB3058-052-Q1-K1-B3
cggctctacccctggggcatcgtggttttggaaaacccagggcactgcgactttgtgaagctgaggacaatgctggtgcgtactcacatgcaggacctgaaggacgtgacgcgggagacacattatgagaactaccgggcacagtgcatccagagcatgacccgcctggtggtgaaagaacggaatcgcaacaaactgactctagagagtggtaccgactttccccttcctgccgtcccaccagggacagatccagaaactgagaggctgatccgagagaaagatgaggagctgcggcggatgcaggagatgctgcacaaaatccagagacagatgaaggagacccattagctgactttcagccctgaatatttaaacgcc

SEQ ID NO: 1515 - DNA, 415 bp, Bos taurus
  Clone ID: 07-LIB3058-053-Q1-K1-B11
atgaaacaaggtgaaactataacagcagtctttcctgtactgttcccacagctcctcccagtgtaccttgcaatcagtgtatcttgcaggattctcacggtaaggcttctgagatcaccaacattgtctctttgatcatgggctgctgctcttgcttcacagagctggtctctggtttgctggttggtggcatagctgacaccagaacccctgtctgactcatagtcagaggcactcatgtcatgaaatgatttgaaagcattataaatcagcaaagtctgataatgactgccagctttccttgtgttttgatttaaaaaaaaaaaagactccaaatattctggaaaacctggatataaaattattctgaagaaatagattaaggtttgaagacatcaaattgtagggaatttta

SEQ ID NO: 1516 - DNA, 323 bp, Bos taurus
  Clone ID: 07-LIB3058-057-Q1-K1-B3
cagatatgagtacagtgttgatagcaaagagtaataaaatgaggagaaaaaaaacaaaacaggagagtccagggtttgcctagctggcttatgttagttccaaattcctcacaatatttgtatttatctactttaatatcaataactaaggacttcagggacttccttggcagtccagtggttaagactgtgcacttccactgcagggggtgtgggttcaatcccttgtcagagagctaagatcccacatgctgtgggagtgtggccaaaaaaaaaaaaatatataattttatttatttattatataaaaaaaaaagggcggc

SEQ ID NO: 1517 - DNA, 354 bp, Bos taurus
  unsure (338): unsure at all n locations; Clone ID: 07-LIB34-001-Q1-E1-B3
cttaaatgcgcagatgacagggcagatcttgccaagtacatatgtgataatcaagatacaatctccagtaaactgaaggaatgctgtgataagcctttgttggaaaaatcccactgcattgctgaggtagaaaaagatgccatacctgaaaacctgcccccattaactgctgactttgctgaagataaggatgtttgcaaaaactatcaggaagcaaaagatgccttcctgggctcgtttttgtatgaatattcaagaaggcatcctgaatatgctgtctcagtgctattgagacttgccaaggaatatgaagccacactggaggaatgctgtgccanagatgattcacatgca

SEQ ID NO: 1518 - DNA, 403 bp, Bos taurus
  Clone ID: 07-LIB34-002-Q1-E1-B11
cgggccgacccacgcgtcagaggatgctggctgcagccggcgctttgggctctcgtcttagtttctcgttctcctgtcctgggagcccggcgggtccgggcctcccatctgtgccggtgcgggcgccggcatgtggctgtgggaggaacaggggggcctcatgggccccttctccttcctgctgctggtgctgctgctgctaacgcgcagtcccttcaatgcctgcctcttcactggcagcctctacctcctgttgcgcctcttcagctttgagccagtgccctcccgcagggctatgcaagtgctcaagccccgggaccgcgtttccgctatcgcccaccggggaggcagccacgacgctcccgagaacacgctggcggccattcggcaggcagcttagaac

SEQ ID NO: 1519 - DNA, 380 bp, Bos taurus
  Clone ID: 07-LIB34-002-Q1-E1-B3
agcatacttaacaaataaaggtggtgatccttgctcccctggttttcattatagaaattggagaaatgtacaaagaagataaatactggtacatttaattaaatttttcagaaatttaccttccttgtgtgcagtttaaagctaataaactaagcaaattagaagttcagaatctaatggtagttaacagtttctaacacgagtttgctttattgtaaaaattggtgattgccctgcagatccgccagtgtcagaaaagcctctcacccatctgcatggtgagcctcaagagtccagggcggcaccctcctccatgtgtgaccttccagagggggatgtgggtctgtgcatcgcgatacccagttgacttttgccctggg

SEQ ID NO: 1520 - DNA, 420 bp, Bos taurus
  Clone ID: 07-LIB34-003-Q1-E1-B11
gctgctgctctggttgctggcgctgtgcgcgctgctggcgctcgtggtgcagctactgcgcttcctacgtgccgacgcggacctcaccctgctgtgggccgagtggcaggggcgacgaccagaatgggagctgactgatatggtggtgtgggtgactggagcatcaagtgggattggagaggaactggcttaccagctgtccaaactaggagtttctcttgtgctgtcagccagaagaatgcatgagttggaaagggtgaaaagaaagtgccttgagaatggtaatttgaaagaaaaagatatactcattttgccccttgacctgactgacagaagttcccatgaaatggctaccaaagcagttctccaggagtttggcagaagtgacattctggtcaacaatggtggaatttcccaacc

SEQ ID NO: 1521 - DNA, 371 bp, Bos taurus
  Clone ID: 07-LIB34-003-Q1-E1-B3
agaagcaatttagaatgactggtaaaacgaaatatacccaaagctcgcagcaacaaaaaaggatacagttctttctggccagcttcctgcttctgccctttctgctcgtctgcatcgtagagtctctcctgaagctttttattcctaagaagagaaaatcagtcaccggagagattgtccttattaccggagctggacacggtattggcaggcagactgcctacgaatttgccaaacttaagtgcaagctggtcctgtgggatataaataagcatggacttgaggaaacagccaccgaatgcaagagactgggtgcaaaggctcatacctttgtggtagactgtagtaaccgagaagatatttacagctct

SEQ ID NO: 1522 - DNA, 402 bp, Bos taurus
  Clone ID: 07-LIB34-006-Q1-E1-B11
ggaataacatccagtgggtggtttgcaggagaagcagaagcatctgggcctgggtttcctgaaatcatcacacctgcagcagaaggaaaatgactgagttgaagtacatttctggattcgggaatgagtgtgcctcagaggaccctcgttgcccaggtgccctgccagaaggacagaataatcctcaagtttgcccctacaatctgtatgctgagcagctctcaggatcagctttcacttgtccacggagcaccaataaaagaagctggctgtataggattctaccttcagtttctcacaagccttttgagttcattgaccaaggccacatcactcacaactgggatgaagttgatcctgatcctaaccagctgcgatggaaaccatttgagattccaaaag

SEQ ID NO: 1523 - DNA, 418 bp, Bos taurus
  Clone ID: 07-LIB34-006-Q1-E1-B3
ggccgatcctgactgctatgacaacaggacttcagcattgtctgacaagtcctgtgaaagcaactctccattcccagtgcacgctggaactcctgagtgctgcacccatgaaggccttgaaaagaagctctgtatggctgccctgaagcaccagccacatgaatttccaacttacgtagagccaacaaatgacgagatctgtgaggcattcacgaaagatcccaatgactttgctgatcgatttatgtatgaatattccattaattatggacaagctcctctgacacttttagtcggttacaccaagagttatctctctatgggagggtcctgctgtacttcaccaaacgcaacagtatgctttttgacagagagacttcagcttagacatttttcacttctcaccattatgacagac

SEQ ID NO: 1524 - DNA, 406 bp, Bos taurus
  Clone ID: 07-LIB34-008-Q1-E1-B11
gcgaggtgcttgctggggctggggtgcgcgacggcgccgggggctgcggtgaacgcctcacaggccgtgcagttccctgtggggaggcgccgtcgccattgccacctcgcccggtgagcgcgtcccgctcgccgagcagggccgcagccgaccgccggcaccatgggccagtgtggcatcacctcctccaagaccgtgctggtgtttctcaacctcatcttctggggagccgctggcattttatgctatgttggagcctatgtcttcatcacttacgacgactatgaccacttctttgaagatgtgtacactctcatccctgctgtggtgatcatagctgttggggccctgctcttcattattgggctaattggttgctgtgccacaatccgggaaagccgctgtg

SEQ ID NO: 1525 - DNA, 365 bp, Bos taurus
  Clone ID: 07-LIB34-009-Q1-E1-B11
gtcgccgcggtttcctgcttcaacagtgcttgaacggaacccggctgctcgtccccccctaccccggccggccactcagagccagccctcgtcaccacttgacagcgccctccgaccggcccaaggtccccgccaccgctccagtgccgctcggccgtcgccgccaccaccaccaccaccgcccgttttcagccgcccaccatgacgaccgcatccccctcgcaggtgcgccagaactaccaccaggactcggaggccgccatcaaccgccagatcaacctggagctctacgcctcctatgtctacctgtccatgtcgtactattttgaccgtgatgatgtggctttgaagaactttgccaaata

SEQ ID NO: 1526 - DNA, 362 bp, Bos taurus
  Clone ID: 07-LIB34-009-Q1-E1-B3
caaataatggatcccaaaggccagagagtgaagcttaatgatggccacttcattcctgtcctgggatttggaacctttgcacctcgagaggttcctaagagtgaagctctggaagtcaccaaatttgctatagaggctgggttccgccatattgacagtgctcatttgtaccaaaatgaagagcaggttggccaggccattcgaagcaagattgccgatggcactgtaaagagagaagacattttctacacttcaaagctttggtccacttcccttcgtccagaattggtccgaccagccttgggaaagtcactgaataatcttcaactggaccaagtccatccttaaaataatcattttcc

SEQ ID NO: 1527 - DNA, 328 bp, Bos taurus
  Clone ID: 07-LIB34-010-Q1-E2-B3
cttagccaaaaaaaagttgtaacttcgtaatcttggccacagctcctcctgttagacttggagcttttcttagtttttctcgagtcccgctgacctgcagggctttcctgctcgggcggcgcggcccccgcgcggctgagggtcaaaggtgccgcccgtggtggttgagcgtggggcgggggggcccggcccgggacccagggtgggccgtgctcacgcccgcaggctttgtactcgccttttgtacagctgtgagcgtgtaagaccagtccttgggtacctgttttcattgtaaagaccacctaattaaagtttagcttttctaagg

SEQ ID NO: 1528 - DNA, 408 bp, Bos taurus
  unsure (373): unsure at all n locations; Clone ID: 07-LIB34-011-Q1-E1-B11
gggtccacgcacgcgtccgaaaaaacaaaaaacttccaatatatttgtagcagtatagcatttatcaaaatggtaattttatacttattatggttatttgataactgtctgtgtaccccactagtcacaagctctaggagggtagaaactgaactcattttacctgcttattttattccttctatctagttgaaagtgaaagtcgctcagttcagttcagttcaattcagtcactcggtcttgtccgactctttgcgaccccatgaactgcggcacgccaggccccactgtccatcaccaactcctggagttcactcaaacttacgtccatcaagtcggtgatgccatccagccatctcatcctctgtcgtcnccttctcctcctgcccccaatccctcgcagcatca

SEQ ID NO: 1529 - DNA, 371 bp, Bos taurus
  Clone ID: 07-LIB34-011-Q1-E1-B3
acgataactgtagagaaggccagtatgtcagctctggtcctggagagccgagccttgggcaagaaactcagcgactttggacaggaaacgaactatattgaaggcaactctgatcaaaatgctgtatccctgatcttctcactcaaagaaaaaattggtgcaactggcagagtaatacgtttatttgaggagaatgatataaacctgacccacattgaatcaagaccttcacgtttaaggaaagacgagtatgaatttttcaccaatctggatcaacgcagcgtgcctgccctggcaaacatcatcaagatcttgagacatgacattggtgccactgtgcacgagcttttccgggataagaagaaagacac

SEQ ID NO: 1530 - DNA, 378 bp, Bos taurus
  unsure (85): unsure at all n locations; Clone ID: 07-LIB34-012-Q1-E1-B3
atcagatggaatactgccgcaccccgtgtactgttacttgcaatattcctgtggtgtctggcaaagaatgtgaggaaatcatcangaatggaggtgaaacatctgaaatgtacctcattcagcctgaggattctagcaaaccatatagagtatactgtgatatgaaaacggaaaaaggaggatggacagtaattcagaaccgtcaagatggtagtgttgactttggcaggaaatgggatccatataaacaaggatttggaaatattgcaaccaatgcagaagggaagaaatactgtggtgtaccaggtgagtattggctcggaaatgacagaattagccagcttaccaatatgggacccacaaagcttttgattgaaa

SEQ ID NO: 1531 - DNA, 388 bp, Bos taurus
  Clone ID: 07-LIB34-013-Q1-E1-B11
aggaaagccgctctggcagcgccggcgtgacccacccgccatgctccccccagcgctcgtcttgctgttggggtttctctgccacgttgctatcgcaggacgaacctgccccaagccagatgagctaccgttttccacggtggttccactgaaacggacctatgagcccggggagcagatagtcttctcctgccagccgggctacgtgtcccggggagggatccggcggtttacatgcccgctcacaggactctggcccatcaacacgctgaaatgcatgcccagagtatgtccttttgctgggatcttagaaaacggaacggtacgctatacaacgtttgagtatcccaacaccatcagcttttcttgcgacacggggttttatctg

SEQ ID NO: 1532 - DNA, 409 bp, Bos taurus
  Clone ID: 07-LIB34-014-Q1-E1-B3
gggtccacgcacgcgtccgaaacgcacaaaggctggatggattgggcagcgcacaagctaacaggtctcacctcttccatttcggagatgatccttggatcttttcagccaggaagagctgtccggaaattctgagttgatacaaaagtatagaaatatcattgcacatgcccccaacctggataacattgaactgtactggaacagctacaacaatcgccgagacctgaactttgtgcgtggaggcgataccaccctcaagtgccctgtgatgctggtggtaggagaccaagcaccccatgaagatgcagtggtggaatgtaactcaaaactggaccccacccagacttctttcctcaagatggctgactctggggggcaagcccagctgactcagccaggcaagctg

SEQ ID NO: 1533 - DNA, 362 bp, Bos taurus
  Clone ID: 07-LIB34-015-Q1-E1-B11
gatcgcgagcggccgcacttttttttcattttgttctcatatttcgttatattatgtatttttccaagtgtcaactccaacacacgtggaggtttcaagaagcctacgaaaagtgggtactaagtgttgtacaaagccggaatcagaaagaatgccctgtactgaagactatctgagcttgatcctgaaccggttgtgcgtgctgcatgagaagacaccagtgagtgaaaaagtcaccaagtgctgcacagagtcattggtgaacagacggccatgtttctctgctctgacacctgatgaaacatatgtacccaaagcctttgatgagaaattgttcaccttccatgcagatatatgcacac

SEQ ID NO: 1534 - DNA, 371 bp, Bos taurus
  Clone ID: 07-LIB34-015-Q1-E1-B3
ctcgtaggtccacgcaaccctctagagtgagtcgtatgatgctctggggtctgtccctgagcccagtgactgagcatgcgacgttctttgaccccaggccatccctgtgggccgatgccggctcagcgctggcaccctgggccgatgtgacgctgacctgccagagcccgctgccgacccaggagtttcagctcctcaaggatggcgtgggccaggaaccggtgcacctggagtcccctgcccatgagcacaggttcccgctgggaccagtgacgagcaccacccggggcctctagcgctgcatctacaagggcaacaaccattggatcatcccgagcaacctggtggaagtgaccggagcatagcccctg

SEQ ID NO: 1535 - DNA, 408 bp, Bos taurus
  Clone ID: 07-LIB34-018-Q1-E1-B11
aggaagggaaccggcaaaaactatggagggacggtggccgtcaccgagtccgggcacacatgtcagcgctggagcgagcagacaccccacaaacacaacaggaccccagaaaactttccatgcaaaaacttggaggaaaactactgtcgtaaccctaatggggagaaagccccatggtgttatacaaccaacagcgaagtgaggtgggaatactgcacaatcccgtcctgcgagtcctctccgttatccacggaacgcatggatgtcccagtaccacccgaacaaactcctgtgccccaagactgctaccatggtaacgggcagagttatcgaggcacgtcgtccactactatcacaggaaggaaatgccagtcgtggtcatcgatgacaccacacaggcatctgaag

SEQ ID NO: 1536 - DNA, 367 bp, Bos taurus
  Clone ID: 07-LIB34-018-Q1-E1-B3
acaggagaaagaggtgatacaggacgtggtggcagaaaaatgaagaggatcctggttttcctccttgctgtagcctttgtgcatgctctagagagaggccgagattatgagaaagataaagtctgcaaggaccttgccagcctgggaagagatgacttcacatctttgtcaatggtcctatacagcagaaaatttcccagtggcacctttgaacagatcagccatcttgtgaatgaagttgtttccttaacagtaacctgctgtgctgaaggggccgatcctgactgctatgacaacaggacttcagcattgtctgacaagtcctgtgaaagcaactctccattcccaatgcaccctggaactcctg

SEQ ID NO: 1537 - DNA, 420 bp, Bos taurus
  Clone ID: 07-LIB34-019-Q1-E1-B4
cacagaggctacccaagatgtaaaatttcattgggactgaaataattttggttcagtgacaaaatttattacttaatgtatattataaattctaacaaatagtggtatctttgaataaaatagatgaacactagctaatgataaagtgagtcctatagacaaaaatctttcaaggtcaatagaataatcaacagtcaagacctatatcttgaaaaaattaagaagtcctcttctgaacacttgaaaacactgttgcaatggttaaaacccacaactaatttatctgtttctgttaacgtctatagtttttgatgattttcctgtgattatcacactatctctaggaatatgtgattgttgactacgtttctattttaagattgagtgtttccagcacacaaagacctctcattgatctga

SEQ ID NO: 1538 - DNA, 366 bp, Bos taurus
  Clone ID: 07-LIB34-020-Q1-E1-B11
gcctgcaggggcccgaggggacccctgtgtcttggtccctgatggaccagacgggagagatgcggatggcaggcaccctgcctgagtaccgggcccaggggctcgtcacccacgccatctaccagcaggcccagtgtctgctcaagcggggcttccctgtgtactctcatgtggaccccaagaaccagatcatgcagaagatgagtcagagcctcaaccacgtgccaatgccctctgactggaaccagtggaactgtgagcctctgtgatcggccctgagcaggagccagggtggaggggtctgaggacgtgacggagggcagagcgtggtggagggagtaataaattgtggctgcaatcaccatg

SEQ ID NO: 1539 - DNA, 366 bp, Bos taurus
  Clone ID: 07-LIB34-020-Q1-E2-B11
gcctgctggggcccgaggggacccctgtgtcttggtccctgatggaccagacgggagagatgcggatggcaggcaccctgcctgagtaccgggcccaggggctcgtcacccacgccatctaccagcaggcccagtgtctgctcaagcggggcttccctgtgtactctcatgtggaccccaagaaccagatcatgcagaagatgagtcagagcctcaaccacgtgccaatgccctctgactggaaccagtggaactgtgagcctctgtgatcggccctgagcaggagccagggtggaggggtctgaggacgtgacggagggcagagcgtggtggagggagtaataaattgtggctgcaatcaccatg

SEQ ID NO: 1540 - DNA, 428 bp, Bos taurus
  unsure (330): unsure at all n locations; Clone ID: 07-LIB34-021-Q1-E1-B11
tacatagcttccaagtagaccccactggctaccttggtgcggcattttcaacagcacagaatcaccctttacacgatcaaaagatgctgtttcatctaaggaccctgttgaacaatgcagctcttagaaatggtcacaatttcgtggttcgaaattttcgatgtgggcaaccactacaggataaagtacagctgaagggccgtgacctcctcactctaaagaactttacaggagaagaaattaagtatatgctatggctatcagcagatctgaaattcaggataaaacagaaaggagagtatttgcctttactgcaagggaagtccttangcatgatttttgaaaaaagaagtactcgaacaagattgtccacagaaacaggctttgcacttctgggaggacacccttgttttcctactacggacgat

SEQ ID NO: 1541 - DNA, 228 bp, Bos taurus
  Clone ID: 07-LIB34-024-Q1-E1-B3
tcataggacgacgcaagactctaaaatgagtcttattaaactttaccacaagtctatgacactgaaagaagccatcaagtcttcactcataatcctcagacaagtaatggatgagaatctgaatgcaactaacatagagctagccacagtgcagcctggccagaatttccacatgttcacaaaggaagaacttgaagaggttatcacggagatttaaggaagtgtgat

SEQ ID NO: 1542 - DNA, 406 bp, Bos taurus
  Clone ID: 07-LIB34-026-Q1-E1-B3
gtgacatatgacgtggcggcaaccctgtgaacatgatcctggttttccgcattgtcagtagcctttgtgcatgctctacagagatgccgagattactggaatgatacaggctggatggagcttgccaggctgagatgagacgacttcacatcgttgtcaatggtcctattcaacagagactttcccaatggcaactttggacacatgagccatcctgtgaatgtaattgtttccttatcagtaagactgctgtacggaaggggccgatcctgacatctatgacaatatgacctcagcaatgtctgacacgtcctgtgaatgcaactctccattcccagtgcaccctgaaactcctgagtgctgcaactatgacggccatgacatcaaggtctgtattgatgccctg

SEQ ID NO: 1543 - DNA, 412 bp, Bos taurus
  Clone ID: 07-LIB34-027-Q1-E1-B11
gaacgtgataggaattttgttactcttcccgtttcaagtagaaagtcatttctctgcaagtctcggaaatcagcactgttgttttctaaagaccccactgatgcgttgaagtatatccaccttccacgtctctgcacttctgagtaaggagcggggagtgtgctaattaacccaccagcacctgttgaacagtgtctgttgtagcaattttgcatacatttgtattttatttaagggaaaaaatttaggtagtgtgaaatattttgctaatcctataaagaaggaaagaaaactcttctattaaaggaaaaagtaaatttaacagttaccttttttctttatgtcagggggtaggtcttatttacagtagagtgggcaagggctgtatagaaacatgagaaaactgaacttt

SEQ ID NO: 1544 - DNA, 420 bp, Bos taurus
  unsure (406): unsure at all n locations; Clone ID: 07-LIB34-027-Q1-E1-B3
aacggaacggtctcccagaagcaatttagaatgactggtaaaacgaaatatacccaaagctcgcagcaacaaaaaaggatacagttctttctggccagcttcctgcttctgccctttctgctcgtctgcatcgtagagtctctcctgaagctttttattcctaagaagagaaaatcagtcaccggagagattgtccttattaccggagctggacacggtattggcaggcagactgcctacgaatttgccaaacttaagtgcaagctggtcctgtgggatataaataagcatggacttgaggaaacagccaccgaatgcaagagactgggtgcaaaggctcatacctttgtggtagactgtagtaaccgagaagatatttacagctctgcaaagaacgtgaaagcanaagttggagatgtt

SEQ ID NO: 1545 - DNA, 420 bp, Bos taurus
  Clone ID: 07-LIB34-030-Q1-E1-B3
aagacggtggaggtgcccatgatgacccttgacctggaaaccccttacttccgggacgaggagctgggctgcacgctggtggagctcacgtacaccagcaacgacagcgccctcttcatcctccccgacgagggcaaaatgcgggacctggaagccaagctgaccccggagacgctgacgaggtggcgaaactccctgcagcccagacgaatacatgaactctacctgccaaaattttccatcaaaagcaactatgaactgaatgacatcctctcccagctgggcattaggaaaatatttgccaacgctgacttgtcaggaatcacagggaccgcggacctggtagtctcccaggtggtccacggggctgcgctggacgtggaccaggagggcacggaaggagctgctggcacgggaatc

SEQ ID NO: 1546 - DNA, 376 bp, Bos taurus
  Clone ID: 07-LIB34-031-Q1-E1-B11
attgggaacgcacactcacccgcgggaagagccttgcaagggaccctttggcctctgacctgatcgtccaaagagaaagggaacctcggcatccgtgccccccagcccagctctgcagagatgcctcctcagctctcagacggcctcaactactcagccaaaatcgtccggggctccctggacagcctgccccaagccgtgagggagttcgtggagagcagcgccaagctgtgccggcctgaccaagtccacatctgcgatggctccgaggaggagaaccggcagctgctgagccacatggaggatgagggtgttatcaagaggctgaagaagtatgacaactgctgggtgggtcccactgaccccagggatgtgg

SEQ ID NO: 1547 - DNA, 403 bp, Bos taurus
  Clone ID: 07-LIB34-031-Q1-E1-B3
gaaattatgaaatatgaaacactgatatcaacacatgaatcaacaattcgatttttgcaagaaatatataactcaaatagtcaaaaaatcgttaacctaagagataaagtggtccagcttgaagcaaactgtcaagagccttgtcaagatacagtgaaaatacatgatgtaactgggagagattgccaagatgttgccaataagggggccaaagagagtggactttactttatcagacctctgaaagctaagcagcagttcttagtctactgtgaaattgatgggtctggaaatggatggactgtgtttcagaagaggcttgatggcagtctggatttcaagaaaaactggattcaatataaagaagggtttggacatctgtctcctactggaaacacagaat

SEQ ID NO: 1548 - DNA, 371 bp, Bos taurus
  Clone ID: 07-LIB34-032-Q1-E1-B3
ggtcgacgcacgcgtcagctcacagagaatgcctgtttggagttgtcaagagcgggcgcaggcgagcccggggccctcggacttggacgccaagctgacggaggcggaggagacgcagagtggcctgcaggccgagtgtgaccagtacggcagcattctggccgagacggaggccatgctcaacgcactgcagaagaccgtggacgatgaggagcacgtgtggaaagcccgggtgagcgccgccgaggaggagctccaggagtcacgggtcaccgtaaaacatctccaagaggttgtccaaatgctcagaagggaactttgagacttctgatcaggtcagggagcacagctggcgccttgaagccgagctg

SEQ ID NO: 1549 - DNA, 203 bp, Bos taurus
  Clone ID: 07-LIB34-034-Q1-E1-B3
ccgggtcgacaaacgcgtccacccgattcctcgcaaaaagtcttcaatgagtgaatcaggcaacatggtactacagttagtcatctgctggctccagactacatggcgtctgcactgatgggctttttggtggtgctggactcggccctacagtacagatcgtgcactttctcagcactgttgcgcaaactcatcgaggctac

SEQ ID NO: 1550 - DNA, 418 bp, Bos taurus
  Clone ID: 07-LIB34-035-Q1-E1-B11
taccggtctagcattcgcgggtcaaatcccacgtaaagaatgcttacctgagcatgaatgacatctccacggaggggaggttcacttaccccactggggaaatactggtctattccaactgggccgatggggagcccaacaacagtgatgagggacaaccagagaactgtgtggaaatctttcctgatggcaagtggaatgacgtaccctgcagtaagcaactccttgtgatctgcgagttttgagctctcccacccaccccagggaaggggcagtgcccagagctgtgagctgccaacatcccaataaaaaggtgaccctctgctgctcagggcttccccactgagccacgggatgaggccaccaggcaggcctcctatggaactcctccctcagaataaagtttgaaactggcttc

SEQ ID NO: 1551 - DNA, 430 bp, Bos taurus
  Clone ID: 07-LIB34-035-Q1-E1-B3
aaaaaacacgcatgtggttttgagtatagctctaaacttcagcggatgtttcaagacattggtgtaagcaaagatttgaacgagcagttcaaaaagcacctaacgaactccgagccacttgacttggatttcagtattcaagtgctgagttccggatcgtggccctttcagcagtcttgcacgtttgccttgccgtcggagctggaacggagttaccagcgattcacagccttttacgccagccgtcacagtggcagaaaattgacgtggttatatcagctgtcacaaggagaattagtaacaaactgcttcaaaaacagatacactttgcaggcatccacattccagatgggcatcctgctccagtataacacagaggactcctatgccgtgcagcagctgacggacagcacccatatcaaaatggaca

SEQ ID NO: 1552 - DNA, 418 bp, Bos taurus
  Clone ID: 07-LIB34-036-Q1-E1-B3
accgactattaaacaatcgctttgtaaccctccaacaatgaatacttcaacttgtatcaaaacaaataatgagtatccacaattctaaaggacaaacatgaacattaatattaatatctctgatcctatttattggatcaacaaacctactaggcctattaccccattcattcacaccaacaacacaactatcaataaacctaggcatagccatccccctgtgagcaggagccgtaattacaggattccgcaataaaactaaagcatcacttgcccatttcttaccacaaggaacacccactccactaatcccaatactagtaattattgaaactatcagcctttttattcaacctatagccctcgccgtgcggttaacagctaacatcactgcaggacacctattaattcacctaat

SEQ ID NO: 1553 - DNA, 429 bp, Bos taurus
  Clone ID: 07-LIB34-037-Q1-E1-B3
ctggcggctcaggcagagaagcagcaccatgaccggcaagaaagtctgcattgtaggctctggcaactggggctcagccatcgccaagattgtgggtggcaatgcagcccagctggcacactttgacccacgggtgaccatgtgggtgtttgaggaagacatcgggggcagaaagctgacagagatcatcaacacacagcacgagaatgtcaaatacctgccagggcacaagctgccccccaatgtggtggctgtccctgatgtggtccaggctgcagcggatgccgacatcctgatctttgtggtgccccatcagttcatcggcaagatctgtgatcagctcaagggccacctgaaggccgacaccattggcgtgtctcttattaagggggtagacgaaggccccaaggggctgaagctcatctctga

SEQ ID NO: 1554 - DNA, 395 bp, Bos taurus
  Clone ID: 07-LIB34-038-Q1-E1-B3
gatcccccaagggcaccatggccgccctgggcatcacggtcgccctgctggtgtggatggccaccctgctgttcatctccatctggaagcacatctacagcagctggaaactgccccctggccctttcccactgcccatcatcgggaatcttttacagctggatattaagaacattcccaaatccttcaccaggctggcggagaggtacgggccggtgttcaccctgtacctgggctctcagcgtgccgtggtcgtgcatggctacaagcccgtgaaggaggtcctgcttgactacaagaacgagttttctggcagaggagaaaaccctgggttccagatgcacaagaacaatgggatcattttcaacaatggatcaacctggcgggacacccga

SEQ ID NO: 1555 - DNA, 433 bp, Bos taurus
  Clone ID: 07-LIB34-039-Q1-E1-B3
gcgacagacatggcagcggccaagcccgagaacctctccctggtggtgcacggacccggagacttgcgcttggaaaactatcctatccctgaaccaggcccaaatgaggtgcttctgaagatgcattctgttggaatttgtggctcagatgtccattactggcagcatggtcgaattggagattttgttgtgaaaaagccaatggtgctggggcatgaagcttcaggaacagtcgtaaaagtgggatcattggtcaggcacctacaaccaggtgatcgtgtcgccatcgagcctggtgctcctcgagaaactgatgagttctgcaagattggccgatacaatctgtcacctagcatcttcttctgcgccacgccccccgatgatgggaacctctgccggttctacaagcacaatgctaacttctgctagaagc

SEQ ID NO: 1556 - DNA, 424 bp, Bos taurus
  Clone ID: 07-LIB34-040-Q1-E1-B11
gcgggttaacgcaagcgtccataattggtccaacaaattttgcatgtttctagtgtaggttgtttttttttttttttaaggaaggcccagatataatagcttaaagatttctaataattgttgtacaaggaaacagtcagagagatgatgaagagagaaagtggcctccatgacgtagaagggatactctatctcgtcgttgattaaaaacaccagcaatgtcaacaagaagcctaagaagcatgagagaacattgccgctggcacatctctgagcttaaacagtttgcacaaaggttttgattgcacagagattctcagctaacagtttctcacgttttacagactcgccttcggaagtgaaaactgcgtttctgcccccatgatgagatcttgaatcgcgagtctgggttttttttgggggg

SEQ ID NO: 1557 - DNA, 429 bp, Bos taurus
  Clone ID: 07-LIB34-040-Q1-E1-B3
agctcgtggggggacttgacatgctcattctcaaccacatccactacacgcctttgggggtgtttagcaatgacatccatctcttgcgcagaaccctggaggtcaaccttctgagttatgtggtcctgagcacagccgccttgcccatgctgaagcagaccaacgggagcattgtggtcgtctcctccatagccgggaaaatagcttgtccacttgttgctgcgtattctgcaagcaagtttgctctggatgggttcttctcctctctcaggatggaatatgaggcgaccaaggtcaatgtgtcaatcaccctctgtattcttggcctcatcgacacagacacagccatgaaggcagttgctgggatatttaatgcaaaagcatctccaaaggaagaatgtgccctggagattatcaaacggggaactc

SEQ ID NO: 1558 - DNA, 402 bp, Bos taurus
  Clone ID: 07-LIB34-041-Q1-E1-B11
ggcggcggctctggatccactgcccacatcccgctctcgcaggcagacatgagggcagagagaacttccttcctcctggccctggggctcctggtggctgggatccgcagtgtccactgcctcccagagaatgtggtggtgaaggaccagcacagaagggtggatggccacacgttagcctccagcaacaccgacttcgccttcagcctctacaagcagttggctttgaagaaccccaataagaatgtcatcttatccccgctgagtgtctccatagccttggccttcctgtctctgggggcccgtggctccaccctgacagagatcctggaaggtctcaagttcaacctcacagagattcaggagaaagaaatacaccatagctttcagcaactcctgcag

SEQ ID NO: 1559 - DNA, 421 bp, Bos taurus
  Clone ID: 07-LIB34-041-Q1-E1-B3
gaaggtctcaagttcaacctcacagagacccccgagacagaaatccaccagggcttccagcacctcctgcagacgttcaatcagcccagcaaccagctgcagctgagcgtgggcaacgccatgtttgtgtcagaggagctgaagctgctggacaaattcaggaaagatgccgaggctttttacgcctctgaggttttatccactaacttcaaggattctgaagctgccgtaaagcttatcaatgaatatgtgaagaataaaactcatggaaaaattgagaagctcttcaatgatcttgacgtgctcacaaatttaatcttgttgaattatatcttctttaaaggccagtggaagacgccatttaatcctaaccatacttacgaatcagagttcacgtgagccagaacgagagggtgattgt

SEQ ID NO: 1560 - DNA, 379 bp, Bos taurus
  Clone ID: 07-LIB34-043-Q1-E1-B11
cccacgcgtccggaaagtgcctactgcacatctggaagatgttctgccacttgctgaagatattacaacaatcctctccaagtgctgtgactctgtctctgaggactgcatcaaggagcttcctgaatatgcagtaaaactctgtgacaacttatccactaaaaattcgaaatttaaggactgttgtcaagaaaaaacacccatggagatatttgtgtgcgcttacttcatgccagcttccccaaaccctgaattgccagatgtcaagttgcccatgaacaaagatgtgtgtgatgaaggaaacaccaaggtcctggatcagtatatatttgaactaagcaggaagactcggattccagaagtattcctcactaaaata

SEQ ID NO: 1561 - DNA, 326 bp, Bos taurus
  Clone ID: 07-LIB34-043-Q1-E1-B3
attagcagccggcatcacaatgctattaacagaccggaacctaaatacaaccttcttcgacccggcaggaggaggagaccctattctatatcaacacttattctgattctttggacaccccgaagtctatattttaatcttacctgggtttggaataatctctcatatcgtgacctactactcaggaaaaaaagaaccattcggatatatgggaatagtttgggctataatgtcaatcggatttctagggttcatcgtatgagcccaccatatattcactgtcggaatagacgttgacacacgagcctacttcacattagccacta

SEQ ID NO: 1562 - DNA, 472 bp, Bos taurus
  Clone ID: 07-LIB34-045-Q1-E1-B11
caagagtatgatggaagaaattatgaaatatgaaacactgatatcaacacatgaatcaacaattcgatttttgcaagaaatatataactcaaatagtcaaaaaatcgttaacctaagagataaagtggtccagcttgaagcaaactgtcaagagccttgtcaagatacagtgaaaatacatgatgtaactgggagagattgccaagatgttgccaataagggggccaaagagagtggactttactttatcagacctctgaaagctaagcagcagttcttagtctactgtgaaattgatgggtctggaaatggatggactgtgtttcagaagaggcttgatggcagtctggatttcaagaaaaactggattcaatataaagaagggtttggacatctgtctcctactggaaacacagaattttggctgggaaatgagaagattcatttgataagcacacaagtctaacatccc

SEQ ID NO: 1563 - DNA, 395 bp, Bos taurus
  Clone ID: 07-LIB34-045-Q1-E1-B3
catccaggactgttgcctggaaaatcccatggacagaggagcctggtaagctacagcccatggggtcacaaagagtcggacacaactgagcgacttcactttcaaaggttatggctctgaatttgaacacattacctaactctggaatgggcgaatttaactcagataatcattatatctaccactgtgggcaagaatcccttagaagaaatggagtagccctcatagtcaaaaaaaagagtccaaaatgcagttcttgggtgcagtctcaaaaatggacagaatgatctctgctcttttccaaggcaaaccattcagtatcactgtaatccaagcctatgctccaaccagtaatgctgaagaagctgaagttgaatgggtctgtgaagacctac

SEQ ID NO: 1564 - DNA, 416 bp, Bos taurus
  Clone ID: 07-LIB34-046-Q1-E1-B3
caggaagtcgccgggaagaagcccagtaccggcccgccgtgtctgtcctccatggctgccacgctgctcgcccgggcctgtggccttgtccgcggagccccctggccttggggctggcgtcgcctacataccgtctaccagtctgttgaactgcccgagactcaccagatgctgcggcagacgtgccgcgactttgccgagaaggagctctttcccatcgcatcccaggtggacaaggagcatcgcttcccaacagctcaggtgaagaagatgggcgagctggggcttatggccatgaatgtgcccgaagagctcagcggagccggccttgattacctggcctactccatcgccatggacgagatcagccggggctgtgcctccacgggagtcatcatgagtgtcaacaattccct

SEQ ID NO: 1565 - DNA, 435 bp, Bos taurus
  Clone ID: 07-LIB34-047-Q1-E1-B11
gggtccagcacgcgtccggactcgagcagggagctggtggctcttccatccccagaccagccaagcctgtgagtgacaccccagacagaggaaccagagccatgcggagtctcagcggactgctgttgttactgactgcctgcctggcggtaaacgccagctccgtgcccacattgcccgatgacattcaagtgcaggagaacttcgacctgtctaggatctatgggaagtggttcaatgtggccgtgggctccacctgcccatggctgaagaggttcaaggagaagatgaccatgagcacagtggtgttgaaagcggggccgacgagcaaggagatcagcgtcaccaacactcacaggcggaaaggtgtctgtgaatcgatctctggtacttatgagaaaacaagcactgatgggaagtttctctatcacaaag

SEQ ID NO: 1566 - DNA, 404 bp, Bos taurus
  unsure (331),(343): unsure at all n locations; Clone ID: 07-LIB34-047-Q1-E1-B3
ataagaatggtttagcaccaggcgccccacgaacgtgcggtgcgtgacgggcgagggggcggccgcctttccggccgcgccccgtgtcccgggacgaagggctctccgcaccggaccccggtcccgacgcgcggcgggggcgcgccgcgccgcgccccgggggacgcgggcgacggcccgccggcggggacggcgggggaccggctatccgaggccaaccgaggctcccgcggcgctgccgtatcgttccgcctgggcgggattctgacttagaggcgttcagtcataatcgcacagatggtagcttcgccccattggctcctcagccaancacatacaccanatgtctgaacctgcggttcctctcgtactgagcaggattaccatggcaacaagacatcatc

SEQ ID NO: 1567 - DNA, 389 bp, Bos taurus
  Clone ID: 07-LIB34-049-Q1-E1-B3
tttttatttttggtttttttttttttttcacggtaaattcagtctccttatttttccgtttccatcagattctcaggcagacacatataagcatgacatttaattttcagtgtgaaaaccagcttagcatggatttacgtcagatgcatccgttttccagaaagctaaagaactgtgctccttgaagcatttgggaatctcgaaggtgccgtctatgcactgagcatcttctgtgtagctgcacttcgtttccttattcttgcagaacaaagaaactttttggccatgcagcattccatgtgaggaggtggtcaacgaaagcgcttcaatgcctgagggaaggagaagagtcgggtccatgaacattgcaggtttctggattttagctc

SEQ ID NO: 1568 - DNA, 433 bp, Bos taurus
  Clone ID: 07-LIB34-050-Q1-E1-B11
tacatcacttcattcaaagtcttggtcatcgaacatctattagttacacagatagcaaagcatgtaactgttgcctccttgtctcccagtgataagcccatggaacattttagagaaaatgggtaatcagaagagggaattggtcaataaatatgactgaactacaaagaaatgaaaaatgattaacactgcagataaaattagtgttagaagctttgaaaatggccactgcaaagcaaatataggatgataccacgaccaacatgaagctacagtacaagccacattttttgagtctgatgaatataaaagcaaggtaaagttggttcaacatcttttagtgtaaaatttcaccaagaacagaaagccgcttatggttgagatgaagcatttacttctcctttgtagtgtaatcaagaacaaataccaatca

SEQ ID NO: 1569 - DNA, 245 bp, Bos taurus
  Clone ID: 07-LIB34-051-Q1-E1-B11
ctttggcacaatgaagtgggtgacttttatttctcttctccttctcttcagctctgcttattccaggggtgtgtttcgtcgagatacacacaagagtgagattgctcatcggtttaaagatttgggagaagaacattttaaaggcctggtactgattgccttttctcagtatctccagcagtgtccatttgatgagcatgtaaaattagtgaacgaactaactgagtttgcaaaaacatgtgttg

SEQ ID NO: 1570 - DNA, 238 bp, Bos taurus
  Clone ID: 07-LIB34-051-Q1-E1-B3
gacggacgggcactgggcgactctgtgcctcgcggaggaaaaataattaaacatgggcaaaggagatcctaagaagccgagaggcaaaatgtcatcatatgcattctttgtgcaaacttgccgggaggagcacaagaagaagcacccggatgcttctgtcaacttctcagagttttctaagaagtgctcagagaggtggaagaccatgtctgctaaagagaaaggaaaatttgaagac

SEQ ID NO: 1571 - DNA, 105 bp, Bos taurus
  Clone ID: 07-LIB34-052-Q1-E1-B3
caatgacggccatcagtgaaaatattctctttggaatgggaaatcctcttcttgatatctctgctgtagtggataaggatttccttgataagtattctccttaaa

SEQ ID NO: 1572 - DNA, 345 bp, Bos taurus
  Clone ID: 07-LIB34-055-Q1-E1-B11
ctagtcccaacactcattattattacccgatgaggaaaccaaacagaacgcctaaacgccggactctatttcctattctatacactagctggctccctacccctattagtcgcactaatttatatccaaaacacagtaggatccctaaatttcctaatattacagtactgagtacaacctgttcataactcttgatctaatgtcttcatatgactagcatgtataatagctttcatagtaaaaataccactatatggcctccacctttgactacctaaagctcacgtagaagcccccatcgcaggctccatagtccttgcagcagttctactaaaactagggggg

SEQ ID NO: 1573 - DNA, 355 bp, Bos taurus
  Clone ID: 07-LIB34-055-Q1-E1-B3
aggtgcctcggggctcctgggcccggtggggtcagagagggattggttctcgctaagtggactcaagcggcggatcctgagtctggcctcggatccgtcggaggcggtgggtgtgcggccgtccttccggcgccatgtcgttctgcagcttcttcggaggcgagattttccagaaccactttgagccgggtatctacgtgtgtgccaagtgtggctatgagctcttctccagccgctccaagtacgcacactcatccccatggccggcgttcactgagaccatccatgctgacagtgtggccaagcggccagagcacaatcggcctggagccataaaggtatcctgtggcaggtg

SEQ ID NO: 1574 - DNA, 372 bp, Bos taurus
  Clone ID: 07-LIB34-056-Q1-E1-B3
aaagtccaagatcaaggggccagcagagttggttctgatgcaatctctctccctagctcctcactgccaccatgtgtcgtcactgtattcctatgtggtctttcctcgaggtacctgtggaaggaatgaactctctggtctcttcatataaggacaccaaaccaagcagatcagcactccagccttaggatctcatttaaccccgatttcctccctaacagccctattttctgatgtaatcacattggggcttaggattttgacataggaatttgaaggggacacagtgcagtccatagcagcctctcttgcaaattttaattggcaagaaaaagttggatgtgaatcaaacattttgacaccaaagaaatt

SEQ ID NO: 1575 - DNA, 228 bp, Bos taurus
  Clone ID: 07-LIB34-057-Q1-E1-B11
tgccactgtcgacatctggtatttgaaaaaacagggtctgcaatcacctgacagtgtacagaaaagctcccctctttgtgtagctgacagggccttttggcggaggagaatgtcattgaatcttgacagtgacgtttgcctccagctgcctgacaggcagcaggtcagcagctcaaccccacagaagccagcaccaagtgaagctgaaaaaataaggccaaaatgtga

SEQ ID NO: 1576 - DNA, 227 bp, Bos taurus
  Clone ID: 07-LIB34-057-Q1-E1-B3
acgccaggaaagtaccccaagtgtcaactccaactctcgtggaggtttcaagaagcctaggaaaagtgggtactaggtgttgtacaaagccggaatcagaaagaatgccctgtactgaagactatctgagcttgatcctgaaccggttgtgcgtgctgcatgagaagacaccagtgagtgaaaaagtcaccaagtgctgcacagagtcattggtgaacagacggcca

SEQ ID NO: 1577 - DNA, 225 bp, Bos taurus
  Clone ID: 07-LIB34-058-Q1-E1-B3
ataatctttactgagcagtagtaatagtttattaattgaaagtttaccactgcatgttttctgactacataactcttcaaattgggcctttgctcattttggattaaattcccaccttactgccaattaaatgaattttccaacgaataatgcataccgagaatgaaagtatattgaaaaaatggtgaattctttttaagtaacatgcttctagaacaaaatatt

SEQ ID NO: 1578 - DNA, 207 bp, Bos taurus
  Clone ID: 07-LIB34-059-Q1-E1-B3
atgcggacttctcaggaatcacagatgaccacaagctggcagtttcccacgtgatccacaaggctgtgctcgacgtgggcgaggagggcacggaaggagctgctgtcacggctgtcgtaatggctacctcatcactcttgcacacgctaactgtcagtttcaacaggccctttctgctttccatattctgcaaagagactcagagca

SEQ ID NO: 1579 - DNA, 316 bp, Bos taurus
  Clone ID: 07-LIB34-060-Q1-E1-B11
gtctaacaatatgtataagttctatatgaggaaaactacaaaaccctgaatgaaataaagaagaaacaaatgacagatattccatgttcatggacaggaaatccgaatattgtccattcagtgattcaatgcagattcaatgcaatccaaataaaaacccagtaagtcattttatggatatcgataaactgattctgaagtttatatggagacacaaaagtctctaaatagccaatacaatattgaaggagaacagaattggagagctgatactgtattttgactttgagacttactgatactataaagccatggt

SEQ ID NO: 1580 - DNA, 241 bp, Bos taurus
  Clone ID: 07-LIB34-060-Q1-E1-B3
cgaagatcttcggaggggaaatcaagactcacatcctgctgttcctgccgaaaagcgtgtctgactatgagggcaagctgagcaacttcaaaaaagcggctgagagcttcaagggcaagatcctgtttatcttcatcgacagcgaccacactgacaaccagcgcatcctggaattcttcggcctaaagaaagaggagtgcccggccgtgcgcctcatcacgctggaggaggagatgaccaa

SEQ ID NO: 1581 - DNA, 399 bp, Bos taurus
  Clone ID: 07-LIB34-061-Q1-E1-B11
aaaccgggataacctcgaactttaagaaggcaaacatggcttcaactacccagcgaaaaaggatgagtcctaaacctgagcttaccgaagagcagaaacaggaaattcgagaagcctttgatctgtttgatgctgatggaactgggacaattgatgttaaggaacttaaggtggcaatgagggcgctgggctttgaaccgaataaagaagagatcaagaaaatgataagtgaaattgataaagaatggacaggaaaaatgaactttagtgactttttaactgtcatgactcagaaaatgtctgagaaggataccaaagaagaaatcctgaaagccttcaagctctttgatgatgatgagactgggaagatatcgttcaaaaacctcaaacgtgtggcca

SEQ ID NO: 1582 - DNA, 360 bp, Bos taurus
  unsure (334): unsure at all n locations; Clone ID: 07-LIB34-061-Q1-E1-B3
gttctgaaaccctaaaggacgcaccggtaattgccccggtccaaccttctcaacttgctttcctgtgtcaaatagcactgcagactccagtactagcctgtccagagcagcaagtgagaggaaacaagccagcattgtaagaggacatgcttctcctccctctctccgtgctgctcctgctcacacagccctggagatccctgggagcagaaatgacaaccttttctcagaaaatactggccaatgcctgtaccctggttatgtgtagccccctggagagtggcttgcctggtcatgatggacaagatgggagaaatgtccccatggagagaanggggattcaggttcaccaggacctgc

SEQ ID NO: 1583 - DNA, 213 bp, Bos taurus
  Clone ID: 07-LIB34-062-Q1-E1-B11
tacacaatcaagatataataaaacaaaacatttaatcccaatttatagtataggagatagaaatctaagtacggcgctatcgagaaagtaccgcaggggaacgatgaaagaaaaagctaaaagtataaaaaagcaaagattaccccttgtaccttttgcataatgaattaactagtataagacttaacataatgaattttagctaagcagccc

SEQ ID NO: 1584 - DNA, 217 bp, Bos taurus
  unsure (12),(16): unsure at all n locations; Clone ID: 07-LIB34-062-Q1-E1-B3
aagttcccgggntcancccaagcgtccgtcggagccccgggcccgccgacaccatgagttggcctcgcacctccgagtgtaatcttctacattctttcattgctttcttcagcatgcctggcatatgttgctacccgagacaactgctgcatcttagatgaaagatttggtagttattgcccaactacctgtggaattgcagatttcctgaataatt

SEQ ID NO: 1585 - DNA, 370 bp, Bos taurus
  Clone ID: 07-LIB34-063-Q1-E1-B3
ccagctcaaccaaatcaactacgcagatcacaagttgaaggcagggaccaataccaacagggctctcctggaactgtacaacatgatgagcacggaagtaaaccagttcaaagagacctgtaaccgcacgcgccacgtcatcatcatcatgactgaccgtttgcacaacatgggtggggatccagtcactgtcattcacgatattcggtacttgctacacattggtagaaatcgcaaaaaccccattgaggattatctggatatctatgtgttccgggttggacctctagtgaaccatgagaacatcaatgctttggcttccaagaaggataaagagaaacacctgttcaaactccaaggcatggaaaac

SEQ ID NO: 1586 - DNA, 369 bp, Bos taurus
  unsure (123),(302): unsure at all n locations; Clone ID: 07-LIB34-064-Q1-E1-B3
aaggggtttccctgaaattcgggggaaaaagtccttgcattgggtttgctgatgccgacttggacaatgcggttgaatttgcacaccaaggagtattctatcaccagggccagtgttgtatanctgcatcccgtctctttgtagaagaatcaatttacgatgagtttgttcgaatgagtgttgagcgggcgaaaaagtatgttcttggaaatcctcctgacctcagagtcagtcaaggccctcaaattgataaagaacaatatgaaaaaatacttgacctcattgaaagtgggaagaacganggggccaagctggaatgtggccgaggcccttgggggaataaaggctacgttatccaaccacagtttt

SEQ ID NO: 1587 - DNA, 240 bp, Bos taurus
  Clone ID: 07-LIB34-065-Q1-E1-B3
ccgggtcgacccaagcgaccgcaaaactttggcacaatgaagtgggtgacttttatttctcttctccttctcttcagctctgcttattccaggggtgtgtttcgtcgagatacacacaagagtgagattgctcatcggtttaaagatttgggagaagaacattttaaaggcctggtactgattgccttttctcagtatctccagcagtgtccatttgatgagcatgtaaaattagtgaac

SEQ ID NO: 1588 - DNA, 201 bp, Bos taurus
  Clone ID: 07-LIB34-066-Q1-E1-B11
ctcccagaagcaatttagaatgactggtaaaacgaaatatacccaaagctcgcagcaacaaaaaaggatacagttctttctggccagcttcctgcttctgccctttctgctcgtctgcatcgtagagtctctcctgaagctttttattcctaagaagagaaaatcagtcaccggagagattgtccttattaccggagctgg

SEQ ID NO: 1589 - DNA, 253 bp, Bos taurus
  Clone ID: 07-LIB34-066-Q1-E1-B3
cctcacctggttccagtaccactctctggatgtgattgggttcctgctggcctgtgtggcaactgttgtatttgtcaccacaaaatgctttctcctttgttaccgcaagtttgctaaaacaggaaagaagcaaaaaagggagtagctaaaggcgttatgcccctagatggaactcctccagtttattccagcacaaaagagttatgatgagcttcccctgtgacaaaacaacaattcacaatttagcatgtca

SEQ ID NO: 1590 - DNA, 214 bp, Bos taurus
  Clone ID: 07-LIB34-069-Q1-E1-B3
agggatgctgccggccagtcccaaaatggaacataaggcggtggtgttcctacttctcttatttctgaaatcaggtctcggagacctcctggatgactatgtaaacacccagggggcttccctgcttagtttgagtcggaagaacctggcgggaagaagcgtagaggactgtgcagccaagtgtgaggaggagacagacttcgtttgcagggca

SEQ ID NO: 1591 - DNA, 245 bp, Bos taurus
  Clone ID: 07-LIB34-070-Q1-E1-B11
gggccgaaccatcaccgccgtgctcaccaccttctgcgtccagatgggctaccttctggccggatattacaacacagccaccggcacctaccacatcaagtggacaatgccacactgtgtcctgaccttgaagctgatcggtctggccatggactactatgacggagggaaggatcagaaatccctgacctccgagcaagcagatatacgctatatggggggtgtcccctcccctgcttgggaaa

SEQ ID NO: 1592 - DNA, 287 bp, Bos taurus
  Clone ID: 07-LIB34-071-Q1-E1-B3
accaaccttgggcaaagtcaattgggcgacattgatatcccctatcattctcggcattccggcgcaggcaaccgtgttctgcctgccacacatctccatgactggaattgtccatcgacactactgtcttggaaaaaaatgattatcccagcatgatacagacgtgccatatcacagtatctacactggtgaccatttccttcacaagataccatcatttggcacatcactccattagcagcaacatcttcttctcgatcattcgcattgcttcagtcattgctcac

SEQ ID NO: 1593 - DNA, 423 bp, Bos taurus
  Clone ID: 07-LIB34-072-Q1-E1-B11
gggccgagccacgcgtcaactgaagataaaggtgcctgcctgctaccaaagattgaaactatgagagaaaaagtactgacttcatttgccagacagagactcaggtgtgccagtattcaaaaatttggagaaagagctttaaaagcatggtcagtagctcgcctgagccagaaatttcccaaggctgagtttgtagaagttaccaagctagtgacagatctcacaaaagtccacaaggaatgctgccatggtgacctacttgaatgcgcagatgacagggcagatcttgccaagtacatatgtgataatcaagatacaatctccagtaaactgaaggaatgctgtgataagcctttgttggaaaaatcccactgcattgctgaaggaaaaaaagaatgcaatacctgaaaacctgcccccatt

SEQ ID NO: 1594 - DNA, 429 bp, Bos taurus
  Clone ID: 07-LIB34-072-Q1-E1-B3
tcgatgcaggcgtctacacttggtcgacttataatataccgatcccacctaatatcctcccttctatgcttagaaggaataatgctatccctattcgttatagcagccctaacaatcctcaactcacattttacattagctagcataatacctattatcctactagtcttcgcagcctgtgaagcagccctaggtctatctctactagtaatagtatcaaatacatatggtactgattatgtacaaaacctcaacttactccaatgctaaaatacattattccaacaattatacttatacccctaacctggttatcaaaaaataatataatttgggttaactccacagcacacagccttctaattagctttacaagcctcctcctcataaaccagtttggcgacaacagccttaatttttcactactat

SEQ ID NO: 1595 - DNA, 392 bp, Bos taurus
  unsure (332): unsure at all n locations; Clone ID: 07-LIB34-073-Q1-E1-B3
atgcagagcagctctgcagagaggctaagggacagctggcctccccacgctcttcagccgagaacgaagccgtgacacagatggtcagagcccaggaaaagaatgcttacctgagcatgaatgacatctccacggaggggaggttcacttaccccactggggaaatactggtctattccaactgggccgatggggagcccaacaacagtgatgagggacaaccagagaactgtgtggaaatctttcctgatggcaagtggaatgacgtaccctgcagtaagcaactccttgtgatctgcgagttttgagctctcccacccaccccaaggaangggcagtgcccagagctgtgagctgccaacatcccaataaaaaggtgaacctctgctgct

SEQ ID NO: 1596 - DNA, 426 bp, Bos taurus
  Clone ID: 07-LIB34-074-Q1-E1-B3
gcgtccagcgaggagttcccacggtcccgcagcagatttctgcagcggaactcccgggggcaggatgatttgggaagtcaccgtgttgctcagcttggtcctgggaactggtgctgtccccctggaggaccctgaggacggaggcaagcactgggtggtgatcgtcgcaggatcaaacggctggtataattacaggcaccaggcagatgcatgccacgcctaccagatcgttcaccgaaacgggatccctgatgagcagatcatcgtgatgatgtatgacgacatcgccaactccgaagacaatcccaccccgggaattgtgatcaacaggcccaacggctcagacgtgtaccaaggcgtgctgaaggactacacgggcgaggatgtcaccccgaagaatttccttgctgtgttgagaggtgatgc

SEQ ID NO: 1597 - DNA, 265 bp, Bos taurus
  Clone ID: 07-LIB34-075-Q1-E1-B11
agtcgtattattctctgccagctgtgtcccatgtacggttcagtcaacatttcccaaactcggctcacctgtgtgcgcagaaagggacttacatttgtgcctgctcgagacacgaaccatagttcgattactcaagggcctttacatgtcagatggagggcaccggggatattcggtttgtcatcacactcaactgtaattcgacatctgtctttaccagttcaacagataatctatgaactgctctgccgagatcatacacgga

SEQ ID NO: 1598 - DNA, 285 bp, Bos taurus
  unsure (59): unsure at all n locations; Clone ID: 07-LIB34-076-Q1-E1-B3
tagaaagtcgtaaaacgtcatgatttagacttgatttgtcgagctcatcaggttgtggnagatggatatgaattctttgctaagcgacaactggtaacccgttttcagcccaaattactgtggcgagtttgataatgctggtggaatgatgagtgtggatgaaactttgatgtgttcatttcagattttgaaaccatctgaaaagaaagctaagtaacaatatggtggactgaattcaagacgtcctgtcaatccacctccaacagctaatccaacgaagaaaaa

SEQ ID NO: 1599 - DNA, 456 bp, Bos taurus
  unsure (24): unsure at all n locations; Clone ID: 07-LIB34-077-Q1-E1-B11
cctatagtaagtcgtaatattggnaggcggcgtaggctgagctttgcactggccgccaacctcatcgccatagactccaaggacctctgtgagaccgtcaaatggctgatcctggagaagcagaagcctgatggaatcttccaggaggatgggcctgtgatacaccaagaaatgattggtggcttcagggacaccagggagaaagatgtgtcccttacagcctttgttctcatcgcgctgcacgaggctaaagacatttgcgaggcacaggtcaacagcctgggccgcagcatcgctaaggcatgagacttcctcgaaaaccactacagagagttgcgaagaccatatactgtggccattgctgcctatgccctggctttgttgggcaagctggagggtgaccgccttcacaaatttctggaaacagccaaggaaaagaacgctgggaggaaccaa

SEQ ID NO: 1600 - DNA, 450 bp, Bos taurus
  unsure (6),(12): unsure at all n locations; Clone ID: 07-LIB34-078-Q1-E1-B3
tatggnggtganacatctgagatgtacctcattcagcctgaggattctagcaaaccatatagagtatactgtgatatgaaaacggaaaaaggaggatggacagtaattcagaagcgtcaagatggtagtgttgactttggcaggaaatgggatccatataaacaaggatttggaaatattgcaaccaatgcagaagggaagaaatactgtggtgtaccaggtgagtattggctcggaaatgacagaattagccagcttaccaatatgggacccacaaagcttttgattgaaatggaggactggaaaggcgataaggtgacggcactctatgaaggatttactgtacagaatgaggccaacaaatatcaactgtcagtgagcaaatacaaaggaacagctggcaatgccctcatagaaggggcttctcaactggtgggagaaaaccggacc

SEQ ID NO: 1601 - DNA, 392 bp, Bos taurus
  Clone ID: 07-LIB34-079-Q1-E1-B3
gggtcgaccacgcgtccgctcaggcatcaaagcagagaccacgggaacctagttcaccaggctcgaggctggaggccccgccatgacatccctaaggccccttctgatgctggccctgctggcgtgggttgttgtggctgaccaagagtcctgcaagggccgctgcaccgagggcttcaacgccaccaggaagtgtcagtgtgacgagctctgttcttactaccagagctgctgtgccgacttcatggctgagtgcaagccccaagtgactcgtggggatgtgttccatctgccagaagatgagtacgggttccatgactacagtgacgcgcagaccgtcaacagcaacgtggaagcacagcccgagagcaacaccctggcccctgttctgc

SEQ ID NO: 1602 - DNA, 416 bp, Bos taurus
  Clone ID: 07-LIB34-080-Q1-E1-B11
gggtcgacgcaagcgtcaaacgccacatcaactttggcacaatgaagtgggtgacttttatttctcttctccttctcttcagctctgcttattccaggggtgtgtttcgtcgagatacacacaagagtgagattgctcatcggtttaaagatttgggagaagaacattttaaaggcctggtactgattgccttttctcagtatctccagcagtgtccatttgatgagcatgtaaaattagtgaacgaactaactgagtttgcaaaaacatgtgttgctgatgagtcccatgccggctgtgaaaagtcacttcacactctctttggagatgaattgtgtaaagttgcatcccttcgtgaaacctatggtgacatggctgactgctgtgagaaacaagagcctgaaagaaatgaatgc

SEQ ID NO: 1603 - DNA, 413 bp, Bos taurus
  Clone ID: 07-LIB34-080-Q1-E1-B3
agatgaacaaaaacacacaacctaccagaaatgtttggggatgtaaagtttgtctgtgttggtggaagccccaacagaatgaaagcatttgcactgtttatgcacaaggagcttatattgacggacagtgaagaggacatcaaggatatctgtgctgggacagacagatattgtatgtacaaaattggtcgcgtgctctccatcagtcatggcatgggcatcgcctccatttctattatgcttcatgaactcattaaattactataccatgcccgatgctctgacgttatcattatcagaatcggcacatcagggggaataaggattgcacctggatctgttgtaataacagatgaagctgtagactccttctttaagccccggtttgaacaggtaatcttggacaacattgt

SEQ ID NO: 1604 - DNA, 381 bp, Bos taurus
  Clone ID: 07-LIB34-081-Q1-E1-B3
aaaaagaggcgaaccaaaacagatgtgtacatcttgaatttggcagtggcggatttattccttctattcactttgcctttttgggcagttaatgcagttcatgggtgggttttagggaaaatcatgtgcaaagtcacttcagccttgtacacagtcaattttgtgtctggaatgcagtttctggcttgtatcagcacagacagatactgggcagtaactaaagctcccagtcaatcgggagtgggaaaatcatgctgggtcatctgtttctgcgtctgggtggctgccatcttgctgagtatccctcagttggttttttatacagtaaatcataaagctaggtgtgttcccatctttccataccacctacgaacatcaatg

SEQ ID NO: 1605 - DNA, 436 bp, Bos taurus
  Clone ID: 07-LIB34-082-Q1-E1-B3
ccaggtcgaccaggcgtccgatattgataaaattctgccaattatgtttggcagtttgtacaaaatctccaaagaacactggaatccgaccattgtagcactggtgtacaatgtgctgaaaaccctcatggagatgaacggcaagcttttcgatgaccttactagctcatacaaagctgaaagacaaagggagaaaaagaaggaattggagcgagaagaattatggaaaaaattggaggagctaaagctgaagaaagctctagaaaagcagaacagtgcttacaacatgcacagtattctcagcaatacaaatgatggataaaaaaaaaaagcctgccacctctgttggctaggcagttttgtacacttttttgaaatatgtaaaaattatgaaacaaacctcatcagtataatataattaaaaggccaaattttt

SEQ ID NO: 1606 - DNA, 129 bp, Bos taurus
  unsure (78): unsure at all n locations; Clone ID: 07-LIB34-083-Q1-E1-B3
gtgaagtgaaaaggggtatcatcagacgtgacagtctgtgggacaagctcatctttggaaagatccaggaaagcctgngtgggaaggttcggttactgatcaccggagctgcccccatctcaactcccg

SEQ ID NO: 1607 - DNA, 252 bp, Bos taurus
  Clone ID: 07-LIB34-084-Q1-E1-B11
taactgttaaatatacacctgttgaagcaattgaaaagaataaatgtgtagatttagaacattctgacaaaggaagcacctcaagtccttccaagttggctgctgaggctaagtttcgatttacatattccaaagatgatatttacagactgttgtcgtcatattctgctaagcatgaaaaaatgtttctgcatgtaaaatggaaagttcacctatgaagatttgtgatgagaagtcaggatgtcatgctgc

SEQ ID NO: 1608 - DNA, 283 bp, Bos taurus
  Clone ID: 07-LIB34-084-Q1-E1-B3
aggaatatttggcgccgcaaatttcagggtgttcgtgtaaacacttatcagaggatgaactagtgctaatacagattcaaaaattcttcctcaccataaaactacccaccgaaaaatgatagagtcttcttcctcggatgtctgaattaaattgatgtctaaacagcagcgagttccaattattatccatcatattatcgggacaatggaatccagttccatctctatgctgtggaatgactctgatccaattctgtttcaaatcacctcgcttacgactctg

SEQ ID NO: 1609 - DNA, 385 bp, Bos taurus
  Clone ID: 07-LIB34-085-Q1-E1-B3
attccaggccgacccacgcgtcagctgttgctgactctgtcctcaggagctgtttcagtgcgagttctgactactataatcttctggcacgcaatgacgatggatttaagatctgcaaagatggacatccgagattcagttgcatttgtagatcatgttgactgcgataacactgtgaagtttgatataccatgagttgcaaagatcactgtacgttatgcactagatcgtctgcagctagatttgtgaaatcagatctgcaagttaggactgttcctgtgcaaataggtttgtgatgcattcaaatacaaccgaatgcactgatctctatgaatgagttttaaatccaatcatttgtggtacagatgtgtgcatgaacatccca

SEQ ID NO: 1610 - DNA, 132 bp, Bos taurus
  Clone ID: 07-LIB34-086-Q1-E1-B3
ccacgcgtcccgagaaacccacattacaggctcctcactgcaaaatctcagaggccaatccagtgaatgaattatttttgtggtttgttcctaaaactatctttctcaataaaagtgactctatcaacgagc

SEQ ID NO: 1611 - DNA, 346 bp, Bos taurus
  Clone ID: 08-BOVMS1-001-Q1-E1-B7
ccgggttgctctgactgggctgactgtagctgagtacttcagagaccacgaaggtcatgatgtgttgctgtttattgctaacatctttcgcttcagccaggctggggcagaggtgtctgctttattgggcataatcccttctgctgtgggttatcagcctaccctggacactgacatgggtaccatgcaggaaagaatcatcaccaccatatggggatctatcacctctgtacaggctatctatgtgcctgctgatgacctgacggatcctgccccggccactacctttgcccatttggttgcgaccactgtgttgttccatgctattgctgatctgggcatctat

SEQ ID NO: 1612 - DNA, 409 bp, Bos taurus
  Clone ID: 08-BOVMS1-002-Q1-E1-B7
ccgggttgctctgactgggctgactgtagctgagtacttcagagaccacgaaggtcaagatgtgttgctgtttattgataacatctttcgcttcacccaggctggctcagaggtgtctgctttattgggcagaatcccttctgctgtgggttatcagcctaccctggccactgacatgggtaccatgcaggaaagaatcaccaccaccaaaaagggatctatcacctctgtacaggctatctatgtgcctgctgatgacttgacggatcctgccccggccactacctttgcccatttggatgctaccactgtgttgtcccgtgctattgctgagctgggcatctatccagctgtggatcctttggactccacgtctcgcatcatggattccaacattgttggcagtgag

SEQ ID NO: 1613 - DNA, 454 bp, Bos taurus
  Clone ID: 08-BOVMS1-003-Q1-E1-B7
gtaaacccaagcccttgacctcttacaggagctttgtctgccctcttaataacatccggcctaaccatgtgatttcactttaactcaatgaccctgctaataattggcctaacaacaaatatactaacaatataccaatgatgacgagatgttatccgagaaagcaccttccaagggcaccataccccagctgtccaaaaaggcctccgttatggaataattctttttattatctccgaagtactattctttaccggatttttctgagctttctaccactcaagcctcgcccccacccctgaactaggcggctgctgacccccaacaggcattcacccactaaaccccctagaagtcccactgctcaacacctctgtcctattggcttccggagtttctattacctgagcccatcatagtttaatagaaggggaccgaaagcatatattacaag

SEQ ID NO: 1614 - DNA, 437 bp, Bos taurus
  Clone ID: 08-BOVMS1-004-Q1-E1-B11
atggaaaaattgttgtgaacctcacaggcaggctaaataagtgtggagtgatcagccctagatttgatgtgcaactcaaagatctagaaaaatggcagaataacctgctcccatcccgtcagtttggtttcattgtactgacaacctcagctggcatcatggaccatgaagaagcaagacgaaaacatacaggagggaaaatccttggattctttttctagggatgtaatacatacaaataaaatgcctcagaggactctgatgcttccttaagtcgttttgaattttgtacagcagagtaacaagagtgtctttggaagtatacagcctttgtgttaattggtgaatgctgtttccttgaagtacaagaaaattttggtgtaactttcaccatcacccttgtggctcaacagaggaaggtgtgtctggccctgcat

SEQ ID NO: 1615 - DNA, 399 bp, Bos taurus
  Clone ID: 08-BOVMS1-005-Q1-E1-B7
cacaagcttgtttaaataactactctcctttagaggtagatgacagtgacaagggggacaaatgaaagcaaggtactttagaggctgtgtaatgggcaggtaggaagagtgcaaacagcacacagtagggactgtctatgtgttgtctgtaatatctaaaaatatacttgtgttctttttgcattatgaaaaaaacaaatggtgtttgatagttttgaatgaacagtgaaagttctacctagttttgagtgagttctttaaaagaatgaggatgttacggtgctaaacttgacaaaaaaagagaccactgaaatgctgataattttagtaaccttttttcaaagcattgagggggcaaagattacaaattatgccatataaaaataaacatacatctgt

SEQ ID NO: 1616 - DNA, 439 bp, Bos taurus
  unsure (388): unsure at all n locations; Clone ID: 08-BOVMS1-006-Q1-E1-B11
cagtgatactgaagctatgagtatacagattatgaggacttaagcttcgactcctacataattccaacatcagaattaaagccaggggagctacgactattagaagtcgataatcgagttgtactaccaatagaaataacaatccgaatgttagtctcctctgaagacgtattacactcatgagctgtgccctctctaggactaaaaacagacgcaatcccaggccgtctaaaccaaacaacccttatatcgtcccgtccaggcttatattacggtcaatgctcagaaatttgcgggtcaaaccacagtttcatacccattgtccttgagttagtcccactaaagtactttgaaaaatgatctgcgtcaatattataaaataaaaaanaataaaaaaaaattaaaaataatattaaaaaaaaaaaagggcggccgctct

SEQ ID NO: 1617 - DNA, 336 bp, Bos taurus
  Clone ID: 08-BOVMS1-006-Q1-E1-B7
cgcgtccgtaaagagcgacatcgacatcaggaaggacctgtacgccaacaacgtcatgtctgggggcaccaccatgtacccgggcatcgccgaccgcatgcagaaggagatcaccgccctggcccccagcaccatgaagatcaagatcatcgccccacctgagcgcaagtattccgtgtggatcggtggctccatcctggcttcgctgtccaccttccagcagatgtggatcaccaagcaggagtacgacgaggccggcccctccatcgtccaccgcaaatgcttctagacgcctctccgacagccgcgacttctccccaggacgacgaatccgct

SEQ ID NO: 1618 - DNA, 417 bp, Bos taurus
  Clone ID: 08-BOVMS1-007-Q1-E1-B7
agatcaagatggcgtctgtatgatctccgggggtagcggcgtcggagttcggccaaacataaaagatgacaacagcagctcggccaacttttgaacctgcaagaggtggaagaggaaaaggtgagggtgatttgagccagctctcaaagcagtattcaagcagagacctaccctctcatacaaagataaaatatagacagaccactcaggatgcccctgaagaggttcgaaaccgtgacttcaggagagagttggaggagagagagagagctgctgcaagagaaaaaaacagagatcggccaacccgagaacatacaacctcctcttcagtgtcaaagaagcctcgactggaccagattcctgctgccaaccttgatgcagatgatccactaacagatgaggaagatgaagatgaag

SEQ ID NO: 1619 - DNA, 224 bp, Bos taurus
  Clone ID: 08-BOVMS1-008-Q1-E1-B11
atgcgacgtcatagctcttcaatagtgtcacctaaattcaattcactggccgtcgttttacaacgtcgtgactgggaaaaccctggcgttacccaacttaatcgccttgcagcaaatccccctttcgccagctggcgtaatagcgaaaaggcccgcaccgatcgcccttcccaacagttgcgcagcctgaatggcgaatgggacgcgccctgtaccggcgcatt

SEQ ID NO: 1620 - DNA, 471 bp, Bos taurus
  Clone ID: 08-BOVMS1-008-Q1-E1-B7
ccacgcgtccaggaacttctaatccccaccgcacagtgcagctatggctcggggtcccaagaagcacctgaagcgtgtagcagctccaaagcactggatgctggataagctgaccggcgtgtttgcccctcgtccatctactggtccccacaagctgagggaatgtctccctctaatcattttcctaagaaaccgacttaagtatgccctaacaggagatgaagtgaagaagatttgcatgcagcgtttcattaagatcgatggcaaagtccgcaccgatgtaacctaccctgctggttttatggatgtcatcagcattgataagattggagagaattttcgtttgatctatgacaccaagggtcgctttgctgttcatcgtattacacctgaggaagccaagtataagttgtgcaaagtgagaaagatcctcgtgggaacacaaagaatccctcatctggtaacccatga

SEQ ID NO: 1621 - DNA, 451 bp, Bos taurus
  Clone ID: 08-BOVMS1-009-Q1-E1-B7
gccatactaggtgaaaagatgaaagaagaagaagtggaagcgctgatggcaggtcaggaagactccaatggctgcatcaactatgaagcttttgtcaagcacatcatgtctaactaaatggagctctcaagatcaagcattgtttatgaagactggctgaaccttattttaagaacacccatgactaactgtccaaatctgtttaccatcatttagaaaaacaaaacaatttgtactattctaaactgaaggactccctgaatttttatacattttatgtttctctctgaattatattcataccacacaaactaagtgtctgctgatccagacaagaatggtgaaatactgacaatctcagatccaagccctgctctttattgtataccatgggtcaaagaacatccttaaaataataaaccaataaataattttggtcagtctggaaaaa

SEQ ID NO: 1622 - DNA, 341 bp, Bos taurus
  Clone ID: 08-BOVMS1-010-Q1-E1-B7
atgcgacgtcatagctcttctatagtgtcacctaaattcaattcactggccgtcgttttacaacgtcgtgactgggaaaaccctggcgttacccaacttaatcgccttgcagcacatccccctttcgccagctggcgtaatagcgaagaggcccgcaccgatcgcccttcccaacagttgcgcagcctgaatggcgaatgggacgcgccctgtagcggcgcattaagcgcggcgggtgtggtggttacgcgcagcgtgaccgctacacttgccagcgccctagcgcccgctcctttcgctttcttcccttcctttctcgccacgttcgccggctttccccg

SEQ ID NO: 1623 - DNA, 376 bp, Bos taurus
  Clone ID: 08-BOVMS1-012-Q1-E1-B7
tttatatccaaaacacagtaggatccctaaatttcctaatattacagtactgagtacaacctgttcataactcttgatctaatgtcttcatatgactagcatgtataatagctttcatagtaaaaataccactatatggcctccacctttgactacctaaagctcacgtagaagcccccatcgcaggctccatagtccttgcagcagttctactaaaactaggggggtacggtatgctacgaatcacactaattctaaaccctatgaccgactttatagcatacccattcattatactctccctatgaggcataatttataccagctcaatctgcctccgttcaaacgacctaaaatcactcatcgcatactcctc

SEQ ID NO: 1624 - DNA, 405 bp, Bos taurus
  Clone ID: 08-BOVMS1-013-Q1-E1-B7
atgcgacgtcatagctcttctatagtgtcacctaaattcaattcactggccgtcgttttacaacgtcgtgactgggaaaaccctggcgttacccaacttaatcgccttgcagcacatccccctttcgccagctggcgtaatagcgaagaggcccgcaccgatcgcccttcccaacagttgcgcagcctgaatggcgaatgggacgcgccctgtagcggcgcattaagcgcggcgggtgtggtggttacgcgcagcgtgaccgctacacttgccagcgccctagcgcccgctcctttcgctttcttcccttcctttctcgccacgttcgccggctttccccgtcaagctctaaatcgggggctccctttaaggttccgatttagtgctttacggcacctcgagccc

SEQ ID NO: 1625 - DNA, 270 bp, Bos taurus
  Clone ID: 08-BOVMS1-014-Q1-E1-B11
atgcgacgtcagaccacttcaattgggtcaccaagtttcaattcactggccgtctcttaacaacgtcgtgactgggaaaagcctggcggttgccaacttacacgccttgcagcacatccgccttacgccacctgacgtcatagcgagcaagctcgcagcgatagcccttccgaacatttgcccacaccttaatgcgcaaagcgacgcgctctgtcactgcgcattaagcgcagctggtgtagtggctatgcgcaacgtcattgctagacc

SEQ ID NO: 1626 - DNA, 399 bp, Bos taurus
  Clone ID: 08-BOVMS1-014-Q1-E1-B7
ctgagtagcattgccttaaatcttatccaatttgaaaacggttttgtttatgtgatgttcaaattgtccaatgcaaaatatctttccaaacaaaatatacttattttcccaaaggttttcttgctgtgatgcaaacactccttgcggttttaagggaattctactgttgatcccttgagtggcagctctaactgttggcatagccatttgttatgtagtggtagcgactttcctgctatgcaggaacccgtgaagtgtgcattttctataatgtgtgcctcttcatgccgtcagtaatttcttgttaacatgtttgaggggctttgaacttcagcgtcatttacccacaaagtcattcacgctgtaaaaggttatacaaggaattcacaactacctttt

SEQ ID NO: 1627 - DNA, 410 bp, Bos taurus
  unsure (116),(377): unsure at all n locations; Clone ID: 08-BOVMS1-016-Q1-E1-B7
atggaccaaagatggtaagaagcatgtggtcacattacttcaggtacaagactgtcatgtcctaaaatatactccgaaggaaaatcataatggaaaaatggcagccctgactgtangaggaaaaactgtgtcacgtttccataaatctacatctatattggaattttaccaagaacttggattgccaccaaagcagaaaattaaaatgtttaacgtaacagataatgctgttattaagccaggcactcctctttatgctgctcactttcgcccaggacaatatgtggatgtcacagccaaaactattggtaaaggttttcaaggtgtcatgaaaagatggggatttaaaggccaaccggctactcatggtcaaacanaaacccacaagaggcctggagctatttcaactg

SEQ ID NO: 1628 - DNA, 86 bp, Bos taurus
  Clone ID: 08-BOVMS1-017-Q1-E1-B11
aaaaaaacaaaaaaaaaaaaaaaaaaaaaaaaaaaaaaaaaaaaaaaaaaaaaaaaaaaacaacaaaaaaaaaaaaaaaaaaaaaa

SEQ ID NO: 1629 - DNA, 382 bp, Bos taurus
  unsure (330): unsure at all n locations; Clone ID: 08-BOVMS1-018-Q1-E1-B7
cgaacgttaccaccttcctccaaccccacgggagcagaatttgacccagaggaagacgagccaacgttagaagcagcctggcctcacctgcagcttgtttatgagtttttcttaagacttttagagtctccagatttccaacctaatatagcgaagaaatatattgatcagaagtttgtattgcagcttttagagctctttgacagtgaagatccccgcgagagagattttctcaaaactacccttcacagaatctatggaaaattcttaggcttaagagcttacatcagaaaacagataaataatatattttatagatttatttatganacagagcatcacaatggcatagcagaattactggaaatattgggaagtataa

SEQ ID NO: 1630 - DNA, 403 bp, Bos taurus
  Clone ID: 08-BOVMS1-020-Q1-E1-B11
cccagagtttgcagatagtgaccctgccaatatcgttcatgacttcaacaagaaacttaccgcctatttggatcttaacctggataagtgctatgtgattcctctgaacacttccattgtcatgccacccaaaaacctattagagctacttattaacataaaggctgggacctacttgcctcagtcatatctgattcatgaacacatggtcatcactgatcgcattgaaaacattgatcacctgggtttctatatttatcgactgtgccatgataaggaaacttataaactgcaacgcagagaaaccattaaaggtattcagaaacgttcagctgacgtctgtgttacgattcggcattttgagaacagatttgccgtggaaactttaatttgcccttgaaca

SEQ ID NO: 1631 - DNA, 326 bp, Bos taurus
  Clone ID: 08-BOVMS1-020-Q1-E1-B7
atacaatgtcctgggttctttctagtgcagcggaatgtggacaaaggtatgcagttgtgaagtgctttgttgtagcttattaatccacaagggaaacttaggctgtagacataagtacagacccagtgcagttcttgttttctgtatgttgttgggggaataaagttttatatggcaagcacatggcctccctgatttcaatatgcctttattaggatctgtattagccctttatttctttaaaatcttttttcctcttcctcttgaaaagtaagttccaaaatatagtttattgtatcttccatccttaaaaagtttgttccttt

SEQ ID NO: 1632 - DNA, 386 bp, Bos taurus
  Clone ID: 08-BOVMS1-022-Q1-E1-B11
gttcctacagttttgaattcatcctacagaagtaaccataaaactcaagaggggtaggtgaacaggcgccagaactgtcattgacaacggatatgacatttcccagcagtgacaagtggaatcccttgtaacatagtatttgtctgctctgtgtcggtgtgttaaccaggcctgccagttcccttctcttgtgattctgaggactgttcctccagagcttagctggctctaggggagcatggaggccactgtgcccacaggcagaaccagagttccacgcaatgctcacctgagtcacaggattccctattactgtattctagctacaatgttatattacatagtataatgagacgatatcaagagtacacatgtaatgatgatgc

SEQ ID NO: 1633 - DNA, 277 bp, Bos taurus
  Clone ID: 08-BOVMS1-022-Q1-E1-B7
gtttctttgcttcacttctcccaagaccccttcatcgagctggatgtcccacctctctgacctctgcagtttgtctgttctccagctgaccctgattctttcttttcacatcctgccttagggccaggtacacactgtgcttcctgttgtacagaagctcttcacttcagtgtaaaataaacactatgtaagctgtttctgtttgctattctttttacttcttatttattgatattttagtttaaacgctgaataaaaccacaaatctgcttcacac

SEQ ID NO: 1634 - DNA, 431 bp, Bos taurus
  Clone ID: 08-BOVMS1-023-Q1-E1-B11
caaacatcaaaccgactaataagcaatcgctttgtaaccctccaacaatgaatacttcaacttgtatcacaacaaataatgagtatccacaattctaaaggacaaacatgaacattaatattaatatctctgatcctaattattggatcaacaaacctactaggcctattaccccattcattcacaccaacaacacaactatcaatatacctaggcatagccatccccctgtgagcaggagccgtaattacaggattccgcaataaaactaaagcatcacttgcccatttcttaccacaatgaacacacaccccacgaatcccactactagtaattattgaaactatcagcctttttattcaacctatagccctcgccgtgcggttaacagctaacatcactgcaagacacctattaattcacctaatcgg

SEQ ID NO: 1635 - DNA, 261 bp, Bos taurus
  Clone ID: 08-BOVMS1-023-Q1-E1-B7
cacgcgaccggacaacgccttcgtgtggtagttctaaatttaaaccagaaactggggcaactaagcaatgagccacagcaaaaaataaagaacaaaataaagctgtcgttaaatttaaaaacaacaaaatattactaactgcccaaaatatcaatttgatgtagttcttttcatgcaagtttaaattcaattgttagttataattgttggacctccttgagatagtaacaacaaaataaagcaagctatctgcacctcaaa

SEQ ID NO: 1636 - DNA, 287 bp, Bos taurus
  Clone ID: 08-LIB188-001-Q1-E1-B11
acctgtgtggtggggatgactgaagccccgcgacagcccaagcatcgaggacggctgctccgtgctccagctaacagttctccgcagtcagcccgcggctaacagcccctgtgcccgtccccgggaggatgacattagcgctgcccgccccacgcgctcttttgttagtttagtttcctacgcattacctggctttcccggctagtccctctttatagccaaagaaatgaacattccaaggatttggaagtggaatctatggatgtgaaacactttgcctctcgagt

SEQ ID NO: 1637 - DNA, 132 bp, Bos taurus
  Clone ID: 08-LIB188-001-Q1-E1-B7
acttggtacagatgtcaaggatcatggaacctttggcgtcctgaggcttcttgactgtttcgggggctgggcgtatggaaacccggaggtcgaactttttgcaggagactttgcctttgagcttggcatggt

SEQ ID NO: 1638 - DNA, 224 bp, Bos taurus
  Clone ID: 08-LIB188-003-Q1-E1-B7
catgcacccgtgcgccatggcggccggatactcctattacaacctggatgaaacttgtatccgcttctatcacccggataaggaggacggaatgctgagcaaactctgccacaaagatacctgccgctgtgcagaggagaactgcttcatgcaccacacggagaaggaggtcactctggaggaccggctggacaaggcttgcgagccgggcgtggactatgtgt

SEQ ID NO: 1639 - DNA, 444 bp, Bos taurus
  Clone ID: 08-LIB188-004-Q1-E1-B7
gatactcaccagagttcaggatacgccagtaatcgccaccactggctgtcttcactccgtggttaatgccactcacggagatggcggcattggctatcgggatgccttgctcgtctgtcacaacccccttgatgccacggtgaacctgctccatgaaggtgagcagagcttctttgttgttctcccactctcggggcagctcgctctcatgagggaacttatcacagcccaggaagatggagagctccaggcagttggtgtgcaggtagctgaagtcgttgatagtcccagagcggggtttccacttggccccattgacgatgcccatgccaccagtgtagtcctgtgcttggcatcctcccctgtagggctcagtcatggtgaggtgggtagaggcgaaggaaatggccagccagcggaagatggcttggtctggggtcccct

SEQ ID NO: 1640 - DNA, 382 bp, Bos taurus
  Clone ID: 08-LIB188-005-Q1-E1-B7
acaaactttatttttttttcttttcttttttttggattacaaggtggattattgagttattggcatgcgaacaaattcctcccgtgattaacaaacgcaggcattactgcgtttcaaaggagttcagacgaaggagaagctggaggggtcaggaggacctccaggtcagggccatggtcatctgacgacgtgcagagctctctaaaggggcctgaagctcatctcaagggcaagtgggtgcagacgccccgatacttgcaaaagcaactttcacgcctcactcctcctggcttttccggcggtattgctgcattgcattcgctgccacattctccactaagttaggactggagacatcctgcgggaccgtcactgtgaatgg

SEQ ID NO: 1641 - DNA, 403 bp, Bos taurus
  Clone ID: 08-LIB188-006-Q1-E1-B11
gggataccctcttacgtgtgacttaggtgggacattgtccaggcagaactgatgtctctgtttggatactgcagaagggggccctaggcacacccataaaggtagccatacccaggagggttgattggcaggctggaagaaaaattccatgacaaaggcacttttacctcaatagggagctgggagttgactgggagtgttataggggtggggaggaattatttcaatagaggtgttatttgcagactgctgagagaaatgaagagagttcacctacaccgggccatctgcaggatcagtaggggctgctgtatgtctctgctgccgcaaggggaaggtaatgtaggcatcatagccaaagaggcctgcagcgcataggcccagcgcccctgcagcgattttg

SEQ ID NO: 1642 - DNA, 377 bp, Bos taurus
  Clone ID: 08-LIB188-007-Q1-E1-B7
gccatgggcgcgggatacttgagatggacagagtcactcgagcccctccagggagctgtggctaaattcttctctgccagctgtgttccctgcattgatagacaagcataccccaacctgtgtcaactgtgcaagggggagggggagaaccagtgtgcctgctcctcccgggaatcatacctcggttattctggtgccttcaagtgtctgcaggaccgggctggtgacgtggcttttgttaaagagacgacaatgtttgacaacttgccagagaaggctgacagggaccagtatgagcttctctgcctgaacaacagtcgggcgccagtggatgcgttcaaggagtgccacctggcccatgtcccttctcatgctgt

SEQ ID NO: 1643 - DNA, 338 bp, Bos taurus
  Clone ID: 08-LIB188-009-Q1-E1-B7
gatactgtgtgataaggagatccgccacaactccacgggatgcctgcggatgaaggaccactgcgagaagtgccaggagatcctggaagtggactgttcggacagcaacccaactcagacgctgctgcgccagcagctgaacgcatccctgcagctggcggagaagttcagcaggctgtacgaccagctgctccagtcctaccagcagaagatgctcaacacgtcggccctgctcaagcagctgaacgagcagttcacctgggtgtcccagctggccaacctcactcagagcgacgaccagcactacctgcacgtcttcacggtgaattctcacaact

SEQ ID NO: 1644 - DNA, 424 bp, Bos taurus
  Clone ID: 08-LIB188-010-Q1-E1-B7
acacaatttggaggatcaatttatcagaaagtatgtgaagatcttgacacttcagtaaaccttgcttggacatcaggaaccaactgcactcgctttggaattgcagctaaatatcaactggatcccactgcttccatttctgcaaaagtcaacaactctagtttaattggagtgggctatactcacactctgaggcctggtgtgaagcttacactgtctgccctggtagacgggaagagcattaatgctggaggccacaaacttgggcttgccctggaattggaggcttaattcagctgatagaaacctctggaaatgggtatcagaacatttggccttaatatatttccagtgtgaccagcaagcttcaccaccccagcccccgaacgtgatcaagacaaaggatgatctaaacaagaactgt

SEQ ID NO: 1645 - DNA, 380 bp, Bos taurus
  Clone ID: 08-LIB188-011-Q1-E1-B7
acagccggacagtgccatcctgtatgactactacaaccctgagcacaagtgttctgtgttttatggggcaccacgtaagagcaaactcttgtccacgttgtgctctgcggatgtctgccagtgtgctgaggggaagtgccctcgacagcaccgggccctggagcgtgggcagcaggacttggagggttaccggatgaaattcgcctgctactctccccgagtggactacggcttccaggttaaggttctccgagaagacagcagggctgctttccgcctctttgagacccgtatcacccaagtcctgcatttcaccaaggatgccagggccaacgctgatcagaccagaaacttcctggtccgagcctcttgccgccttc

SEQ ID NO: 1646 - DNA, 404 bp, Bos taurus
  Clone ID: 08-LIB188-012-Q1-E1-B11
actttgaaaacctctgctctcggaccaaactgtttactacttgccaggagcaatatcagagtagtccttcagcaccccagccaagtgctcattgtgagtcttaaaccgtcgctttttctgtgaggcaggctttttccttctttgaattggggccactttctttggtccggagtcctgcatggaagaaataccctgtcgcttcagatactcttcaattttctcctcgtccattgaatccacggtgacactcctccacagtttctgaaactcttcatccacagaaaactgacagctcttatcattgaagaaaagaattttcttcttatcaggacggtttacaaatagtatctggtcccctaaagccttgacagctttctgggaattgggcaatccttcctcgatgt

SEQ ID NO: 1647 - DNA, 273 bp, Bos taurus
  Clone ID: 08-LIB188-012-Q1-E1-B7
acccttccgttggtctcagcacacaatctaggctactgtgtttggaggatttccggttctctgccaggacaggcaccaggccacacttgcccgcagtgtagatatatcctccatccaagttcagggcatctgcttcccctttcagcaccaggacgatgcagtcgtcagtggtggacgccgtggcacaggtcacgttctggccgctctgctggctccactgctggcacttcttctgctcctcaagtcccacggcacaccacacgaccctggtgt

SEQ ID NO: 1648 - DNA, 392 bp, Bos taurus
  Clone ID: 08-LIB188-014-Q1-E1-B11
cggatactattttgaacgtgatgatgtggctttgaagaactttgccaaatactttcttcaccaatctcatgaggagagggaacatgctgagagactgatgaagctgcagaaccagcgaggcggccgaatcttccttcaggatatcaagaaaccagaccgtgatgactgggagaatgggctgactgcaatggaatgtgcgctgtgcttggagagaagtgtgaatcagtcactactggaactgcacaaactggccactgaaaaaaatgatccccatctgtgtgatttcattgagactcattacctgaatgagcaggtggaagccatcaaagaattgggtgaccacataaccaacctgcgcaagatgggggctcctggatctggcatggcagagt

SEQ ID NO: 1649 - DNA, 375 bp, Bos taurus
  Clone ID: 08-LIB188-014-Q1-E1-B7
accacgaaatcactcctccaacgttggtgcaaacacaggtggaaggcggcgccacgctcttcaagctcgactattttggggaagaggcgtatctgacgcagtcctctcagctctacctggagacctgcattccagctctgggggacgtcttttgcatcgcacagtcatacagggcagaacagtccagaacacgaaggcacctggctgaatacactcacgtggaagccgagtgtcctttcctgaccttcgaggagctcctgaaccgcctggaggacttggtgtgtgacgtggttgatatagtcctgaaatcacccgcaggaaacatagtgcgcgacctcaacccgaattttaagccccctaaacgggctttcaaac

SEQ ID NO: 1650 - DNA, 413 bp, Bos taurus
  Clone ID: 08-LIB188-015-Q1-E1-B7
acccgcacaccgtggggaagaacacccttctcatcgcggggctgcaggcccggaacaacgcccgggtcatcttcagcggctcccttgacttcttcagcgacgccttcttcaactcagcagtgcagaaggctgcacccggctcccagaggtattcccagactggcaactacgagctggctgtggccctttcccgctgggtgttcaaggaggagggggtcctccgggtggggcccgtgtcccatcatcgggtgggcgagacagcgccacccaacgcctacaccgtcactgacctagtggagtactgacgtcactgtatgaggaagccgtgaaggaagataataccatccactggacacgacctcagaaacccagggtgctcacggaggacatttaccaacccagggctccgtctg

SEQ ID NO: 1651 - DNA, 430 bp, Bos taurus
  Clone ID: 08-LIB188-016-Q1-E1-B11
actaaaggatgtgatggaggtggtgggaattatgcttgcagttccgacatcgatgcctggggccaaggactccgggtcaccgtctcctcagcctccaccacagccccgaaagtctaccctctgagttcttgctgcggggacaagtccagctccaccgtgaccctgggctgcctggtgtccagctacatgcccgagccggtgaccgtgacctggaactcgggtgccctgaagagcggcgtgcacaccttcccggctgtccttcagtcctccgggctctactctctcagcagcatggtgaccgtgcccggcagcagctcaggacagaccttcacctgcaacgtagcccacccggccagcagcaccaaggtggacaaagctgttgattccagatgcaaaacaacctgttactgttgcccaacgcctgaactcc

SEQ ID NO: 1652 - DNA, 388 bp, Bos taurus
  Clone ID: 08-LIB188-016-Q1-E1-B7
ccatggcggccggatacagctccaactgcaggagccaatgagccggagaggctgggagggaccgcaggagcctttcacttggacaggacatcagaggactcggacaccagcttcccatcgcgggtctcaatcttcttcacaaccacaggcttggaactggtgcggctgaaggagccggggctcaggctgtagttgaagccaggggtcccgtaggacgaagtcagtccacctgcgtagccactggtggtcttggtgtggatactcatgttctgcatcccagactccagccggctctcctcgccctccagcagcttcctgtaggtggcaatctccacgtccagggccagcttgacattcatgagctcctggttcgagcggccgcccgggc

SEQ ID NO: 1653 - DNA, 404 bp, Bos taurus
  Clone ID: 08-LIB188-017-Q1-E1-B7
ccatggccgccggatacacttacaggcaccacactcgcagacgccgcggccattgcagatctgtccattcacggccatgcaggaagtggtatccagagaacagtcacaggcgctgccggtgtagttagggttgcactcacacactcgacacttgcagacaccatttcctccacatattaagccattggatctatcacagttgaaattatcacactcgcagaatttgccagaataaatttcatttgtattgtcgctcttcctacacacacactgtccacagacacactctccattgttgctacagatttctgaactgttttctttcctgcagtaggcatccatgtcttcgctgttcaactcatctgtgctacattcacagtgtctcccgacacgtccctcgttgc

SEQ ID NO: 1654 - DNA, 450 bp, Bos taurus
  Clone ID: 08-LIB188-018-Q1-E1-B11
gccatggcggcgggataccagtcatagtgcccccatggccggggctacctggcgcccagcggagatctgagtctcaggagagacgtggacgagtgccagctcttccgagatcaggtgtgcaagagcggcgtgtgcgtgaacacagccccaggctactcgtgttactgcagcaacggctactactatcacgcccagcgactggagtgcattgataatgacgagtgcgcggacgaggagccagcttgtgagggaggccgctgcgtcaacactatcggctcttatcactgcacgtgcgagcccccacttgtgctggacggctcgcggcgccgctgcgtctctaacgagagccagagccttgatgacaatctgggagtgtgctggcaggaagtgggggctgacctcgtgtgcagtcgccctcggctggatcgccaggccacctacacagaatgc

SEQ ID NO: 1655 - DNA, 437 bp, Bos taurus
  Clone ID: 08-LIB188-018-Q1-E1-B7
catactcccgagcgccatgggggcgggatacacctgccaggtagaacacaacaaggaaaccttccagaagaacgtgtcctcctcatgtgatgttgcaccaccatctcccatcggggtcttcaccatccccccatccttcgccgacatcttcctcacgaagtcagccaagctgtcctgtctggtcacaaacctggcctcctatgatggcctgaacatcagctggtcccgtcagaacggcaaggccctggagacccacacgtattttgagcgacacctcaacgacaccttcagcgcccggggtgaggcctcggtctgctcggaggactgggagtccggagaggagttcacgtgcacagtggcccactcggacctgcccttcccagaaaagaacaccgtctccaagcccaaagatgtcgccatgaaaccgccgtccgtgt

SEQ ID NO: 1656 - DNA, 432 bp, Bos taurus
  Clone ID: 08-LIB188-019-Q1-E1-B7
acacaactgcaactctacataaatgccacagatgcagaatactgttttcttgctctatttacacagcggatatacctactctaacaaaggaagtggggggaaatgcacaggaaactcaggccaatggggagcgagaagagaacgaagaagtgcagcgcatgcgtcagtcgatgtgtaacagtcagaagcggaacagttcagaacaaagcctgccctgtcaaaggaagagctaaaagacagttatataaaaatcaaggtgggctttcagactggctaacacaacaacattccatgagtagatggtattgtctgattgtatttttgtttatccatttcattgggagcaaggacaaaaatgttaaatctacaccttgcttatcacagacggttaaaaaaatgccccgccttttaaaaaaaaatttgggggggggg

SEQ ID NO: 1657 - DNA, 276 bp, Bos taurus
  Clone ID: 08-LIB188-020-Q1-E1-B7
gggatacgatgagaccggcccctccatcgtccaccacaaatgcttctaggcggactgttagctgcgttacaccctttttcttgacaaaacctaacttgcgcagaaaacgagatgagattggcatggctttatttgtttttttttttgtcttttttgatttttttttttttttttggcgcttgactcaggatttaaaaactggaacggtgaaggtgacagcagtcggttggatcgagcattcccaaagttctacagtgtggccgaggacttgattgt

SEQ ID NO: 1658 - DNA, 402 bp, Bos taurus
  Clone ID: 08-LIB188-021-Q1-E1-B7
gcgatgggcgcgggatacttgagcaggacagagtcactcgagcccctccagggagctgtggctaaattcttctctgccagctgtgttccctgcattgatagacaagcataccccaacctgtgtcaactgtgcaagggggagggggagaaccagtgtgcctgctcctcccgggaaccatacttcggttattctggtgccttcaagtgtctgcaggacggggctggagacgtggcttttgttaaagagacgacagtgtttgagaacttgccagagaaggctgacagggaccagtatgagcttctctgcctgaacaacagtcgggcgccagtggatgcgttcaaggagtgccacctggcccaggtcccttctcatgctgtcgtggcccgaagtgtggatggcaag

SEQ ID NO: 1659 - DNA, 279 bp, Bos taurus
  Clone ID: 08-LIB188-022-Q1-E1-B11
acttgtcctccgactcagtctgccggtttctctgccactccacggctacatcttctgggtagaagccggtgaccatgcaggtgacgctgagcgtgcttttgctgagctcttccttgggtgggtccaggacatacacctgcggctcccgggccggccctttgctcctggagatgatcctcacgatgggggccgagaggcctttgttgttgaccttgcacttgaactcctttcctccagtccagtcctggtgctggatgggcagggcgctgaccacgcggt

SEQ ID NO: 1660 - DNA, 278 bp, Bos taurus
  Clone ID: 08-LIB188-023-Q1-E1-B11
gatacaaagataaggaatttggctccatggtcttggagctgaatgcttcagatgaccgaggaatagatatcgttcggggaccaatcctgagctttgctagcacaaggacaatatttaagaaaggctttaaactggtgatcttggatgaggctgatgccatgactcaggatgcccagaacgccctgaggagagtgattgagaagtttactgaaaataccagattttgcctcatatgtaactatctgtcaaagatcatccctgccttgcagtcccggtgt

SEQ ID NO: 1661 - DNA, 414 bp, Bos taurus
  Clone ID: 08-LIB188-024-Q1-E1-B7
ccatggcggcgggatacttggagtcggtcccgcccagcatcagctcgcccccgggctgggctttcgggtccctgttcaggaagaaggagaagacgttcttgtccaccaacttctgctgcatcaggttgtcgaagacaggcagcacgttgttgacggagatgcgggggtaggccatgcccagaatgccgtcgaacttggccgcgatgaagaccacaccgggctgcttgatggcctccccgaaggtctgcctctgcaccgtgacgccacccgggctggatgaggatgggttacagggtactggtccggcaggaagctgcagcctttctcgagggcagccaggatctgctccttggtgctgttcttctccaggttccggtccaaatagcccaccagcttcttgcacacctcgcagaa

SEQ ID NO: 1662 - DNA, 424 bp, Bos taurus
  Clone ID: 08-LIB188-026-Q1-E1-B11
gccatggcgcgggatacacgcaaggcgaccactgggctgtcggacacttattgggaaaaaagagtgtggcagagtccccacaacttcatgaggaggagatcctgaaggagcatctgagggagtatgcccagtgggaagaagcgacaaggaacttgctaagcctcctacaagcaaagggggcccgaggccaccagatgcctccatgggagcccctgagcattcaccagcctgcctgggattccgaggacgtcagcaacttcaaagacacaggtcctcagcatgaaggaaggaacccccagctgaactgacaatgacgatggccgcctccctcaaagaagcagaacagaatccttaagaaactgcgttctatgggcatcagttctactggatcatcaacagatttcctttgtgcagaatacttaac

SEQ ID NO: 1663 - DNA, 405 bp, Bos taurus
  Clone ID: 08-LIB188-026-Q1-E1-B7
acctcacggcagcacgtggctaacgactatgcccgccaactttcagaaggctggaggccttgcgaggttctcatgagcaatgcgctggcgcatctcagcggcttaaaggaggacttcgccttttgtcgcaagctcaacatcagcatttgtccactcacgcagacagcagagagattccaggtgatcgtttataaccccctggggcggaaagtggactggatggtgcggctgcctgtcagcaaacacgtttacctcgtgaaggaccccggtggcaaaattgtgcccagcgatgtggtgaccattcccagttcagacagtcaggagctgcttttctcagccttagtgcctgccgtgggcttcagcatctactcagtctcccagatgcctaaccaaagaccccagaag

SEQ ID NO: 1664 - DNA, 281 bp, Bos taurus
  Clone ID: 08-LIB188-027-Q1-E1-B11
taccattaggcccctgtgggcaacagcaggggcctcacactgctcggtgacatcagatgcaggtctaaggacccaacgactgactgcaggggctcgcccacccacagcttacttggcgagcgggtttctgaagctcctgccggcaaacttggccttgctgcccagttcctcgtcaattctgaggatccggttgtacgttattgttcataaacacaagttactttgtgtaaatctagatctccttacatgatatactgtactcaatgttcggtccctcgaga

SEQ ID NO: 1665 - DNA, 401 bp, Bos taurus
  unsure (341): unsure at all n locations; Clone ID: 08-LIB188-027-Q1-E1-B7
actggcccgactggccttcgtgcccctgctgctgctgtgtaacgtccagccccgccgcaacctgccggtggtctttgagcacgactcctggttcatcatcttcatggctgccttcgccttctccaatggctaccttgccagtctctgcatgtgctttgggcccaagaaagtgaagccggctgaggcagagacagctggagccatcatggccttctttctgtctctgggcctggcgctgggggccgtcttctccttcctgttccgggcaatcgtgtgaccgcggatggacggcaggatggcaccggctgcctgttcctgccttcccctttaggggtgggcangggtcctctggaggttttcttgtctagccatcttctgcttgctcatggcctgtgctgggc

SEQ ID NO: 1666 - DNA, 375 bp, Bos taurus
  Clone ID: 08-LIB188-028-Q1-E1-B7
cgccatgggcccgggataccttgacgtggcagttgtcaagaaagcaaatgaggggctcacatggaattctctgaaagacaagaagtcgtgccacaccgccgtggacaggactgcaggctggaacatccccatgggcctgatcgtcaaccagacaggctcctgcgcatttgatgaattctttagtcagagctgtgcccctggggctgacccgaaatccagactctgtgccttgtgtgctggcgatgaccagggcctggacaagtgtgtgcccaactctaaggagaagtactttagcacaaaatggtattactgtatttccaccagcacctgcctcctctgattcagtctatgccagcccctgaccagaaaccccaa

SEQ ID NO: 1667 - DNA, 430 bp, Bos taurus
  unsure (214): unsure at all n locations; Clone ID: 08-LIB2809-001-Q1-E1-B11
accggtgggtcgcgctgagcaccatcactccatccttgatggagagcgcatagaggtggttcaacatgacgtggttgggctcagggagcaaagctggatcacaggaaatgcccgtgtccttgtttaggatgacttggaggagatgtggtgggaggatgggaggcgctttaaaacggctcctctggtttccgagatatagggctcctgatggtanggtcccggtggggaactggacaactcagacacgtcggagcacttttgggaatccaacattaaagcgtcaaacacttcaaagtcagttttcctcacctgaatgacgttgttgactgtgccaagctggctggtgactactggctcggaaaggtcctgtgtccactgaaatcaagcaatagattatcctccaatccctgctgcaaggaagtttgatttc

SEQ ID NO: 1668 - DNA, 435 bp, Bos taurus
  Clone ID: 08-LIB2809-001-Q1-E1-B7
acccccttgaagctaactcatctctgagccctgggccctgtagtgacaatggacatgtaaggactaatctccaggggtgcatgaatggcgctctggacttttgacccttgctcgatgtccctgatggcgcttttaatgcaacagtgcttgctgcttcttcccagtcttgggttcaagatcttgacaaccatgaaacttctcatccttacctgtcttgtggctgttgctcttgccaggcctaaacatcctatcaagcaccaaggactccctcaagaagtcctcaatgaaaatttactcaagttttttgtggcaccttttccagaagtgtttggaaaggagaaggtcaatgaactgagcaaggatattgggagtgaatcaactgaggatcaagccatggaagatattaagcaaatggaagctgaaagcatttcgtca

SEQ ID NO: 1669 - DNA, 413 bp, Bos taurus
  unsure (309),(316),(336),(348),(351),(354),(361),(378),(406): unsure at all n locations; Clone ID: 08-LIB2809-002-Q1-E1-B7
acagcagaaaggcctgaatgggcatatctctctggggatagggcactgctttctggggaacaggcaggactttggactgagaaagggacagcacggactgaggaggaaacatgacagttggaggaagaggctggtgaggctggtgcatccaagactggagcagaggcagaggaaggtgcagattttcaacatcagtgagagtcaggctctggctttcagtaaagggctcaactggatatttaaggaagggcatttctttgtgcttaagagccatagcctccttcactttggagactcccattacttcangctgaangaaaggcggcacccacacangggtttgagtanganganggatgtnttgtgggaagctgttanggatgggcccaaggaagggatagactanagactgt

SEQ ID NO: 1670 - DNA, 160 bp, Bos taurus
  Clone ID: 08-LIB2809-003-Q1-E1-B7
acatattccactatttgtcccgaataaaaagcgccatcagggacatcgagcaagggtcaaaagtccagagcgccattcatgcacccctggagattagtccttacatgtccattgtcactacagggcccagggctcagagatgagttagcttcaagggggt

SEQ ID NO: 1671 - DNA, 262 bp, Bos taurus
  Clone ID: 08-LIB2809-004-Q1-E1-B7
ccatggccgcgcggatactttttgtaatcggtgtccagcacaaggactttgttctcgttcaaggcatcgatcttgaacaccgcagggatcttggttttttctgcaatgatcttcttctgagcacactcatcattctcccatttctgcagcaggatctccaggtcgccctcaggggtgggcttcagctcctccacatacactctcaggggggcactctgggcgtccagcagggagatgtcgctggccgccatggccaaggagt

SEQ ID NO: 1672 - DNA, 426 bp, Bos taurus
  Clone ID: 08-LIB2809-005-Q1-E1-B7
catggcggccggatacttcttcacaagttctaccacctgggctttctggaggggtgtcatccggcagcagatcacccccttgcacatgcatgccgtccgcaccagttccaactccaggtttccttctagagcgtgggccagactgtagccattgatgattaagccatagctgccattgggcacctcctcaggtattttgaagggtggttggggctttgtggcgaggtaactgtttacggggtctgattccagtagagagtcgggtttcatcttttcccttgctgacctgagttctcctccaacagtctcatcattgttgccttccacgataaatatctcatccatctcatcctcgaatatgttacaggcataggcaatgttcacagcggtctcttgcttatctccagttaaaacccaaattttaat

SEQ ID NO: 1673 - DNA, 417 bp, Bos taurus
  Clone ID: 08-LIB2809-006-Q1-E1-B7
actttgtattttttcagtctgagaagctgttccagataacccaggtaacgctcagagggcacatcttccttttgaatgtgcttctgctcaacactattgggaacaatttcctcacttgacgaaatgctttcagcttccatttgcttaatatcttccatggcttgatcctcagttgattcactcccaatatccttgctcagttcattgaccttctcctttccaaacacttctggaaaaggtgccacaaaaaacctgagtaaattttcattgaggacttcttgagggagtccttggtgcttgataggatgtttaggcctggcaagagcaacagccacaaggcaggtaaggatgagaagtttcatggttgtcaagatcttgaacccaagactgggaagaagcagcaagctggcactgatg

SEQ ID NO: 1674 - DNA, 473 bp, Bos taurus
  Clone ID: 08-LIB2809-007-Q1-E1-B7
catgggcccgggataccttgacacattgtcctcagtctagacagaaggtctagtccctaccgtagggaagctgaggggtagcaggagacccactgagacccaatcccaacactgaaacctgccaggctcccctttactcctccccaggtccttccagcgggaggacctgcaagggcaagcccaccttggcttgattgcctggcaactgagaccctgctctggggaagggaagaggtcagaggaagccctgcagagggctggggaggtggggcccatctctgagcaatcagagtacgaggaaagaatgtatgtgcctgatggagaaagggatcggcatgctgggaggtgagggacttatctggggtgctccttcctcctccgtttgtggtcacagacaggacgtcacaggatggcgccatccttcagtggctcactgtctgtggctctgccttcctccccatgtctccttccct

SEQ ID NO: 1675 - DNA, 422 bp, Bos taurus
  Clone ID: 08-LIB2809-008-Q1-E1-B7
gggatacagtattctttaaaattttctttttaaattgaaagccaacaactctgcctttatgatgctaagctcatgttcttatttcttctcctatcttctttctcttctgttcccattatccttccctttgttttgtccctgtcaccttcctttctccttctcctcattgccccccaggcaagcaggtggtcagtcattggtgggtttccagcttccaaagcctagacaaccctgctgtagtctcaaactagtggtctttgccccggctgaccctttccttgagctgtctgagctttaaggtggatggctcaagctagagatatgacagaatcttcggggaagggccttgatgatcttcagcccagacttttgctaaatgaaatggaaaaataactttatttgtggcacaaactgaaaaaaca

SEQ ID NO: 1676 - DNA, 388 bp, Bos taurus
  unsure (378): unsure at all n locations; Clone ID: 08-LIB2809-009-Q1-E1-B11
acagcaaaaaggcctgaatgggcatatctctctggggatagggcactgctttctggggaacaggcaggactttggactgagaaagggacagcacggactgaggaggaaacatgacagttggaggaagaggctggtgaggctggtgcatccaagactggagcagaggcagaggaaggtgcagattttcaacatcagtgagagtcaggctctggctttcagtaaagggctcaactggatatttagggaagggcatttctttgtgcttaggagccatagcctccttcactttggagactcccattacttcaggctgaaggaaaggcggcaccaccacaggggtttgagtaagaggaggggtgttttgtgggaagctgttanggatgggccc

SEQ ID NO: 1677 - DNA, 409 bp, Bos taurus
  Clone ID: 08-LIB2809-009-Q1-E1-B7
ggcgcgggatacagcagaaaggcctgaatgggcatatctctctggggatagggcactgctttctggggaacaggcaggactttgggctgagaaagggacagcacggactgaggaggaaacatgacagttggaggaagaggctggtgaggctggtgcatccaagactggagcagaggcagaggaaggtgcagattttcaacatcagtgagagtcaggctctggctttcagtaaagggctcaactggatatttagggaagggcatttctttgtgcttaggagccatagcctccttcactttggagactcccattacttcaggctgaaggaaaggcggcaccaccacaggggtttgagtaagaggagggatgttttgtgggacgctgttagggatgggcccacggaagggat

SEQ ID NO: 1678 - DNA, 431 bp, Bos taurus
  Clone ID: 08-LIB2809-012-Q1-E1-B11
aatgggctcatcaccccactgcggacccctctcccactggctggacccccccgccgggttggggtcttccttgactatgaatcaggagacatcttcttctacaacatgactgatggatcccatatctatactttctccaaggcctctttctctggccccctccggcccttcttctgcttgtggtcctgtggtaaaaagcccctgactatctgcccagtcactgatgggcttgagggagtcatggtagttgctgatgccaaggacatttcaaaggagatcccactgtcccccatgggggaggactctgcctccggggatatagaaaccctccattctaaactaatcgctctacagcccagccaaggggtgccttaagaaatactccagctcagctcttcccctctactctaacccccctttcaacactccca

SEQ ID NO: 1679 - DNA, 387 bp, Bos taurus
  Clone ID: 08-LIB2809-013-Q1-E1-B7
acagcagaaaggcctgaatgggcatatctctctggggatagggcactgctttctggggaacaggcaggactttggactgagaaagggacagcacggactgaggaggaaacatgacagttggaggaagaggctggtgaggctggtgcatccaagactggagcagaggcagaggaaggtgcagattttcaacatcagtgagagtcaggctctggctttcagtaaagggctcaactggatatttagggaagggcatttctttgtgcttaggagccatagcctccttcactttggagactcccattacttcaggctgaaggaaaggcggcaccaccacaggggtttgagtaagaggagggatgttttgtgggaggctgttagggatgggcc

SEQ ID NO: 1680 - DNA, 381 bp, Bos taurus
  Clone ID: 08-LIB2809-014-Q1-E1-B11
ggatacaaagaaaaggacctgacccacttcaaccagaagcttgaggggttcagcgtgcccaggtgctgggatgagtgcctgaagagctctgagtattacgctcggaagagtgaggtcgacaagttcaacaaggagaattgttggaaaaagagaggattgtgcataattcctaccaaatttggaataagcttcacagttccttttctaaatcaggcaggagccctgatccacgtatacacagatggctccgtgctggtgagccacgggggcacagagatgggccaagggcttcacaccaagatggtgcaggtggccagcaaagctctgaagatccccatctctaagatgcatatcagcgagacgagcactaacacggtgccc

SEQ ID NO: 1681 - DNA, 440 bp, Bos taurus
  Clone ID: 08-LIB2809-014-Q1-E1-B7
actggacctggaagatgcaagctatgtgtgagtagctcatttttttcttctctccagtgcaggatgtagctatctctgcccttggtcacgttgagggttgggggagccatctggatgttgtctgagctctttataagtctctcttccacctttggtcgaacagagacgatgtactggctgtagttcctggggtcaggcacaggaatctggcatcggtgctggatgtaggggctgccagtctccttctgcacgggagagcattcttcctcccgtgcactggggccggtcttgtagaagagggtgaaggagacggagtgggttacctcggacctcacttcccaggtgcaggtaagcagggtggccccgtcaaagaagcactggaggttctgaggctgggcctcatcccctggctgggagttccaggaaacctcctggctcaa

SEQ ID NO: 1682 - DNA, 371 bp, Bos taurus
  Clone ID: 08-LIB2809-015-Q1-E1-B11
acggctcagagcccagtctggccagccgtctccggaacctcagcagcccgctgggcctcatggctgtcaaccaagaagcctgggaccacgggctggcctacctgccctttaacaacaagaagccgagcccctgtgagttcatcaacaccaccgcccgcgtgccctgtttcctggcgggagattttcgagcctcagagcagattctgctggccactgcccacaccctccttctccgggagcacaaccggctggccagagaactaaagaaactcaaccctcactggaatggagagaagctctaccaggaagcccggaaaatcctgggagccttcatacagatcatcacctttagggactacctacccattgtg

SEQ ID NO: 1683 - DNA, 454 bp, Bos taurus
  Clone ID: 08-LIB2809-015-Q1-E1-B7
gccatgggcgcgggatactagagtagaaagggcaattcattaagtatatttagaatccaagctactactactgagaaattacagtatttattcagttcagttcagtttagtagctcagtcgggtccgactctttgcgaccccatgaatcgcagcacaccaggcctccctgtctatcaccaactcccggagtttacccaaactcatgtccatcgaatcggtgatgccatccagccatctcatcctctgtcgtccccttctcctccagcccccagtccctcccagcagcagggtctttcccaatgagtcaagtcttcgcatgaggtggccaaaatattggagttacagtgtttattagagattcaataagttgaaaattcagagtcctcagtttcaaagaaataacatgtgactgaaaacatgtttaattttaaagttttcatcaactctacatta

SEQ ID NO: 1684 - DNA, 249 bp, Bos taurus
  Clone ID: 08-LIB2809-023-Q1-E1-B7
gggatacaacagatgggccttgttcccaatatcgctctggagatacgtcacagcattctggagggaatccatgcccattagatggaacctaggatacgagtgaatcaggaactggcactacatcttaccctgagcttttcatacaagtcgaccatctggatgcctatcaatctggtgcctgggattacattctaataagcactcaatatactgatgcggcatcaatcactgagatccctaatctcattg

SEQ ID NO: 1685 - DNA, 379 bp, Bos taurus
  Clone ID: 08-LIB2809-025-Q1-E1-B7
aggataaaagccagaatgggcatatctctctggggatagggcattgctttctggggaacaggcaggactttggactgagaaagggacagcacggactgaggaggaaacatgacagttggaggaagaggctggtgaggctggtgcatccaagactggagcagaggcagaggaaggtgcagattttcaacatcagtgagagtcaggctctggctttcagtaaagggctcaactggatatttagggaagggcatttctttgtgcttaggagccatagcctccttcactttggagactcccattacttcaggctgaaggaaaggcggcaccaccacaggggtttgagtaagaggagggatgttttgtgggacgctgttaggga

SEQ ID NO: 1686 - DNA, 423 bp, Bos taurus
  Clone ID: 08-LIB2809-026-Q1-E1-B11
acctggagagattgtggaaagcctttcaagcagtgaggaatctattacacgcatcaataagaaaattgagaagtttcagagtgaggaacagcagcaaacagaggatgaactccaggataaaatccacccctttgcccagacacagtctctagtctatcccttccctgggcccatccctaacagcctcccacaaaacatccctcctcttactcaaacccctgtggtggtgccgcctttccttcagcctgaagtaatgggagtctccaaagtgaaggaggctatggctcctaagcacaaagaaatgcccttccctaaatatccagttgagccctttactgaaagccaaagcctgactctcactgatgttgaaaatctgcaccttcctctgcctctgctccagtcttggatgcaccagcctcacca

SEQ ID NO: 1687 - DNA, 258 bp, Bos taurus
  Clone ID: 08-LIB2809-027-Q1-E1-B7
gcccgggattacaccaatgccggatgggccgttcttcttggtgggcctggtcgatcatgcacttgcacagcgtgaagtcggtgtggggcaggttggtgagggccttcagcaggatctgggcggtgaccgtggtctggaagaaggccgggttgaactggtacagtttcaggacagccaggttggcttccagatcataggcattttctttcgcctgtgtctccacataccgctccacggtggccaggttctcacggttgt

SEQ ID NO: 1688 - DNA, 318 bp, Bos taurus
  Clone ID: 08-LIB2809-029-Q1-E1-B11
gggataaagcaaagaaagggcaattcattaagtatatttagaatccaagctactactactgagaaattacagtagttattcagttcagttcagtttagtagctcagtccggtccgactctttgcaaccccatgaatcgcagcagaccaggcgctccctgtcggatcaccatgctcccggacgtttacccaagctcatgtccatcgaatcggtgatgccatccagccatctcatcctctgtcgtccccttctcctcgagcccccagtccctcgcagcagcagggtctttcccagtgagtcaagtcttcgcatgaggtgg

SEQ ID NO: 1689 - DNA, 362 bp, Bos taurus
  Clone ID: 08-LIB2809-030-Q1-E1-B7
gcatgctcctagcgccatgggcccgggatacccggaacccacgaagaactgagccagtgggtggtcactgctcagccctgctgctctgaagacctgaatagcacgatcaatcactcgggaagccatggatggggccaccattttaatcatggcaatatccagagctgcagccttatttcccgccacatccataacgtgggcagctttcagcaccagcagccgggcctgctcgatctccacgcgggacagggcaatgtctgccaggaccatgccctgctctacaaggggcttcccaaaggccatgcgggacttcacctgtggacacaggagacaggacgggaggcatggacggtgccctgcag

SEQ ID NO: 1690 - DNA, 323 bp, Bos taurus
  Clone ID: 08-LIB3057-001-Q1-K1-B11
ctagttctagatcgcgagcggccgcccttttttttttttttttggtgcgcctccactttccgtactacatccatgccctctagaactttgccgaacactacgtgcttgccatctagccaggcagtcttgactgtcgtgatgaagaactgggagccgttggtgtctttgcccgcgttggccatgctcacccagccgggcccatagtgtttaagcttgaagttctcatcggggaagcgttcaccgtagatgctcttaccttcagtgccgtctacccgggtggtcatcggactgttgagaaagactgtgtctaacacagtgaataa

SEQ ID NO: 1691 - DNA, 343 bp, Bos taurus
  Clone ID: 08-LIB3057-001-Q1-K1-B7
cccacgcgtccggctgaccatctgtaaccttttcttgatgattctactctccgatttgtggacaaactgtttgaagctgtggaggaaggccgaagctctaggcattccaagtccagcagtgaccggagcaggaaacgagagctaaaggaagtgtttggtgatgactctgagatctccaaggaatcatcaggagtaaagaagcgacggataccccgttttgaagaggtagaagaggagccagaagtgatccctgggccctccctcagagagtcctggcatgctgactaagctccagatcaaacagatgaatgaggcagcaccacggcaaatggaggagaggaaa

SEQ ID NO: 1692 - DNA, 357 bp, Bos taurus
  Clone ID: 08-LIB3057-002-Q1-K1-B7
taagtatttaatagccaatgcaactaatccagagagtaaggtcttctatctgaagatggagggagattacttccggtaccttgctgaagttgcttgtggtgatgatcgtaagcaaacgatagataattcccaaggagcttaccaagatgctttcgatataatcatgttagagatgctactcatatactttatccttttttttctttctttttacttttttatgtattattttttttttttttttttttttttttttatttctttttttttttaattttttttttttttttttatttttatttttttattttttttatttttttttttttatttttttttatttttttttatttttta

SEQ ID NO: 1693 - DNA, 446 bp, Bos taurus
  Clone ID: 08-LIB3057-003-Q1-K1-B11
gtgattcctaatcgaatgaaaatgggtccatatcttgttgtcataagaactagaatgatgtcaactcataaatccaaaaggaatataagagaatattatgggctgctgaatctggatgaaggctgttctgcagatgatgtcagggaatcttttcgtaagcttgccaagcaataccatccagatggtggctctagtactgctgattctgcaacgtttataaggattgaagaagcttacagaaaggtactttcccacgtgatagaacagacaaatgccagacagagtaaagttgaagacacagaagaagaagaagaaaaattcaaatataaaacaccccaacaccggcattacttaagttttgagggtatttggtttgggactttccagttaaagcgagagacgcagtacaggcagtttagagcagaccgtgcaactgaacaagtgat

SEQ ID NO: 1694 - DNA, 377 bp, Bos taurus
  Clone ID: 08-LIB3057-005-Q1-K1-B11
ggaggctgtcggccgcttcagaatgaagctgaacatctctttcccggccactggctgccagaagctcattgaagtggacgatgaacgaaaacttcgtaccttctacgagaagcgtatggccacagaagttgctgctgacgctctgggtgaagaatggaagggttatgtggtccgaatcagtggcgggaacgataagcagggtttccccatgaagcagggtgtcttgacccatggcagagttcgcctgctactgagtaaggggcattcctgttacagaccaaggaggactggagagagaaagcgcaaatctgtacggtgttgcattgtggatgccaatctgagtgttctcaatttggtcatcgtgaaaaaagggggaa

SEQ ID NO: 1695 - DNA, 451 bp, Bos taurus
  Clone ID: 08-LIB3057-005-Q1-K1-B7
cacccctctacttatttgtcatgagtatattttcagagtttggacttaacattgagctaagaagcattaagtctttgaactgaatgtattttgcagccctgctttggacaatagtaaatgtaggagcactgtagaagtcttaagaaagagggagtgaagggagaagattgacctggttctctactggttttttagacttgtaacatacatgacttggaataaaatctgtatgcacgggcattacccctcaagtcttaagaaataagtcctgaatgcatgtccttcccaactaacactctgtactttggcctttgggtctgaatttcccagcaccccacatttatcacttttccccaatcttgtggtcagtagaaggaaatgtacagctttctgatgggtgagtgaaagagtagccgcagacatgtcatgagttggagagtgtctgataaag

SEQ ID NO: 1696 - DNA, 370 bp, Bos taurus
  Clone ID: 08-LIB3057-006-Q1-K1-B7
taataaacttacacatgcaagcatctacaccccagtgagaatgccctctaggttattagaactgagaggagctggcatcaagcacacaccctgtagctcacgacgccttgcttaaccacacccccacgggaaacagcagtgacaaaaattaagccataaacgaaagtttgactaagttatattaattagggttggtaaatctcgtgccagccaccgcggtcatacgattaacccaagctaacaggagtacggcgtaaaacgtgttaaagcaccataccaaatagggttaaattctaactaagctgtaaaaagccatgattaaaataaaaataaatgacgaaagtgaccctacaatagccgacgcactata

SEQ ID NO: 1697 - DNA, 327 bp, Bos taurus
  Clone ID: 08-LIB3057-007-Q1-K1-B11
cccacgcgtccgaaacaccagagtttattcctttttggttccttggttcacgctggctgcaaggcttgtgtttggtgggagcagcttctcaccgtgacgctgctctacgaagacgacgacaacctcgtgtgacaacatcaaataatgggaaaaggaaacatggaactcgagacaaacaaggtctatgactacgaggatgcacgaggggacgttgaagtcccagataccgctcatcagataagcactgattcatggtttcaagtggctattatcctcacaaccggaatcaacagtgccttaggtcttggatatccagggaccgtcatg

SEQ ID NO: 1698 - DNA, 375 bp, Bos taurus
  Clone ID: 08-LIB3057-008-Q1-K1-B11
cgctgagcacaactcgcccgacgtttttgcgctgcgggtacctgctaggcaacgggcggattctgaccacgaggcggtgaccgaagcctcatacgtgaacctgccaaccattgctctgtgcaacacggactctactgtgcgctacatgaacaatgacattgcgtgcaccaacaggggagcgcactcaaagcgtctgatgtcgtggatgctcgcccgttaagtactgagcatgcgtggcaccatctctcgagagcacatatgcgagcacatgccggacctctacttttacagagatcctgctgagattgaaatggaagagcatgcaagagctgagaacgctgcaaccaatgctgagattcagggcgaatggactgc

SEQ ID NO: 1699 - DNA, 360 bp, Bos taurus
  Clone ID: 08-LIB3057-008-Q1-K1-B7
gcagctcaagccgcggaccaggaggaacatgctgtggacttcctctgccatataaataagaggaaatctttcaaacatggcagaagctaagactcactggcttggagcagtcctgtctctcatccctctaattatcctcctctctgaagctgaagctgcttcatttcagagaaaccagctgcttcagatggaaccagatctcagattggaaaatgtccaaaggtttcccagtcctgaaatgatcagggctttggagtacatagaatatgctcgacagctagactacacataagaaagcattccagactacaacccataccatggtgattctgtgccacttcatcttatagaaaatggtga

SEQ ID NO: 1700 - DNA, 424 bp, Bos taurus
  Clone ID: 08-LIB3057-009-Q1-K1-B11
ttgaaatcatcaccaccatggacagcataggttcgtcgcagaaagggtcccgcctgctcctgctgctggtggtgtcaaatctactcttgtgccagggtgtggtctccacccccgtctgtcccaatgggcctggcaactgccaggtatcccttcgagacctgtttgaccgggcagtcatggtgtcccactacatccatgacctctcctcggaaatgttcaacgaatttgataaacggtatgcccagggcaaagggttcattaccatggccctcaacagctgccatacctcctcccttcctacccctgaagataaagaacaagcccaacagacccaccatgaagtccttatgagcttgattcttgggttgctgcgctcctggaatgaccctctgtatcacctagtcaccgaggtacggggtatgaa

SEQ ID NO: 1701 - DNA, 383 bp, Bos taurus
  unsure (301): unsure at all n locations; Clone ID: 08-LIB3057-009-Q1-K1-B7
cggacgcgtgggttgaaatcatcaccaccatggacagcaaaggttcgtcgcagaaagggtcccgcctgctcctgctgctggtggtgtcaaatctactcttgtgccagggtgtggtctccacccccgtctgtcccaatgggcctggcaactgccaggtatcccttcgagacctgtttgaccgggcagtcatggtgtcccactacatccatgacctctcctcggaaatgttcaacgaatttgataaacggtatgcccagggcaaagggttcattaccatggccctcaacagctgccatacctncttccttcctacccctgaagattaagaacaagcccaacagacccaccatgaagtccttatgagcttgattcttgggttgctg

SEQ ID NO: 1702 - DNA, 358 bp, Bos taurus
  Clone ID: 08-LIB3057-011-Q1-K1-B11
gcgccggattgaaagaagttctttatacagtggtctctctgaatcagatcacagatgggatgggggaggattgctttctagggttcaaacgtctatgcattaatgcagatgttgtgaatgtgtaaagatattagtaatttgattatttctatgtatgtttttaaaagaatcgtttggtctttttgagatattataccttttttttggcattctaccattgtagtctaaacctaaaacttttatgcctcaatttagactatattttttaaaggagcacctctctgtggtgcagagaactttttaaaaagtgccattaagaactgagtcttggtactaagagttctggataaattgtgga

SEQ ID NO: 1703 - DNA, 272 bp, Bos taurus
  Clone ID: 08-LIB3057-011-Q1-K1-B7
acgtagatttactacagggcaaggatttactcatcgaacactaggaaaacctctgtgatgggaatgcttaaggttccaactacccgggaaaccgaataaagatggtggcttacaaagggctggatgctttaaagaaactccatacagctgtggctaagtcgcacaagctttaacgatgaactctcagatgatgccccattaaaggactactgtagagattcccgatgatgctgtccaaacccttgcaagagataactttctgatactggacg

SEQ ID NO: 1704 - DNA, 438 bp, Bos taurus
  Clone ID: 08-LIB3057-013-Q1-K1-B7
ggacccgccaacatgggccgcgttcgcaccaaaacggtaaagaaagcggcccgggtcgtcattgagaagtactacacgcgcctgggcaatgacttccacaccaacaagcgtgtgtgcgaggaaatcgccattattcccagcaagaagcttcgcaataagatcgcaggctacgtcacacatctgatgaagcggattcaaagaggcccggtgagaggtatctccatcaagctgcaggaggaggagagagagaggagagacaattacgtgcctgaggtctcagccctggatcaggaaatcattgaagtagatcctgacactaaggaaatgctgaagctcttggactttggcagtttgtccaacctgcaggtcactcagcctacagttgggatgaacttcaaaacaccacgtggagccgtttgagtctttctgctgtgctgt

SEQ ID NO: 1705 - DNA, 416 bp, Bos taurus
  Clone ID: 08-LIB3057-014-Q1-K1-B7
cgagcgcgtgggcatcctctctggccatgacaacagggtcagctgcctgggggtcacagctgatgggatggctgtggccaccggttcctgggacagcttcctcaaaatctggaactgaggaggctggacaaggggatgtaaaaggccatgaagacactcactcagctgcccctgtcctgcccaatttaaggtttctttgagcttttctcttctacaccccagctttccccctttgagggcagtggggagtatggggagcgtgcctttgggaggcagcatcagggactcgtgacgggcagggaaactgccccatctgcttccaggccttccctgtacatgggtctgacagctttttccttcgtgagcaaggacaatggacccccaacccttcctaaccctaacttggcaggcctagc

SEQ ID NO: 1706 - DNA, 443 bp, Bos taurus
  Clone ID: 08-LIB3057-015-Q1-K1-B7
cggactcgtggggttctagatctcgatctgcctccctttttttttttttttcggttccgcaaacttgaaacgttggatttcctaactacatacagctttaatagtcacgatacctcgctccatcactgcctaggcgaatcctcacccaatcttctaggcttcattagttcatattataggccttctgtatttacttttctcgtaaatatacccctgtctttttctcccttattttcccttctttttttcttttctttatattgctttttttttacatcttatctatttacttttttttattatggtgtgtatttttttttttactcttatttttttattttattttatttttttaattctatatatttttttttttatttatctttatttatttaattctttttttttattttttttattttatttattttatttattttttt

SEQ ID NO: 1707 - DNA, 430 bp, Bos taurus
  Clone ID: 08-LIB3057-016-Q1-K1-B11
cgcggcggcaagatggccgtgcaaatttccaaaaagaggaagtttgtcgctggtggcggcttcaaagctgaactgaacgagtttctcactcgggagctggctgaagatgggtactctggagttgaggtccgagttacaccaaccaggacagaaatcattatcttggccaccaggacacagaatgtacttggtgagaatggccggcggatccggtaattgactgctgtggttcataatagatttggcttttcctgattgctgttttatgttttattcttattatgttatccttcttaggactggggggttatttttcttttctttatttttttattatctttatttttttttttttctttctttttttttttattttttcttttttatattatttattttttttttttttttatttttattttttttcttt

SEQ ID NO: 1708 - DNA, 156 bp, Bos taurus
  Clone ID: 08-LIB3057-016-Q1-K1-B7
cggacgcgtgggctttcaatagatcgcttcgagggagctgctctgctacgtagtaaacgccgacccagaagctgggcgtctacgaatggtttagcaccaggcgccccacgaacgtgcggtgcgtgacgggcgaggtggcatttttcatttcgtcat

SEQ ID NO: 1709 - DNA, 340 bp, Bos taurus
  Clone ID: 08-LIB3057-018-Q1-K1-B7
gtttcttgaaatcatcaccaccatggacagcaaaggttcgtcgcagaaagggtccggcctgctcctgctgctggtggtgtcaaatctactcttgtgccagggtgtggtctccacccccgtctgtcccaatgggcctggcaactgccaggtatcccttcgagacctgtttgaccgggcagtcatggtgtcccactacatccatgacctctcctcggaaatgttcaacgaatttgataaacggtatgcccagggcaaagggttcattaccatggccctcaacagctgccataccttctcccttgctacccctgaagataaagaacaagcccaacatacccat

SEQ ID NO: 1710 - DNA, 356 bp, Bos taurus
  Clone ID: 08-LIB3057-019-Q1-K1-B7
atcatatagtaaacccaagcccttgacctcttacaggagctttgtctgccctgttaagaacatccggcctaaccatgtgatttcactttaactcaatgaccctgctaataattggcctaacaacaaatatactaacaatataccaatgatgacgagatgttatccgagaaagcaccttccaagggcaccataccccagctgtccaaaaaggcctccgttatggaataattctttttattatctccgaagtactattctttaccggatttttctgagctttctaccactcaagcctcggccccacccctgaactaagcggctgctgacccccaacaggccattcaccccactaaaac

SEQ ID NO: 1711 - DNA, 425 bp, Bos taurus
  Clone ID: 08-LIB3057-020-Q1-K1-B11
atcgtggtgagcgtgttcatcgcctgctggtcccccctcttcatccttttccttgtggacgtggcctgcaaggtcaaggagtgcgctgtcctgttcaaggcccagtggttcatcgtgctggctgtgctcaactccgccatgaaccccatcatctacacgctggccagcaaggagatgcggcgggccttcttccgacttgtctgcacctgcctggtcaggggccggggagcccactcttcacccatccagcccgctctcgacccaagcagaagcaaatccagtggcagcaacaacagcagcccctcccccaaaagcaaggaagacctcccccaaacggccgcctcaccctgcatcaccgacagaaacaaaaccctgcagaatggagtcatctacaagtgagagtgcaggcctcaaggaacctgggg

SEQ ID NO: 1712 - DNA, 280 bp, Bos taurus
  Clone ID: 08-LIB3057-020-Q1-K1-B7
atatattacaaaccctattgatcactgtcacattctgagtctagtttacactactacaaccctcataatactatgaagcaccttttactatctcctactgagtttacagctcaactttttttgtatccacattcttccacagcctccacgtcatcattagttccaccttcttaattgtcttcttcttcctccaatcaaaatttaattttacttataaccaccacttctacttttaaaccttttcctcatacttacattttttacacttaatctatacttt

SEQ ID NO: 1713 - DNA, 407 bp, Bos taurus
  Clone ID: 08-LIB3057-023-Q1-K1-B7
tgccgcggtggaagcgggtgcgcgggttttctctctgagttatccagttccgagccttgggtctgcttcgacacccgcattctccgtcgccatgactgaacagatgacccttcgtggcaccctcaagggccacaacggctgggtgacccagatcgctaccactccccagttcccggacatgatattgtccgcctctcgagataagaccatcattatgtggaagctgaccagagatgagaccaactatggtatcccacagcgtgctcttcggggtcactcccactttgttagtgatgtggtcatttcctcagattgccaatttgccctctcaggctcctgggatggaacccatctcctttgggatctcacaacggtcaccaccactcgccgatttgtatgccatacca

SEQ ID NO: 1714 - DNA, 351 bp, Bos taurus
  Clone ID: 08-LIB3057-025-Q1-K1-B11
ctgccaggtatcccttcgagacctgtttgaccgggcagtcatggtgtcccactgcattgatgacctatcctcggaaatgttcaacgaatttgataaacggtatgcccagggcaaagggttcattaccatggccctcaacagctgccatacctgctcccttcctacccctgaagataaagaacaagcccaacagacccaccatgaagtccttatgagcttgattcttgggttgctgcgctcctggaatgaccctctctatcacctagtcaccgaggtgcggcgtatgaaaggagccccagatgctatcctatcgagggccatagagattgaggaagaaaacaaacgacttct

SEQ ID NO: 1715 - DNA, 264 bp, Bos taurus
  Clone ID: 08-LIB3057-025-Q1-K1-B7
gcgtcccgcaaggaaggcaccggttcatctgccacctcttccagctctaccacggggcgctgcaggcaaaggcaaaggcaaaggaggatccggagattcagccgtgaagcaagtgcagatagatggcttggtggtattaaagattatcaaacattaccaggaagaaggccaaggaactgaggtggttcaaggagtgcttttgggccttgttgtaaaaaatcaactggggattaccactggttttcttttccttaagaacattga

SEQ ID NO: 1716 - DNA, 406 bp, Bos taurus
  Clone ID: 08-LIB3058-001-Q1-K1-B11
cagaaaacgcctggaaaaagaaaagcttgaaaaagatgctcagaaaccagactgtcagaaaaacttggggactgtgggtgctgttgccttggactgccaaggaaacctggcttatgcaacctcaacagggggcatcgtcaacaagatgccgggccgcgtcggggacacgccgtgtgtaggatctggaggttacgctgacaatgacatcggagctgtctcaacgacagggcacggtgagagcatcctgaaggtgaatctggccagactcgcgctcttccacgttgaacagggaaaatcactagaagaagctgccaacgcatcactgggtcatatgaagtcaaaggtcaaaggcgtaagtggtatcatcatggtcaacaaaggcagagagtgggcggtgaaatggacc

SEQ ID NO: 1717 - DNA, 429 bp, Bos taurus
  Clone ID: 08-LIB3058-002-Q1-K1-B7
cccacgcgtccgcttcagcagcagaaaccgaggtaccaacgtcccgatccaaactggattactcgcgggaggcgtctctttttctttttctgctcatcagcagaaggatcaggttgactggctcggcaagggcgcctcgagcgagtactggcaggcttctgagtatccaaggttgtatcagcctctgggaggggcgccactaccaatgccccagcaggagcagcatcagaagagtcctcagccagcaaatcaagcatagcgcttatctctgcatcactagggttcaggggcacctcaaaatggacctgccgttcatcatcaggaatctccccgagcgaggcaaccaaggcactaacttcttcagcagtgggccgcactctaaggcccaaactggcatcagtgacaggtggatttgacacaaaaagagtg

SEQ ID NO: 1718 - DNA, 423 bp, Bos taurus
  Clone ID: 08-LIB3058-003-Q1-K1-B7
gcagacatcctgttatcagtactcctaataagtgggtcctttaccctctccacattaattgctacacaagaacacatatggttaatcctcccagcatggcctctagcaataatatgatatatctcaacactagcagaagcaaaccgagctacatctgatttaactgaaggagaatcagagctagtctcgggcttcaacgtagaatatgcagcatgaccatatgacctcttcttcatagcagagtacgcacatattatcataataaatatctttacagcaattttattcctaggaacatcccacaatccacacataccagaactctacacaatcaattgtaccattaaatacttactgctcacaatatccttcctatgaatccgagcatcctaccctcgatttcgctatgaccaactaatacac

SEQ ID NO: 1719 - DNA, 392 bp, Bos taurus
  Clone ID: 08-LIB3058-007-Q1-K1-B7
gacaccgtacgcgatcctctctagcgggtttgtgtcatattacagcgattgcaatctcggggctccgtgcacccgagagcccccagagcactactagcataatgctaaggctttacctgatgtggtatacctaacgctggacagatcgtgattctgataggacgaagagtacgaatatgatgatgaggaggtcgaggactaggagggtctccggacaaagcaccggtagcccttacaaaagggtctgatgtcggcctgattactgctcgccgctgtcatgccagtctgactctcgactttcctggtgcttaccacttgaaggggcacaggcggtccttgtgcacaaagggaggagtgattattttttcttttcattgttggtcattttgttt

SEQ ID NO: 1720 - DNA, 417 bp, Bos taurus
  Clone ID: 08-LIB3058-008-Q1-K1-B11
aaacaggctgcttctgctcaactcaatcaaacgcgtactgatcggaagcctctttgcaaggtacatgactcgaccacaatatgttctgcaacagcaatcccgacagtcactatgccctactacctcaaaacaacagccgtcattgatacaatcctaggctacatctcagccctagaaatcagtaatataactaagaatctaaaatatgactaccgctcaaacgccttcaagctctcaaccttgctagggtatttgcccacaattatacatcagcctagctccatacataaatctatcagtaagccaaagatgagcatcctaccttctagacctaatctgactagaagccatcctaccaaaaaccatctcactcgcccaaatacaagcatctatcctgggcacaaacccaaaaggcct

SEQ ID NO: 1721 - DNA, 420 bp, Bos taurus
  Clone ID: 08-LIB3058-008-Q1-K1-B7
gttctagatcgcgagcggccgcccttagctcgatgcattcattgtccgtttggtgttgtttatttcctgtgatttttattcttaaagaagcctgaagaagtgcaccatggagaggacgaggcggagacatttgtcttccaggcagaattagcccaactcatgtctcttatgatcaacaccttctatgccaacaaggaaatggttattggggagttgatcagtaatgcttctgatgccttagacaagattcgctatgagagcctgacagacccttccaaattggacagtggtaaagagctgaaaattgacatcatcccaaacccccaggagcgtactctgactctggtagacacaggcattggcatgaccaaagctgatcttgtaaatcatttgagaaccattgccaagtctggcactaaa

SEQ ID NO: 1722 - DNA, 412 bp, Bos taurus
  Clone ID: 08-LIB3058-010-Q1-K1-B7
ggactgtcagaaggaatctttcatttgtatgtaattacatacttgaggaggaggtgcttttaaagcagtctttcattttctaatcatctcaaatatgcaaccatccatccagtaacattaagggtcataaactggtgggaaacaggaaattcagtgtagaagcttaagatgcctctgggtgaggtggtctttatttccccctttggttctttgtgtgcgtgtgttgctgctgttgtcgttcatgggcttcaatgctgaagctatgcgatcattcttcagtgagtgagcttctaactggcacgtgttttgatcacggagtttgcaatgtcttgcccttggagacaagtgagggctctagtttcattctatctcataaaggaagtgcaatctctgtaattaaatcctacctgta

SEQ ID NO: 1723 - DNA, 367 bp, Bos taurus
  Clone ID: 08-LIB3058-012-Q1-K1-B11
cgactccacgcgtgcgtccgtagtgctaggcccgtggcctgattttctgtcccacaagggaatgtgctctgacgcggatgccaatccacttgctgaaggtggtgacaatgctgatgatcccaacttagatatcatgtgaaaatgcatatggtcaaagcgatgaattcaaggatgactatacaatcccatatgcgtatacaattgacccatataagctcaatgttactgatggtatagtctatgtgatacctaaaacaggggttcactgtaagctgtgttcactattttatacagatgaagaagttgcaactaatacttattgcaacggcctttctgattaccagaaattaaagaaatttctgaataa

SEQ ID NO: 1724 - DNA, 288 bp, Bos taurus
  Clone ID: 08-LIB3058-012-Q1-K1-B7
gcctaacgatgatatcactcacccaatccctgactagactggatatattacagaggggcagatctatgtcgacagacagctacacaacagacagatttatccacccattaatgtgctgccatcctcgtcgcgatggatgaagtctgctataggagaaggcatcaccagatgggatcacgccgatgtctctaaccggctgtattcgtgctaatctataggtcaggttgtacaagccatgtaagcttcctgtgaagaagaagctctgacctcaaatgaatgccttgactt

SEQ ID NO: 1725 - DNA, 434 bp, Bos taurus
  Clone ID: 08-LIB3058-013-Q1-K1-B7
gtagccagtgtctgcaaccagagcctgatgaagttggtcacccccgaggatgacgagcctgacgagcccaggccagtggtgcagaagcaggcaggccccagccctgaggactgcgcagcaaagcaggagggggcagccagcggagggcctgatggttcttgcgactctagcttcagtagtggcatcagtgtcttcactccagccagcgcggagagggccccggtcaccctccacctggacgggatcgtgcaggtgctgaactgccacctcagcgacacggccatcggcatgatgaccaggatcgccgtcctcaagtggctctaccacctgtacatcaagaccccccgcaagatgtcgcggcacacggacagcctgttccctgtgctcctgcagacgctgtcggacgagtctgacgagggtatccctaaggatct

SEQ ID NO: 1726 - DNA, 434 bp, Bos taurus
  Clone ID: 08-LIB3058-015-Q1-K1-B7
cgcgctctggaatgatgaggtggacaaggctgagcaggagctccgagtggcccagacggagtttgaccggcaggcagaagtgacccggctcctgctggaggggatcagcagcacccacgtgaaccaccttcgctgcctgcacgagttcatcgagtctcagaccacgtactatgcccagtgctaccgccacatgctggacctccagaagcagctgggcagctcccagggagccatgttcccaggcacctttgtgggcaccgccgagcccgcctccccacccctcagcagtacctcgcccaccaccaccgcggccacgatgcccatggggccctccgtggccgacctggcccctccgggggaggctgctctccgcctggaggaggtggccccacctgccagcggaacccggaaagcccgcgttctctatgactacg

SEQ ID NO: 1727 - DNA, 429 bp, Bos taurus
  Clone ID: 08-LIB3058-016-Q1-K1-B11
ggaccagctggcttctgtgcgctaggccgtgactaacttgcttagtgtggttctcggaactcagcaggtatacctggaaccattaaatatgtttgtgccttaaaaggagaggagaaagtgtggttaagagagtgcagccatgaagttctgagccaggcaagtagccaggttgtcgggcagccacgtgtgaatccggagtagacggtgccttcggaggcaacgcgtgtgcgtgtgtgagcatgcgtgggtgtacatccctctcttcctccctcaccccgccccgccccgcccccaggtgtcatcgccattcctctgcataccccaccttcagtgcaaagatttcttaagtactggccccagtagcagaagctggttcctgctgtcagtgtaccttctgtgtgctctttattcctagcagagtgatgatct

SEQ ID NO: 1728 - DNA, 327 bp, Bos taurus
  Clone ID: 08-LIB3058-016-Q1-K1-B7
tcgcggacgcgtggggcccggtggcggagaggaagtgtggggccgccgcgctgagcccgtgcccgccgaggccgagcggctccccccggggtgctcgggtgacagtgccgcggccgccgggcgcagcgcggggcacgcgccgggcagagccgagcaccagacggacgcttcggcagagacgcggggaaaatggctgatgactttggcttcttctcgtcgtctgagagcggggcccccgaagcgggcgaggaggacccggcggctgccttcttggcccaacaggagagtgagattgcgggcatagagaatgacgagggttttcgggca

SEQ ID NO: 1729 - DNA, 325 bp, Bos taurus
  Clone ID: 08-LIB3058-017-Q1-K1-B7
cggacgcgtgggcttgtcatttgtaataactcagatggaccttgagggcattattctacatgaaatatagagaaagacagataccatgtgatctcacatatggaatctgaaaaataaataaaacaaaagcaaggtagtaattatagagaaaagattcttgttgccagaagggagggaagtagaatgagggtgaaatgattgacagagatcaaagggtacaaacttctaaaatgtcatgggtatataatgtacagcatagtgactggagcttatactactgtattgcatatttcaaaattgctaagagtaaatcagatgtcctcac

SEQ ID NO: 1730 - DNA, 453 bp, Bos taurus
  Clone ID: 08-LIB3058-018-Q1-K1-B7
gaagaggcgagagcgacccctggatcgacttaaagcccgcgcgccactgcatccccgtgtccagctcctacgtcccgccgccgcagccaccatgcccaagagaaaggctgaaggggatgctaaaggagataaagccaaggtgaaggacgaaccacagagaagatctgcaagattatctgctaaacctgctcctccaaagccagaacccaagcctaaaaaggcccctgcaaagaagggagagaaggtacccaaagggaaaaaggggaaagctgatgctggcaaggatgggaataaccctgcagaaaatggagatgccaaaacagaccaggcacagaaagctgaaggtgctggagatgccaagtgaagtgtgtgcatttttgataactgtgtacttctggtgactgtacagtttgaaatactattttttatcaagttttataaaaatgcagaatt

SEQ ID NO: 1731 - DNA, 423 bp, Bos taurus
  Clone ID: 08-LIB3058-020-Q1-K1-B11
ggactcctgaatctcaaggtacagtgaaggcgtggggaaaccacagagctcagtcctccacctgccagcggacagcagagcttgagagagattcagcctccgttttagaattcatgtctccttatccctagtccagccatgcctctagagttgagacttttcagatggcagagactccatggatgataagccagcccggataggcagtagatatttttgccagcctgaagaggaactcagataagcagcagcttgaaccaaggcctgaaagattagtagagacagaaatttcacattcatacaagaacatcactatctgacttgcttctgagaagagttgaaaagctgagtctctatggaaagagtggtgatgttgcctctgccgttccataactctggtggatttaaaaccaacctgttccc

SEQ ID NO: 1732 - DNA, 443 bp, Bos taurus
  unsure (427): unsure at all n locations; Clone ID: 08-LIB3058-021-Q1-K1-B7
cttctctgggttgtgttcgtttcgacgtccgcgaagatgcagctcaaaccaatggagagtaacggcgagatgctgaacaaagtgctgacccggctgggggtcgccggccagtggcgcttcgaggatgttctgggactggaggaggagtctctgggctcggtgccagcgccggcctgcgcgctgctgctgctctttccgctcacggcgcagcatgagaacttcaggaaaaaacacattgaagagctgaagggacaagaagtcagtcccaaggtgtacttcatgaagcagaccattggcaactcctgtggaaccatcggactcattcatgcagtggccaataatcaggacaaactggagttcgaggatgggtctgttctgaaacagtttctttctgaaacagagaagttgtcccctgaagacagagcanagtgctttgaaaagaa

SEQ ID NO: 1733 - DNA, 463 bp, Bos taurus
  Clone ID: 08-LIB3058-022-Q1-K1-B11
gctttctgtagcagagatcaccaatgcttgctttgagccagccaaccagatggtgaaatgtgaccctcgccatgggaaatacatggcctgctgcctgttgtaccgtggtgacgtggttcccaaagatgtcaatgctgccattgccaccatcaagaccaagcgcagcatccagtttgtggactggtgccccactggcttcaaggttggcattaactaccagcctcccactgtggtacctggtggcgacctggccaaagtacagcgagctgtgtgcatgctgagcaacaccacagccatcgctgaggcctgggctcgtctggaccacaaatttgacctgatgtatgccaagcgtgcctttgttcactggtacgtgggtgagggcatggaagaaggagaggtttctgaggcccgtgaagacatggctgcccttgagaaggattatgaggaggttggtgtggattct

SEQ ID NO: 1734 - DNA, 411 bp, Bos taurus
  Clone ID: 08-LIB3058-023-Q1-K1-B7
cttccagtacgagagcaaggtcttctacctgaagatgaagggcgactactacctctacctggccgaggtggcttctggcgagaagaagaacagtgtggtggaggcctcagaggcggcctacaaggaagccttcgagattagcaaggagcacatgcagcccacacaccccatccggctgggcctggccctcaacttctccgtgttctactacgagatccagaatgcgcctgagcaggcctgcctcctagccaaacaagccttcgacgacgccattaccgagctggacacactaaacgaggattcctataaggactccacgctcatcatgcagctgctgcgagacaacctcaccctctggacgaagcgaccccaaggggcatgacgaggaagccggagaaggcaactgatcgc

SEQ ID NO: 1735 - DNA, 413 bp, Bos taurus
  Clone ID: 08-LIB3058-026-Q1-K1-B11
tcgactagttctagatcgcgagcggccgccctttttttttttttttttttttttttttttggtaggattaacatgatttatttcattatcagtcttacaagttgctgaggttgggcaaagccaggagagtaacttcaggcgtttctatcaagtgacagcctgattagcagggccgttactgagcggagggcagtggagggcaccccaggaaccccagcttctacagcagtgttaaaacccctccttcagaggcactggatagggcgtggcccgtgacagccaggggccactccactggcttttggtgcccactgacccctttcagcagagacacaaaggccttcagaggcaccaaggaggcaggatgggctgggcaggtggaaagactggtactttctcaccgaggctctgtc

SEQ ID NO: 1736 - DNA, 441 bp, Bos taurus
  Clone ID: 08-LIB3058-029-Q1-K1-B7
gtagaatgtgcaagatctgcttcctgggctcccagaactaaactggtctgcttaaggtaaatcagcatctgatgcagcagttttctcagattcgttgcaattcacaagttcagccacaggaatacacagatgtaaacacctggacctttctattctcctcttttcccccagcccctctgagcatcgacacgcatagtgttagccactcggttgtgtccgactctctgcagccccgtggacggtggcccaccaggctcctctgtccaggcacagaaattccacttgagtcagaggctgcttgcattctagcattggatccttgaagccaaagactggcacgtttgtgtagaatgtccctggggtgggtgtggcacttggggaacgggtaccatgaaacagagaccctttgcccttgaattgcaccctaaattagttgctggc

SEQ ID NO: 1737 - DNA, 318 bp, Bos taurus
  Clone ID: 08-LIB3058-030-Q1-K1-B11
cgcgacggccgccctttttcatatcaaggaagttccctatttattggcttgcttgagttgatgctgggcaagtcctcatttgtccctttcaggtaccttggaagggtgatgggctggagagggccacacccagattcctaggtcacaggcaaagcacctattgactgtatacatagggagcatgattctccacagagtgatacatgctacggcgggcatgggcttgggccaaagtccccatatgtacagaaatgaataaagtgggtctctgaaaaaagatgtccattggaatcgaaactgcttgaaaagggatgactg

SEQ ID NO: 1738 - DNA, 243 bp, Bos taurus
  Clone ID: 08-LIB3058-030-Q1-K1-B7
ccaggaaccagcacctatgacagaagatctgctcgaagagcagtctgaggttctagctaaattgggtgcatcggcagaaggggctcacctgcgagcgcgcatgcaaagtgcatgtctgctctgagatatggagtcttttaaggcagctaatccatgttggtttctggaagattttgtgaggtggtactcacctagggattatattgaagaggaaagggttgatgaaaagggcaacatggttct

SEQ ID NO: 1739 - DNA, 385 bp, Bos taurus
  Clone ID: 08-LIB3058-031-Q1-K1-B7
aggaaatgctgtacaccgtgctcctactctgtgtgtatctaaattgtataaggttgctgtgatcgagataaatagatgctaatttaaaaatgcaaatgttttgcattttatttttaccattagtataatttgtttagagattctttataaaatatttttattttttttattttttttttattttttaatatattttttatttttatattttatgttttttctttatttgtatttatttttgttttttttttttttttttttttttcttctttaatttttttttttatattttataatttttttttattttttttttttttttattatattttttttttttttatatttttttattttttgttttttttttttatttttttttttt

SEQ ID NO: 1740 - DNA, 429 bp, Bos taurus
  unsure (360): unsure at all n locations; Clone ID: 08-LIB3058-034-Q1-K1-B7
attaaattatagtccaattgtcataactttactgaagaaccattataacccacaggctcctctgttcccacctgatcttgcagtgcatctagtgccattgtgaattaattgatttaaatctaatttttctcattctgcttctatgccagcctgaaacctttggcctccaatcagcaagggggtgtatcccctgcaactgcaattcctttgggtccaaatcatttgactgtgaagagagtggtcaatgttggtgccagccaggagtaacaggaaagaaatgtgatcgctgtgcccacggctatttcaacttccaagaaggcggatgcacaggtctgtaaatgagactaagctcaatgcatntattacctggtttggtatttaagcttctatagcagtttgttctacaaggttgccagagattaaatgaaa

SEQ ID NO: 1741 - DNA, 438 bp, Bos taurus
  Clone ID: 08-LIB3058-035-Q1-K1-B7
ctggacaagcgcgactgagaggcgggcttctgttcctgtggaggccgttgagtcccccggaacgcgccaccatgagcagcaccctagctaagatcgcggagatcgaagccgagatggctcggactcagaagaacaaggccacagcacaccacctagggttgcttaaggctcgtcttgctaagcttcgcagggagctcattactccaaaaggtggtggtggtggaggaccaggagaaggatttgatgttgccaagacgggtgatgctcgaattgggtttgtgggttttccgtctgtggggaagtcaacgctgctcagtaacctggcaggggtatattctgaggtggcagcctatgagttcactaccctgaccactgtgcctggcgtcatcagatacaaaggtgctaagatccagcttctggatctcccaggtatcattg

SEQ ID NO: 1742 - DNA, 426 bp, Bos taurus
  Clone ID: 08-LIB3058-038-Q1-K1-B11
ggggcacgacgcccagggcacgctttccttaatcttcaagctgggaggacgagacagccgttccgggtccccgatggcaagacgctgaagcccagctcccctcccagaaccccgtccccagcttcttaatacaaccgcctcgacgctaaccattgtctaaattcccaagtgcagcaggcatccccccaccctgcccacatgcgcgtcctgcaggctcctggccagcggctcaatggagaagacggtgcagctgtcagctcacccttgaagatcagcgaggtccctgagggtccagggtgggcgaccctccacgcccaccttctgccctgggacggccttggacgcggccctggggaccctgccgccgggcccccatgcagagtgtggagaccggcctgtggctctgagcttcctttggtttctttc

SEQ ID NO: 1743 - DNA, 433 bp, Bos taurus
  Clone ID: 08-LIB3058-039-Q1-K1-B11
cggacgcgtgggcggacgcttgggctatatcgcgagcggccgcccttttttttttttgtttttttttttttttttttttttttttatgggttgtcatgcagatataggtgcaaagatcatcatgtatgtgtatatgaagacatacatgtataaatataggtacaaaatgtatacaaaatataaatattggttaacatatatatatagagacaaatctgtttacatatactgggtaaagctaggctttattttaaataatcaagccattaatcttttataatatctgtttgtccttgtgattaaagttctacacatattttaaaatacagaaatgactatagctttttcaatatattttaaatccatctaacaactgcttctggcacctgctggggaaaaggcattttaggtgttaccaagatggatctaaaac

SEQ ID NO: 1744 - DNA, 429 bp, Bos taurus
  Clone ID: 08-LIB3058-039-Q1-K1-B7
aattgacaatttttttgatttgtggtctgctcatgaggcactcagtgacatcactgacttgatgaacttgagtttgagctccaggagatggtaaaggacaggaaagcctggcatgctgcaagtccatggggttgcagagagtcggacacaactgagcaactgaacgacaacatgaagcactcacttatcaagcttttttacctttccattttgcttcaaatgcggcacaacagtagaatggttgacgttgagttcttcagcaacttctcatgtagttgtaagagaatcagctttgatgatgctttcaagtggtccttgtcaacttatgatagctggccactataattctaaccttcaaggctcttatctcctttgcaatgcttcttgaaccaccattgaactatattagcagttcctgggccaaatgag

SEQ ID NO: 1745 - DNA, 417 bp, Bos taurus
  Clone ID: 08-LIB3058-041-Q1-K1-B7
gcggtggtctctgccacacattccttcctcttggtccctcactctggggaagaagcctctgaggaggcccttgtggcccgcccctgaatgaagcagctcgtgtcctagatctgctcctctttgaccccatgccctactgtcacttcttctgatgttagtgtgagtgtcgtgtatatatatgtggacaccctcagacatctaatccaggtcttgtcccaccgatatctgagcacatccctgaagtccatgcgggcatcatccccagtgtgcaggtggggacccgggcaggctttgagagacacatggattcatccaggatggagaacagggctcctcaccagactgcagacaggagctggtccacggagcaccctgctccatctccctgcgtgagggaccggagccccacaccagcaa

SEQ ID NO: 1746 - DNA, 423 bp, Bos taurus
  Clone ID: 08-LIB3058-043-Q1-K1-B7
aggatctagccatcttcctataccacctacgtctagaggcagaggtggaggtggtggagatgcacaacagcgacatctctgcgtatacctacgagcggacactgatgatggagcagcgctcccagatgctgcggcagatgaggctgaccaagacagagcgggagcgagaggcccagctagtcaaggaccggcactcagccctgcggttggagagcctgtactctgacgaggaggatgagtctgcagctgggactgacaagatccagatgacatggaccagggacaagtacatggccacggaaccctgggaccccagccacacgcctgacaacttccgggagctggtgcatattaagccggaccagtctaatgtgcggcgtatgcacacggtcgtgaagctcattggagtattggcacacgctc

SEQ ID NO: 1747 - DNA, 431 bp, Bos taurus
  Clone ID: 08-LIB3058-044-Q1-K1-B11
tgaaagtctatgcacttttcagcatgaattcttatatccttgaattctgatatttgcacacttctattccagacacttctatacagagatttagactaaggacaatccgggggatttgtgaatttagggaatgtttctcatttaggaagtgagaaacattttccttctctaattagagcagacaactaatgtaagaagcatgtaggcattttataaacatatttcttagaagatggatgaattgaaatcaccctctttttaaattagagattctgcaagtcttaactttgctcctaagagaaaattacaacagagtttctgagacttctttgttcaaataataacatgaatgtattttattcataatatattgtagtttataaggaatggtatctccctacacgttattgagcattattttggaatatgtt

SEQ ID NO: 1748 - DNA, 440 bp, Bos taurus
  Clone ID: 08-LIB3058-046-Q1-K1-B11
gatatgaaaaaccattgttgtcattcatttacaagaacactaatgactaacattcgaaagtcccacccactaataaaaattgtaaacaatgcattcatcgaccttccagccccatcaaacatttcatcatgatgaaatttcggttccctcctgggaatctgcctaatcctacaaatcctcacaggcctattcctagcaatacactacacatccgacacaacaacagcattctcctctgttacccatatctgccgagacgtgaactacggctgaatcatccgatacatacacgcaaacggagcttcaatgttttttatctgcttatatatgcacgtaggacgaggcttatattacgggtcttacacttttctagaaacatgaaatattggagtaatccttctgctcacagtaatagccacagcatttataggatacgtcct

SEQ ID NO: 1749 - DNA, 398 bp, Bos taurus
  Clone ID: 08-LIB3058-047-Q1-K1-B11
gtgggaggggacggagagacaattctactgggctgtttgttagtgagtcccttagcaggtggggttcccgaaggtttgtgggttgacccggggttgcagtacgtgcccatgtgtgccttcgcctctcccaagggcccatctcttcctggtagtgcccttgtgtacttatccgggacgtcgtgtttctttcttgggactgttgtctgggtctgcacgtagggcctgtccttgccagcgatcagaccttccgaccccaccagggtcagagctgcctgggcctgagggggccctgccctgaggaggactccgaggctttgagcaggcccccgacagctgctcgcgggagccgcctaccgacacccgagccccgccggcgcctcgcgctcccggctcttggc

SEQ ID NO: 1750 - DNA, 304 bp, Bos taurus
  Clone ID: 08-LIB3058-048-Q1-K1-B11
gagtctcccatcaaaggacgtgctcagttttatgatcccaatttttatgatgaaacctatgattatggtggttttacaatgatgtttgatgaccgccgtggacgtcctgtgggatttcccatgcggggaagaggtggttttgacagaatgccgcctggtcggggtgggcgtcccatgcctccctccagaagagattatgatgatatgagccctcgtcgaggacctcctccaccccctcccggacgaggtggccggggaggtagtagagctcggaatcttcctcttccaccacccaccaccacct

SEQ ID NO: 1751 - DNA, 444 bp, Bos taurus
  Clone ID: 08-LIB3058-048-Q1-K1-B7
gggaaaaaaaattttttttaataaaatatttgagagttatgacagtaaatctaaaatgatttccaaaggaatattacgtaacaaatggcttgaagtagtctattaaaaaattggggagattttgatttcatagtgagtcagcaaggcatttttttgttttttaaaaaatctcatttccttacagaaacagtttatagtttttaatgaatttgtaaacaaaaaagctcccatttcaaaataaaaacaaaatcccagatcatatagatgtttacagtgattacatttatctaagcaacatacatacatgttcagttgtaagatgttaactaaatttctgtgacaaatatgcgctttttttttaataccaagaacattatagagttaatgcagagtcctaaggataatctagtagtcactaagtttttcttaaagtcttcactttag

SEQ ID NO: 1752 - DNA, 433 bp, Bos taurus
  Clone ID: 08-LIB3058-050-Q1-K1-B11
tgcagttacgtatggaggggacagactgctcctggaggtccctagaggtattaagcgttttggagtgagcaaactaaagattttgtttctggaaccattctcaattgaagttgggattattatttcttatcctttgtgctttagaaggcaaatgagttataaactcgtttttaaatcacttcagttgctaacctcttcttttccacttccgcaggctatggctttgtggaattcttgagtgaggaagatgctgactatgccattaagatcatgaacatgatcaaactctatgggaagccaatacgggtgaacaaggcatcagctcacaacaaaaacctggatgtgggggccaacatttttattgggaacctggacccagagattgatgagaagttgctttatgatacttttagcgcctttggggtcatcttac

SEQ ID NO: 1753 - DNA, 462 bp, Bos taurus
  Clone ID: 08-LIB3058-051-Q1-K1-B7
tcgtatatcatccaaaaattaaaaatttaatttttataaaaaaaaaaaaaaaattaaaagtaaggtaaattatataataaatttaaaaaaacactatatattttaaataaaaaaaggggcgtgcttttttttaggttccaattttacttcctcttgtttgcaacttctttcttttttttttttgtaccctaatttaatttaattgcccttttttttacaacctcatgttttgaaaacccttgtctttaccaaattttttcctttttaagcatttccctttttttccagttggctttttatcaaaaagtcccttacctttagccttttttaattttttttctccttatttttttatttggactttcctcttatttggtcttttaattctccttttttttgttttttcctccacttttacttttctttttcattctccttttttttcgtttatttttttttttt

SEQ ID NO: 1754 - DNA, 273 bp, Bos taurus
  Clone ID: 08-LIB3058-052-Q1-K1-B7
cttggaggtgtcctggacatttgccctcatcagaaactcatccaagatgagtgtgctgaaagccatcgagcaggcggacctactgcaggaggaggatgagtcgccacgcagtgtgctggaggagatgggtctggcatagccctcgccctggggccgagtggagatgtggggatctggtggagaggtggggcatctgtggcccttttcctctaggtgggacctagctgcgcctgctctgctgcctaaccttaatctgcaatgagctgtcggctc

SEQ ID NO: 1755 - DNA, 281 bp, Bos taurus
  Clone ID: 08-LIB3058-053-Q1-K1-B7
cggacgcgtgggcggacgcgtttgcgtgtacgcgtgggtttttttttttttttttttttggtttttttttttttttttttggagtctccttctcagtttattccgacgttaggatgaaatggttctcataaataagggccacgagccctttcttacgaccacggtccatgacaaggggcaaggcaaaaggggcctgggttggaattccggcaaggggccaagccgggacttaaattaacaaggccccaagggttaaccggaaggttgcccggcttgaaggc

SEQ ID NO: 1756 - DNA, 413 bp, Bos taurus
  Clone ID: 08-LIB3058-054-Q1-K1-B11
caagcccttgacctcttacaggagctttgtctgccctcttaataacatccggcctaaccatgtgatttcactttaactcaatgaccctgctaataattggcctaacaacaaatatactaacaatataccaatgatgacgagatgttatccgagaaagcaccttccaagggcaccataccccagctgtccaaaaaggcctccgttatggaataattctttttattatctccgaagtactattctttaccggatttttctgagctttctaccactcaagcctcgcccccacccctgaactaggcggctgctgacccccaacaggcattcacccactaaaccccctagaagtcccactgctcaacacctctgtcctattggcttccggagtttctattacctgagcccatcatagt

SEQ ID NO: 1757 - DNA, 440 bp, Bos taurus
  Clone ID: 08-LIB3058-054-Q1-K1-B7
aaaaaaagaaaaaaaaaaaatttagatattgctgtattatttactcagagggtttctgcactttttttttttttttaatgcaactcctaatgttgttggggcttcctttgtagctcagttgggaaagaatctgcctgcaatgcaggagacctgggttcgattcctgggttgggaagatcccctggagaaggaaatggcaacccactccagtattcttgtctggaaaatcttatggacagaggagcctggctggctacagtccatggggtcacagagtcggatacgacttatcgactaaaccaccaccaccaccaccaccaccaccacatgttgatgcatccttgttattttcggagtcctgttgatggacactttaattgtttataaactattgctgttgtagatatgctacagtgctattttgaaatctgtgtgtagag

SEQ ID NO: 1758 - DNA, 397 bp, Bos taurus
  Clone ID: 08-LIB3058-056-Q1-K1-B11
ggcccagctgcggaacagcgagggggctcgccgctcagtggagtgtggaggatgaggaggaggctgcctgtgagcagcaccggcgcgacacggagcggcagcttcgggctcaagacgaagacgaaggaagcccgtccccggagcagtcggagcaggagaagctcctcagcccgcagccctcggaggctcctgagctggacgaggatgagggctttggcgactggtcccagaagccagagcagcaacggcagcagcactggggggctggggaggccccggatgctggggacccctctcggggcgagagtctggaggggacgcaagaggacgacaggccccgccagtgcacctctgggagccaaggtggtgacaagctgagtccagctgacgtctgtct

SEQ ID NO: 1759 - DNA, 394 bp, Bos taurus
  Clone ID: 08-LIB3058-057-Q1-K1-B7
ttgagcttgcttaaaaacaaccactttttccccgcagacgggcttccgggcgtactcaaagaaaataggtaacaatgcgtttcgcggtttctggcttggcagaaggcaagatctctaattaacgttctgcctcgttaaacagggagggggaccagggaccccgctgcggtggccacggcggtgtggcgtcttctgcgtggtcccttcgcgttcgggggtcttggaccagcgcgtggggcaggtcttctggccgcttctcgatggaaaaactacattggtttgttatagacgttagcaaattacttcatccaagatgacttcatgatctttcagcatcttgctttggattttaaggtttcggtgttgtggatagcatccgaatttaactggcttt

SEQ ID NO: 1760 - DNA, 418 bp, Bos taurus
  Clone ID: 08-LIB3058-058-Q1-K1-B11
gcccaagcggggctcaggcaaggatggacaccacgcggccagaaccacccactatggctgcctgccccagaaggcgcagcacggccggccccaagacgaaaaccctgtagtgcacttcttcaagaacatcgtgacaccccgcacacctcctccatcgcaaggaaagggggctgagggccagaagccaggattcggctatggaggcagagcgtctgactacaaatcggctcacaagggactcaaggggcacgacgcccagggcacgctttccaaaatcttcaagctgggaggacgagacagccgttccgggtccccgatggcaagacgctgaagcccagctcccctcccagaaccccgtccccagcttcttaatacaaccgcctcgacgctaaccattgtctaaattcccaagtgcagc

SEQ ID NO: 1761 - DNA, 361 bp, Bos taurus
  Clone ID: 08-LIB3058-058-Q1-K1-B7
gacgcctacaaatataaccttcttcccacaacactttctaggactatctggcatgcctcgacgatactccgactacccagatgcatacacaatatgaaatactatctcatcaataggctcattcatttccctaacagcagttatactaatagttttcatcatctgagaagcatttgcatctaaacgagaagtcttgactgtagacttaaccacgacaaatctagaatgattaaacggatgccctccaccatatcacacatttgaagaacccacctatgttaacctaaaataagaaaggaaggaatcgaaccccctactattggtttcaagccaacatcataacctctatgtctctctcaat

SEQ ID NO: 1762 - DNA, 442 bp, Bos taurus
  unsure (306),(369),(385),(390),(423): unsure at all n locations; Clone ID: 08-LIB34-001-Q1-E1-B7
gctacacactgagaggcaggcagagaacatcacacacagctgaaaggaaactcagaggagggaatcgccaagaaaagtggccatggagctaatcccaaacttttccgtggaaacctgggttctcctggctatcagcctggtgctcctctatctatatggaacttattcacatggactgtttaagaagctgggggttcctggcccaagacctctgcctctttttggaaacgttctatcctaccgaaagggtgtttgtgagtttgatgaagaatgttttaaaaagtatgggaaaatgtgggggatttntgaaggtaaacatcctctgttggttatcacggattcagacatgatcaaaacagtactagtganagaatgttatctgtcntcacnaaacggagggtttttgtccaatggaagtatganaatgctgttctgtgctgag

SEQ ID NO: 1763 - DNA, 399 bp, Bos taurus
  Clone ID: 08-LIB34-003-Q1-E1-B7
ccctaaattgaaaccagaccccaatactttgtgtgatgagtttaaggcagatgaaaagaagttttggggaaaatacctatacgaaattgctagaagacatccctacttttatgcaccagaactcctttactatgctaataaatataatggagtttttcaagaatgctgccaagctgaagataaaggtgcctgcctgctaccaaagattgaaactatgagagaaaaagtactgacttcatctgccagacagagactcaggtgtgccagtattcaaaaatttggagaaagagctttaaaagcatggtcagtagctcgcctgagccagaaatttcccaaggctgagtttgtagaagttaccaagctagtgacagatctcacaaaagtccacaaggaatgctg

SEQ ID NO: 1764 - DNA, 389 bp, Bos taurus
  Clone ID: 08-LIB34-004-Q1-E1-B11
ttcctgggtcgacccaagagtcagaaactttggcacaatgaagtgggtgacttttatttctcttctccttctcttcagctctgcttattccaggggtgtgtttcgtcgagatacacacaagagtgagattgctcatcggtttaaagatttgggagaagaacattttaaaggcctggtactgattgccttttctcagtatctccagcagtgtccatttgatgagcatgtaaaattagtgaacgaactaactgagtttgcaaaaacatgtgttgctgatgagtcccatgccggctgtgaaaagtcacttcacactctctttggcgatgaattgtgtagagttgcatcccttcgagaaacctatggtgacatggctgactgctgtgagaaac

SEQ ID NO: 1765 - DNA, 408 bp, Bos taurus
  Clone ID: 08-LIB34-005-Q1-E1-B11
agaagcctaaggaaagtgggtactaagtgttgtacaaagccggaatcagaaagaatgccctgtactgaagactatctgagcttgatcctgaaccggttgtgcgtgctgcatgagaagacaccagtgagtgaaaaagtcaccaagtgctgcacagagtcattggtgaacagacggccatgtttctctgctctgacacctgatgaaacatatgtacccaaagcctttgatgagaaattgttcaccttccatgcagatatatgcacacttcccgatactgagaaacaaatcaagaaacaaactgcacttgttgagctgttgaaacacaagcccaaggcaacagaggaacaactgaaaaccgtcatggagaattttgtggcttttgtagacaagtgctgtgcagctgatgac

SEQ ID NO: 1766 - DNA, 404 bp, Bos taurus
  Clone ID: 08-LIB34-005-Q1-E1-B7
ggaagttatgaccttggagaacgcagaccatccagtgctgcttatcagaaggcacctactaaggagttttatgcgtgaaaactcccatttagtgtctctatttatgagatcactgaacttttaaaaataaagcttttgcatagaataatgaagatctttgttttttgttttttgtttttttttcattaaagagccattctggcactttaatgataaaaatcccattgtatttaaatcttttcatgtatttctttagaacaacataaaattcagacttaacatctgcagtgttctgtgaatagcagtggcaaaatattatgtgataaaaacgctcaatgtatatggaatcggtttaaatttctatgcgcaaatatgaaaagagtgtttttatccgatggttcgaa

SEQ ID NO: 1767 - DNA, 412 bp, Bos taurus
  Clone ID: 08-LIB34-006-Q1-E1-B7
tttcttgcaacttcgaaaaatttaaaaccatgaaacatctattactgctacttttctgtgcttttatagttcaggcccaatttcctactgactatgacgagggacaagatgacagacctaaggtaggtttgggtgcccgcggtcatcggccctatgacaagaagaaggaagaggcccccagcctgagacctgtgccccctcccatcagcggaggtggctatcgggctcgtcccgccacagcaactgtgggccagaagaaagtggagagaaagccccctgacgctgatggctgcctgcacgcggacccggatctgggtgtgttgtgtcctacaggatgtaagttgcaagatactttggtaagacaggagagaccaatccgaaagagtatagaagatttacgtaatactgtgga

SEQ ID NO: 1768 - DNA, 414 bp, Bos taurus
  Clone ID: 08-LIB34-007-Q1-E1-B7
attcctgttaactcttaataaacttacacatgcaagcatctacaccccagtgagaatgccctctaggttattaaaactaagaggagctggcatcaagcacacaccctgtagctcacgacgccttgcttaaccacacccccacgggaaacagcagtgacacaaattaagccataaacgaaagtttgactaagttatattaattagggttggtaaatctcgtgccagccaccgcggtcatacgattaacccaagctaacaggagtacggcgtaaaacgtgttaaagcaccataccaaatacggttaaattctaactaagctgtaaaaaccatgattaagataaaaataaatgacgaaagtgaccctacaatagccgacgcactattactaagacccaaactgggattagattcccc

SEQ ID NO: 1769 - DNA, 408 bp, Bos taurus
  Clone ID: 08-LIB34-008-Q1-E1-B7
ggagcagcctcagcttctcgcctccgaaccgcagcgccgaccaagacccggacccggacccggacccggtcccagagcttctccgacgtcagcgcagggagcaggagtccctgaaataacttcttccgctaggctccgtcacgcccgggagtcccgggtgcgcacctgcaaactccgccttgtgcacctgctgcccctgagccagcgcgggcgcccgagcgagtcatggccaacgcggggttgcagctgctgggcttcatcctggcgtttctgggctggatcggctccatcgtcagcacggcgctgccccagtggaaagtttactcctatgctagtgacaacatcgtgacggcccaggccatctatgaggggctgtggatgtcctgcgtgtcgcagagcaccgggcag

SEQ ID NO: 1770 - DNA, 399 bp, Bos taurus
  Clone ID: 08-LIB34-009-Q1-E1-B7
cggacgcgtgggcgggagcggtgtctcggactccttagggaggcagagctgagcacacggcagaccccctgggagacctcaattccaaccagctgactctcctgtgccccccgtgcccaccatgcatcctcagtcagttctgcacagcggctacttccacccactgctccggaactggcagacagccgccaccagcctcagcgcctccaaccttatctaccccatctttgtcacggatgttcctgatgacaaacagcccatcgccagcctcccaggagtggccaggtacggtgtgaaccggctggaagagatgctgaaacccctggtggaagagggcctgcgctgtgtcctgatctttggtgtccccagcagagttccccaggattagcggggctccgc

SEQ ID NO: 1771 - DNA, 388 bp, Bos taurus
  unsure (339): unsure at all n locations; Clone ID: 08-LIB34-010-Q1-E2-B7
ctgaagtgggtctcagagggtaaaatccagtaccatgaacatgtcactgaaggatttgaaaacatgccagctgcatttataggattgctaaaaggagagaatctgggaaaggcaatagtgaaagcatgaacaaaaatgacacatggaatccagaaatcacctagatgattagtttcttttaatcatttagtaaaatatatactaacttcataatgcatgaacaaaagtcactagtggaatctagaaatcatttggatgattagcttctttttaatcatttagtaaaatctgtgctgttttcataatctaaaaaacagtaattgtaatgtgattgatctnactaataaaatacattgaagtgaaaaaaaaaaaaaaaaaggcgggccgc

SEQ ID NO: 1772 - DNA, 376 bp, Bos taurus
  Clone ID: 08-LIB34-012-Q1-E1-B11
ggaagagcctgtaagtctgtaattcacatctcctgccagcagagaaacgaagaaacatgagcacggcaggaaaagtaataaaatgcacagcagctgtgctgtgggagctcaatgatccattttccattgatgaggtggaggttgcaccccctaaggcccatgaagttcgtattaagatggtggccacaggaatctgtcgctcagatgaccatgtggttaatggatctctggtcacacgtcttcctgtggtcttacgtcatgagggagccgggattgtggagagcattggagaaggggtgactacagtaagaccaggtgataaagtcatcccactctttattcaccagtgtagaaagtgcaatgtttgtaaacaacc

SEQ ID NO: 1773 - DNA, 308 bp, Bos taurus
  Clone ID: 08-LIB34-013-Q1-E1-B7
acggcttcgggaagtggatcctgcacactcgagcttcatgatggttcatgcaaagagctggaccctgaagaaacattttgtaagttaacctactaacagtgactttgaactgaagacagttgaacatccacccttaaaagatggagaggtcctgctggaagctttgtacttgactgtggatccatacatgagaattatggcaaaaagcttgagcatctgcatctctcgtatgatccatgaatgtcaactcactcatgcagtctaaagatagcaagattgacatagaccatcatgatgatgtctataag

SEQ ID NO: 1774 - DNA, 436 bp, Bos taurus
  Clone ID: 08-LIB34-014-Q1-E1-B11
ccgggtcgactcacacgtccgaccactaataaaaattgtaaacaatgcattcatcgaccttccagccccatcaaacatttcatcatgatgaaatttcggttccctcctgggaatctgcctaatcctacaaatcctcacaggcctattcctagcaatagactacacatccgacacaacaacagcattctcctctgttacccatatctgccgagacgtgaactacggctgaatcatccgatacatacacgcaaacggagcttcaatgttttttatctgcttatatatgcacgtaggacgaggcttatattacgggtcttacacttttctagaaacatgaaatattggagtaatccttctgctcacagtaatagccacagcatttataggatacgtcctaccatgaggacaaatatcattctgaagagcaacagtcatc

SEQ ID NO: 1775 - DNA, 427 bp, Bos taurus
  Clone ID: 08-LIB34-014-Q1-E1-B7
aatccaatctaaaggtcatcgtatagaggaagttcctgaacttcctttggtggtggaagataaagttgaaggctacaagaagaccaaggaggctgtgttgcttctgaagaaacttaaggcctggaatgatatcaaaaaggtctatgcctctcagcgaatgagagctggcaaaggcaagatgagaaaccgtcgccgtatccagcgcaggggaccctgcatcatctataatgaggacaatggtatcatcaaggccttcagaaacatccctggaattactctgcttaatgtaagcaagctgaacattttgaaacttgctcctggtggtcacgtgggacgtttctgcatttggactgaaagtgctttccgaaagttagatgagctatatggcacttggcgtaaagcagcctccctcaggagtaactacaac

SEQ ID NO: 1776 - DNA, 421 bp, Bos taurus
  Clone ID: 08-LIB34-015-Q1-E1-B7
ggaactcaggctgctgctgaaggcggcagctgttaagtgtccccgctctgcgctcgggggttcctgggcctgagagtctcagcttgggggacggagctaagacttcgtgaccacctcgccctttccttgtcccggaaatctcaggaacgagccggcggcgtcctcgctctcgatacgagcgactgaaaggcccaggcactgccggggaacacgcgcggggaaccggggagaacagacctggtcagggtgaagtaaccatgcaggcgtttctaaaaggcgcatctatcagcactaaaccaccgccgactaaggatcgaggagtaactgccactgccagaagtagtggagagaacaagaaagccaaacctgttccgtgggttgataaatgacgaccacaatgtggggtggattttgttttttt

SEQ ID NO: 1777 - DNA, 416 bp, Bos taurus
  Clone ID: 08-LIB34-016-Q1-E1-B11
gaaaatggacaaactaatatacttgtggcctacttcagttgcttttctgataatgaatgtgtaccctcaaatgtacaatgtcaattttcatacaaagattcctgacattttgaataaactgtaacatctggtccttatgtggcaataagggaagttaagagactgaatgtcgaacttcttaatggagggaaaaaaataataaaaacctccagaggtcaaagaggaacaagagagaaagacagattggccaaagggaggacagagaaaataaatgaattgactttctgtttccaaaatgggctagtaatctcaaacagttactcgcatgtgacaaagctattctgataattctctttctgggtgagagtgtttcttgtaagtcagtaatttctggttactcattaactgcgctttgc

SEQ ID NO: 1778 - DNA, 412 bp, Bos taurus
  Clone ID: 08-LIB34-016-Q1-E1-B7
ggcggcacccggaggacctaggctcccggaggacaaggaaccgcccaacatggcatcggagagcgggaagctatggggtggccggtttgtgggcacagtggaccccatcatggaaaagttcaactcgtccatcacgtacgaccggcacctctgggaggcggacgtgcagggcagcaaagcctacagccggggcctggagaaggcggggctcctcaccaaagccgagatggaccagatactccatggcctggacaaggtagctgacgagtgggctcagggcaccttcaaactaaaccccaatgatgaggacatccatacggccaatgagcggcgtctgaatgagctcattggtgaaaccgcggggaagctgcacacgggacgaactcggaacgaccaggtggtcactgacctc

SEQ ID NO: 1779 - DNA, 404 bp, Bos taurus
  Clone ID: 08-LIB34-017-Q1-E1-B11
cttggagagtatggattccaaaatgcgctcatagttcgttacaccaggaaagtaccccaagtgtcaactccaactctcgtggaggtttcaagaagcctaggaaaagtgggtactaggtgttgtacaaagccggaatcagaaagaatgccctgtactgaagactatctgagcttgatcctgaaccggttgtgcgtgctgcatgagaagacaccagtgagtgaaaaagtcaccaagtgctgcacagagtcattggtgaacagacggccatgtttctctgctctgacacctgatgaaacatatgtacccaaagcctttgatgagaaattgttcaccttccatgcagatatatgcacacttcccgatactgagaaacaaatcaagaaacaaactgcacttgttgaact

SEQ ID NO: 1780 - DNA, 406 bp, Bos taurus
  Clone ID: 08-LIB34-017-Q1-E1-B7
tgatgagccaggagctgcctgacgactgggacaagcagcctgtcaaagtgctggttgggaagaactttgaagaggttgcttttgatgagaaaaagaacgtctttgtagagttctatgccccgtggtgcggtcactgcaagcagctggcccccatctgggataagctgggagagacgtacaaggaccacgagaacatagtcatcgccaagatggactccacggccaacgaggtggaggcggtgaaagtgcacagcttccccacgctcaagttcttccccgccagcgccgacaggacggtcatcgactacaatggggagcggacactggatggttttaagaagttcctggagagtggtggccaggatggggccggagatgatgacgatctagaagatcttgaagaagc

SEQ ID NO: 1781 - DNA, 411 bp, Bos taurus
  Clone ID: 08-LIB34-018-Q1-E1-B7
cgccatgcatactctcaacagtcgcaggtttggcatggctgcagcactggcatgcaccatgaaaagcatcattgccaatgctgtggatcatgctgctaaccgtacccagtttggggacaaaattcacaactttgcgctgatccaggagacactgggccagatggctatgctgcagtatgtgactgagtccatggcgtacatggtgcctgccaacatggcccagcgatccacggacgtccagatacatgccgccatcaacagaatctttggctcggaggcatcctgcaaagtgacacatgagtgcatcgaaatcattcggggcatggacttcatgaatgagcctgcggtaaagcgtgtgctccgagatcttcgcatcttccggatcctccaggggacaaatgacattctccg

SEQ ID NO: 1782 - DNA, 370 bp, Bos taurus
  unsure (281): unsure at all n locations; Clone ID: 08-LIB34-019-Q1-E1-B11
tacagaatgaggccaacaaatatcaactgtcagtgagcaaatacaaaggaacagctggcaatgccctcatagaaggggcttctcaactggtgggagaaaaccggaccatgaccatccacaacagcatgttcttcagcacatacgacagagacaacgacggctggaaaactacagatcccagaaagcagtgttctaaagaagatggtggtggatggtggtataaccgatgccatgcagccaatcccaatggcagatactactggggtggagcgtacacctgngacatggcaaagcacggcacaaacgatggagtggtgtggatgaactggcaaggctcttggtactcaatgaagaagatgtccatgaagat

SEQ ID NO: 1783 - DNA, 421 bp, Bos taurus
  Clone ID: 08-LIB34-019-Q1-E1-B7
ccagttgcccctggtcattgagttcaccgagcagacagccccgaagatcttcggaggggaaatcaagactcacatcctgctgttcctgccgaaaagcgtgtctgactatgagggcaagctgagcaacttcaaaaaagcggctgagagcttcaagggcaagatcctgtttatcttcatcgacagcgaccacactgacaaccagcgcatcctggaattcttcggcctaaagaaagaggagtgcccggccgtgcgcctcatcacgctggaggaggagatgaccaaatataagccagagtcagatgagctgacggcagagaagatcaccgagttctgccaccgcttcctggagggcaagattaagccccacctgatgagccaggagctgcctgacgactgggacaagcagcctgtcaaagtgctg

SEQ ID NO: 1784 - DNA, 408 bp, Bos taurus
  Clone ID: 08-LIB34-021-Q1-E1-B7
ctcactgtgagaataaatatgcatgctttctgtaattaactggtgctttgaaaaccttttttaaggaagacaaatctcaaccaaagttctgctcatccagacaagctcaccctctagttaattttagcacagctcattctttcgtgcctcgttactgaacaaacatccatcatcccagtaaggcttccagataccactgttttgctaaaagatttattctccttgttttccaaaagcgaatggctttcacgtaagattaaacgaactaggtgcttgtaaataatttattaccgtttactgcatttctataatactgaaatgcatgccctccaggggaagacagactgtgagtcgagttaaaaagcaaacaaaaggacccaataataagcaatatgaaactacactcct

SEQ ID NO: 1785 - DNA, 408 bp, Bos taurus
  Clone ID: 08-LIB34-022-Q1-E1-B11
gaaattagtttgtggagagttgacactaggtgacgtttaggtctcattctccttctcttcagcgctgcttaatcaattggtgtgttgcgtcgagatacacacattaatgaaattgcgcatcgctttaaggatgtggagatcaatatttaaacgcctggtactgattgccttatctcaatatctctcacagtctccagggtatcagcatgtaaaatataatgcctaacaaactaagtcagcagtaacatgtgttgctgatgactcaccaagcttgcagtcagtagtcacgtcacatccgcgttcgacatcagttgtgatggcttgcatcccatcgagagctctacgatgacattgtgcactgctttgacatgctgaattctgacacagattgttgcatccagagactca

SEQ ID NO: 1786 - DNA, 392 bp, Bos taurus
  Clone ID: 08-LIB34-023-Q1-E1-B7
tcgtgggtcgacacaagcctctaaagtgattcgtaatacgcccatcccacagaggaaaggctctgtcctgagaatggctgatctccggatactggtcagcatcatcctaatgacaaatgctgtcctggagaaaggagggtgtaccggacctccggggccaccaggacacccagggcctccaggtataagagggcctccaggtataagaggaataccaggtttgccaggtccgccgggaactccaggaccaagtgtaaaatgcccatgccacagacagtccgccttcactgtgaagctcagtggccagttgccttccccttcaaagcctgtgcccttcacagaggtcctgtacaatgcccagagagacttacaggatgacactggggttcttc

SEQ ID NO: 1787 - DNA, 282 bp, Bos taurus
  Clone ID: 08-LIB34-024-Q1-E1-B11
tatagtgagtcatattacgagcggccgcccgcgatctataactattcattcacagtatctcttgtaggactactagtataccgatcccacctaatatcctcccttctatgcggagaaggaataatgctatccctaatcgtcaggtcatccctaacattcctcaactcacattttatattagccagcataatacctattatcctactagtcctctcagcctgtgaagcacccctacgtctatctctactatttaatagtatcaaatacatagtcgtactgaat

SEQ ID NO: 1788 - DNA, 412 bp, Bos taurus
  Clone ID: 08-LIB34-024-Q1-E1-B7
tcaatactgggactcgtgggtcgacacaagcctctacagtgactcgtattagttttccccgctgaagaatgcagacagtcagaatgggaaggacaaccctactactgcaaggcatgctttgatgtccctccatcattgctgggtcctcaatgcagggggccacttcatagatgaaaatggctctcgcctcccagcaattccccgcagtgctacacatggaaagtcagaggccatcacagctgatgtcaatcacaacttgaatgatgccaatgatgtgccaatccagtgtgaaatctctcctcttatctcctatgctggagaatgactagaaagttatgtggcagataaagaatttcatgcagctttaatcattgatgagaatgaagtccatgagctggtgaaaaatggtata

SEQ ID NO: 1789 - DNA, 392 bp, Bos taurus
  Clone ID: 08-LIB34-025-Q1-E1-B7
ctccagctcaccatggctcgggcattgagagtgccagttgcactgtggctgttgggcttgtgctggtctttggctaaagcccaccctctggctagagctcctgagcttgggcacggagttgaaggtgggaatgtggccaagccggatccagaagtgacggaacgctgctcggatggctggggctttgatgctaccaccctggatgagcatgggaacatgctgtttttaaaaggggagtttgtgtggaagggtcatgcctgggcccggcagttgatctcagagaggtggaaggatgcccccagtcccgtggatgctgcattccgctatgatcgtaacagtgtccgtcggatcaagggggacaaattccgggtatatcctcctgagaaggggga

SEQ ID NO: 1790 - DNA, 418 bp, Bos taurus
  Clone ID: 08-LIB34-026-Q1-E1-B7
agaataaaggagtcaagctgacacacagggaagaaggccaaggaggcggagcgtgtggtggttactgttctgtgttataaactctgggaaacgccatctcttgcgtatttgatcagataatgtcatctttctgtatataaactctcttaactgctattttagggaccttgcagtttgcacatatttgttttgtatcatggcagtaaatatttgtgagaaagcccactcattgacttttccaggtaaaacgtaagcatgcaaagtttgcaatctgcagttttttatgtaacataaaataggtgtacctttataagtacatttgattttatgatttacattcatcatgtgattttttaaaaatccacctctctagtatatgttgatacaaggtctggttttggtctctttttcgcttaaa

SEQ ID NO: 1791 - DNA, 410 bp, Bos taurus
  Clone ID: 08-LIB34-027-Q1-E1-B7
ctcttatggacgggccctgcaggccagtgcactggctgcgtggggtggcaaggctgaaaacaagaagacaacccaggaggcctttatgaagcgggccctggctaacagccaggcagccaaaggacagtatgttcacatgggctcttctggctctgcttccacccagtcgctcttcactgccagctatacctactagaacccgaggctgaccagcttggctctggcgctctaggtgtcttggtaggagggctaaaaggaaacaacgacttttcgactgaccctggaaattagatgaaattaggttgcaagctactggaaacacaacacatgttaatttcttagacacaagtgggaaaaaatcagttatggaaacaagtctgaatatcagggatctgatgaaatcctcaccc

SEQ ID NO: 1792 - DNA, 412 bp, Bos taurus
  Clone ID: 08-LIB34-028-Q1-E1-B11
atcaagttcaacctcacagagacccccgagacagaaatccaccagggcttccagcacctcctgcagacgttcaatcagcccagcaaccagctgcagctgagcgtgggcaaggccatgtttgtgtcagaggagctgaagctgctggacaaattcaggaaagatgccgaggctttttacgcctctgaggttttatccactaacttcaaggattctgaagctgccgtaaagcttatcaatgaatatgtgaagaataaaactcatggaaaaattgagaagctcttcaatgatcttgacgtgctcacaaatttaatcttgttgaattatatcttctttaaagcccagtgggagacgccatttaatcctaaccatacttacgaatcagagttccacgtgagccagaacgacagggtga

SEQ ID NO: 1793 - DNA, 422 bp, Bos taurus
  Clone ID: 08-LIB34-029-Q1-E1-B7
cggacgcgtgggctcggctgtcttcatcctcgacgtcaagggcaagcccctgatcagccgcaactacaagggtgatgtggctatgagcgagatcgatcacttcatgcctctgctcatgcagcgggaggaggaaggcgccctgaccccactgctgagtcacggacgggtccacttcctgtggatcaaatacagcaacctctacttggtggccaccacactgaagaatgccaacgcctccctcgtgtattccttcctctacaagatagtggaggtattctccgaatactttaaggagctagaggaggagagtatccgagacaactttgtcatccgtctatgaattgctggatgagctcatggactttggcttcccacagaccacagacagcaaaatcctgcaggagtacatcacgcagcagggc

SEQ ID NO: 1794 - DNA, 354 bp, Bos taurus
  Clone ID: 08-LIB34-030-Q1-E1-B11
aattagcaaaaagtcatgccatggaatctgccagagaagattcttcaagcctagttgctgaacttcaagaaaagctccaggaagaaaaagctaagtttctagaacaacttgaagagcaggagaaaaggaagaatgaggagatgcagaatgttcgaacatctttgatcgctgagcagcagaccaattttaacactgttttaacgagagagaaaatgaggaaagaaaacataatcaatgatctcagtgataagctcaagagcacaatgcagcagcaggagcgggacagagatttgatcgagtccctgtctgaggaccgcgcgcgtctgctggaggagaagaagcgactggaggagg

SEQ ID NO: 1795 - DNA, 409 bp, Bos taurus
  Clone ID: 08-LIB34-030-Q1-E1-B7
ctgcccacatcccgctctcgcaggcagacatgagggcagagagaacttccttcctcctggccctggggctcctggtggctgggatccgcagtgtccactgcctcccagaaaatgtggtggtgaaggaccagcacagaagggtggatggccacacgttagcctccagcaacaccgacttcgccttcagcctctacaagcagttggctttgaagaaccccaataagaatgtcatcttatccccgctgagtgtctccatagccttggccttcctgtctctgggggcccgtggctccaccctgacagagatcctggaaggtctcaagttcaacctcacagagatccaggagaaagaaatacaccatagctttcagcacctcctgcaggcgctcaatcaacccagcaaccagct

SEQ ID NO: 1796 - DNA, 126 bp, Bos taurus
  Clone ID: 08-LIB34-031-Q1-E1-B7
aacacagactataaaagcattaaaaaaaacaaaactaatggaggtaaaacatatatgtcatgtgaaataattttaatgttggacactgtacatgtatttttattccaataaacttttgtgttacag

SEQ ID NO: 1797 - DNA, 407 bp, Bos taurus
  Clone ID: 08-LIB34-032-Q1-E1-B7
cgccaaagccttgcggaaagccatgaaggggcttggaactgacgaggacaccatcatcgacatcatcgcccaccgcagcaacgcccagcggcagcagatccgccagaccttcaagtctcactttggccgggacttgatggctgacctgaagtctgagctctccggagacctggcaaggctcattctggggctcatgatgccaccggcccattatgatgccaagcagttgacgaaagccatggagggagctggcacagatgaaaaggctctcatcgagatcctggccactcggaccaacgccgaaatccaggccatcaataaggcctacaacgaggactatcacaagtcactggaggatgctctgagctcagacacgtctggccacttcaacaggatcctcatctctc

SEQ ID NO: 1798 - DNA, 222 bp, Bos taurus
  Clone ID: 08-LIB34-034-Q1-E1-B7
aagataatttactgagaaatttaaatttttctcagttcccatgaggaagaacacattgctgtcttttgaaaataacttcagcaccatcatggcttgatgtttattcctgctttgaattaatcaggttttttaaaacttgcaattacatttatcctaatacagcactgattttgcagtagactgatttgtaattgctttcctttttccaataaaataatctgt

SEQ ID NO: 1799 - DNA, 430 bp, Bos taurus
  Clone ID: 08-LIB34-035-Q1-E1-B7
gatgaagaagacaccaagagagttgtccgaagcgccaaggataaaaggtttgaggaactgaccaaccttatccggaccatccgtaatgccatgaagattcgggatgtcaccaagtgcctggaagagtttgagctcctgggaaaagcatatgggaaggctaagagcattgtggacaaggaaggtgtcccccggttctatatccggatcctagctgacctggaggactatcttaatgagctatgggaagataaagaagggaagaagaagatgaacaagaataatgccaaggccctgagcactctgcgccagaagatccgaaaatacaaccgagattttgagtcccatattacaaattacaagcagaaccctgagcagtctgcagatgaagatgctgagaagaacgaggaggattcagaaggctcttcagatg

SEQ ID NO: 1800 - DNA, 406 bp, Bos taurus
  Clone ID: 08-LIB34-036-Q1-E1-B11
acacctacctacccctgcccttttctttttcctatcactgaagctttctagtgcattagttgggagggggtcgggggaacataaccactgcttccatttaatcaggtgtgtttgtccaataggcatagctctccggacagagagcccagtcattgtgaagggatggggaggactttttctgagtggttactgagtcggggacaggcgtgctggattctatggttaggttaggatttcccttcttggtgggaagttccattacttacaaggttgtaaccaactttctatcaaaagtgaaaattaggggggaaggaagggtgggaagtcaggtaggaaaatgccctagatctcctggtgtggtgcttcccttgcctggggctcaatgccctaacaagctccgcataaa

SEQ ID NO: 1801 - DNA, 392 bp, Bos taurus
  Clone ID: 08-LIB34-036-Q1-E1-B7
agtttgccgccgggacacaggtgtcgtgaaaaccaccgttaaacctaagccatcatgggaaaggagaagacccacatcaacatcgttgtcattgggcacgtagattcagggaagtctaccacgactggccatctgatctataaatgtggcgggatcgacaagagaacaattgaaaagttcgagaaggatgctgccgatatgggaaagggctccttcaaatatgcctgggtcttggacaaacttaaagctgaacgtgagcgtggtatcaccattgatatctccctgtggaaatttgagaccagcaagtactatgttaccatcattgatgccccaggacacagagacttcatcaaaaacatgattacaggcacatcccatgctgactgtgctgt

SEQ ID NO: 1802 - DNA, 367 bp, Bos taurus
  Clone ID: 08-LIB34-037-Q1-E1-B11
aggagttgccccatggacagggccccacagagacatcaccgagcctcgcaggagctgctgtgctgcagaagaagacccacacctcacaaattgaagtgattccgtgtaaaatctgtggggacaagtcatctgggatccactacggggttatcacctgtgaggggtgcaagggcttcttccgccggagccagcagtgcaacgtggcctactcctgcacccgccagcagaactgccccatcgaccgcacgagccgcaaccgatgccagcactgccgcctgcagaactgcctggccctgggcatgtcccgagatgctgtcaagtttggccgcatgtccaagaagcatagggacatcctgcatgcagaggt

SEQ ID NO: 1803 - DNA, 419 bp, Bos taurus
  Clone ID: 08-LIB34-037-Q1-E1-B7
agaagtcgggatgtcatgctgcaaacaactttcttggattctataaatactctgccgactacttacgaaaagggggaatattttgcatttttggaaacctatggaacccactacagtagctctgggtctcttggaggactctatgaactaatatatgttttggataagaagtccatggagcagaaagatattgaactgagggacgtacagagatgcctcgggtttgatctggatttgtctctgaaggttggagttgaagttacgggaaattttgattcaaaactttgctcaaagaagggtatgggtcaaacagaaacgaacccagaggctgacctcttcgatgatgttatcaccttcataagaggaggaaccagaaaatacgcaactgaactgaaagagaaacttctcagaggagccag

SEQ ID NO: 1804 - DNA, 427 bp, Bos taurus
  Clone ID: 08-LIB34-038-Q1-E1-B7
gttctgaaaccctagaggacgcaactgtgagtgtctctgtcctagcctctcaacttgctttcctgtgtccagtgagtatcttcctgcctgaatgggcgctttatcctactggtgctgaggaaggcagggtctgtacagctgttccagtctaggaggatagcactgcagactccagtactagcctgtccagagcagcaagtgagaggaaacaagccagcattgtaagaggacatgcttctcctccctctctccgtgctgctcctgctcacacagccctggagatccctgggagcagaaatgacaaccttttctcagaaaatactggccaatgcctgtaccctggttatgtgtagccccctggagagtggcttggctggtcatgatggacaagatgggagagaatgtccccatggagagaagggggatc

SEQ ID NO: 1805 - DNA, 434 bp, Bos taurus
  Clone ID: 08-LIB34-039-Q1-E1-B7
acgccgactgctgccgccgctggtcacccgtcacgatgtccggcaaaggctccgtggttctggcctacagtgggggcctggacacctcctgcatcctcgtgtggctgaaggagcaaggctatgacgtcattgcctacctggccaacatcggccagaaagaagactttgaggaagccaggaagaaggcgctgaagcttggggccaaaaaggtgttcattgaggacatcagcaaggagtttgtggaggagttcatctggccggccatccagtccagcgcactgtacgaggaccgatacctcctgggcacctctctcgccaggccctgcatcgcccgcaagcaggtggagatcgcccagcgagaaggagccaagtatgtgtctcacggcgccacaggaaaggggaacgaccagattcggtttgagctcacctgctac

SEQ ID NO: 1806 - DNA, 415 bp, Bos taurus
  Clone ID: 08-LIB34-040-Q1-E1-B7
gagctgcggcgagggcaccgcgggcagctaggtgtccggcacggccatggcaggcgcgctggtgcggaaggcggcggactatgtccggagcaaggacttccgggactacctcatgagtacgcacttttggggcccagtagccaactggggtcttcccattgccgccatcaatgacatgaagaagtccccagagattatcagtgggcggatgacatttgccctctgctgttactccctcacgttcatgagattcgcctacaaggtgcagcctcggaactggctcctgttcgcctgccacgccaccaatgaactagcacagctcatccagggacgactgctgattcggcacgagatgtccaaaaaggcttcagcgtaacagcgggagatgaagaaccggcccttgaagggactgcat

SEQ ID NO: 1807 - DNA, 415 bp, Bos taurus
  unsure (327): unsure at all n locations; Clone ID: 08-LIB34-041-Q1-E1-B7
agaaggattctttcaatgctatagaaacagtgttctacagaagcatttacaagttgtactgtgaaagtcctcagttgtggtccactctttgcaaccccatggactgtagcccccagcccaggctcctctgtccatgggaattctccaggcaagaatactggagtgggttgccatgcccttctgcaggggttttcccaacccagggatcaaacccagggattgaacccatgtctcccgcattgagggctgattctttaccaactgagctgccagggaagcccaagaatactgcactgggtaacctgtcacttctccaggggatcttcngcaaccaggaatcgaaacagggtctcctgcattgcaggtggattctttaccaactgagttactggagaagtcctacaaattgtacgac

SEQ ID NO: 1808 - DNA, 409 bp, Bos taurus
  Clone ID: 08-LIB34-042-Q1-E1-B11
gcggcagccacccgcgtcctccttcccgcggccctcgggagaccgcgttcggccgcagtggaccgcgagaatgtctgaaggtgacagtgtgggagattctgtccatgggaagccgtctgtggtctacagatttttcacacgacttggacagatctaccagtcctggctggacaagtctacgccacacacggccgtgagatgggtggtgacgctgggcctgagcttcatctacatgatccgcgtttatctgctgcagggttggtacatcgtgacctatgccttgggaatctaccacctgaatctgttcatagctttcctttctccaaaagtggacccttcgttaatggaagattcagacgacggcccctcattacccaccaaacagaacgaggagttccgacccttcatc

SEQ ID NO: 1809 - DNA, 413 bp, Bos taurus
  Clone ID: 08-LIB34-042-Q1-E1-B7
acaatctccagtaaactgaaggaatgctgtgataagcctttgttggaaaaatcccactgcattgctgaggtagaaaaagatgccatacctgaaaacctgcccccattaactgctgactttgctgaagataaggatgtttgcaaaaactatcaggaagcaaaagatgccttcctgggctcgtttttgtatgaatattcaagaaggcatcctgaatatgctgtctcagtgctattgagacttgccaaggaatatgaagccacactggaggaatgctgtgccaaagatgatccacatgcatgctattccacagtgtttgacaaacttaagcatcttgtggatgagcctcagaatttaatcaaacaaaactgtgaccaattcgaaaaacttggagagtatggattccaaaatgcgct

SEQ ID NO: 1810 - DNA, 416 bp, Bos taurus
  Clone ID: 08-LIB34-043-Q1-E1-B7
gctcggagccccgggcccgccgacaccatgagttggtcctcgcaccctccgagtgtaatcttctacattctttcattgctttcttcagcatgcctggcatatgttgctacccgagacaactgctgcatcttagatgaaagatttggtagttattgcccaactacctgtggaattgcagatttcctgaataattaccaaaccagtgtagacaaagatctacgaactttggaaggcatcttatatcaagttgagaacaaaacatcagaagccagagagctggtcaaagcaatccaaatcagctataaccctgatcaaccatcaaagccaaataacatagagagtgctaacaagaattccaagagtatgatggaagaaattatgaaatatgaaacactgataacaacacatggatccac

SEQ ID NO: 1811 - DNA, 398 bp, Bos taurus
  Clone ID: 08-LIB34-044-Q1-E1-B11
agaacctgtctgtgtccatccatctgtccagtcgcaactctgcggtcatgcatcgtatcctctgggaatcagcgatcctcctgcgctcagaagagactaaggaaaatgagcgtttcacagttaaagctgaagggaaaggacaatgcaccttgtcggtagtgatcgtgtatcatgccaagctcaaacgcaaagtctcctgcaaaaagttcgacctccgggtttccatacacccagcccccgaaacagtctataaccctcaagacgcaagaggttccatgatccttgacatctgttccaagtacctgtgagaccagtatgcgactatgtccaccctggatatatccatgatgacaggcttctcacctgatgttgaaaacctcaagacgctgagcacttgt

SEQ ID NO: 1812 - DNA, 426 bp, Bos taurus
  Clone ID: 08-LIB34-046-Q1-E1-B11
aagagaccctattctatatcaacacttattctgattctttggacaccccgaagtctatattttaatcttacctgggtttggaataatctctcatatcgtgacctactactcaggaaaaaaagaaccattcggatatatgggaatagtttgggctataatgtcaatcggatttctaggtttcatcgtatgagcccaccatatattcactgtcggaatagacgtctacacacgagcctacttcacatcagccactataattattgctattccaaccggggtaaaagtcttcagctgattggcaacacttcatggaggtaatatcaaatggtctcctgctataatgtgagccctacgctttattttcttatttacagtagggggtttaactggaattgtcttagccaactcttccctcgatattgttct

SEQ ID NO: 1813 - DNA, 427 bp, Bos taurus
  Clone ID: 08-LIB34-048-Q1-E1-B11
cagcaaccagctgcagctgagcgtgggcaacgccatgtttgtgtcagaggagctgaagctgctggacaaattcaggaaagatgccgaggctttttacgcctctgaggttttatccactaacttcaaggattctgaagctgccgtaaagcttatcaatgaatatgtgaagaataaaactcatggaaaaattgagaagctcttcaatgatcttgacgtgctcacaaatttaatcttgttgaattatatcttctttaaagcccagtggaagacgccatttaatcctaaccatacttacgaatcagagttccacgtgagccagaacgagagggtgattgtacccatgatgaccctttacctggaaaccccttacttccgggacgaggagctgggctgcacgctggtggagctcacgtacaccagcaacgac

SEQ ID NO: 1814 - DNA, 407 bp, Bos taurus
  Clone ID: 08-LIB34-048-Q1-E1-B7
atccgaccctttctaccccagggcaagggcaggagtcacctctggaagaaagaggatgtgatgaagggggatggtcttcagggcaggaagaggaggggaaagcctgccttcttcctaaggccgctgcggagaggcgtgtggagcccgagaaaggccacatgaggccacagggagaaggcgtctgtccgcaagctgaaagagagctctcaccaggcactgaataagccagcgccttaatcttggacttccagcctctgaaactgagaaacaaacttctgctgtttaagacacctgtctatggtattttgtgatggcagcctgtgcagattaaaacactgtccagagaaaaatctgcctgaagagaacacagaggacacttctttttcagttgttaaatgcatgatcac

SEQ ID NO: 1815 - DNA, 426 bp, Bos taurus
  Clone ID: 08-LIB34-049-Q1-E1-B11
aggacctgataataaaggaatttataaaggagaccgggagtccagtgggaaatacacatttgctgctcacatggatggaacatataagttttgttttagcaataggatgtctaccatgactccaaaaatagtgatgttcaccattgacatcggggaagcccccaaaggacaagacatggaaacagaagctcaccagaacaagctagaagaaatgattaatgagctcgcagtggcgatgacagctgtgaagcatgaacaggaatacatggaagttcgagagagaatacacagagcaatcaatgacaacacaaacagcagagtggtcctttggtccttctttgaagctcttgttctatttgccatgacattgggacagatttactacctgaagagattcttcgaagtccggaaggttgtttaaaagcc

SEQ ID NO: 1816 - DNA, 436 bp, Bos taurus
  Clone ID: 08-LIB34-049-Q1-E1-B7
actctgctacgtacgaaaccccgacccagaagcaggtcgtctacgaatggtttagcaccaggcgccccacgaacgtgcggtgcgtgacgggcgagggggcggccgcctttccggccgcgccccgtgtcccgggacgaagggctctccgcaccggaccccggtcccgacgcgcggcgggggcgcgccgcgccgcgccccgggggacgcgggcgacggcccgccggcggggacagcgggggaccggctatccgaggccaaccgacgctcccgcggcgctgccgtatcgttccgcctgggcgggattctgacttagaggcgttcagtcataatcccacagatggtagcttcgccccattggctcctcagccaggcacatacaccaaatgtctgaacctgcggttcctctcgtactgagcaggattaccatggcaacaac

SEQ ID NO: 1817 - DNA, 232 bp, Bos taurus
  Clone ID: 08-LIB34-051-Q1-E1-B7
gcaccatttcaactcatgaggccaataagtgtgccagttttcgtgaaaatgtgcttcgtatcttggagagtggtccttttgtctcctgtgtgaagaaaacctcacacatggattgcatcaaggctatctcgaataacgaagcagatgctgtgacgttggatggaggtttggtgtatgaggcatgcctgaagcccaacaacctgaagcctgtggtggcagagttccatgggac

SEQ ID NO: 1818 - DNA, 242 bp, Bos taurus
  Clone ID: 08-LIB34-052-Q1-E1-B11
gctaccccagtggcatggccatctcaagaaggacagaatcccagcctctcacccatcagaaaattgattagagatggcagcattgacctggtgattaacctccccaataacaacactaaatttgtccacgataattatgtgattcggaggacagctgttgacagtggaattgctctcctcactaatttccaggtgaccaaactttttgctgaagctgtgaagaaagctcgcaatgtggactc

SEQ ID NO: 1819 - DNA, 189 bp, Bos taurus
  Clone ID: 08-LIB34-052-Q1-E1-B7
ggcgcccccatcgagcccgacccccccgtgtctcactggaagccggaggctgtgcagtattatgaagatggagcacggatcgaggccgccttccggaactatatccaccgggcggacgccaagcagcaggaggacagctatgagatcttcatctgccacgccaatgtcattcgctacaccgtgtgccgg

SEQ ID NO: 1820 - DNA, 240 bp, Bos taurus
  Clone ID: 08-LIB34-054-Q1-E1-B7
ccgaggaggagcgcgcccctcgccatggctgcgcggtcgctcctcctgatccgcggggggtgcgtcgtcaacgacgactcctcgcaggaggccgacgtgctggtggaggacggcgtggtgcaggcagtggggcgccacgtgctgccgcccggggacgcgccagccgggctgcgggtcctcgacgccgccggcaagctggtcctgcccggcggcatcgacacgcacacacacatgcagttt

SEQ ID NO: 1821 - DNA, 340 bp, Bos taurus
  Clone ID: 08-LIB34-056-Q1-E1-B11
gactactaatataccgatcccacctaatatcctcccttctatgcttagaaggaataatgctatccctattcgttatagcagccctaacaatcctcaactcacattttacattagctagcataatacctattatcctactagtcttcgcagcctgtgaagcagccctaggtctatctctactagtaatagtatcaaatacatatggtactgattatgtacaaaacctcaacttactccaatgctaaaatacattattccaacaattatacttatacccctaacctggttatcaaaaaataatataatttgggttaactccacagcacacagccttctaatt

SEQ ID NO: 1822 - DNA, 220 bp, Bos taurus
  Clone ID: 08-LIB34-057-Q1-E1-B7
ggccctctcaatgccgacctgctgcatctcgttctgctcatcaccgccctgtgcggtctcctgctgtcggttgtgatcgtgttcctgccccgggaccacgcccaccgtgatcgtgcaaacagcccgcatggcgaactcattcttgggggaggtgaaccagggaatcctggagcgagagtgcctggatgaggcctgctcactagaggaggcccgcgaggtc

SEQ ID NO: 1823 - DNA, 215 bp, Bos taurus
  Clone ID: 08-LIB34-058-Q1-E1-B7
tggttcctgcgctacgaggcatgccgcttcctgtggccaggctttggagagaatgcccgggtgctagaccggatctgccgaccgctcgacggggaggagagtgcccgggagacacccatcgggctggtgcctaatgaaggcgccttggatctcagcagcctgggatccattgacaccacccagttgttctccctccccaaggacttttggcaaca

SEQ ID NO: 1824 - DNA, 205 bp, Bos taurus
  Clone ID: 08-LIB34-059-Q1-E1-B7
gacaaagagggcatccccccagaccagcagaggctgatctttgctgggaaacagctggaagatggccgcaccctgtctgactacaacatccagaaggagtccactctgcacctggtcctccgcctcagaggtgggatgcagatcttcgtgaagaccttgaccggcaagaccatcaccctggaggtggagcccagtgacaccatcg

SEQ ID NO: 1825 - DNA, 236 bp, Bos taurus
  Clone ID: 08-LIB34-060-Q1-E1-B7
attgaaaccagaccccaatactttgtgtgatgagtttaaggcagatgaaaagaagttttggggaaaatacctatacgaaattgctagaagacatccctacttttatgcaccagaactcctttactatgctaataaatataatggagtttttcaagaatgctgccaagctgaagataaaggtgcctgcctgctaccaaagattgaaactatgagagaaaaagtactgacttcatctg

SEQ ID NO: 1826 - DNA, 367 bp, Bos taurus
  Clone ID: 08-LIB34-061-Q1-E1-B7
gatgctggagatgcatttgatggctacgattttggcgatgattctagtgacaagtttttcacatcccataatggcatgcagttcagtacttgggacagtgacaatgataagtatgatggcaactgtgctgaacaggatggatctggttggtggatgaacaaatgtcacgctggccacctcaatggagtttattatcaaggtggcacttactcaaaaacatctactcctaatggttatgataatggcattatttgggccacatggaaatcccggtggtattccatgaagaaaaccaccatgaagataatcccacttaacagacttgccatcggagaaggacagcagcaccaactggggggagccaaac

SEQ ID NO: 1827 - DNA, 305 bp, Bos taurus
  Clone ID: 08-LIB34-064-Q1-E1-B7
tcatctgcgtcgcttttatttcgcttcaccctctcgtcatctccgcttattccaggggtgtgttccgtctacatacacaggggggtgagattgctcacccgtttaaagatttgggacactcatattttatgcgcatgatagggagtgccttctctcagtatctccagcagtgtccatttgatgagcatctcaatttagtgcacgatctaactcagtttgctccacatctgttgctgaatactcccatgcccgctgtgtaaagtcacctcacactctcttttgagatgaagtgtgtaaaattgcat

SEQ ID NO: 1828 - DNA, 199 bp, Bos taurus
  Clone ID: 08-LIB34-065-Q1-E1-B11
cttcgacagagcggaggacacggctctggagtgcggctccagggagaccatggagcgcccagtgagagtgaaggcgtgggtggaggagaaccggggctccttcctgcccccggtctgcaacaagctcctgcaccagaagcagctcaaaatcatgttcgtggggggtcccaacaccaggaaggactaccacatcgaggat

SEQ ID NO: 1829 - DNA, 249 bp, Bos taurus
  Clone ID: 08-LIB34-066-Q1-E1-B7
ccccatcgctgggattctccatgcaagagcactggagtgggttgccatttccttccccagtgcatgacagtgataagtgaaagtacagtcactcagtcgtgtccaactcttaagctcctccagccatgggaatttccaggcacactactggagtggggtgccattgccttcaccgattattcacctacgtggtgcctaaacgtaacaaatttttttctgaattaggatgcattgtagacacaatgtctg

SEQ ID NO: 1830 - DNA, 205 bp, Bos taurus
  Clone ID: 08-LIB34-067-Q1-E1-B11
cacggacacggccaagcagatcaagaccaaggtcaacaagcacgccttctccggaggcagggacaccgttgaggagcaccggcagtttgggggcaactgtgacgtggacgtgtccttcatgtacctgaccttcttcctggaggatgatgacaagctggagcagatcaggagggactacacgagcggggccatgctcaccggcgag

SEQ ID NO: 1831 - DNA, 233 bp, Bos taurus
  Clone ID: 08-LIB34-067-Q1-E1-B7
tacatcccaccaggaagcagtgtgccacaagattgcccccaacctggccaactttgccttcagcatataccaccatttggctcatcagtccaacaccagcaacatcttcttctcccccgtgagcattgcttcagcctttgctatgctctccctgggagccaagggcaacactcacactgagatcctgaagggcctgggtttcaacctcactgagctcgcagaggctgagatcc

SEQ ID NO: 1832 - DNA, 212 bp, Bos taurus
  unsure (205): unsure at all n locations; Clone ID: 08-LIB34-069-Q1-E1-B7
gcgaaggacgcggtttctggaggcgaagaacgcggttggccaatcgcaagccagaagatgaaggttctgtgggttgccgtggtggtcgcgcttctggcaggatgccaggcggatatggagggagagctggggcccgaggagcccctgactacgcagcagccccgggggaaggacagccagccttgggagcagggcgctgggccgncttctgg

SEQ ID NO: 1833 - DNA, 190 bp, Bos taurus
  Clone ID: 08-LIB34-070-Q1-E1-B7
ggcgtgggcctctgcaacacccagtatgcccgattggtggagatcgtgggcatgtatgaccttggcgtgggcatcgtcctgggggcccatcaagatcggttcaaggatctgctctcgacaagccagaagaaatactcccaactggatctgggaactaactgctttgtctaacggccctcatggtcaatgc

SEQ ID NO: 1834 - DNA, 385 bp, Bos taurus
  Clone ID: 08-LIB34-071-Q1-E1-B11
acggacgcgtggggccgaatccttttggaggctgccaggataataagggaacggagggatgaaattgccactatggagactatcaacaatgggaagtccatctttgaggcccgctgggacattgacacttcctggcagtgcctggagtactatgcaggcttggcaggatccatggctggcgaacacatccagctcccgggtggatcctttggttacaccagaagggaaccactaggggtgtgtgttggaataggagcgtggaactacccctttcagatcgcctgctggaagtcggctccagctctggcttgtggtaacgccatggtctttaaaccttctcccttcacgcccgtgtccgtgttgctgctggctgaaatccatactg

SEQ ID NO: 1835 - DNA, 415 bp, Bos taurus
  Clone ID: 08-LIB34-072-Q1-E1-B7
aggcggcggctctggatccactgcccacaccccgctctcgcaggcagacatgaggacagagagaacttccttcctcctggctctggggctcctggtgtctgggttctgctccagggtccactgcctcccagagaatgtgaccccagaagaacagcacaaagggacgtctgtggatggccactcattagcctccagcaacactgacttcgccttcagcctctacaagcagttggctttgaaggaccccaataagaatgtcatcttctcccctctgagcatctccatagccttggccttcctgtccctgggggctcatgaccacactgtgacagagatcctggaaggtctcaagttcaacctcacagagacccccgagacagaaatccaccagggcttccagcacctccttgcagac

SEQ ID NO: 1836 - DNA, 386 bp, Bos taurus
  Clone ID: 08-LIB34-073-Q1-E1-B7
cggacgcgtgggttttttttttttttttttttttttttttttttcctctaaataaacaccatttccatggttttaataagcaaaataggaaaccattttaataaccaaaaaacagaaaccagtctgaataaaactacaatagactaggttttaatattttcatatcataagcagggtttgaaattgatcccttattgtacatgaaataaaaacaatttctgttgtggcaaatttgatttcaacacagttgaatctgtaaaaaccgaagctcgtttccaatgcaggacaaatatccacaatatttaaaactgcaagcaccatgcggttcatacaatcttgttattactgttaatttatcaactaatacaaactcaaaaatgcatccg

SEQ ID NO: 1837 - DNA, 395 bp, Bos taurus
  Clone ID: 08-LIB34-076-Q1-E1-B7
gcgggtggacacacgagtctgctcagtcatcacttgaggagattctggccgtgagcttgtcagacaagaaagggatctgtgtggctgacccctatgaggtcactgtgatgcaggatttctttatcgacctgcgtctcccctactcggtggtgcgcaacgagcaagtggagatccgagcgatcctctacaactaccgggaggcggaaaatctcaaggtgagggtggaattgctctacaatccagccttctgtagcctggccaccgccaagaagcgccaccagcagactataacaatcccagccaggtcctcggtggcggtgccttacgtcattgtgcccctgaagatcggcctccacgaggtggaggtcaaggctgccgtctacaaacacttcatc

SEQ ID NO: 1838 - DNA, 438 bp, Bos taurus
  unsure (338): unsure at all n locations; Clone ID: 08-LIB34-077-Q1-E1-B7
aacgtccgccgaaatctatattttaatcttacctgggtttggaataatctctcatatcgtgacctactactcaggaaaaaaagaaccattcggatatatgggaatagtttgggctataatgtcaatcggatttctaggtttcatcgtatgagcccaccatatattcactgtcggaatagacgtcgacacacgagcctacttcacatcagccactataattattgctattccaaccggggtaaaagtcttcagctgattggcaacacttcatggaggtaatatcaaatggtctcctgctataatgtgagccctaggctttattttcttatttacagtanggggtttaactggaattgtcttagccaactcttccctcgatattggtcttcacgacacatactacgttgtcgcacatttccactaagttttatcaataag

SEQ ID NO: 1839 - DNA, 422 bp, Bos taurus
  unsure (239): unsure at all n locations; Clone ID: 08-LIB34-078-Q1-E1-B7
ctcgtactaggcatatacggcctccacgatccccaagggaggaagagttccttctgccacataacctggcattgaaagatactggtactctccatcacgcggggccttctgctgctggcagccctgtgctgcctgccccacatctcgctggctggagttctccaacgacacgctgtccaagatacacatgatacatcccaccagtgaatcagcatgccacaggattgcctccacactgnccagctttgccttcagcatatagcacgatttggctcagcagtcgaacatcagcagcatcttcatctcccccgtgagcatcgcttcagcctttgcgatgctctcactgtgagccaagggcaacactcacactgagatccttaacggcctgggtttcaacctcactgagctcccagaggctgaga

SEQ ID NO: 1840 - DNA, 385 bp, Bos taurus
  Clone ID: 08-LIB34-079-Q1-E1-B11
ctttggcacaatgaagtgggtgacttttatttctcttctccttctcttcagctctgcttattccaggggtgtgtttcgtcgagatacacacaagagtgagattgctcatcggtttaaagatttgggagaagaacattttaaaggcctggtactgattgccttttctcagtatctccagcagtgtccatttgatgagcatgtaaaattagtgaacgaactaactgagtttgcaaaaacatgtgttgctgatgagtcccatgccggctgtgaaaagtcacttcacactctctttggagatgaattgtgtaaagttgcatcccttcgtgaaacctatggtgacatggctgactgctgtgagaaacaagagcctgaaagaaatgaatgc

SEQ ID NO: 1841 - DNA, 411 bp, Bos taurus
  Clone ID: 08-LIB34-081-Q1-E1-B7
acgtcatggcgcgcctcctgcgggctctgcggggcctaaccctccgcgaggcgcccgggtgggctgtgcggggccgagcggactgcggcggcttccgcgcaggtgctggatccccgcaagcagggtgtcttataaaacgtcagccggctctctccaagagtgagtggcagaagaagctgacaccagagcagttccatgtcacgagagaaaaagggacggagccgcctttcagtgggatctacctgaataacaaggaaccagggatgtatcactgtgtgtgttgcgacagcccgctcttcagctctgagaagaagttctgctccggcacgggatggccttcgttctctgaggctcatgggacatctggctctgatgagagtaacacggggatcctgagacgtgcggacacct

SEQ ID NO: 1842 - DNA, 175 bp, Bos taurus
  Clone ID: 08-LIB34-082-Q1-E1-B11
gcgtcagctctccatgtcaacttcattcgagtactgcgtttgcgggttgcactgtggtcgtctgacgtttagctgtgacattgctctcatcatctctcattctcactgggtttcgttttgcctcagtagtcctgcgagggagttcatttccacgactttgcaggtcagaagcaat

SEQ ID NO: 1843 - DNA, 379 bp, Bos taurus
  Clone ID: 08-LIB34-083-Q1-E1-B11
tagtgagtcgtattatgtctattctttactatgatgtgagttacctatgatgtgcatgcatgctcagtcatgtctgattctttgtgacgccatggactgtacccgaggaagctcctcttccccatggcgttttccaggcaagaatactaacgtggcttgccatttcctactccaagggacttttttccgacccaggatctgtacctgcatctcccaagattcctgcattattaagtgtattctttaccaattagtcatctgccatgccctgatgatcatgatgatgccattatatttcccttatttcgttcatacatcagctttattaattttgtcagtctttaaaccttgaaagttacggactgtgtcttaatcatac

SEQ ID NO: 1844 - DNA, 267 bp, Bos taurus
  Clone ID: 08-LIB34-083-Q1-E1-B7
agggtgctcctcttgagtcagccctatccacggcagagatgttttccgtgagggacctctgcctggtcctgagtttggtgggtgcaattaagacagaagatggtagtgatcctcccagtggtgactttttaactgaatgaggacgggtgcgtggcccaagacttgtggaaagacagcaatctgcctgcaaagagacaggctggcccttctgctctgatgaagactggaatacaaaatgcccttcgggctgaatgatgaaagggttga

SEQ ID NO: 1845 - DNA, 396 bp, Bos taurus
  Clone ID: 08-LIB34-085-Q1-E1-B7
agggtcgatatacatgggatatacttctcaggaaacactttcctgtcaagaggagaaaggagagacacagcaaacctcttccctcaaacaagtttgagtctcttcatgaagccagatactgcagggacttttgatgtggaatgcctcacaactgatcactacacaggtggcatgaaacaaaagtacactgtgagccagtgcagccagaggtccgaagatttatacctctacctgggagaaaggacctactacatcgcagcggtggaggtggaatgggattattccccaagtaggaaatgggaaaaggagctgcatcatttacaggaacaaaatctttcaaatgcatttttagataaggaagaattttacataggctccaagtacaagaaagttgtg

SEQ ID NO: 1846 - DNA, 458 bp, Bos taurus
  Clone ID: 08-LIB34-086-Q1-E1-B7
cacaagatcgacagaggttggcaaactgatcaaagaagctgctgggaaaagcaatctgaaaagggtgtccctgtaactcgggggaaagagtccttgcattgtgtttgctgatgccgacttggacaatgctgttgaatttgcacaccaatgagtattctatcaccagggccagtgttgtaaacctgcatcacgtctctttgtataagaatcaatttacgatgagtttgttcgaaggagtgttgagcgggcgaaaaagtatgttcttggaaatcctctgaccccaggagtcagtcaaggccctcagattgataaagaacaatatgaagaaatacttgacctcagtgaaagtgggaagaaggaaggggccaagctggaatgtggcggaggcccttgggggaataaaggctactttatccaacccacagttttctctgatgttactgatgatatgcgcattg

SEQ ID NO: 1847 - DNA, 413 bp, Bos taurus
  Clone ID: 09-BOVMS1-001-Q1-E1-C1
atacagagaaaaatgatggttttctcaaatttcatagaaaaagaatggtttatcaattcattctttacattcaatgactgttgagcatttactctttctaaggctctgtgttagcactgggccatcataggaaaatatcagagataaattctgttcacagtgctatcctgacacagtatgtggccttggaaaatttgctaaacattctgtgcttatttttcccatgtgtaaaataaggatttctggacaaacaaccttatacctcacagatgtaccgtggagactgagaaaatatcttaatatggacatgacaaaaaagtgtctaaaagaatacttttgaatgtggcactacttgttcctctgagtgcttttctacattatattatggtctctttcattctcatcaatgaaac

SEQ ID NO: 1848 - DNA, 388 bp, Bos taurus
  Clone ID: 09-BOVMS1-002-Q1-E1-C1
aaaagaaactcaaggccaccgaagatgaactggacaaatactccgaggctctcaaagatgcccaggagaagctggagctggcggagaaaaaggccaccgacgctgaagccgacgtagcttctctgaacagacgcatccagctggttgaggaagagttggatcgtgcccaggagcgtctggcaacagctctgcagaagctggaggaggccgagaaggcagcagatgagagtgagagaggcatgaaagtcattgagagccgagcccaaaaggatgaggagaagatggagattcaggagatccagctgaaagaggccaaacacatcgctgaggatgccgaccgcaagtatgaagaggtggcccgtaagctggtcatcattgagagtgacct

SEQ ID NO: 1849 - DNA, 435 bp, Bos taurus
  Clone ID: 09-BOVMS1-003-Q1-E1-C1
caaaaattcggccaagcgttcggccaagccttcggaatcctaacaagcaatagcaaaggtttaacaaccaatccggaaaccaaccctggggggcccattcaggtttatgacggtggccgtgccatgaccaaggatatcagcctgcttggcaagtttgaactcacgggcatacctcctgccccccgtggtgttcctcagattgaagtcacttttgatattgatgccaatggcatcctcaatgtttctgctgtggataagagcacaggataagagaacaagattaccatcactaatgacaaaggccgcttgagcaacgaagacattgaacgcatggttcaagaagcatataagtacaaagctgatgatgagaagcatcgggacaatgtgtcttcaaagaattcgcttgaatcctacgccttcaacatgaaagctact

SEQ ID NO: 1850 - DNA, 371 bp, Bos taurus
  Clone ID: 09-BOVMS1-004-Q1-E1-C1
atgcgacgtcatagctcttctatagtgtcacctaaattcaattcactggccgtcgttttacaacgtcgtgactgggaaaaccctggcgttacccaacttaatcgccttgcagcacatccccctttcgccagctggcgtaatagcgaagaggcccgcaccgatcgcccttcccaacagttgcgcagcctgaatggcgaatgggacgcgccctgtagcggcgcattaagcgcggcgggtgtggtggttacccgcagcgtgaccgctacacttgccagcgccctagcgcccgctcctttcgctttcttcccttcctttctcgccacgttcgccggctttccccgtcaagctctaaatcgggggctccctttagg

SEQ ID NO: 1851 - DNA, 291 bp, Bos taurus
  Clone ID: 09-BOVMS1-005-Q1-E1-C1
ggtgaaaggagccttgggagacgcctgtgcgatacgctcttcaatgggattcaccagattgagagatatgacatgcatgactggtgtagcgctgagtctgggtgaaagttaattatccactttcaccacaatgccaagccaattctcagcattatgtaaaatgacctgtaactttcacctcagcttaaatctacataccaagcggcccacatattttccagtcaacttatctgatgccatctcacagctacttgatgacagcaaaatgtcttgcttacactgatatggaag

SEQ ID NO: 1852 - DNA, 424 bp, Bos taurus
  Clone ID: 09-BOVMS1-005-Q1-E1-C9
atgaaatcaataacccatctcttacagtaaaaaccataggacatcagtgatactgaagctatgagtatacagattatgaggacttaagcttcgactcctacataattccaacatcagaattaaagccaggggagctacgactattagaagtcgataatcgagttgtactaccaatagaaataacaatccgaatgttagtctcctctgaagacgtattacactcatgagctgtgccctctctaggactaaaaacagacgcaatcccaggccgtctaaaccaaacaacccttatatcgtcccgtccaggcttatattacggtcaatgctcagaaatttgcgggtcaaaccacagtttcatacccattgtccttgagttagtcccactaaagtacttttgaaaatgatttgcgtcaatattataaaa

SEQ ID NO: 1853 - DNA, 239 bp, Bos taurus
  Clone ID: 09-BOVMS1-006-Q1-E1-C1
atgcgacgtcatagcgcttctatagtgtcacctaaattcaattcactggccgtcgttttacaacgtcgtgactgggaaaaccctggcgttacccaacttaatcgccttgcagcacatccccctttcgccagctggcgtaatatcgagcaggcccgcaccgatcgcccttcccaacagttgcgcagcctgactggcgaatgggacgcgccctgtagcagcgcattaagcgcggccggtgt

SEQ ID NO: 1854 - DNA, 460 bp, Bos taurus
  unsure (276),(283),(303),(311): unsure at all n locations; Clone ID: 09-BOVMS1-007-Q1-E1-C1
gggtcgaccacgcgtccgggtcatatccctgtgtcttcacgtggacttctctctgtacttgtctgtattcaaatttcctcttataaggataccagtcatattggactaaggcccaccctgatgacttcattttactctaattacttctttataaagattctgtctccaaatacagtcacattctgaggtaccaggaattgggactttgcactggtcctaatgtttgcattcactaaataatttgttgatacctaatgccccctgtgatgctatgangaggtanggctttggggatgtgcttangtcatgangatggagttctcacgagtgggattagtgctctttttttaaaagagagcccacagacaccgcttaccctttctgccacatgagctgatgatgaaaagacagtctatgaaccaagaagaggacctttaaactagacactgaatatgcctgc

SEQ ID NO: 1855 - DNA, 170 bp, Bos taurus
  Clone ID: 09-BOVMS1-008-Q1-E1-C1
cccgtccgctaaaagcagacctactgacactcacatgaattggaggacaaccagtcgaacacccatatatcaccatcggacaactagcatctgtcctatactttctcctcatcctagtgctaataccaacggccggcacaatcgaaaacaaattactaaaatgaagacag

SEQ ID NO: 1856 - DNA, 286 bp, Bos taurus
  Clone ID: 09-BOVMS1-009-Q1-E1-C1
tgctgcaggctgagatcgatgagctgagggccaccctgaagcagacagagaggagcatgaagatcgcagagcaagagctcctggatgccagtgagcgcgtccagctcttgcacactcagaacatcagcctgatcaacaccatgaagaagctagagacagacatcacgcaaatccacggagagatggcggatattctccaggatgctcgcatcgcagatgataaagccacgaaggccatcactgatgcatccatgatggctgacgagctgatgaaggtgcaagacac

SEQ ID NO: 1857 - DNA, 349 bp, Bos taurus
  unsure (10): unsure at all n locations; Clone ID: 09-BOVMS1-009-Q1-E1-C9
cgggtcgaanacgcgtccgaccaacttgaccaggaagctgcagttgaagtgtcccagttgacggacccacagcatgacttagaacgagtatagaaacctgagtgggttatcatgatatgtgtttgcactcatcttggttgtgtacccattgcacatgcatgacattttggtggttattactgcccttgccatgggtcacactatgatgcgtctggcaggatcaggaatgggcctgcacctctcaaccttgaagttccctcatatgagttcaccagcgatgatatggtgattgttggttacagacctggactcgagttacaggcttcattcagtcttcatgtcacctcat

SEQ ID NO: 1858 - DNA, 348 bp, Bos taurus
  Clone ID: 09-BOVMS1-010-Q1-E1-C1
atgcgacgtcatagctcttccatagtgtcacctaaattcaattcactggccgtcgttttacaacgtcgtgactgggaaaaccctggcgttacccaacttaatcaccttgcagcacatccccctttcgccagctggcgtaatagcgaagaggcccgcaccgatcgcccttcccaacaattgcgcagcctgaatggcgaatgggacgcgccctgtagcggcgcattaagcgcggcgggtgtggtggttacgcgcagcgtgaccgctacacttgccagcgccctaccgcccgctcctttcgctttcttcccttcctttctcgccacgtacgccggctttccccgtcaagct

SEQ ID NO: 1859 - DNA, 387 bp, Bos taurus
  Clone ID: 09-BOVMS1-012-Q1-E1-C1
aaaaaaacaaagggaaacagagtttaaaaataaagacatgaaaaaaactgtacaaaaaaacagcaaattaacaataaagggaaattcaaattaatcgaagttcacacgcagccttaagcatggagcgaaagacaaagacgactaataagaacttcaaactccagccaaacgttccttgttgccactctgggtaattctgagactttctcttagagcctgttgcatgcccatagctttacagcttctgcctttcctttgtatttattctcagccatttgggggacatgcatctctacaaacagactggatatgggacttcttgtcattttaagagtagaaaatacggtaacttaacttactatctgccgtctaccctcgccgccccca

SEQ ID NO: 1860 - DNA, 399 bp, Bos taurus
  Clone ID: 09-BOVMS1-015-Q1-E1-C9
aaagaatccattatatgagcagattttttaagtaatttctgtatattgtatatttgaattggcttttattgagcagcttatcttccacttgcaagcttatggaaatatcaaatgtcaaaataagtaaaaagtgggagaattatttactgttagaagaatgtttttattagtttggatgtcttcttttttaatggaatctaatcagtacttctgaactgcaggtatagtgctctaactaaaacataagctagtagtcccactgatcgataaactagacagtgtttatccctactttttgaatttagaatattgaggtattctctgtttaaacttgtctgggggtatttaagcttatacatatatgtgtacatatgttcatacacacagatctctgttttt

SEQ ID NO: 1861 - DNA, 435 bp, Bos taurus
  unsure (112): unsure at all n locations; Clone ID: 09-BOVMS1-016-Q1-E1-C1
acgtcaacatgactgacaatgatcttatcaatattcttgaccctttttatcatctttcaactaaaagtttcaaaacacaacttttatcacaatccagaactgacaccaacanaaatattaaaacagaacaccccttgagaaacaaaatgaacgaaaatttatttacctcttttattacccctgtaattttaggtctccctctcgtaacccttatcgtactattcccaagcctactattcccaacatcaaaccgactagtaagcaatcgctttgtaaccctccaacaatgaatacttcaacttgtatcaaaacaaataatgagtatccacaattctaaaggacaaacatgaacattaatagtaatatccctgatcctatttattggatcaacaaacctactaggcctattaccccattcaatcaaaacaacaacac

SEQ ID NO: 1862 - DNA, 408 bp, Bos taurus
  Clone ID: 09-BOVMS1-017-Q1-E1-C1
aaaatattaaaacaaaacaccccttgagaaacaaaatgaacgaaaatttatttacctcttttattacccctgtaattttaggtctccctctcgtaacccttatcgtactattcccaagcctactattcccaacatcaaaccgactagtaagcaatcgctttgtaaccctccaacaatgaatacttcaacttgtatcaaaacaaataatgagtatccacaattctaaaggacaaacatgaacattaatattaatatctctgatcctatttattggattaacaaacctactaggcctattaccccattcattcacaccaacaacacaactatcaataaacctaggcatagccatccccctgtgagcaagagccgtaattacaggattccgcaataaaactaaagcatcac

SEQ ID NO: 1863 - DNA, 263 bp, Bos taurus
  Clone ID: 09-BOVMS1-018-Q1-E1-C1
accaacgcttcggaaaaagaagaggaaaagaagaaagctgagaagaacgtgacctctgaaacaaaaaagaaagaccaagaagatgtcaaaatggaaactgagaaaggaactggcatggatgttaaaagaaaagagcctaacaaagccccaaaaaccaaacaaggggacaataaagtttgagcacaagcacctactaaaaaagaaggaaagaaaggagagactgaacgaaccaaagaagaaggtgggtctgcctcaaccaaaaa

SEQ ID NO: 1864 - DNA, 369 bp, Bos taurus
  Clone ID: 09-BOVMS1-019-Q1-E1-C9
atgcgacgtcatagctcttctatagtgtcacctaaattcaattcactggccgtcgttttacaacgtcgtgactgggaaaaccctggcgttacccaacttaatcgccttgcagcacatccccctttcgccagctggcgtaatagcgaagaggcccgcaccgatcgcccttcccaacagttgcgcagcctgaatggcgaatgggacgcgccctgtagcggcgcattaagcgcggcgggtgtggtggttacgcgcagcgtgaccgctacacttgccagcgccctagcgcccgctcctttcgctttcttcccttcctttctcgccacgttcgccggctttccccgtcaagctctaaatccggggctcccttta

SEQ ID NO: 1865 - DNA, 260 bp, Bos taurus
  Clone ID: 09-BOVMS1-020-Q1-E1-C1
ggagcatcaatgctagtctcaggcttcaacgtataatacgcagcaggaccagttgcccgcttcttcatagtagactacacagctattatcatagtaactatctttacagcaattttaatcccatgaacatcccacagtccacacattccactactccacacagtccacttgaccattaaatccctactggtcacactatcattcctatgatcccgagcatcctaccctcgatttcgcgatgactacctagcacacttact

SEQ ID NO: 1866 - DNA, 424 bp, Bos taurus
  Clone ID: 09-BOVMS1-021-Q1-E1-C1
ggaatggcaacttcatagaattggcttgctgaaaattcctgaattcattggaaggttccagaaccttattgtgttagatttatctcgaaacacaattactgagatacctcgaggaattggactgctcactagacttcaggaactgattcttagttacaatagaatcaaaactgtccccatggaactaagttactgtgccagcttggagaaacttgaacttgctgttaacagagacataagtgatcttccacaagagctcagcaatttgttaaagcttactcaccttgatttgagtatgaacctctttactacaatccctcctgctgtgttgaacatgcctgcccttgagtggcttgatatgggaagcaacagacttgaacaacttcctgacactatagaaagaatgcaaaatctacatacatta

SEQ ID NO: 1867 - DNA, 404 bp, Bos taurus
  Clone ID: 09-BOVMS1-022-Q1-E1-C1
caaccaacccgtcggcaaacacgcaaggccgtcagactacctattgtagatattgcaccctatgatatcggtggtcctgatcaagaatttggtgcggacattggccctgtttgctttttataaaccaaactctatccaaagtcccagaaaaagcttcacactccatatgttccttttgttctaatcttgtcagccagtacaagtgaccaagttccagttatttatttccaaaattcttgggaaaaaagtgtaatttgaccaaaaaaggatatttgtttttgctattacaccaaatacagttcaaatgcttattgttctatttttttaccaatttcaatttcaaaatgtctcaatggtgctataataaataaacttcaacactcttccaataacactgcgttaca

SEQ ID NO: 1868 - DNA, 277 bp, Bos taurus
  Clone ID: 09-BOVMS1-023-Q1-E1-C1
gtccgagaaattcattcatgatcatgttgatctacaagttagtgccctctatgctcttcaggtgcactgctacaacagcaacttcccaaaaggcatgttactccgcttttttgttcacttctatgacatggaaattattgaagaagaagctttcttggcttggaaagaagatataacccaagagtttccagggaaaggcaaggctttgttccaggtgaatcagtggctaacctggctagaaactgctgaagaagaagaatcagaggaagaagccgac

SEQ ID NO: 1869 - DNA, 440 bp, Bos taurus
  Clone ID: 09-LIB188-001-Q1-E1-C1
catggccgcgcgatactcggtgtggatcggaggctccatcctggcctccctgtccaccttccagcagatgtggatcagcaagcaggagtatgacgagtctggcccctccattgtccaccgcaaatgcttctaaatggactgcgagcagatgcgtagcatttgctgcatgagttaattcagaagtataaatttgccgtggcaaatgtatacacctcatgctagcctcatgaaactggaataagcctttgaaaagaaatttgtccttgaagcttgtatctgatatcagcactggattgtagaacttgttgctgattttgaccttgtattcaagttaactcttaccttggtatatgtttaataccctgtgcatatctttgatttaaacccctagttatatgcggctctcacctcgagctgaggtgagaatgtttatggaagag

SEQ ID NO: 1870 - DNA, 426 bp, Bos taurus
  Clone ID: 09-LIB188-002-Q1-E1-C1
accaagatgataccctgcgacttcctcatcccggtccagagccagcaccccataaggaacggtttgcatcacaagatcctcctggccaacttcttggcccagactgaggccctgatgagggggaagtcgacagaggaggcccggaaggagctacaggctgctggaaggagtccagaggactttgagaagctgttgcctcacaaggtctttgaaggaaatcgcccgaccaactctatagtgttcaccaaactcacgccattcattcttggagccttgattgccatgtatgagcacaagatcttcgttcagggcatcatctgggacatcaacagcttcgaccagtggggagtggagctgggaaagcagctggctaagaaaattgaacctgagcttgacgggagcagcccagtgacttctcacgattct

SEQ ID NO: 1871 - DNA, 409 bp, Bos taurus
  Clone ID: 09-LIB188-003-Q1-E1-C9
aatcaagacctcgaccacactgtagaactttgggaatgctcgatccaaccgactgctgtcaccttcaccgttccagtttttaaatcctgagtcaagcgccaaaaaagaaaaaaatcaaaaaagacaaaggaaaaaaacaaataaagccatgccaatctcatctcgttttctgcgcaagttaggttttgtcaagaaaaagggtgtaacgcagctaacagtccgcctagaagcatttgcggtggacgatggaggggccggactcatcgtacgagagctggagctgctctatgcccgggcccagctggagctggaagtgagcaaggcccatcagctggctgaggtggaggtgaagaagttcaagcagatgacagaggccctggggcccagcaccatcagagacatggctgtg

SEQ ID NO: 1872 - DNA, 404 bp, Bos taurus
  Clone ID: 09-LIB188-005-Q1-E1-C1
ggcggcgggacacagcgccgaatcaaccttcgaggggatcctcaaaaacccaagagcagagtctttgaacagcaggtccctctggccgggtggagagccaaaagggctggaagctccgagacttgttttttccaaatttctcctgcgccttgctgagaagcttccagatcaagtcttccttgccatccacacttcgggccacgacagcatgagaagggacctgggccaggtggcactccttgaacgcatccactggcgcccgactgttgttcaggcagagaagctcatactggtccctgtcagccttctctggcaagttctcaaacactgtcgtctctttaacaaaagccacgtctccagccccgtcctgcagacacttgaaggcaccagaataaccgaagtat

SEQ ID NO: 1873 - DNA, 393 bp, Bos taurus
  Clone ID: 09-LIB188-005-Q1-E1-C9
tcccgaccgctatgggcccgggatacctgcagacgctgaccaccattgctgctgagaaaaactcgaccatcatcttccctctgcccatagacatgctgcaggctatcatggggccaaaacagtgagccgcgggggcggcagagctgagacgggcccaaaccagccctcagccgggaggtggaggggtgcacgctgggcctttctccctccctcccctgttccataggttgagtgtgatattcttacaacgcatagtgatcctagcaacagatgaaggttgttagcttgtaaatacgacatgagagagagaggtgattaatgtaagataaccttactctaaaatatttaaaagttcatgtgtttagattgctccatgataggtgaagtccatct

SEQ ID NO: 1874 - DNA, 399 bp, Bos taurus
  Clone ID: 09-LIB188-006-Q1-E1-C1
tcccgaccgtaatgggcgcgggatacaagcctagtgtgttactgggcttcaacatgaaagagctaaataaagttaagcatgagatggattttgatgctgagtggctctttgaaaatcacgatgagaaggattccagagtcaatgctagtaaaacagcagacaaaaagctcaatcttgggaaggaagatgacagttcctcagacagttttgaaaatttggaggaagaatccaatggaagtgatagcccttttgaccctgtttttgaagttgagcctaaaatccctaatgataacccagaggaacacataccgaaggtaatttctgaagatgctttagaatctgagaagctagaccaaaaagcggaggatggttcaaaatatgaaactattcatttgactg

SEQ ID NO: 1875 - DNA, 381 bp, Bos taurus
  Clone ID: 09-LIB188-007-Q1-E1-C1
gcgggatcccggtcttctaccaacaaccaaattaggtagcctgtttatcttgagctgacttcctgctccagggctggcttcctaatccagtcatattgctgaagtgtggctgaggtgagcccaggcctctctccgcgggtgagggttgctcctcacttaggttgtggggagaaccccccccacagtaaatggaagcagttgcctgcctgcctctggagtcccttttgcaacactcctttctttccctgggctgaagccaggacctggtggtgttccttacaggatagtcagtgacgatgccgggcacagctttccggagtgaaggccattgggcccgagcaacctttcacttggctccccccaacctctctaggaatcaca

SEQ ID NO: 1876 - DNA, 447 bp, Bos taurus
  unsure (387)...(389),(406): unsure at all n locations; Clone ID: 09-LIB188-008-Q1-E1-C1
cgggatacctccctaatgacaaagtctccaaagtcaaattgcttatgaacaaagtaaaggtttataaatattctggctttttgtaaattttcccaatatagtttgggggctaatacaactcagcagaagtagaggctcaatggtcagcatgaatatgctttatttcttatcctgacacctagggattttattaacaaaaacagcattataccatcttctcactgaccaaagcaccattgtgttgatccgatcatgtaagaggtgactctcctaagagaccaaagtgacagacctgcgcagggatgcgtctatgaaggaaggtgtgacgaaggagctgcaggctgacactggtggaatatcacaggatgacttaaccttggccttgannnaacagaacatttcaganggtgaaaaatcacacactcctactagtgatgttgaagaaaa

SEQ ID NO: 1877 - DNA, 383 bp, Bos taurus
  Clone ID: 09-LIB188-009-Q1-E1-C1
acttgagctggacagagtcactcgagcccctccagggagctgtggctaaattcttctctgccagctgtgttccctgcattgatagacaagcataccccaacctgtgtcaactgtgcaagggggagggggagaaccagtgtgcctgctcctcccgggaaccatacttcggttattctggtgccttcaagtgtctgcaggacggggctggagacgtggcttttgttaaagagacgacagtgtttgagaacttgccagagaaggctgacagggaccagtatgagcttctctgcctgaacaacagtcgggcgccagtggatgcgttcaaggagtgccacctggcccaggtcccttctcatgctgtcgtggcccgaagtgtggatggc

SEQ ID NO: 1878 - DNA, 425 bp, Bos taurus
  Clone ID: 09-LIB188-009-Q1-E1-C9
tggccgcgggctacagaccagagacaaagcaagagaagaagcagaggctgctggcccgagctgagaagaaagccgcgggcaaaggcgatgtccccaccaagaggccacctgtccttcgagcaggggtcaacacggtcgccaccctggtggagaacaagaaggctcagttggtggtgatcgctcacgacgtggatcccattgagctcgtggtcttcctgcctgccctgtgccgcaagatgggggttccctactgcatcatcaagggcaaggcccggctggggcgcctggtgcacaggaagacgtgcaccaccgtagccttcacacaagtcaactcggaggacaagagtgccctggctaagctggtggaagccatcaggaccaattacaacgacagatacgatgagattcgtcgtcactggggaagc

SEQ ID NO: 1879 - DNA, 279 bp, Bos taurus
  Clone ID: 09-LIB188-010-Q1-E1-C1
acataggggacctcaacatcctcgccgctctcatcgttacagcacagctcaagcaccagtgctcgcacatggcggccaagctttcgtttcgacacacggcttacaatctcggtcatcggctgatccaatcgttccttgagcttggcggctggcatgaagaaagagtagagcatagacacgccctgggacagcatagtgatctccaacttatgttctgtcttgaagtagtcgaggaactgtttgagggtcatctcctcaccgttaggctgcaaaccctgt

SEQ ID NO: 1880 - DNA, 397 bp, Bos taurus
  Clone ID: 09-LIB188-011-Q1-E1-C1
gccatgggcgcgggataccttgaccattgtcctcagtctagacagaaggtctagtccctaccatagggaagctgaggggtagcaggagacccactgagacccaatcccaacactgaaacctgccaggctcccctttactcctccccaggtccttccagcgggaggacctgcaagggcaagcccaccttggcttgattgcctggcaactgagaccctgctctggggaagggaagaggtcagaggaagccctgcagagggctggggaggtggggcccatctctgagcaatcagagtaggaggaaagaatgtatgtgcctgatggagaaagggatcggcatgctgggaggtgagggacttatctggggtgctccttcctcctccgtttgtggtcacagac

SEQ ID NO: 1881 - DNA, 399 bp, Bos taurus
  Clone ID: 09-LIB188-013-Q1-E1-C1
accgaccttacctggcaccaatgtccatatatgaagtcatgtatagctgctggcatgagaaacctaaaggccgcccgacgtttgctgagctgctacaggttcttacagagattgcagaaacctggtgacctaaagggactgccaacccagaggatcatcctgcaggactgtcatgaaaggaaaccctgggtgaagtcactgatggtgaatatcaccctttagagccactgactctaagaaacagtgcaaagattacaggcttttccaatttgttaaagcttgagagtattctgacaataacttttctacatatatgtttgagagtgacttctaaacttggactattctataatattctttatgtctcatgcatgaagaatgaaaaaattgctccatagt

SEQ ID NO: 1882 - DNA, 438 bp, Bos taurus
  Clone ID: 09-LIB188-013-Q1-E1-C9
ccatggccgcgcggataccgtgccttgtttttgacactctcctggtcgtcatacgccacccactggttgcccttggtggcataggggacctgctggtcacggaatctgtgggtggcggctccgtggaggaagtcacagatctcataataggcaaggatccctttctccttggtgaactggcctggaattcctggccctgagatgggggctcccacatctgtcttggaagaggccagagtgtagctcctcccaaaagtggggatacccatcaccagcttattggctggagcccccagcctcagcatgtagctcacagcgtagtcagcgttactgaatctgtcagaacttgcatcttcctggcctcgaaacagggggctgtggtgtccgactgtctggcgccaggctccgtgaaagtcatacgtcaaaaggctgatgaag

SEQ ID NO: 1883 - DNA, 341 bp, Bos taurus
  Clone ID: 09-LIB188-014-Q1-E1-C1
acgtggagacctcggccaaagacacggggccaaacgtgggacaaagggtgttcctttggaccctcaattgagagaagatcaaggacaaaagaaaaatgtcagaaaacaaagataagaatgggaagaaaagcaacaaggaacaagaaaagttttaaaggaaaagatgttgcttactgtgaaagccaagtgctggacaagtggtcgccactgaggaccgagggcgggttctttgagaaaagacttccgttgacctctcaccctgtcccgtgctccccaacctccttcacacacacttccgtaaatggggaaaaatatctgtgactcgttggctggcagaagaa

SEQ ID NO: 1884 - DNA, 270 bp, Bos taurus
  Clone ID: 09-LIB188-015-Q1-E1-C1
acctcaccaaagacttgggcacacacttgtccaagccctggtcatcgcgagcacacaaggcacagagtctggatttcgggtcagccccaggggcacagctctgactaaagaattcatcaaatgcgcaggagcctgtctggttgacgatcaggcccatggggatgttcctgcctgcagtcctgtccacggcggtgtggcacgacttcttgtctttcagagaattccatgtgagcccctcatttgctttcttgacaactgccacggcaaggt

SEQ ID NO: 1885 - DNA, 451 bp, Bos taurus
  Clone ID: 09-LIB188-015-Q1-E1-C9
gccatggcagcgggatacagccccgaatctaccttagaggggatcctcaaaaacccaagagcggagtctttgaacagcaggtccctctggccgggtggagagccaaaagggctggaagctccgagacttgttttttccaaatttctcctgcgccttgctgagaagcttccagatcaagtcttccttgccatccacacttcgggccacgacagcatgagaagggacctgggccaggtggcactccttgaacgcatccactggcgcccgactgttgttcaggcagagaagctcatactggtccctgtcagccttctctggcaagttctcaaacactgtcgtctctttaacaaaagccacgtctccagccccgtcctgcagacacttgaaggcaccagaataaccgaagtatggttcccgggaggagcaggcacactggttctccccctccccc

SEQ ID NO: 1886 - DNA, 458 bp, Bos taurus
  Clone ID: 09-LIB188-017-Q1-E1-C9
gccatggacgccggatacgcgctctcagccgaggtcaagaaccggctgcagtccaaatatgaccctcagaaggaggcggagctccgaagctggattgagggactcactggtctctccgttggcccagacttccagaagggtctgaaggatgggatcatattgtgcacactcatgaataagctgcagccaggctcagtccctaagatcaaccgctccatgcagaactggcaccagctagaaaacctctccaacttcatcaaggccatggtgagctacggcatgaatcctgttgacctgtttgaggccaacgacctgtttgaaagtgggaacttgactcaggtgcaggtgtctcttcttgccctggctgggaaggccaagacaaaggggttgcagagtggtgtggacattggcgtcaaatactcagagaagcaggagcgaaactttgatgatgccaccat

SEQ ID NO: 1887 - DNA, 380 bp, Bos taurus
  Clone ID: 09-LIB188-019-Q1-E1-C1
acttgttcacttctggtaggttctgtcttggccaggggcagattgatccgtgggccccggggagagtctttgtgtctgatcagtctacaaggtagactcactctctctcctggtgggaaaaggcaccatgcgaagccacaaggcatctggtgcagaaaggttgtgagagcaacactgcaacgtggaaactgtagcgtttcattttcccccttcatgttctgatgtttgtgcatgtatattactgatttctcagaactaaccttcgttcctatgtagagttgcgccattgctgttttacatctttcggggagataagaaggcatctgcgaagtctgtcacctttccagattcatgactgtctttggaagggcacccacgac

SEQ ID NO: 1888 - DNA, 450 bp, Bos taurus
  Clone ID: 09-LIB188-019-Q1-E1-C9
ggccgcgggatactgggggatccccacgccaaagggcagcccctcgcaggagatgggcgtccagctgggccagccaggggctgaaggacattcgacttctatttttgtatttaaatgacatgaatgtaaacggaacagctcagggtcgtttcagagcctgttgactttttatctcttcctgtgattttctgttgtgaacagaaactccatgtagcaacctggactgaattgagaaagaaaacgccaaatgctttggggattaacgctaagtaggagagctttgtgaccttatgtgttagagtttcagaacgtttttctgtttgctaaaccttgaagaaatgtgtgcctcagtctagatgttttgtcttctctcttctgcactgaatacctgagggtttgaccaatcgacgcacctctgcggggggtggggctggctcgcgggggctctga

SEQ ID NO: 1889 - DNA, 410 bp, Bos taurus
  Clone ID: 09-LIB188-020-Q1-E1-C1
cggactacttgaataaagaaattaaaaatgccctcaaggaggtgaaacagataaagacccaattagaacaaaccaatgaaaagcgcaaattactgctcagctccctagaggaagccaagaagaagaaagaggacgccctgaatgacaccagggattctgaaaacaggctgaaggcgtcccagggggtgtgcaatgagaccatgacagccctttgggaggaatgtaagccctgcctcaagcagacctgcatgaagttctacgcgcgggtgtgcagaagcggatcgggactggttggccaccagcttgaggagttcctaaaccagagctcccccttctacttctggatcaacggtgaccgcatcgattccctgatggagaatgaccgggagcagagccacgtgatggacgtc

SEQ ID NO: 1890 - DNA, 407 bp, Bos taurus
  unsure (256): unsure at all n locations; Clone ID: 09-LIB188-021-Q1-E1-C1
gacactgtataaactggacatcacccctctccttgggaaaacgcactgggctgtttgagaacaagcaagcctttaagggcaaagtaatttccaaaaacaggagagctaagttcccgaagactaagccagacagatgcagctatgtgtaaattgtatatttttaagaactactgaagcacgcaccggtcactcgctctgcgtagctttgtgagggtttgatgtaaataagccgcctgtgagagtcccgaggtggganggacaagaggacatgagagcagagactccgtggagcctttgaaggtgaccggataactgtcttcactgtgaccaattggagcccctgaagaaggggctttcatacctcgttggagacgccacctccagagttcacactgcacaggataaaa

SEQ ID NO: 1891 - DNA, 413 bp, Bos taurus
  Clone ID: 09-LIB188-021-Q1-E1-C9
tggcggcgggatacttcattgtggaagagttagcactaagcaggaaacctttccatgctgtgaagaagctgggacagaaggttcttccttgagtgtgaccatcttcacttcagctcaggagccctgttggctgaagtgtagggcgtcctttctgattcctgaagtagatgaagagccccaccgcaaggaagagcagacccagaacgaagcccccgactccactcatcatcttgctctgagcagagtcagaccgtgccctccattctactgtgatagggcttgtctggctggggtgctccacttggcaggtgtagacctctccactctgaggaactgtttcaagcatcaccatggtctggaaggtccagtctccattctggattaggcctgtggagatcaccccaacctcctct

SEQ ID NO: 1892 - DNA, 398 bp, Bos taurus
  Clone ID: 09-LIB188-023-Q1-E1-C1
ctgctcagcacacgggcctagctggaactggaagtgagcaaggcccagcagctggctgaggtggaggtgacgaagttcaagcagatgacagaggccctggggcccagcaccatcagagacatggctgtggcacggccggacatgcaggtaaaattgctgcagaccctgggcctaaaatccaccctcatcaccgatggttccacgcccatcaacctcttcaacacagccttgggtttgctggggctcggggcttatgcccaacccccatccaagaagctcaccgggggaaccatcctccaagatggcttgcttcccatctccactgctgcccccctaactcttgtaaacaaccatgttgtgccttagctctgtaccactgacggcacctgctcacactc

SEQ ID NO: 1893 - DNA, 298 bp, Bos taurus
  Clone ID: 09-LIB188-024-Q1-E1-C1
ccatgaccggcgggatgctctggagtaagtcccgcccagcatcagctcgcccccgggctgggctttcgggtccctgttcaggaagaaggagaagacgttcttgtccaccaacttctgctgcatcaggttgtcgaagacaggcagcacgttgttgacggagatgcgggggtaggccatgcccagaatgccgtcgaacttggccgcgatgaagaccacaccgggctgcttgatggcctccccgaaggtctgcctctgcaccgtgacgccacccgggctggatgaggatgggttacagggt

SEQ ID NO: 1894 - DNA, 426 bp, Bos taurus
  unsure (324): unsure at all n locations; Clone ID: 09-LIB188-024-Q1-E1-C9
tggtccaggtcataccttaaacagagggtctgtgattccctgaatagtctctctggcgttacttaacactttagcaacccaagcgccccccggtcccctttgggcaacgtcataatttccgcgggcatgggagtatttgtctgcacccttgtaattggcttctttcatgtcttgggaagctctccacatgtctttagccccttgaccagcttccttgaggaatgtcccccatccctggctgctgatgcccaggattaggaagcagaaaatgatgcccgtggaaaggttcatcctgtggccgtgccctcctgctgaagctcctgntgaagctgagctgccacctgcccgggcggccgctcgaacctgctcttctgcatggagaacagtgctgagcccgagcaaagcctggcctgccagtgcctggtc

SEQ ID NO: 1895 - DNA, 421 bp, Bos taurus
  Clone ID: 09-LIB188-025-Q1-E1-C1
gggcgcgggacaccagctgatccccagacggcgtctcctgtgaagatgtcaacgagtgcatcacgggcggccagagctgccggctcggggaaacctgcgtcaacacagcgggctccttccgctgccagcgcgacagcagctgcggaactggctatgagctcacagaggacaatgactgcaaagatattgacgagtgtgagagtggtattcataactgcctccccgattttatctgtcagaatactctgggatccttccgctgcagacccaagctacagtgcaagagtggctttatacaagatgctctaggcaactgtattgatatcaatgagtgtttgagtatcagtgccccatgccctgttgggcagacgtgcatcaacacagagggctcctacacgtgccagaagaacgtgcccaactg

SEQ ID NO: 1896 - DNA, 415 bp, Bos taurus
  Clone ID: 09-LIB188-025-Q1-E1-C9
gcccgggacaccgaccatacctagcaccaatgtccatatatgaagtcatgtatagctgctggcatgagaaacctaaaggccgcccgacgtttgctgagctgctacaggttcttacagagattgcagaaacctggtgacctaaagggactgccaacccagaggatcatcctgcaggactgtcatgaaaggaaaccctgggtgaagtcactgatggtgaatatcaccctttagagccactgactctaagaaacagtgcaaagattacaggcttttccaatttgttaaagcttgagagtattctgacaataacttttctacatatatgtttgagagtgacttctaaacttggactattctataatattctttatgtctcatgcatgaagaatgaaaaaattgctccatagtcgtcttt

SEQ ID NO: 1897 - DNA, 421 bp, Bos taurus
  Clone ID: 09-LIB188-026-Q1-E1-C1
ggccgcggcatacgctgagtttaattcagctgccggatgagctcattgatgcgttcacctcgatagcctggtgagcccacttccttgaggaagcccactctattcttggtagcgtgacgggccactgagagttggaaagggcgtaggaaccttgagatcgccaggaaattcttccccgggaaggcaatttcatgaatgaggtcttccaagcaaatgacatcaaacttccccaggtgttcctcaataactgtgttgtctgtcagagggatgaccttgttcttgaccttcgcttgtccacgtttcaagatgagttcccgaacagacttcagatttggaaatccccaggtcacataaggttccacgatacgaagcgtctttatggtttcaggggtcaccttcacaaagacaccactgaaaatct

SEQ ID NO: 1898 - DNA, 272 bp, Bos taurus
  Clone ID: 09-LIB188-027-Q1-E1-C1
gatacgatgagtacggcactccatcgtccaacgcaaaatgctctaaggggactgttacctgcgttaaaccctttttcttgacaaaacctaacttgcgcagaaaacgagatgagattggcatggctttatttgtttttttttttgtcttttttgattttttttttttttttggcgcttgactcaggatttaaaaactggaacggtgaaggtgacagcagtcggttggatcgagcattcccaaagttctacagtgtggccgaggacttgattgt

SEQ ID NO: 1899 - DNA, 379 bp, Bos taurus
  Clone ID: 09-LIB188-028-Q1-E1-C1
cgccatgtacccgggatagacgcccatcgccgacacctcgggggtgccctccatcccccagacccacagcccgcagcactgggaacagccggtctacacacagctcaccagaccctgagaagagctcgcacggggcgggggcccacgatgctggccgtgatgatcgcagaaggaacccaagaaacaaacgcgcgaccctttggacattttttttttccttctctctctctctcgttttttttttattttttattttttatttttaagacaacgttacgctgaaggcgactcggacgcagattcccaagacactaaacgttgagctatccagacgcatcaccgccttgtcgttagaccggtggccagcccactcttggct

SEQ ID NO: 1900 - DNA, 359 bp, Bos taurus
  unsure (122): unsure at all n locations; Clone ID: 09-LIB188-028-Q1-E1-C9
ccccgattcaaatccgttccaagtgaccttgggttccactctgttgggcactgttcttgggaattgtggtattccaccctatttagaccttgcttttccaaaaatgagttgaatgagacaangtttgaaactggaactactctgagatacacctgtcgtcctggctacaggataagttcaagaaagaactttcttatctgtgatggaacagacaattggaaatacaaagagttttgtgtcaaaaaacgatgtgaaaacccaggagaattacttaatgggcaagtgatagttaagacagattactcttttggatcagaaatagaattcagctgttcagaagggtatgtcttaattggctc

SEQ ID NO: 1901 - DNA, 268 bp, Bos taurus
  Clone ID: 09-LIB2809-001-Q1-E1-C1
agtgacaatgagcatctaaggacaaatcgccaagggtgcatcaatggcgcacagtacttgtaacccctgctcaatgtcggtgatggcgcttttaatgcaggagtgcttgctggatcatcgaagtcttgagtgtcaggatcatgacacccatgaaacgtcacatccttacctgtcgtgtagctgttgctcgtgcgagttctgatcagccgatcaagcagcagggactccctcaacaagtcctcattgaagatttactcacgatttttgt

SEQ ID NO: 1902 - DNA, 432 bp, Bos taurus
  Clone ID: 09-LIB2809-002-Q1-E1-C9
tggccccgggatacagtggcaaactcacaggggagaagagtttccatccatgtcaaagtccaggaatcctgatgaagaaagtttgtttactgtaagagcttcaattatcatcaaggaaagctcctatgaagaatgtgtcctgctgcatccggaacctccttcttggccaggagaaagatgtagaggtttccataccagcctccttcttcccaaggctgactccctggatggtggctgtggctgtcatcttggtggtcctaagacttctcacaattgggtccatattttttacctggagactatacaaggaaagatccagacagaggaagaatgaattcagctctaaagagaaactcctggaagagctcaaatggaaaagggctacattgcatgcagtggatgtgactctggattcagatactgcccaacccc

SEQ ID NO: 1903 - DNA, 395 bp, Bos taurus
  Clone ID: 09-LIB2809-003-Q1-E1-C1
gttaccaacattgatgccccaggacacagagacttcatcaaaaacatgattacaggcacatcccaggctgactgtgctgtcctgatcgttgctgctggtgttggtgaatttgaagccggtatctccaagaacgggcagacccgtgagcatgcccttttggcttacaccctgggtgtgaaacaactaattgttggcgttaacaaaatggattccactgagccaccctatagccagaagagatacgaagaaattgttaaggaagtcagcacctatattaagaaaattggctacaaccccgacacagtagcatttgtgccaatttctggctggaatggtgacaacatgctagaaccaagtgctaatatgccatggttcaagggatggaaagtcacccg

SEQ ID NO: 1904 - DNA, 260 bp, Bos taurus
  Clone ID: 09-LIB2809-003-Q1-E1-C9
catggccaggcgatactcgtcggccaaggcggccaacgacatctccctgctggacgcccagagtgcccccctgagagtgtatgtggaggagctgaagcccacccctgagggcgacctggagatcctgctgcagaaatgggagaacggtgagtgtgctcagaagaagatcattgcagaaaaaaccaagatccctgcggtgttcaagatcgatgccttgaatgagaacaaagtccttgtgctggacaccgactacaaaaagt

SEQ ID NO: 1905 - DNA, 433 bp, Bos taurus
  Clone ID: 09-LIB2809-004-Q1-E1-C1
ccatgaccgccggatagacgaatcagacttgacaagccaatcattcacattgtaggactcgtggaacacctggaataagagcttaaacttctcactggtggtttcacagccgccattctcaggcttctcaagcttatgggattcctggggagttaccagccactcagaaagatcgatctcatcttgatcaagaggctctagatctccaaccttttcaatttccatggagtaagaactggtagtagaacagctgttagacttttggaaacttggtttttcagaaacttcttgttgctgactcttgtggagccagttttccaaaccctttaggttgccccagactttattcaggaaactgcaggctctagcagaggtctgactgttctccaaggtctgcttgtggttgagccagtcctggagattggtgttgggt

SEQ ID NO: 1906 - DNA, 453 bp, Bos taurus
  Clone ID: 09-LIB2809-005-Q1-E1-C1
ccatggcagccggatacagcacgctggtgggacaggatgtggccaagtttatgaactggatggcggatgaatttaactatcccctgggcaatgtgcatctcttgggatacagccttggggcccatgctgctggtattgcaggaagtctgaccaataagaaggtcaacaggataaccggcttagatccagctggacctaacttcgagtatgcagaagctccaagtcgcctttctcctgatgatgcggattttgtagacgttttacacacattcaccagggggtcaccaggtcgaagtatcggaatccagaaaccagtagggcatgtggacatttaccctaacggaggcactttccaaccaggatgtaacattggggaagctctccgtgtgattgcagagagaggccttggagatgtggatcagctagtgaagtgctcccatgaacgttccgttc

SEQ ID NO: 1907 - DNA, 481 bp, Bos taurus
  Clone ID: 09-LIB2809-005-Q1-E1-C9
tgctcgccgagccatggccaccggatactgttctttaacggatttttctgagctttctaccactcaagcctcgcccccacccctgaactaggcggctgctgacccccaacaggcattcacccactaaaccccctagaagtcccactgctcaacacctctgtcctattggcttccggagtttctattacctgagcccatcatagtttaatagaaggggaccgaaagcatatattacaagccctatttatcaccatcacattaggagtctacttcacactactacaagcctcagaatactatgaagcaccttttactatctccgacggagtttacggctcaactttttttgtagccacaggcttccacggcctccacgtcatcattgggtccaccttcttaattgtctgcttcttccgccaattaaaatttcattttacttctaaccaccacttcggctttgaagccgctgcctgatactgac

SEQ ID NO: 1908 - DNA, 226 bp, Bos taurus
  Clone ID: 09-LIB2809-007-Q1-E1-C1
ataacgactttgttcccactcaagggctcgatcctgaccaccgcagggatcgtggttttttctgcacatgatgctcctctgagcaaactcactagtactcacaggtctgcagcatgatctccatgtccccctcaggggtgggcttcaacgcgtccacatactgctctcatgggggcactctgggcgtccaacacgcagatgtcgctggccgcgatgcccaaggact

SEQ ID NO: 1909 - DNA, 401 bp, Bos taurus
  Clone ID: 09-LIB2809-007-Q1-E1-C9
cgccatgggcccgggatacagcagaaaggcctgaatgggcatatctctctggggatagggcactgctttctggggaacaggcaggactttggacggagaaagggacagcacggactgaggaggaaacatgacagttggaggaagaggctggtgaggctggtgcatccaagactggagcagaggcagaggaaggtgcagattttcaagctttttttttttttttttttttttttttttttttaatagtgccttaaaatgtaatttattgaaaagaagaaagacaaaatctcagttaatgcacacaattatttgatatgatggcacttacaggagaagtgattcaaaggcttttaaaacattttccatacagaaatttaatgaagactttaattccctttgac

SEQ ID NO: 1910 - DNA, 411 bp, Bos taurus
  Clone ID: 09-LIB2809-008-Q1-E1-C9
tactactgaaattaaggtaacaagctgttaggacaatttcacttaaggatgttacactatctaaaatacagtagagaactcaagaagaaagagtgccttcaatttgagattgccctattcgaaaacagcagttgaagcctttggatagaatggtttgacatgatagatgaaaagacatgtagagcatggaattttcagaaccatcaaagaccataactgtggagtccctcagaattcacttgactcttcaccacagtggcatagtagtcttttcactgttctcagagccaatgggattagggatgtcagagaatgatggggcatcagtgtactgtgtgcctagtggaacgtaataccaggcaccagatggataggcatccagctggtagaattgtccgaaaagctcagggt

SEQ ID NO: 1911 - DNA, 372 bp, Bos taurus
  unsure (327): unsure at all n locations; Clone ID: 09-LIB2809-009-Q1-E1-C1
gatacagcagaaacgcctgaatgggcatatctctctggggatagggcactgctttctggggaacaggcaggactttggactgagaaagggacagcacggactgaggaggaaacatgacagttggaggaagaggctggtgaggctggtgcatccaagactggagcagaggcagaggaaggtgcagattttcaacatcagtgagagtcaggctctggctttcagtaaagggctcaactggatatttagggaagggcatttctttgtgcttaggagccatagcctccttcactttggagactcccattacttcagactgaaggaaaggcngcaccaccacaggggtttgagtaacaggggggatgttttgtggga

SEQ ID NO: 1912 - DNA, 366 bp, Bos taurus
  Clone ID: 09-LIB2809-011-Q1-E1-C1
agcagaaaggccagaatgggcatatctctctggggatagggcactgctttctggggaacaggcaggactttggactgagaaagggacagcacggactgaggaggaaacatgacagttggaggaagaggctggtgaggctggtgcatccaagactggagcagaggcagaggaaggtgcagattttcaacatcagtgagagtcaggctctggctttcagtaaagggctcaactggatatttagggaagggcatttctttgtgcttaggagccatagcctccttcactttggagactcccattacttcaggctgaaggaaaggcggcaccaccacaggggtttgagtaagacgagggatgttttgtggg

SEQ ID NO: 1913 - DNA, 361 bp, Bos taurus
  Clone ID: 09-LIB2809-011-Q1-E1-C9
cccaatagtgctgaggaacgacttcacagtatgaaagagggaatccatgcccaacagaaagaacctatgataggagtgaatcaggaactggcctacttctaccctgagcttttcagacaattctaccagctggatgcctatccatctggtgcctggtattacgttccactaggcacacaatacactgatgccccatcattctctgacatccctaatcccattggctctgagaacagtgaaaagactactatgccactgtggtgaagagtcaagtgaattctgagggactccacagttatggtctttgatggttctgagatttccatgctctacatgtcttttcatcaatcatgtcaaacca

SEQ ID NO: 1914 - DNA, 409 bp, Bos taurus
  Clone ID: 09-LIB2809-013-Q1-E1-C1
actaccagaggatgttggtggtcctccttcaggctaatagagaccctgacgctagaattgatgaagcacaggttgaacaagatgctcaggctttgttccaggctggagaactgaaatggggaacagatgaagaaaagtttattaccatctttggaacacgaagtgtgtctcacttgagaagagtgtttgacaaatacatgactatatccgggtttcaaattgaagaaaccattgaccgggagacttctggcaatttggaacagcttctccttgctgttgtgaaatccattcgcagtatacctgcctaccttgcagaaaccctctactatgctatgaagggagctggaacagatgatcataccctcatcagagttgtggtttccagaagtgagattgatctgtataacat

SEQ ID NO: 1915 - DNA, 338 bp, Bos taurus
  Clone ID: 09-LIB2809-016-Q1-E1-C9
ttctatagtgtcacccaaatcgtgagtgtatgctacataaggctatgttttaattgtagccgcgttctaacgaaaatatgtacaagctaattgtgtatcagctggcttacatgaagcagacgcgatcatctctctcgtaaactgccgtcatagtccgtttggttagacgaaccttctgagtttctggtaacgccgtcccgcacccgggaatggtcaccgaaccactcagcaaggtcatcgctaaccagatcctcgacgccggaggcatcgtggccggcattaccggcgccacaagtgcggtttctggcgcctatatcgccgaaatcaccgattgggaa

SEQ ID NO: 1916 - DNA, 156 bp, Bos taurus
  unsure (54): unsure at all n locations; Clone ID: 09-LIB2809-017-Q1-E1-C9
atggcagaggatacgccttgaagctaactcatctctgagccctgggccctgtantgacaatggacatgtaaggactaatctccaggggtgcatgaatggcgctctggacttttgacccttgctcgatgtccctgatggcgcttttaatgcaacagt

SEQ ID NO: 1917 - DNA, 330 bp, Bos taurus
  Clone ID: 09-LIB2809-019-Q1-E1-C1
cgcttcccgctggcatctcggcagagaactccatgcctagcaggcagttccgagaggcccaatttcctgggatggcgtcgggggacagcttgcccgtggccagcatgatgtcgcggaagttgagggaggcataatagatggtgcagagctggaagccaggggccgtgggctggctgtggcgcagaggggagcagacccagcggatggaagacaggtcccctcgggtgaggacatttatgaaggcatgctctgtctgctcctcgggcttgtcttgttccagtgggaagtggcggaacgctccgcaggccccatcacggtagacattcatca

SEQ ID NO: 1918 - DNA, 256 bp, Bos taurus
  Clone ID: 09-LIB2809-020-Q1-E1-C1
tcacatagggaataacctttgtcttacgttgaatccatggcttcatagctttctgatgctgataaacagtcttgagatactggggcaaggcgaatttctggtgacgctggctgatttttttcagaagatttaggcgattcttttcctcgtcagtcagttgagttttcgtagtgaagacttctgttgattccgggtcggaggtcttcggtgaattttcctcactggtggagagctgctcccggtgcagagtgggagt

SEQ ID NO: 1919 - DNA, 354 bp, Bos taurus
  Clone ID: 09-LIB2809-022-Q1-E1-C9
acaagcttatttattttttttttttttttttttcgcatttgattggctttattatgcaggaatcaaaaaattaaatctggcataaaagtaaaatgttagaagagaccaagaaagagccagatctgtgaaaatcaaattccctgttcaccgaagggagacaactggccaaaggaaagtttgaagtagtcatttggtttcagctagacctgcgttgtcttctttgatgtctccttagagtttttagactgcagtttaagtaacttggactgtgttgatctcaggtgggctctcaataacttctggagaatcttctagagtagctacagtgctctctactgcttcggtggtaagtgt

SEQ ID NO: 1920 - DNA, 121 bp, Bos taurus
  Clone ID: 09-LIB2809-023-Q1-E1-C1
aatcactgtatagtaagcatatctgttttcaattttcttatcaattctgatataatattcactgttattattactgtctcagttcagttcactttactgaggtcagttatgttcaactctt

SEQ ID NO: 1921 - DNA, 412 bp, Bos taurus
  Clone ID: 09-LIB2809-025-Q1-E1-C1
gccatgggcccgggatacaactaactttggagttgatactaatagaaattattccaaaattattcttaagtcacaaataactactatcccacataaaaagggaaaaatcccacccaattaaggaaaatgtatcctgtgtatgtttccatggcaatgagtttatgcattctcagattttgtccggctagttatccaccctttatctgatgcatttattccatctctcagagagaaccatatagattcctgacagcatccaggacacgtggctcgtggtggacacacttcatggtggatactgctactatcaaaatactcagaacttaagagaattccaagatgctttataaaaagcattagtcatgcctcaaaactgccctttgaggtaggtcacgtataatatcccatttta

SEQ ID NO: 1922 - DNA, 384 bp, Bos taurus
  Clone ID: 09-LIB2809-027-Q1-E1-C1
caactgaaggtgaataatcactgcacagaaagcaaatctgttttcaattttcttagcaattctgatataatattcactgtaatcaaaactgcctcagttcagttcagttcagtcactcagtcatgtccaactctttgtgaccccctggaccgcaacacaccatgactccctgtccatgaccaacacccgaagcttgctcaagctcatgtccattcagtgatgccatccaaccatctcatcctcttcctcttctcctctcctgccttcaatctttcccagaatcagatcttttccaatgcatcagttcttcagatcacgtggccacagtattggagtttcagcaaaagtctttccagtgaatattcaggactgatttcctttacg

SEQ ID NO: 1923 - DNA, 385 bp, Bos taurus
  Clone ID: 09-LIB2809-027-Q1-E1-C9
gcagaaaggcctgaatgggcatatctctctggggatagggcactgctttctggggaacatgcacgactttggactgagaaagggacagcactgactgaggatgaaacatgacagttggaggaagaggctggtgaggctggtgcatccaagactggagcacaggcagatgaaggtgcagattttcaacatcagtgagagtcaggctctggctttcagtaaagggctcaactggatatttagggaagggcatttctttgtgcttaggagccatagcctccttcactttggagactcccattacttcaggctgaatgaaaggcggcaccaccacaggggtttgagtaagacgagggatgttttgtgggacgctgttacggatgggccc

SEQ ID NO: 1924 - DNA, 220 bp, Bos taurus
  Clone ID: 09-LIB2809-028-Q1-E1-C1
aaaattttattccaacaagtttttatcttttgtagtagtatctttaggaaacacaggtcattctgttttttctgttcctttgaagatttattctcttccaaattcttagtgggttgagcttcactcagggaaagtggttttcttcccttacccgtgctggtgcagttacacagtgtaaatgtgccctgtgaaactgttgataggtgaagcttgaaatcgt

SEQ ID NO: 1925 - DNA, 472 bp, Bos taurus
  unsure (453): unsure at all n locations; Clone ID: 09-LIB2809-030-Q1-E1-C1
gcatgcccccagccgccaagggcccgggataccctctaggggacaggaggataatgttgtctgcagccagcccgctcgaaacctaagccgccctgatggtttagaagaccctgaggatagtaaagaagatgagaaggtgcccactgctcctgatcctccaagtcagcatttacgtgggcatggaacaggcttttgctttgatcccagctttgatgttcagaagaaatgtccactctgtgaattaatgttccctcccaactatgatcagagcaaattcgaagaacatgttgaaagtcactggaaggtgtgcccaatgtgcagcgagcagttccctcctgactatgaccagcaggtgtttgaaaggcatgtacagacccattttgatcagaatgttttaaattttgaccaattaactttggaataaggagttaataatacagtttaacagttaanaaaaaaaatcacctcaaat

SEQ ID NO: 1926 - DNA, 366 bp, Bos taurus
  Clone ID: 09-LIB2809-032-Q1-E1-C1
cgccaagggcccgggatactgggctatcaccccactgcggacccctctcccactggctggacccccccgccgggttggggtcttccttgactatgaatcaggagacatcttcttctacaacatgactgatggatcccatatctatactttctccaaggcctctttctctggccccctccggcccttcttctgcttgtggtcctgtggtaaaaagcccctgactatctgcccagtcactgatgggcttgagggagtcatggtagttgctgatgccaaggacatttcaaaggagatcccactgtcccccatgggggaggactctgcctccggggatatagaaaccctccaatctaaactaatccctct

SEQ ID NO: 1927 - DNA, 451 bp, Bos taurus
  Clone ID: 09-LIB2809-032-Q1-E1-C9
catgcgccctaccgccatgagcgcgggatacctctggacctctaacaccatgtaggtgagtgagttcaaaccatcagagagcattgtctcctttgtatgtgcaattcggtcaaacctctgaggattaggttcatttttcttgtctctcgagtggcggatcatccgacacttcccgatcacagcatttgggcgagacacagacatgcctctaaaagctaatctgttataaatgtcatcatcttcacctccccagccccagtagttattaggaaatccattgatgctgagaaactgttgtttacttagagcagagacacctccaaaatactgcacgtaaggtaggctaaatccaaacttatccattgctacagaaatgtgccgtggctgtgaaaagcacctgtaggtgttatggtcgttcattgggatgaggtccacatcgctaaacacaaag

SEQ ID NO: 1928 - DNA, 270 bp, Bos taurus
  Clone ID: 09-LIB3057-001-Q1-K1-C1
gagaaaccctattaatgtcatgaatgtgttaagacttttagccatggctcatccgttactcgacatcaaataagtcacagtggagagaaaccttacaaatgtattgaatgtggaaaagcctttagccatgtctcatcacttactaatcatcaaagcactcacactggagagaaaccatatgaatgtatgaactgtggaaaggcgtttagtcgcgtttcacatctcattgaacatctgagaattcatactcaagaaaactctatgaatgtc

SEQ ID NO: 1929 - DNA, 383 bp, Bos taurus
  Clone ID: 09-LIB3057-004-Q1-K1-C1
ctgaggtacaccgaaagcacatcatggggcaaaacgttgcagattacatgcgctaccggattgaggaagatgaagatgcttacaagaaacagttctctcagtacataaagaacaacgtaactccagacatgatggaggagatgtataagaaagctcatgctgcaatacgagagaatccagtgtatgagaagaagcctaagaaagaagttaaaaagaagaggtggaaccgtcccaaaatgtcacttgcccagaagaaagatcgggtagctcagaagaaggcaagcttccttagagctcaggaacgagctgctgagagttaaaccaaactacaattttctatcaacattttttagataagaataataaacttattgaacaagcat

SEQ ID NO: 1930 - DNA, 355 bp, Bos taurus
  Clone ID: 09-LIB3057-004-Q1-K1-C9
gtacgttctttcctagtcgacattaacttgaaaggacggacagttattgtgaagggcgccaggaggcaccctgcggagggacttcaatcacatcaatgtagaacttagtctccttgggaagaaaaagaagaggctccgtgttgacaaatggtggggaaacagaaaggaactgtccactgttcgcacaatctgtagtcacgtacagaacatgatcaagggtgttacactgggtttccggtacaagatgaggtccgtgtatgcccacttcctcatcaacgttgatattcaagagaatggttcttatggggaaatccgaaattttttgggtgaaaaatacatacgcatggttcgaatg

SEQ ID NO: 1931 - DNA, 389 bp, Bos taurus
  Clone ID: 09-LIB3057-006-Q1-K1-C1
atttgaaataactcagctggaattccatcacctccactagctttgctcctagcaatgctgcctaaagcccactaaacttcacactccaggatgtctggctctaggtgagtgatcacactatcgtggttatctgggtcattaagaaattttttgtatagttcttctatggattcttgccacctctttttaatatcttctgattctgttaggtccataccttttctgtcttttattgtgtccatcaccaatttccgagcttgctcaaactcatgtccatcaagtcagcgatgccatccaaccatttcatcctctgtccccttctcctccttgcttcagtacttcccagcatcagggtctggtttcaaggagtcagttcttcacatcaaggg

SEQ ID NO: 1932 - DNA, 429 bp, Bos taurus
  Clone ID: 09-LIB3057-009-Q1-K1-C1
gtccgaccggaggagtcgctctccccgcgcggtgcattctggggagccaggtcgagcgcgccgccgccgtcgcttgaggaaagcgagaagaggccgcgactggggagaagacgccggagtcgccaccggagaggagtcgcctgcccaggagctgccgccggagaggcccgccaacccgttcgcccgtccccctgccccgtttcacgatgcaacctgcttctgcaaagtggtacgatcggagggactatgtcttcattgaattttgtgttgaagacagtaaagatgttaatgtaaattttgaaaaatcgaaacttacattcagttgtcttggaggaagtgataattttaaacatttaaatgaaattgatctttttcactgtattgatccaaatgattccaagcataaaagaacagacagatcgattttat

SEQ ID NO: 1933 - DNA, 327 bp, Bos taurus
  Clone ID: 09-LIB3057-010-Q1-K1-C1
cggacgcgtgggtgcggccgctcccgggtcggtggacgcaatggcggcccagaagagagcctccgagagatccaagtacctggcctcggcgagcaccatggaccacgccaggcacggcttcctccccagacacagagacacgggcatcctcgactccctcggccgcttctttggctcggacaggggtgcgcccaagcggggctcaggcaaggatggacaccacgcggccagaaccacccactatggctccctgccccataatgcgcaacacggccggcctcaagacgaacaccctgaagtgcacttgtttaagaacatcgtgacacc

SEQ ID NO: 1934 - DNA, 324 bp, Bos taurus
  Clone ID: 09-LIB3057-012-Q1-K1-C1
ttcccggtcgaccacgcgtccggagcttcctggtgaagtgtgtttcttgaaatcatcaccaccatggacagcaaaggttcgtcgcagaaagggtcccgcctgctcctgctgctggtggtgtcaaatctactcttgtgccagggtgtggtctccacccccgtctgtcccaatgggcctggcaactgccaggtatcccttcgagacctgtttgaccgggcagtcatggtgtcccactacatccatgacctctcctcggaaatgttcaacgaatttgataaacggtatgcccagggcaaagggttcattaccatggccctcaacagc

SEQ ID NO: 1935 - DNA, 410 bp, Bos taurus
  Clone ID: 09-LIB3057-013-Q1-K1-C1
gtcaaagccaaaatccaagacaaggagggcatcccacctgaccagcaacggctgatctgcggttgccaacaactggggggtgggccgactctgtcaaattacaatatccaaaaagagtccaccctgcacttggtgcttcgtctgcgaggcggcatcatcgagccttcccttcgccagctcgctcagaaatacaactgcgacaagatgatctgccgcaagtgttacgcccgcctgcacccccgtgctgtcaactgccgcaagaagaagtgtggccacaccaacaacctgcgccccaagaagaaggtcaaataaagctcttccacctgcttctcctttgcccgcagggcggcctcctgcccaagccccgtggtcctgggcctcaataaagtttccctttcgttgactggagc

SEQ ID NO: 1936 - DNA, 320 bp, Bos taurus
  Clone ID: 09-LIB3057-014-Q1-K1-C1
gacagaccccctgacaaatcccatgtctctttgtcccagagacttccacctcctgacagagtactgtcagctgtggtccagaccctggtagctaaagaaaaagcactgaggcccgtggaccagaatactcagtcaaaaaatagagctgctttggtgatggatctcatagacctaactcctcgccagaaggatcgggcaggttcaccccatgagctcacaccacaggctgatgagaagatgccagtgttggagtcgagctcatggcctgccagcaaaggtctaggacagataccacgagcttgtgaaagaggcagtgtgtc

SEQ ID NO: 1937 - DNA, 388 bp, Bos taurus
  Clone ID: 09-LIB3057-014-Q1-K1-C9
tccagggccaaccctttcaaacgcacaattgaaatagtgggggaacagtatactcctgaaaatcttgctaccttgaaatctgtcttccaagagctggggaaactgacgggaccaaacagccaaaagcgtgagagggctgatgaggagcaaaaactttacacagatgatgaagatgatatctacaaggctaataacattgcctatgaagacgtggttgggggagaagattggaacccagtagaggaaaaaatagagagtcaaacccaggaagaggtaagagacagcaaagagaatgcagacaaaactgagcaaatcaatgatgaaatgaagcgttccgggcagctgggccttcaagatgaagatcttccggaagagagtaaagaccaac

SEQ ID NO: 1938 - DNA, 374 bp, Bos taurus
  Clone ID: 09-LIB3057-015-Q1-K1-C1
atccatgacctctcctcggaaatgttcatacgaatttgataaacggtatgcccagggcgggaggttcattaccatggccctcaacagctgccatacctcctcccttcctacccctgaagataaagaacaagcccaacagacccaccatgaagtccttatgagcttgattcttgggttgctgcgctcctggaatgaccctctctatcacctagtcaccgaggtgcggggtatgaaaggagccccagatgctatcctatcgagggccatagagattgaggaagaaaacaaacgacttctggaaggcatggagatgatatttggccaggttattcctggagccaaagagactgaaccctaccctgtgtggtcaggac

SEQ ID NO: 1939 - DNA, 253 bp, Bos taurus
  Clone ID: 09-LIB3057-016-Q1-K1-C1
ctatggttacgtggatgcagcgtataaaccaggcatgtccccggaggagtgcagacgcgtcacgacaaatgcgattgccctggccatgaagcgggacggctccagcgggggcgtcatctacctggccaccatcacgggcgctggggtggaccatcgcgtcatcctgggcgatgagctgccaagattctatgacgagtgaatctccttcctcggactctccttctttattttgtaataaactttctggaaccag

SEQ ID NO: 1940 - DNA, 258 bp, Bos taurus
  Clone ID: 09-LIB3057-017-Q1-K1-C1
cggacgcgtgggatcgacaggaagcaatcgactggcttctgggcttagctgttagacgtgagtatggagataatgctgaaaaatacaacaaggacttggtacctgataatacaaaaaatgctgacaatgcagctaaaaatgcagagccattgatcaatttggatgtaaataatcctgattttaaggctggtgtaatggctttggctaaccttcttcagattcagcgtcatgatgattacctggtaatgcttaaggcaa

SEQ ID NO: 1941 - DNA, 272 bp, Bos taurus
  Clone ID: 09-LIB3057-017-Q1-K1-C9
gcaggttataaaaagcggaataacgtgctccactgcctgcgcagggattcaagcaagattgacagttaccttaagctggtgaattgcataatcatctacaacaacaactgctaagcccacattcatcctatccatttctgagatggttcttaatgatccattccctggcaaacttctctgagctttatagctttgtaatgcatgcttggctctaatgggtttcatcttaaataaaaacagactctgtagcgatgtcaaaaataaaaaaataa

SEQ ID NO: 1942 - DNA, 456 bp, Bos taurus
  Clone ID: 09-LIB3057-018-Q1-K1-C1
gttacagcaaaaatttgaagcaatggacttaccagtgttacagcttcgtgttacagctcagttttgttaagaaagcaaaagagaatatatccgtgaagtgttaaaaggagtcgacttaaaagactcaaagagaatagaagcccccaacttaattttgggttcccctttcaaaaggttttttttccttcccttgggctttcccatattaatttggcttaacaagaattccttttggtttaaccgaaggttcttaaattctgttcttaaaacttttcttggtttgtgttttcaaaggttttttcttttttgggttttaattattttttttttttaattttatttttttattttttactcttttataatttttttattattttttatattagttatattttgtcatgtggttttttttaattttatttttttttagtttaatattttttttattttatt

SEQ ID NO: 1943 - DNA, 376 bp, Bos taurus
  Clone ID: 09-LIB3057-019-Q1-K1-C1
gggagttggtagggggagctgaggcagcgagaaggttcctgaagctctcggattctcgcggctgagttagggattcaactgccaccatgtcgagcaaaagagcaaagaccaagaccaccaagaagcgcccccagcgcgcgacctccaacgtgttcgccatgtttgaccagtcccagattcaggagttcaaggaggccttcaacatgatcgaccagaacagggatgggttcattgacaaggaagacttgcatgacatgcttgcttccctgggaaaaaatccaactgatgagtatctggatgccatgatgaacgaggctccaggtcccataaattttaccatggtttctcacaatggtttgggtgaaaaaggtttaaa

SEQ ID NO: 1944 - DNA, 324 bp, Bos taurus
  unsure (111): unsure at all n locations; Clone ID: 09-LIB3057-020-Q1-K1-C1
ccccagatgctatcctatctttttccatttacatcgaggaataaaacaaacggcttctgtaaaatttggagattaggtttacccacttaattcctatatccaaatatactnatccctaccctattttatcaatactcccttccctgcaaactaatgatgaatatgcacgttattccgctctttataacctgctccactgcctgctcatggattcaagcaagattgacacttaccttaatctcctgaattgcataatcatctacaacaacaactgctaatcccacattcatcctatccatttctgagaatatccttaataatcca

SEQ ID NO: 1945 - DNA, 260 bp, Bos taurus
  Clone ID: 09-LIB3057-021-Q1-K1-C9
cccggatggacccactcgttcgaggtacttgaccaataatctgatttttttttggaaaatggaattacccatgattagaaggcgatatccaggtgctgaatgtgctgagaatgctgatgatcccaacaaagatacatgtgaaaatgcatatggcctaagtgatgaaaacaaggaggactatacaatcccagatgagtatagaattggaccatataatcccaatgttcctagtgctatagactatgtgatacctatttcag

SEQ ID NO: 1946 - DNA, 272 bp, Bos taurus
  Clone ID: 09-LIB3057-025-Q1-K1-C1
ctagatcgcgagcggccgccctttttttttttttaatcattttttttttctttaatagggacggttaaacggtatgcccagggcaaagggttcattaccatggccctcaacaactgccatacctcctcccttcctacccctgaagataaagaacaagcccaacagacccaccatgaagtccttatgagcttgattcttgggttgctgcgctcctggaatgaccctctgtatcacctaatcaccgaagtaccgggtattaaaagagccccaaa

SEQ ID NO: 1947 - DNA, 349 bp, Bos taurus
  Clone ID: 09-LIB3058-001-Q1-K1-C1
agattcctgctttttattagtactgtattctttgcacacatttcaatgtgaaacagatgtcagactgagtccagcatttattagctttcatagtgatgccttatcatcgaaagaggcttaaggaacgatgagttgatattcttggcattgcttgaatcagatggttccacctagtctttttattctgtaaatcatcagtcttttccagtgtttgtttacacagatagatcgtattcttactaacccatatgacactagaactttatcagatatgatatgagatccaagctttattccacaaaaatcggattaatgaaattatattaccagtcacagggaaacaatttgg

SEQ ID NO: 1948 - DNA, 428 bp, Bos taurus
  Clone ID: 09-LIB3058-003-Q1-K1-C1
cgaaaccagaggtggccggagctacagccaaggaccactgacatgtctgagttagagaaggccgtggtggccctcattgacgtcttccatcaatattccgggagggaaggtgacaagcacaagctgaagaagtcagaactcaaggagctcatcaacaatgaactttctcattttttagaggaaatcaaagagcaggaggttgtggacaaagtcatggagacactggacagtgatggggacggcgaatgtgacttccaggaatttatggctttcgttgccatgattaccactgcctgccacgagttcttcgaacacgaataaggaaaagaaagcagcggagctgtttctgcagcagagacggagtttgaccaggggaacacaggcagggcttgcagggctgtaggagctgagctttccgtgttgtagct

SEQ ID NO: 1949 - DNA, 418 bp, Bos taurus
  Clone ID: 09-LIB3058-004-Q1-K1-C9
gggttcctgtgtcgtcttggaggtgactcggcgtgattgaatttgcggcatcttcgcattcactcacaggtcaaaatgcagatcttcgtgaaaaccctgaccggcaagaccatcaccctggaggtggagcccagtgacaccatcgagaacgtgaaggccaagatccaggataaggaaggcattccccctgaccagcagaggctcatctttgccggcaagcagctggaagatggccgcactctttctgattacaacatccagaaagagtcgaccctgcacctggtcctccgtctgaggggtggtatgcagattttcgtgaagaccctgaccggcaagaccatcaccctggaagtggagcccagtgacaccatcgagaacgtgaaggccaagatccaggataaggagggcattccccccg

SEQ ID NO: 1950 - DNA, 243 bp, Bos taurus
  Clone ID: 09-LIB3058-006-Q1-K1-C1
cggacgcgtgggctcgagcgacgtgcccatggacccactggagatgcacatggacatggatggagactatcccatcgacacctacagtgacggcctcaggcccccctacgcaactgcagaccacatgctggcctagctgcccggacccgagtgcggttccccatctgagaggttctccgtgcaggtgatggggccagatagccaagtgcctgaaccccggcagcatggctgcaacttcctgcg

SEQ ID NO: 1951 - DNA, 355 bp, Bos taurus
  Clone ID: 09-LIB3058-007-Q1-K1-C1
cagacacgtagctattgtgatccgtacgaattcccgacccagaagcaggtcgtctacgaatggtttagcaccagacgccccacgaactttcggtgcgggactgtcgagggggcggtcgcctttacagacgttcactgtgttccgagaccaagggctctccgaaccggaccccgttaacaacgcgcgggggcgtcacgccgcgtcgcgccccgggggacgcgggagaccgcccgttgacaatgacagccaacgaccgaatatacggggccgatccacgtttcctactttctttccaataggtacgactgggcgttattccgacttaacagcgctcaatgttaaccactcttttgga

SEQ ID NO: 1952 - DNA, 411 bp, Bos taurus
  unsure (359): unsure at all n locations; Clone ID: 09-LIB3058-007-Q1-K1-C9
gggaagttggcagtgaggagagactgtctgaagggccgggaaaggcacaaatggcttttctcaaccaaagaaaccagactccggctaagaaagaggagttagtgtccagatatgatacacagtctgccaggggccttgagaagtcgcacagccgggaaaggagcagccaggagagtggagaggagaccaagagccaggagaactggccccaagagctgcaacgccatccggagggccaggaagcacccggagaaagtgaagaggatgccagccccgaggtggacaaacggcgctcgaggccaagacaccaccacgggaggagcaggcccgacaggtcctcccaggaggggaatcctccnctcgaggaggagtcacacgttggcacgggcaactcagacgaagagaaagccc

SEQ ID NO: 1953 - DNA, 345 bp, Bos taurus
  Clone ID: 09-LIB3058-009-Q1-K1-C9
atttcttggtcagaagtttgggcatataaccagattaaaatgaaggaacctcccattgttttgatagcaccgctcagctgtccttgtaaaacagtgtacacacgctttccagttctagtaatcctgggtgtttatcatgttcagagaaactcaagctattgcatgattagccccctgtttggcatgggaaccccatactaaggagacaccaagcctgcaccgaccctcattctgggtcgtctgtggttgtaattcagcatgtttcgcagagtaaatctgtcgtgactttgcttttggttcctatgttattgatttcttattcttttatttacttgctctcttatt

SEQ ID NO: 1954 - DNA, 418 bp, Bos taurus
  Clone ID: 09-LIB3058-010-Q1-K1-C9
cttgtggcatccattataccaccttcaacttcatcatggactgtgacgtggacatccgaaaggacctgcatgccaacacggtgctgtctggcgggaccaccatgtaccctggcatagctgacaggatgcacaaggagatcaccgatctggctccaagctcgatgaacatcaagatcattgctcctgccgagcgcaagtactctgtgtggatcggaggctccatgctggcctacctgtccaccttgcagcacatgcggatcagcaagcatgagtatgacgtagtcggcccctacattgtccaccgcacatgcttctaaatggactgtgagcagatgcgtatcatttgctgcatgaggtaattcataagtataaatgtgccacgggaaatgtatacacctcatgctagccttatgaaact

SEQ ID NO: 1955 - DNA, 343 bp, Bos taurus
  Clone ID: 09-LIB3058-011-Q1-K1-C1
tcggaaatccgtcaagtggaaaagaagagccattcataacagtaaacggtcaaccaacgtggatcatgtgtttttactgccagtattgagaaattcatggaagttgtcagcaggaagtaaaaatttacagagaagggtgtatgtgtttgccgctttcacacattaatggcatgattttttttttttttaacgcaaaaagaaaaaggaaaaaaaaccacccacattttaatttagcatgagccaatttacagagcatggaaattcactttcattcccaggattggcacgtatgcaattagcaatgcagtgtatatacaagaagccatgctggtaacagtttatc

SEQ ID NO: 1956 - DNA, 261 bp, Bos taurus
  unsure (178): unsure at all n locations; Clone ID: 09-LIB3058-012-Q1-K1-C1
gtctcctgtgaagggagaggccaagtcgccagagaaggccaagtctcctgtgaaagaggaggccaagtccccagagaaggccaagtctcctgtgaaagaggaggccaagtccccagagaaggccaagtccccagtagaggccaagtccccagagaaggccaagtctactgcgaaagangaggccaagtcgccagagaaggccaagtctcctgtgaaagaggaggccaagtccccagagaaggccaagtctactgtgaaaga

SEQ ID NO: 1957 - DNA, 441 bp, Bos taurus
  Clone ID: 09-LIB3058-013-Q1-K1-C1
ctcttcctgccacgccaacaacaggcatttcacgtttccagcccatcttccacgctgcggaggctgtgccctgccctcttctctcctgtttcaaaggcattcacaggcctcaggccctgaacaagatctgagcttcagaaggcatctctgcaggctgccagctccgagagcaggatggagtccttggcagcatcatacgggtgctccttggacgggatctccagtacagccggaatggagcgctggtgggcgtcaagggcgtgccgcaccatctctgcaatgtactggttgataaggatgatgccgatgtcatcccggtttagaaactgccggaaagtgtcttcgatctcattgatggtagtatccttctccaccaccaggaaattaaggtggcggttcttgttaagctcccctattgccgccaacaggaagccagtcaca

SEQ ID NO: 1958 - DNA, 254 bp, Bos taurus
  unsure (121): unsure at all n locations; Clone ID: 09-LIB3058-014-Q1-K1-C1
cacagacgaaacctactgcatcgacaattaagcgctgtatgacatctgcttccgcaccctgaaactgaccacccccacctactgggacctcaaccacctggtgtcggccaccatgagcggngtcaccacctgcctgcgcttcccgggccagctcaatgccgacctgcgcaagctggccgtgaacatggtgcctttcccacccctgcacttcttaatgcccggcttcgcccaactgaccagccggggcagccagc

SEQ ID NO: 1959 - DNA, 378 bp, Bos taurus
  unsure (1): unsure at all n locations; Clone ID: 09-LIB3058-015-Q1-K1-C9
ncgcgccctgagctgcagacggacctagagccccctgcccttctccaatagccacaacacgctgaagctgcgcttcccggccgaagatgagttccccgacctcagcggccacaacaaccacatggccaaggtgctgacccccgagctgtacgccgagctgcgcgctaagagcactccgagcggcttcacggtggacgacgtcatccagaccggcgtggacaacccaggccacccctatatcatgaccgtgggctgtgtggccggcgatgaggagtcgtacgacgtgttcaaagagctctttgaccccatcatcgaggaccggcacggaagctataagcccaccgacgagcacaagaccgaccttaaccccgacaacct

SEQ ID NO: 1960 - DNA, 316 bp, Bos taurus
  Clone ID: 09-LIB3058-016-Q1-K1-C1
gttctagatcgcgagcggccgccctttttttttttttttttttttttttttttttttggttttttttttttttttttttttttttctttcttttttttttctcccccacttgtttggggaaaaaaaaaaaaagaaaagtccgggctttggttaagaaatccttattattttttaacaaatttttcttaattattaggaagtataaggaatggggttctgtaaaaaaacagcggggggaactcagcttgaaggaaggggtcttaacttccatgagccaacgccagggggaaatgttacatggggcatagggtaggct

SEQ ID NO: 1961 - DNA, 228 bp, Bos taurus
  unsure (1): unsure at all n locations; Clone ID: 09-LIB3058-017-Q1-K1-C1
nttctggtggatcttcaagggtctcctagggagatcggttggctgtagctcacactccaagcagggacactggtagggaaggccccagcgaatattgatcggcacaagtgcttctggaggtcaccatgttggcgtatagacctggctagaatccaacggcctttaggctccattggtgggaggacacaggccaaagaaccaggagggctctaacccatcatcagatag

SEQ ID NO: 1962 - DNA, 455 bp, Bos taurus
  Clone ID: 09-LIB3058-018-Q1-K1-C1
gagttatatgacaaaggaggagaacagtgcaattaaagaaggtggagcaagtggtggttttggctcccccatggacatctttgatatgtttttcggaggaggaggcaagatgcagagagagaggagaggtaaaaacgttgtccatcaacttacagtaactttagaagatttatataatggtgcaacaagaaaactagctctgcaaaagaatgtgatttgtgacaaatgtgaaggccgaggtggtaaaaaaggagcagtagaatgctgtcccaattgccgaggtactggaatgcaaataagaattcatcagataggacctggaatggttcagcaaattcagtctgtctgcatggagtgccagggccatggggagcggatcagtcctaaagatagatgtaaaagctgcaatggaaggaagatagttcgagaaaagaaaattctagaagttcatattg

SEQ ID NO: 1963 - DNA, 456 bp, Bos taurus
  Clone ID: 09-LIB3058-019-Q1-K1-C1
ctcacgcgtccgctttgaggtcaagtggatatcaactcatacctgagaattaacaatagttagagtctcatttaggtattagttgaaaattttaaatggccggatacatacgaatatccaaatgatctatcatgtcatctagtgcaacaagacaagccagtacttgaggatcatgcttaaaaacttagtgcaaacccacagacggtcttgctcgacctagttaactgccacagtaaaagcaatgtatatggttaggaattgtactaattcaagtgctagtacccttggcatgaactgtcccatgattagcctcagagtcatagtcagctactattcagctcatgatactgctacctaccgtacagagtggggtgtaatcgtgccaatttacaatcaagaagccatcaaaccatatgcagcttaattcatattgaaacctatattgattgcaaaaag

SEQ ID NO: 1964 - DNA, 426 bp, Bos taurus
  Clone ID: 09-LIB3058-019-Q1-K1-C9
ggagaggctggcggcgtggccctgcgtgacttggctgacgcctgtcttcccctacttacacagagtagaggcttctcccgaaagagccagacgttcctgcccaaggtcttcttccgcaaaatgtcatcctcaggggccaaggacaagccggagctgcagtttcccttcctgcaggatgaggagacggtggccacgctgcaggagtgcaagacgctcttcatcctgcgaggcctgcctgggagcggcaagtccacgctggcccggttcatcgtggacaagtaccgggatggcaccaagatggtgtctgccgacagctacaagatcacccctggcgcccggggatccttctctgaggagtacaagcagctggacgaggacctggctgcctgttgccgacgggatttccgggtcctggtgctggatgat

SEQ ID NO: 1965 - DNA, 459 bp, Bos taurus
  Clone ID: 09-LIB3058-021-Q1-K1-C1
atcaaccaaaagagtccatagccagcagaccaaaagctgaaacctctgggctaatttgtaagatatatgttttaaaaagaaattaactccttagtaaggaggaataaaacctcccttatgctttctgtgttggtagaaatgttttctgttgttgttgttttctcctatactgtatgtaacttctgtaatttcaatattgttgttttatgtatttttgatattgtaaaactgttatttattgtattctgttagaaccactccctgggatgtgaggcacctgagttatcagttatccaagtgaacctggggaaatgggaggagctagtattctcaattgggaagagcttgattcttcaatgagtttagcattttggttccctctaaaattaagtgacaaagtaatggcattccttaaaagacagaaagtttgtgggaagtaaaaaaggggttagaaatttg

SEQ ID NO: 1966 - DNA, 371 bp, Bos taurus
  Clone ID: 09-LIB3058-023-Q1-K1-C1
ggaacctcccgctgacacaggctgccctgaaggttcttgcccagaaagccagtgagggccaatctgctgctgccaagaccccgtcttcaagtgggactgacagtgctgtgggaacactctccacggcaagtccccagagcacccctacccaggtcagaatggccaacaagctcagaaagcctgaggttcctacagctcagcaggccacagccactccctcgggacaccccacagccaaggcccctgcaacctcagatgacagcaacagcagctcttcagggagcgaggacgatgccaaggggtcccaagcggccccgtcagcccacaggccaagcccagcccccttcaggaaggagaccttggttggaaga

SEQ ID NO: 1967 - DNA, 442 bp, Bos taurus
  Clone ID: 09-LIB3058-025-Q1-K1-C1
cggacgcgtgggtggactgtaacccaccagactcctctctctgtggatttctccacacaagaaaactgaagtgggttgtcattcccttctccaggggatattcttgacccagaaactgaactcaggtctcctgcactgcaggcagattctttaccatctgagccacaggttctcattgtgtgtttgacccactatgagaaaggcagtataaaattctcagtatacaaactgagagtttaaatacttggtaaatgaatgggtcattaatattagttgcctactatgtgaactcactgttataggcactaaagagacacacaaatttatcattttattgtgcctacagttgagaataggcaataacatacgttagtattttgtgaactctaagagtaccatataagtgtaactattgatttcctcagttggtatgcctaatact

SEQ ID NO: 1968 - DNA, 178 bp, Bos taurus
  Clone ID: 09-LIB3058-026-Q1-K1-C1
cggacgcgtgggcgcccgggctgcggtgaagaggacgctccgtagactcggcgccggccggctccctctccgcgctctgcgaccgccgcggcgaacatggcctcaggagtgcaagttgccgatgaagtatgtcgcattttttatgacatgaaagttcggaagtgctccacgccagagg

SEQ ID NO: 1969 - DNA, 301 bp, Bos taurus
  Clone ID: 09-LIB3058-027-Q1-K1-C1
gggccacgctggctgagcctggggccttgggccaggaagttgctcccacagactctgcgggatggggccacaggacccggtgtctctgggaccagagtgcacgaagatcacacgtgggggccggagggacaagatgggtggactctgcagaagagcgctctgggtgggtgccccgtggccagcctttcccttgcccccatctttcctcttgtcatcagaagaaaggcatgtggaccagaggacttgacttgctgccttaaaaccaataaaaggttaccttgtctaagtgtttttggatcgg

SEQ ID NO: 1970 - DNA, 415 bp, Bos taurus
  unsure (387): unsure at all n locations; Clone ID: 09-LIB3058-027-Q1-K1-C9
gtgagaagatgacccagatcatgttcgagaccttcaacacccctgccatgtacgtggggatccaggctgtgctgtccctgtatgcctctggccgcaccaccggcatcgtgatggactccggtgacggggtcacccacacggtgcccatctatgaggggtacgcccttccccatgccatcctgcgtctggacctggctggccgggacctgacggactacctcatgaagatcctcacggagcgtggctacagcttcaccaccacggccgagcgggaaatcgtccgtgacatcaaggagaagctctgctacgtggccctggacttcgagcaggagatggccaccgcggcctccagctcctccctggagaagagctacgagcttcctgacnggcaggtcatcaccatcggcaatgagcg

SEQ ID NO: 1971 - DNA, 345 bp, Bos taurus
  Clone ID: 09-LIB3058-030-Q1-K1-C1
ccaagggcgagtatcggggtgttctgcactgcgccatggagacagcaaagctggggccgctggccttttacaagggccttgtgcctgctggtatccgcctcatgccccacaccgtgcttacgttcgtgtttctggaacagcttcgcaagcacttttgcatcaaagtgccgtcctgatgtggcggtgggagcagctgggtcacgcccagccccctgcgccagtttattccatagtgccagagggctggcagctgagccctgtcctgagcccagcccctgcccactttgcttctgccccctgctgccaggcccaggacttgtatcccagcctgcctggccagcccag

SEQ ID NO: 1972 - DNA, 389 bp, Bos taurus
  Clone ID: 09-LIB3058-031-Q1-K1-C1
gctaaatgcattcatccatgcatgatttactcatcagacatgcagctgtgactgctaggtgccgcagcactctacaagatgctacataacttgtgttagttatttcagctcttgctatgatggcaaccaaacatggaatgggaaaccttctgctgcccaggagctctttgatgttaaggaggagcgctttctgctccaggcctcctgtttattttaacatggagcctaatccattttctatttcccaaggtttatccctctagctgttttgactttttctgtaatgcatatttttcttttttatttcttattattattattttttttttattttgattttattatttttttatttttttttatttttttattaatatttttttttttta

SEQ ID NO: 1973 - DNA, 414 bp, Bos taurus
  Clone ID: 09-LIB3058-034-Q1-K1-C9
cgaaaccagaggtggccggagctacagctctagaccactgacatgtctgagttagagaaggccgtggtggccctcattgacgtcttccatcaatattccgggagggaaggtgacaagcacaagctgaagaagtcagaactcaaggagctcatcaacaatgaactttctcattttttagaggaaatcaaagagcaggaggttgtggacaaagtcatggagacactggacagtgatggggacggcgaatgtgacttccaggaatttatggctttcgttgccatgattaccactgcctgccacgagttcttcgaacacgaataaggaaaagaaagcagcggagctgtttctgcagcagagacggagtttgaccaggggaacacaggcagggcttgcagggctgtaggagctgagctt

SEQ ID NO: 1974 - DNA, 224 bp, Bos taurus
  unsure (35): unsure at all n locations; Clone ID: 09-LIB3058-035-Q1-K1-C9
taaagcaccgccaagtcctttgagttttaagttgntgctagtacagtctatataccgggatcttcagcaaaccctaaaaaggaaaaaaagtaagcgtaattatgatacataaaaacgttaggtcaaggtgtaacctatgaaatgggaagaaatgggctacattctctacaccaagagaatcaagcacgaaagttattatgaaaccaataaccaaaggaggattt

SEQ ID NO: 1975 - DNA, 329 bp, Bos taurus
  unsure (19): unsure at all n locations; Clone ID: 09-LIB3058-036-Q1-K1-C1
ccggctcgacccactcgtncgtcgtgctcagcctgtgcggcatccctgtggagattgccatcctactgaccgacacaaacttcaaggacttctttctcgtggagagagatgggttcgagtcctggctaacgagtgcatcaagaggttgtgccccgtgcatttccacagcaatggctccgagtatgtgatggccctcaccgctggcaagaacgaaggttacgtccactttgggaccatcacagttttaacagtgaaaacttcatttacctggcggacttccccaaagagcttgccatcaagtacctggtgaactcattccgaggggacat

SEQ ID NO: 1976 - DNA, 390 bp, Bos taurus
  Clone ID: 09-LIB3058-036-Q1-K1-C9
cgacccactcatccggtgctagatcgcgagcggccgccctcataattcttattttttttttttttttttttttgttttttgtaaaattttatattttttttcaaatttattttttttttttcatatttatttactattattattattatttattaaataatacaaatattaccaaaaataaaaaaaaaaaaaaacaaaaaaaaaaaaaaaaaaaacactttatctaaaaaccaaaatgttaaaaaaccccaaaaaaaaaaaaccttaaaaaaaaaaaaaaaacaaaaacccaaaaaaaaaaatataaaaacctaattattaaaaacaaattcataaaaaaaaaaacaaaaaatacaaaaatttaaccaaaaaaataaaaacccaacttac

SEQ ID NO: 1977 - DNA, 323 bp, Bos taurus
  Clone ID: 09-LIB3058-039-Q1-K1-C1
gggcggacgcgtgggttcttcaggttatgcttctggagctccagccgtgtggaggcatggctacaccgaagcttcaggggtgaaaaacaagttgtgtgtggcagccctgtcggtgaataacttctgcgataaccaggaagccctgtacggtgtgtttgacggagaccgcaacgtggaggtgccctacctgctccagtgcaccatgagcgacattctggcagaagagctgcagaaaacgaaggaccgggaagagtgcatggtcaacacgttcatcggtatgcataggaaactgggcacagctgggcagaagctcggaggcgctg

SEQ ID NO: 1978 - DNA, 424 bp, Bos taurus
  unsure (114): unsure at all n locations; Clone ID: 09-LIB3058-041-Q1-K1-C1
ggcgctagaagcgagcggcggctggcgttacacttcaggcccggacactactgcacctaggctcagggctcgtgcctcgtctgctgcaaaccagcctgaacgcctggacacggnccgatccctcatcggcccgagcccacccaggcccagcccagccgagcctgtgcgtccacctgccgcagcctctgccgcagccgccactccatccccaacccgggccccgcatctaggccgccaggatggacgtgttcatgaagggcctgtccatggccaaggagggcgtcgtggccgccgcggagaaaaccaagcagggggtcaccgaggccgcggagaagaccaaggagggtgtcctctacgtcggaagcaaaacccgagaaggggtggtgcaaggagtggcctcagtggctgagaaaaccaaggagca

SEQ ID NO: 1979 - DNA, 419 bp, Bos taurus
  Clone ID: 09-LIB3058-043-Q1-K1-C9
cggactcgtgggcgcgagcggccgccctttttttttttttttttttttttatgtgttgtcatgcagatataggctgactaggagagtgaatacataggcttggattatagctactgcaaactctagaattgttagtaggattagaatggtgaatgtaattagagctgttgtagtgctaatgcttattagtgcaagtgtagctcctccgattaggtgaattaataggtgtcctgcagtgatgttagctgttaaccgcacggcgagggctataggttgaataaaaaggctgatagtttcaataattactagtattgggattagtggagtgggtgttccttgtggtaagaaatgggcaagtgatgctttggttttattgcggaatcctgtaattacggctcctgctcacagggggatggcta

SEQ ID NO: 1980 - DNA, 443 bp, Bos taurus
  Clone ID: 09-LIB3058-045-Q1-K1-C9
attactctgcgaggtgaatcatagaggtatcttgctgtgatttatgtcagagagtgttctgcctatattttcctctaggagttttatagtttctggtcttacagttagatatttaatccattttgagtttatatttgtttatggtgttagaaagtattctagtttcattcttttacatgtggttggccagttttcccagcacaacttgttaaagagaatttcttttctccattgtatatttttgcccctttgtcaaagataaggtgtccataggtgcatggattcatctttgggctttctattttgttacattgatctgtatttttgtctttgtgccagtaccatactgtcttgatgactgtagcttgtagtatagtttgaagtcaggtaggttgattcttccagttccattcttctttctcaagattgctttggctatttga

SEQ ID NO: 1981 - DNA, 353 bp, Bos taurus
  Clone ID: 09-LIB3058-047-Q1-K1-C1
cggacgcgtgggccggaccccttgacgtgctttgtgtccccggggtggagagggggggcgcggtgacaggcctcggtcccgctggccagtgaccagtcgcctgactgggctcctgccccggaccggcccatccctgaagactttacctggtgaccaaaactgttgcctctcctttccttgacctggaaccctcagcagcgatgcgtttcttgactgtcgcgtccctgtccctggcactcagtgcctccgccttgcccgacccggagaaactcagggactgcggttctgggctcggagttctaaaggatgtgaatgtgaccccatgccccacccagccttgcaaactgcacaga

SEQ ID NO: 1982 - DNA, 412 bp, Bos taurus
  unsure (27): unsure at all n locations; Clone ID: 09-LIB3058-048-Q1-K1-C1
ggatacttgggactacacaaaccccanattcagtggacaaggtgaccctggcagcaacggtaacaaacgccagaggcagccccctctactgggagatcaccccgcagaatatggagggccccacggtgggtaccacagccattaccatgatgagggctacgggccccccccacctcactacgaagggagaaggatgggcccaccagtggggggtcaccgccggggcccaagtcgctacggcccccagtatggcaccccccaccccctcccccaccacccgagtatggcccccacgccgacagccctgtgctcatggtctatggcttggatcagtctaagatgaactgtgaccgggtcttcaatgtcttctgcttgtatggcaatgtggagaaggtgaaattcatgaaaagca

SEQ ID NO: 1983 - DNA, 444 bp, Bos taurus
  Clone ID: 09-LIB3058-051-Q1-K1-C1
tcgagtagaccatatgttttacatactatacttagaagctaagtaactagatctaagaaacatacaggatttcaatagatgatttagtcacagatctctggaatagttcataaaatattttaaagggtttgtttaagcgtgatgtttaagcatttttggccagaatgttttttatatatgcaggaaaggtttgaagcagttgtactagaaaccaatctttattttttaccccactactaggtaagggacctggaaaccaagaagtgactgctcattcaatccataaagctatgttaacagattggaggtagtagcattttcattaccagtgactgaaattacacctgtttactccctgatcaagcaggagtacttgctattcctgaaaatcttgtccttaggttcaaactgaagttgtgggaggtgatggacatttgagaagcc

SEQ ID NO: 1984 - DNA, 433 bp, Bos taurus
  unsure (337): unsure at all n locations; Clone ID: 09-LIB3058-052-Q1-K1-C1
gaacgtgacggtgcagaacgtgctacttatcctggaggcggcggacaagacgcaggccctggacatgaagcggcactgcctgcacatcatcgtgcaccagttcaccaaggtttccaagctgcccacgctgcgctcgctgagccagcagctgctgctggacatcatcgattcgctggcctcccacatctcagacaagcagtgtgcagagctgggggccgacatatgagggcccaaatgatgctgccctgcccgctgcagaccgtgccggtcacacttgggcctgcagcttaggggtccagtgtccagagccttccgaagggagctgagtggacacggnggtgtcccaaaccccccatctcattgctgaggatacacgtcccccaggaaacggacagtgaagcaggtctctggcttgcagcctttcccaggtggg

SEQ ID NO: 1985 - DNA, 436 bp, Bos taurus
  Clone ID: 09-LIB3058-052-Q1-K1-C9
gacgattgccatatgaacttcaggactatgttgaagatacatcagaatatgtagctcctcaggaaggaaattttgtttataagctgtttagcctgcaagacctgttgttacttgtgcgatgcagcgtccagaggatagagaccagaccacgttctaaaaaacggaagaaaatcagaagacaatttccagtttatgtactaccaaaagtggagtatcaagcttgttatggagttgaagctctgactgaaagtgaactctgtcgcttatggactgaaagtttattgcattccaactcctcattttatgttggacatattgatgcatttacatcaaagcttttcctgcttgaagaaattacctcagaagaattgaaagaaaaactttcagcactcaagatttcaagtttatttaacattcttcaacacattctaagaaa

SEQ ID NO: 1986 - DNA, 413 bp, Bos taurus
  Clone ID: 09-LIB3058-053-Q1-K1-C9
agagtttactcaatttaggagccattttctttattacaacaattatcaacataaagccccccgcaatgtcacaataccaaacccctatgttcgtatgatccgtaataattaccgccgtactactactactctcgctacctgtattagcagccggcatcacaatgctattaacagaccggaacctaaatacaaccttcttcgacccggcaggaggaggagaccctattctatatcaacacttattctgattctttggacaccccgaagtctatattttaatcttacctgggtttggaataatctctcatatcgtgacctactactcatgaaaaaaagaaccattcggatatatgggaatagtttgggctataatgtcaatcggatttctaggtttcatcgtatgagcccaccat

SEQ ID NO: 1987 - DNA, 353 bp, Bos taurus
  Clone ID: 09-LIB3058-057-Q1-K1-C1
tgctcttcttaggtctctggacctatcttttgttcgtcggctcagtgcttgctgaccaatgagcgggctgccaccaagaacaacgatgtgcatgtcgaagccgactcatcccgggcggtcatcaagttcagcttttagtccatcttgtgctggtacgtgctggactctctggtctaccagcgctacaaggctggagtgggcgaattcatacaaaactacgcggaccccactgcggacccgagcacggcctacgcctcctacccaggcgtgcctgccgacacctaccagcagccggccttcacccagaacgccgagagcaccgaaggctaccagcctgcccctgtgtactgagc

SEQ ID NO: 1988 - DNA, 405 bp, Bos taurus
  unsure (345): unsure at all n locations; Clone ID: 09-LIB3058-057-Q1-K1-C9
cggacgcgtgggaacaagtctgtctctagatcatttagctagagactttctaaaccatttctgttttgattaggctttagtttttagagcaggtttaggttcacagcaaaaccgagtggaaagcccagagttcgcgtgcagccttgacccggcggatgcacagcctcccccgctctcagtgtccagcccagtttggtccgtttgttgcagttggtgaacctcactgagagtccatagttcacttctgaggtcactcttagtgtatattctgtgaattttgacaagtgtagtgacttgtcctgaaataattttttaagtgttcaggatgatgaaggcatatagcangaatgtagaaggcactaataaaaggtagtaattgtttatatttgtaaatagatgtaaata

SEQ ID NO: 1989 - DNA, 423 bp, Bos taurus
  Clone ID: 09-LIB3058-058-Q1-K1-C1
gaaattcttaattcccctgaccgtgcctgcatgttggcaaaagcagcttttgatgatgcaattgcagaactggacacgctgagtgaagaaagctataaggactctacacttatcatgcagttgttacgtgataatctgacactatggacttcagacatgcagggtgatggtgaagagcagaataaagaagcgctgcaggatgtggaagatgaaaatcagtgagacataaaagccaacaagagaaaccatctctgaccaccctagaccttcccatcccacccctcttggaagttcccccattgtcactgagaaccaccaaatctgacttttacatttggtctcagaatttaggttcctgccctgttggttttttggtattttcttttttaaacagttttcaaaagttcttaaaggcaaaagtga

SEQ ID NO: 1990 - DNA, 368 bp, Bos taurus
  Clone ID: 09-LIB34-002-Q1-E1-C1
cacgcgtccagtatcagatcgcgagcggccgcccttttttttttttttttttttttttttttttaatgattaagaagactttattagactcaattacacatatgatggtttatctagctctcacttaaatttttaaaatttgcttgaaaaatgatttcacattgatttttatttcttttgggaagctcccatgttgcagttgactggacttaccttgaaaggaactatttttggtggcttcaagagtaacgaccctgtgcccaaagttgtgactgacttcatggcttagaagtttttattggatcagtcaattacgcatgtgttaggacttgtaatacataaacgaaagatgtgacatgcttcgctct

SEQ ID NO: 1991 - DNA, 398 bp, Bos taurus
  Clone ID: 09-LIB34-002-Q1-E1-C9
acgcgtcagcaaagttaaacctaagccaaaatgggaaaggagaagacccacatcaacatcgttgtcattgggcacgtagattcagggaagtctaccacgactggccatctgatctataaatgtggcgggatcgacaagagaacaattgaaaagttcgagaaggaggctgccgagatgggaaagggctccttcaaatatgcctgggtcttggacaaacttaaagctgaacgtgagcgtggtatcaccattgatatctccctgtggaaatttgagaccagcaagtactatgttaccatcattgatgccccaggacacagagacttcatcaaaaacatgattacaggcacatcccaggctgactgtgctgtcctgatcgttgctgctggtgttggtgaatt

SEQ ID NO: 1992 - DNA, 394 bp, Bos taurus
  Clone ID: 09-LIB34-003-Q1-E1-C1
ctcaggtcatgggaacattaggccttccagtccagactggggcacctttagagaggaaggaagtgtaagttcagggacaaagcaagagttccacacaggtaaacttgtcactactaaaggagataaagagcttctgattgataatgagaaggtcacctctggtcacacaactaccactcgtcgttcatgctctaaagtcattacaaagacagttacaaatgccgacggtcgcacagaaacgaccaaagaagtggtaaagtctgaagatggttctgactgcggtgacgcggacttcgactggcaccatacttttccttcgaggggtaacctagatgatttctttcatagagacaaggatgatttcttcacccgtagttcacacgagtttgatggt

SEQ ID NO: 1993 - DNA, 398 bp, Bos taurus
  Clone ID: 09-LIB34-003-Q1-E1-C9
ctatagtgagtcgtattaatatcaggttgagaacaaaggatcagaatccagagagctggtcaaagcactccagatcagctgtgcccctggtcaaccatcaaagccaagtgacatagagagtgctagcaagaattccaagagtacgatggaagaagttatgacatatgacacactgatatcaacacatgaatcaacaattcgatttttgcaagaactatataactcagatagtcaaaaaatcgttaagctaagagataaagtggtccagcttggggcagactgtcaggagccttgtcaagatacagtgaacatacatgatgtaactgcgagagattgccaagatgttgccaataaggggggcaaaggagagtggactttaagttagcagacctctgaaa

SEQ ID NO: 1994 - DNA, 360 bp, Bos taurus
  unsure (300): unsure at all n locations; Clone ID: 09-LIB34-004-Q1-E1-C1
catgagggctctgctgctcctgggggccctgctggtgagcctggagtcaacggtttcgactccaccttggaagggccccaagaagcataagctcacagagagtgagcacacagtggttctcactgtcaccggggaaccctgccacttccccttccagtaccaccggcagctgcatcataaatgcatccacagaggccggccaggcccccgaccttggtgtgctactacccccaactttgagaaggaccaacgatgggcatactgcctggagcccaagaaagtggaagaccactgcaacanacacaatccctgccaaaaaggaaggaccctgtgtgacatgccggatgggccacgctgcat

SEQ ID NO: 1995 - DNA, 414 bp, Bos taurus
  Clone ID: 09-LIB34-005-Q1-E1-C1
cagccctgacctaggacagtgaatcgataatggcactctccatcacgcggggccttctgctgctggcagccctgtgctgcctggcccccatctccctggctggagttctccaaggacacgctgtccaagagacagatgatacatcccaccaggaagcagcatgccacaagattgcccccaacctggccaactttgccttcagcatataccaccatttggctcatcagtccaacaccagcaacatcttcttctcccccgtgagcatcgcttcagcctttgcgatgctctccctgggagccaagggcaacactcacactgagatcctgaagggcctgggtttcaacctcactgagctcgcagaggctgagatccacaaaggctttcagcatcttctccacaccctcaaccagccaa

SEQ ID NO: 1996 - DNA, 370 bp, Bos taurus
  unsure (304): unsure at all n locations; Clone ID: 09-LIB34-006-Q1-E1-C1
aaacccttcacctgaaaataatctgaatacacctattttcctttcctcctagattacacacaaaacaaaccataactgttccattctttggactattgaacttctaaagtgtgccttcttattcaccaactttgttttgctgttccatcactacatcatttgcttattgtggacatgatcttttaaaacataccaccatgctgagctgtctgttgggtatataattgtctttaatgtttagaatctgactacttggcggtcgtttaatgtgctcatctttcagactcaagttgtctgacgtaangacgggtgtccttgggtcaattcttgtgctgcttcatctaattgaatcatcagattttgcatgttt

SEQ ID NO: 1997 - DNA, 398 bp, Bos taurus
  Clone ID: 09-LIB34-006-Q1-E1-C9
ggaaccaccattacatcggtactaccaaagccaggcctagtagcatctcgagttgaggtttccaaagtccttatcctaggatcaggaggtctgtccattggtcaggcaggtgaatttgattactcgggatcgcaagctgtaaaagccatgaaggaagaaaatgtcaaaactgtcctgatgaacccaaatattgcatcggtgcaaaccaatgaagtgggcttaaagcaagcagatactgtctactttcttcccatcacccctcagtttgtcacagaggtcatcaaagcggaacggccagatgggttaattctaggcatgggtggccagacagctctgaattgtggagtggaattattcaggagaggtgtgctcaaggaatatggtgtgaaagtcctggg

SEQ ID NO: 1998 - DNA, 416 bp, Bos taurus
  unsure (394): unsure at all n locations; Clone ID: 09-LIB34-008-Q1-E1-C9
ccaagagaagagctgctcaccagggatgaacaaattgccagagatgtggtgcattgtcctgttttcccttgtggcctgggtttatgccgagcctactatgtatggagagattctatcccccaactaccctcaggcataccccaacgaggtcgagaagtcttgggacatagaagtccctgcagggtacgggatccacctttacttcacccacctggatatagagttgtctgagaactgctcctatgattcagtgcagataatgtcgggaggccatgaagaagggaaactctgtggacggaggaccaacaagaattcaaactccccagtggtgaaagagttccacatcccatacagtaaattgcaggtgatcttccggtcggacttctccaacgangagcgtttcaccgggtttgctg

SEQ ID NO: 1999 - DNA, 312 bp, Bos taurus
  Clone ID: 09-LIB34-009-Q1-E1-C1
gagtttgcaaaaacatgtgttgctgatgagtcccatgccggctgtgaaaagtcacttcacactctctttggagatgaattgtgtaaagttgcatcccttcgtgaaacctatggtgacatggctgactgctgtgagaaacaagagcctgaaagaaatgaatgcttcctgagccacaaagatgatagcccagacctccctaaattgaaaccagaccccaatactttgtgtgatgagtttaaggcagatgaaaagaagttttggggaaaatacctatacgaaattgctagaagaaatccctacttttatgcacca

SEQ ID NO: 2000 - DNA, 382 bp, Bos taurus
  Clone ID: 09-LIB34-010-Q1-E2-C1
cacaaaactttggcacaatgaagtgggtgacttttatttctcttctccttctcttcagctctgcttattccaggggtgtgtttcgtcgagatacacacaagagtgagattgctcatcggtttaaagatttgggagaagaacattttaaaggcctggtactgattgccttttctcagtatctccagcagtgtccatttgatgagcatgtaaaattagtgaacgaactaactgagtttgcaaaaacatgtgttgctgatgagtcccatgccggctgtgaaaagtcacttcacactctctttggagatgaattgtgtaaagttgcatcccttcgtgaaaactatggtgacatggctgactgctgtgagaaacaggagcctgaaag

SEQ ID NO: 2001 - DNA, 305 bp, Bos taurus
  Clone ID: 09-LIB34-011-Q1-E1-C1
agcacttccatccccagaccagccaagcctgtgagtgacaccccagacagaggaaccagagccatgcggagtctcagcggactgctgttgttactgactgcctgcctggcagtaaacgccagctccgtgcccacattgcccgatgacattcaagtgcaggagaacttcgacctgtctaggatctatgggaagtggttcaatgtggccgtgggctccacctgcccatggctgaagaggttcaaggagaagatgaacatgagcacagtggtgttgaaagcggggccgacgagcaaggagatcagcgt

SEQ ID NO: 2002 - DNA, 386 bp, Bos taurus
  Clone ID: 09-LIB34-013-Q1-E1-C1
ccacgcgtccgaaaacttatctttctctaaaggtgattattctaaagtcaggtgccaccctccaaaaacattagataaagttgtattcctatacggcaaaagtgtggtacgctataacaagaaaagaattaactcaacggtccaaggttacaaacattaaaactactacttacatttctatataccaactatattaatcaatacactcccagggacacagtacgtaagggatatggaaacttggcagcaagcattagctcaaaaaagaaatcctctactagttctattctaataattttaactctctgagaatctctgcattattagaatatcttaagcttcacgtgcctctcgtggttgggaggctatgaacaatcacatgcata

SEQ ID NO: 2003 - DNA, 364 bp, Bos taurus
  Clone ID: 09-LIB34-013-Q1-E1-C9
gtccaatgacgaacagggagcccagtccagagctggaccccgcgcggtcacggactctcgggagcggctctcagggtccggtcgcccggatctagcgagcgcgtgcggagcggctctggatctcgggaccgatcacgtcttgacaggggcagagacatggcgcgcagctgaaatgaacctcaggaaattgtccttgagcgcgatgccggccttactatccaatatagacgattgggtatcactgaagaagtccgtggacacgacctgaagatcagaatttcagagaaaagcgatagtcccaacagaaggaccttcaggagctcagtcacttgggcgtacagtatttgctcgagccccactttgt

SEQ ID NO: 2004 - DNA, 409 bp, Bos taurus
  unsure (387): unsure at all n locations; Clone ID: 09-LIB34-014-Q1-E1-C1
aagagacaacactctcttccctagcccagccaggtgtagccattacctttcctgactttcaggactcagatctcattgcaactgtgatgcctaatacactaccacctcacacagagagtgatgatgactggatccctgacatccagacagagccaaatagccttgcatttaaattgatttcagattttccagaaacaacctcccccaaatgtcctagtcgcccctggaagccagttaatggagtgaatccaactgtggaaatgaaagagtctcatgattttgatcttgttgatgctcttctttaatttaggcagccaggggtatttctttaacatctcaatcaaccctggtcccattgtccaaagatcctcatataatacaacaaanaccatgaacattccagacagcc

SEQ ID NO: 2005 - DNA, 416 bp, Bos taurus
  Clone ID: 09-LIB34-015-Q1-E1-C1
ggtcattaagatgttttgttttagtttctttagcctgtaggggccgattttagtactggttttcaatattttatagtacaagacaagttgctttggtccatttcataagccagaattccttatatttagataattaaaggttcttaaagtgaagatttactgtttctttgttacttgctggtacagctaaagtttgttttacttgcacatttgtacatatacctaatgttttcaagtgccttaattgtttaaaatctctggcttcaaaggtttttgggaaaaggtaggcttacctcacatttttgtgtttctctcagtagtgatattctaggtacctcacaaaaatttttattatggtgccatggctgttagcttttagtaattgctttaagtacaaaattcagttggaaatacac

SEQ ID NO: 2006 - DNA, 411 bp, Bos taurus
  Clone ID: 09-LIB34-015-Q1-E1-C9
cataaatcaacaattcgatttttgcaagaaatatataactcaaatagtcaaaaaatcgttaacctaagagataaagtggtccagcttgaagcaaactgtcaagagccttgtcaagatacagtgaaaatacatgatgtaactgggagagattgccaagatgttgccaataagggggccaaagagagtggactttactttatcagacctctgaaagctaagcagcagttcttagtctactgtgaaattgatgggtctggaaatggatggactgtgtttcagaagaggcttgatggcagtctggatttcaagaaaaactggattcaatataaagaagggtttggacatctgtctcctactggaaacacagaattttggctgggaaatgagaagattcatttgataagcacacag

SEQ ID NO: 2007 - DNA, 424 bp, Bos taurus
  Clone ID: 09-LIB34-016-Q1-E1-C1
ctcctgcatccaggcagatggtgactgcggatccatccccacctcccgctctcacaggcagacatgagggcagagagactgtcccccctcctggctctggggctcctggtggctgggatccgcagtgtccactgcctcccagagaatgtggtggtgaaggaccagcgcagaagggtggatggccacacgttagcctctagcaacaccgacttcgccttcagcctctacaagcagttggctttgaagaaccccaataagaatgtcatgttctccccgctgagtgtctccatggccttggccttcctgtctctgggggcccgtggccccaccctgacagagatcctggaaggcctcaagttcaacctcacggagatccaggagacacagatccaccagggcttccagcacctcctgcaggcgctca

SEQ ID NO: 2008 - DNA, 413 bp, Bos taurus
  Clone ID: 09-LIB34-017-Q1-E1-C1
gaagaagaagtgaagcagccatccagccttgcccaatttgacttcctctccctccgcccttcatttcctctttgcacacattacaggtggcgtgttctgtgataatgaaaagcatcagaaaagcttttgtactttgtggttttctctattttgaattttttgatccaaaaaactgattagcagaatatagtttggagtttggcttcgtattcctggggtttttccctgctttcgttttctgtcagcccccacccttagccccttcctctcctcaagcagccagcccaccgtgagaaggagcggggtctgcagcagaggcaagctccaagagtccgctctccggccgagcttcaccaagaggacctggactgtttggtaaagacgcctcgggccttccttcctcaacggtgttt

SEQ ID NO: 2009 - DNA, 379 bp, Bos taurus
  Clone ID: 09-LIB34-018-Q1-E1-C1
attccgagtcgacccaggcgtccgaagcaagcaacctatggttactacctaggaaaccccacagagtttcaggatacctcagatcatcacacctttaaaaagatgctgccacgggatgagagaaggttcaaggctgcagagctcgatagtgaccagacagccacccgggaggagttcaccgcctttctgcatcctgaggagtttgagcatatgaacgaaattgtggttttgggaactctggaggacatcgacaagaatggggacggctttgtggatcaggatgagtatattgctgatatgttttcccacgacgagagtgggcctgaggccagactgggtactgtcagagacggagcactttaatgaattccgggatttg

SEQ ID NO: 2010 - DNA, 303 bp, Bos taurus
  Clone ID: 09-LIB34-018-Q1-E1-C9
gccccggctgcacggagagtggtcgcattggctgagccagaacgtgatggccgggctacgtgcgcgcgctgccgcgacgcaaagatcaagggtaccgcctacaactgcgcggtcagccgggagctcagcagtggagtctccggatatgcaacacaccgccgagcgctggagcgtgtcgctgtacctcaagcacttcagccccgaagagctgaccgtcaagaccgatgaccgtgtagtggagattactggcaaacagtacgaaaggtaggacgaccacgggtagattacgcgttgcttgactcg

SEQ ID NO: 2011 - DNA, 368 bp, Bos taurus
  Clone ID: 09-LIB34-020-Q1-E1-C9
gtgataatcaagatacaatctccagtaaactgaaggaatgctgtgataagcctttgttggaaaaatcccactgcattgctgaggtagaaaaagatgccatacctgaaaacctggccccattaactgctgactttgctgaagataaggatgtttgcaaaaactatcaggaagcaaaagatgccttcctgggctcgtttttgtatgaatattcaagaaggcatcctgaatatgctgtctcagtgctattgagacttgccaaggaatatgaagccacactggaggaatgctgtgccaaagatgatccacatgcatgctattccacaagtgtttgacaaacttaagcatcttgtggatgaacctcagaattt

SEQ ID NO: 2012 - DNA, 395 bp, Bos taurus
  Clone ID: 09-LIB34-020-Q1-E2-C1
tttctggattccggaatgagtgtgcctcagaggaccctcgttgcccaggtgccctgccacaaggacagaataatcctcaagtttgcccctacaatctgtatgctgagcagctctcacgatcagctttcacatgtccacggagcaccaataatagaagccgagagtataagattcaaccttcagtttctcacaagccttttgagttcagtgaccaaggccacatcactcacaactgggatgaaattgatcctgatcctatccagctgcgatggaaatcatttgagattccaaaagcttctcagacgaaagtggacttcgtgaatggcctgcacaccttgtgtggagctggagacatcaggtccataaatgggcttgctatccacatttacctctgt

SEQ ID NO: 2013 - DNA, 397 bp, Bos taurus
  Clone ID: 09-LIB34-020-Q1-E2-C9
gtgataatcaagatacaatctccagtaaactgaaggaatgctgtgataagcctttgttggaaaaatcccactgcattgctgaggtagaaaaagatgccatacctgaaaacctgcccccattaactgctgactttgctgaagataaggatgtttgcaaaaactatcaggaagcaaaagatgccttcctgggctcgtttttgtatgaatattcaagaaggcatcctgaatatgctgtctcagtgctattgagacttgccaaggaatatgaagccacactggaggaatgctgtgccaaagatgatccacatgcatgctattccacagtgtttgacaaacttaagcatcttgtggatgagcctcagaatttaatcaaacaaaactgtgaccaattcgaaaa

SEQ ID NO: 2014 - DNA, 160 bp, Bos taurus
  Clone ID: 09-LIB34-021-Q1-E1-C1
aattcatgtctattgagtcagtgatgctatctaataaccagatcatcctctgcttccgccttcttctcttgccctcaatctttcctagtatcagggtcttttccaaagagttggctctttgcatcaggtggagcttcactaataaataattgttgaacag

SEQ ID NO: 2015 - DNA, 352 bp, Bos taurus
  Clone ID: 09-LIB34-022-Q1-E1-C1
attgattaatgtccccaaagaaatctgctttttactatatctttcagcactagagattgttttctgttcctgaaaatacattttctgctctttgattcttgctactattgtattatttcatgcattttttaaaagggcatttgaggggaggatgattcctatgagtgaaaaaaatgttttagcttagtctaagctacctgccttcaaaatagtgtagggaccaccatcatattatattttattttattttgttttttatctttaagcatttttctaatgatttgaagagataactatttacaaaaattatacatatcagtgataacaatttcttgctctcaccaatttttta

SEQ ID NO: 2016 - DNA, 453 bp, Bos taurus
  Clone ID: 09-LIB34-023-Q1-E1-C9
cgggtccacgcacgcgtccgaaactttggcacaatgaagtgggtgacttttatttctcttctccttctcttcagctctgcttattccaggggtgtgtttcgtcgagatacacacaagagtgagattgctcatcggtttaaagatttgggagaagaacattttaaaggcctggtactgattgccttttctcagtatctccagcagtgtccatttgatgagcatgtaaaattagtgaacgaactaactgagtttgcaaaaacatgtgttgctgatgagtcccatgccggctgtgaaaagtcacttcacactctctttggagatgaattgtgtaaagttgcatcccttcgtgaaacctatggtgacatggctgactgctgtgagaaacaagagcctgaaagaaatgaatgcttcctgagccacaaagatgatagcccagacctccctaaattgaaa

SEQ ID NO: 2017 - DNA, 236 bp, Bos taurus
  Clone ID: 09-LIB34-024-Q1-E1-C1
gaaaccctagaggacgcaactatagcactgcagactccagtactagcctgtccagagcagcaagtgagaggaaacaagccagcattgtaagaggacatgcttctcctccctctctccgtgctgctcctgctcacacagccctggagatccctgggagcagaaatgacaaccttttctcaaaaaatactggccaatgcctgtaccctggttatgtgtacccccctggaaaattgcct

SEQ ID NO: 2018 - DNA, 305 bp, Bos taurus
  Clone ID: 09-LIB34-025-Q1-E1-C1
gggcacggggaagctccgctctggagaactgcctccaggagcaggcgcggctcagagcccaagtgtacctgctggagacccgggtcaagcagcaacaagtcaagatctcgcagcttttgcatgagaaacaagtccagctccttgataaaggagaggagaatagtgtcattgaccttggaggaaagaggcaatacgcagattgttcagagattttcaatgacgggtacaagcagagtggattttataaaatcaaacctctccagagcccagcagaattctctgtttaatgtgacatgtctgatgga

SEQ ID NO: 2019 - DNA, 416 bp, Bos taurus
  Clone ID: 09-LIB34-025-Q1-E1-C9
gagcgagcgagctgagtggttgtgtgattgcgtcccggagaccggtagcgcttgcagcatggctgaccaactgactgaagagcagattgcagaattcaaagaagctttttcactatttgacaaggatggtgatggaactataacaacaaaggaattgggaactgtaatgagatctcttgggcagaatcccacagaagcagagttacaggacatgattaatgaagtggatgctgatggtaatggcacaattgacttcccggaatttctgacaatgatggcaagaaaaatgaaagatacagacagtgaagaagaaattagagaagcattccgtgtgtttgataaagatggtaatggctatattagtgcagcagagcttcgccatgtgatgacaaaccttggagagaagttaacagatg

SEQ ID NO: 2020 - DNA, 408 bp, Bos taurus
  Clone ID: 09-LIB34-026-Q1-E1-C9
caggaccacttcaatcttaccacgggagtgttcacctgcaccatccctggcgtgtaccgctttggctttgacatagagctattccagcatgctgtgaagctagggctcatgaagaatgacactcaaatcctggagaaggagtccaaggccaaggacaattataggcatctttctggaaatgtcgtcttgcagctgacattgggagacagagtctggctggaatccaagctagacacaacagagactgagaaaggaccaattcaaagtatgttctttgggtatttgctctatggaaattatcctggctaaggggtaatggcacccttgaattcctcaagtggtcctaaacctcccagcaaacttccctccctgccccagtacttttcagtgatcattgaataaattacg

SEQ ID NO: 2021 - DNA, 363 bp, Bos taurus
  Clone ID: 09-LIB34-027-Q1-E1-C1
agacttatcctcaaaatctgccagtcacaacagagattgatcatctcgctggccttgattacagcttaatgggggcccctcaagcaacagcccaaatgctggatgtgatgttcaagggtgaaatttttagccgagatgaccgcttcccagttgctttccttgctcctgtcatgaaccttcctgaggaacacagccgaatggtctactttgccatctctgattatgccttcaacaccgccagcctagtttatcataaagcgggattcctgaactttactatcacggatgacatgattccgcctgattctagcattcgactgaacaccaagtccttccgcgccttcgttcccaggatagccagac

SEQ ID NO: 2022 - DNA, 327 bp, Bos taurus
  Clone ID: 09-LIB34-028-Q1-E1-C1
cagacgcgtgggcttggacaacacccagcaacttaagattttggctgactccatcagtggtgaagttgagatcctttgcagtgccctccagaaattaaagtgaagtcacggacagaacctaaactgagaatctctcaatggaaatccacctacttcttttatttcatcttaaaaagtgtaacaaacaagtcttgattcaaaatgacagccttaaatcctttcgagagcaagttggcgggtcaacaaataggatcatatgaaatgacagcatattaataatacccaagagcataaagggaaattctttgggataactgtgatttagag

SEQ ID NO: 2023 - DNA, 368 bp, Bos taurus
  Clone ID: 09-LIB34-029-Q1-E1-C1
gagaactgaagttttttgtcatctgctgttgctgttctatgaaccaccttcttctttctgcgagcagttcctttctcaccaatgcgggccacgctgagacaaagcaactgacagaaatgctccccagcatcttaaaccagcttggtgccgacagtctgaccagtttaaggagactggctgaagctctgcccagacaatctgtggatggaaaagcaccacttgccactggagatgaggatgatgatgaagttccagatcttgtggagaattttgatgaggcttccaagaatgatgcaaactgaattgagttaacttctgaagaagataaatcttgaagaatttactgggagctgctattttatattatg

SEQ ID NO: 2024 - DNA, 361 bp, Bos taurus
  Clone ID: 09-LIB34-029-Q1-E1-C9
gagaaagtaccgcaagggaacgatgaaagaaaaaactaaaagtataaaaaagcaaagattaccccttgtaccttttgcataatgaattaactagtataagacttaacaaaatgaattttagctaagcagcccgaaaccagacgagctactcacaaacagtttaccaagaactaactcatctatgtggcaaaatagtgagaagatttgtaagtagaggtgacatgcctaacgagcctggtgatagctggttgtccagaaaatgaatctaagttcagctttaaagataccaaaaattcaaataaaccccactgtagctttaaaagttagtctaaaaaggtacagccttttagaaacgggtaca

SEQ ID NO: 2025 - DNA, 397 bp, Bos taurus
  Clone ID: 09-LIB34-030-Q1-E1-C1
agacttggtggtggaggccattgtagagaatctgcagatgaagaacgagctgttcaagaggctggacaagtttgccgccgaacacacaatctttgccagcaacacttcctctttgcagatcacaagcctagccaattccaccaccagacaggaccgattcgccgggctccatttcttcaacccagtgcctttgatgaagcttgtggaggtcattaaaacaccaatgaccagccagaagacgtttgaatctctgctagacttcagcagagccctggggaagcatcctgttgcttgcaaggacacgcctgggtttatcgtgaaccgtcttctggtgccgtacctcatggaagcagtcaggctgtgtgagcgaggtgaagcatccaaggaggacatcgac

SEQ ID NO: 2026 - DNA, 373 bp, Bos taurus
  Clone ID: 09-LIB34-031-Q1-E1-C1
acggagttgaaggtgggaatgtggccaagccggatccagaagtgacggaacgctgctcggatggctggggctttgatgctaccaccctggatgagcatgggaacatgctgtttttaaaaggggagtttgtgtggaagggtcatgcctgggcccggcagttgatctcagagaggtggaaggatgcccccagtcccgtggatgctgcattccgctatgatcgtaacagtgtccttctgatcaagggggacaaattctgggtatatcctcctgagaagggggaggaatatccaaagttgctccaagagaagtttcctggaatcccattcccactgggtgcagctgtggaatgtcaccgccgagaatgctctcatga

SEQ ID NO: 2027 - DNA, 419 bp, Bos taurus
  Clone ID: 09-LIB34-031-Q1-E1-C9
tgaaaacggaaaaaggaggatggacagtaattcagaaccgtcaagatggtagtgttgactttggcaggaaatgggatccatataaacaaggatttggaaatattgcaaccaatgcagaagggaagaaatactgtggtgtaccaggtgagtattggctcggaaatgacagaattagccagcttaccaatatgggacccacaaagcttttgattgaaatggaggactggaaaggcgataaggtgacggcactctatgaaggatttactgtacagaatgaggccaacaaatatcaactgtcagtgagcaaatacaaaggaacagctggcaatgccctcatagaaggggcttctcaactggtgggagaaaaccgggacatgaccatccacaacaacatgttcttcagcacataccacagagac

SEQ ID NO: 2028 - DNA, 407 bp, Bos taurus
  Clone ID: 09-LIB34-033-Q1-E1-C9
gctttaaactctcgtgccagtgcttaggctttggcagtggtcatttcagatgcgattcatctaaatggtgccatgacaatggagtgaactacaagattggagagaagtgggatcgtcagggagagaatggccagatgatgagctgcacgtgtcttggaaatggaaaaggagaattcaagtgtgatcctcatgaggccacatgctatgacgatgggaagacttaccacgtgggagaacagtggcagaaggaatatcttggtgccatttgctcctgcacatgctttggaggccagcggggctggcgctgtgacaactgccgcagacctggggctgaacccggtaacgaaagctccactgcccactcctacaaccagtaatcccagagataccatcaagaaacaaacact

SEQ ID NO: 2029 - DNA, 436 bp, Bos taurus
  Clone ID: 09-LIB34-035-Q1-E1-C1
caatgaagtggatgacttttatttctcttctccttctcttcagctctgcttattccaggggtgtgtttcgtcgagatacacacaagagtgagattgctcatcggtttaaagatttgggagaagaacattttaaaggcctggtactgattgccttttctcagtatctccagcagtgtccatttgatgagcatgtaaaattagtgaacgaactaactgagtttgcaaaaacatgtgttgctgatgagtcccatgccggctgtgaaaagtcacttcacactctctttggagatgaattgtgtaaagttgcatcccttcgtgaaacctatggtgacatggctgactgctgtgagaaacaagagcctgaaagaaatgaatgcttcctgagccacaaagatgatagcccagacctccctaaattgaaaccagaccccaatac

SEQ ID NO: 2030 - DNA, 330 bp, Bos taurus
  Clone ID: 09-LIB34-035-Q1-E1-C9
cacaaaagtctctgtaaccacccagatcattaatgtaatcagcaaacactctcggggcaggttgtgttgtggatgcttaaaatgtgttgtcttctagaacagccgtgttactaagctagactgtagcgtgaaatcttgcacagttcccgttgaaccttccaaaatgaaaatgtcaaagacccagccagaagttttccagaaataccgattgttccaaagtaaagtgctcctaagtctttgtagctgtacttaaattgctttgtggcgggcggggcgttgcgggggggaaccagctgaagcatgttaagaatgaaataaaaggtttcccat

SEQ ID NO: 2031 - DNA, 271 bp, Bos taurus
  Clone ID: 09-LIB34-036-Q1-E1-C1
ccacgcgtctaggcggcggctcaggatccactgcccacaccccgctctcgcacgcacacatcatgacagagagaacttccttcctcctggcctctggggctcctggtgtctgggttctgcgccagggtcgactgcctcccattataatggtgaccccataagaggagcacacacggacctctgtggattgccactcattagcctccaacaacactgagttcgccttcaacctctataagcagttggctgtgaaggaccccatcaagaatgt

SEQ ID NO: 2032 - DNA, 348 bp, Bos taurus
  Clone ID: 09-LIB34-038-Q1-E1-C1
aggagaacgaggtgatacaggacgtggtggcatcacaatgaagaggatcctggttttcctccttgctgtagcccttgtgcatgctctacagagaggccgagattatgagaaagataaagtctgcaaggaccttgccagcctgggaagagatgacttcacatctttgtcaatggtcctatacagcagacgatttcccactggcacctttgaacagatgagccatcttgtgaatgaaattgtttccttaacagtaatctgctgtgcggaacgggccgatcctgactgctatgacatcaggacttcaacattgtctgaccagtcctgtgaaagcaaatccccagtcccagt

SEQ ID NO: 2033 - DNA, 435 bp, Bos taurus
  Clone ID: 09-LIB34-039-Q1-E1-C1
gccccaagcatccagtatcgtgcatcaaacctggactggcgactcatttcatatatgatattatacatgtttcaatgccattctcccaaattatcccaccctctccctctcccacagagtccaatagactgttctatatacatctgtgtctcttttgctgtttcgtacacagggtcattgttaccatcttcctaaattccatgtatatgcgttagtatactgtactggtgtttttctttctggcttacttcactctgtagaataggctccagtttcatccacctcattagaactgattcaaatgtattctttttaatggctgagtaatactccattgtgtatatgtaccacagctttcttatccattcatctgatgatggacatctaggttgcttccatgtcctgtccattatcaacagtgctgcgatgaaaccc

SEQ ID NO: 2034 - DNA, 383 bp, Bos taurus
  Clone ID: 09-LIB34-040-Q1-E1-C1
gggaccacccacgcgtccggagagaggggtcaccgcctcccacagaagtaaaaggagcctcgctgcagtgttgcattgggcttctcagcctccaagacctcctcccacttccagaatccacacgtaactgcatgttccccttcccgggagaaaaccaactgtcaggaggggtacatgttgccccctcccccttctgctccccagcggatcctggctcctcctcctctacagtgcctggtagacgagcgccacgctgaagaatgcagaccttgttaaggcttgtcctgcagcttggtgttacagatgtgctgttagtgcaataaggtgaaggctgtctgcccagaggaatacataatttatatgagaaaatacatttcataagt

SEQ ID NO: 2035 - DNA, 347 bp, Bos taurus
  Clone ID: 09-LIB34-040-Q1-E1-C9
gacgccgcatcaacctgctggccgagggccggctggtcaacctgggctgtgccatgggccatcctagctttgtgatgagcaactccttcaccaaccaggtcctggcgcagatcgagctctggacccacccagacaagtaccccgtcggagtcgacttcctgcccaagaagctggatgaagcagtggctgaagcccacctgggcaagctgaatgtgaagctgaccaagctgactgagaagcaggcccagtacctgtgcgtgtcccgtgaaggcccgttcaagcctgatcactaccgctactgagaaccagacctgccctttgccttccagctgctgtccttggctggg

SEQ ID NO: 2036 - DNA, 400 bp, Bos taurus
  Clone ID: 09-LIB34-041-Q1-E1-C9
actgtcctgatcggcctacaggaatcgtgggctattaaagagaatcatgtgatcatccaagctgagttctatctgaaacctgaggaatcagccgagtttatgtttgactttgatggtgatgagattttccacgtggatatggggaagaaggagacggtgtggcggcttccacaatttggacattttgccagctttgaggctcagggtgccctggccaatatggctgtgatgatagccaagctggacatcatgataaagcgctccaacatcaccccaaacactcaatgttcctccagaagtgactctgctcccaaacaagcctgtcgaactgggagagcccaacacactcatctgcttcattgacaagttctccccaacccgtgatcagtgtcacatggct

SEQ ID NO: 2037 - DNA, 158 bp, Bos taurus
  Clone ID: 09-LIB34-043-Q1-E1-C1
aggaaacatggcggcggctaccggaccctcattttgggtgaggaaccagaccctgagtgtgtcgatggtactcttcacgctgaacaggtatggcctgtatgaacggctgcggaaaaactcggaatttaaggcggctccgccgttgctgcccaaggttg

SEQ ID NO: 2038 - DNA, 401 bp, Bos taurus
  Clone ID: 09-LIB34-043-Q1-E1-C9
aggttaggattcggcgctctcttctggacgtgaacctgttgggggtgattgatgtgaccctgagtgtgctgcccctggtgcggaaggcaaggggccgtgtggtcaatgtttccagcatcatgggccgggtggccctccttggtggaggctattgcatgtccaagtatggcgtggaggccttctcagactccctcaggagggagctctcctactttggggtgaaggtggttatgatcgagcctggttattttaagaccgctgtgaccagccctaaggcactttctcagggcttccaggcatcatggaatcaggccagcccagagattaaggaactctatggagagaagttcatggctaacctcatgaaatcagtcgacttgttggagacaaccaactgccag

SEQ ID NO: 2039 - DNA, 410 bp, Bos taurus
  Clone ID: 09-LIB34-045-Q1-E1-C1
cgcggtgcaaacagtcgctgggtgggtaacactctgttactggagccagctcagctcagcggagcagatataaaccgagaagggcaaactcatcgagagggcgtcttcgggaccatggcgaatggatatacatatgaagattatcaagacactgcaaaatggcttttgtctcataccgaacagcgacctcaagtggcagtgatctgtggttctgggttaggaggtctggttaacagattgactcaagcccagacctttgactacagtgaaataccaaactttccagaaagtacagtgccaggtcatgctggtcgactggtgtttgggatcttgaatggcagagcctgtgtgatgatgcagggcaggttccacatgtatgaaggctatccgttttggaaggttacattccc

SEQ ID NO: 2040 - DNA, 441 bp, Bos taurus
  Clone ID: 09-LIB34-045-Q1-E1-C9
gacagatctcacaaaagtccacaaggaatgctgccatggtgacctacttgaatgcgcagatgacagggcagatcttgccaagtacatatgtgataatcaagatacaatctccagtaaactgaaggaatgctgtgataagcctttgttggaaaaatcccactgcattgctgaggtagaaaaagatgccatacctgaaaacctgcccccattaactgctgactttgctgaagataaggatgtttgcaaaaactatcaggaagcaaaagatgccttcctgggctcgtttttgtatgaatattcaagaaggcatcctgaatatgctgtctcagtgctattgagacttgccaaggaatatgaagccacactggaggaatgctgtgccaaagatgatccacatgcatgctattccacagtgtttgacaaacttaaacatcttgtgga

SEQ ID NO: 2041 - DNA, 280 bp, Bos taurus
  Clone ID: 09-LIB34-046-Q1-E1-C1
gggtccagtcacgcgtccggactgaagcctcctccagaaggcaacgtgagaagttcaaatttgatgcgactattacgcacagaggctgttcaagacgccacgatggtagaagcccatgtcagagctcacatggcagaaagacataagcctgcttccgatcagccatgcctttctcacgtgtggatgtccttcctgtcactacagaacgcatggagaggctaatgatgcacgcaatcttaaagtagacaagtatgtcgttgctggaaagtatgagcacact

SEQ ID NO: 2042 - DNA, 356 bp, Bos taurus
  Clone ID: 09-LIB34-047-Q1-E1-C1
caagagggcaaccttgcagtttctccgcggcccaccccagtggctgcagcttcagaatgtggcagcttacaagcctcttactgttcgtgaccatctggggaatttccagcacaccagctcctcctgactcagtgttctccagcagccagcgtgcccaccaagtgctgcggatccgcaaacgtgccaactccttcctggaggagctgcggcccggcaacgtggagcgtgagtgctcagaggaggtctgtgagttcgaggaagctcgggagattttccaaaacacggaagacacaatggccttctggtccaagtatagcgacggggaccagtgcgaggaccgggcctcagggagcccg

SEQ ID NO: 2043 - DNA, 432 bp, Bos taurus
  Clone ID: 09-LIB34-047-Q1-E1-C9
cacggagccccgggcccgccgacaccatgagttggtcctcgcaccctccgagtgtaatcttctacattctttcattgctttcttcagcatgcctggcatatgttgctacccgagacaactgctgcatcttagatgaaagatttggtagttattgcccaactacctgtggaattgcagatttcctgaataattaccaaaccagtgtagacaaagatctacgaactttggaaggcatcttatatcaggttgagaacaaaacatcagaagccagagagctggtcaaagcaatccaaatcagctataaccctgatcaaccatcaaagccaaataacatagagagtgctaccaagaattccaagagtatgatggaagaaattatgaaatatgaaacactgataacaacacatgaatcaacaattcgatttttgcaag

SEQ ID NO: 2044 - DNA, 433 bp, Bos taurus
  unsure (321),(357),(397): unsure at all n locations; Clone ID: 09-LIB34-048-Q1-E1-C1
gagccgctgcagccaagtccggatcccacgccgtgcgcctccgacgcccgcccgctcgacggtcactcccggttcctttagggtctaagtccaagatggcaactctcaaggatcagctgattcagaatcttcttaaggaagaacatgtcccccagaataagattacaattgttggggttggtgctgttggcatggcctgtgccatcagtatcttaatgaaggacttggcagatgaagttgctcttgttgatgtcatggaagataaactgaagggagagatgatggatctccaacatggcagccttttccttagaacaccanaaattgtctctggcaaagactataatgtgacagcanactccaggctggttattatcacagctggggcacgtcagcnaagaggagagagccgtctgaatttggtccaagcgta

SEQ ID NO: 2045 - DNA, 441 bp, Bos taurus
  Clone ID: 09-LIB34-050-Q1-E1-C1
cggacgcgtgggttcagttcagtgctaccactttggatggtcccctaaacttccaacgtgtaaagaagcacagatacagccatgcccagccaatgctcgagatatgacaactacagtgaaatatcaggatggggaaaaatatcaattctatgtaaagaaaattatttaattcaagatgcagaagaaattgtgtgcaaggatgggagatggcagtcaataccacattgcactgtggctcaagggtaactaaacctcttgaaatgcaagagatatataagacacaggttggatccctggatggggaagatacccttgggaggaaggtggcaacccactccagtgttcttgcctgggaaatttcatggagagaggaacctggtgggcgagagttcactgggtcacaaacagttggacatgactaagtgactgagcatgcacaca

SEQ ID NO: 2046 - DNA, 435 bp, Bos taurus
  unsure (302): unsure at all n locations; Clone ID: 09-LIB34-050-Q1-E1-C9
actaggtggacttctcaaaccaacagtggcctctcagaaccagagtcttcccgttgccaaactcccacctaacaagttagtatctgatgacttggattcatccttagccaacattgtgggcaatcttggcattggaaatggaaccactaagaatgatgtaaattggagtcagccaggtgaaaagaagctcactggaggatctaactggcaaccaaaggttgcaccaacaactgcgtggaatgctgcaacaatggccccccctgtaatggcctatcctgctactacaccaacaggcatgatangatatggaatccctcctcaaatgggaagtgtacctgtaatgacacaaccaagcttaatatacagccaacctgtcatgagaccaccaaacccttttggccctgtatcaagagcacagatacagtttatgtaact

SEQ ID NO: 2047 - DNA, 235 bp, Bos taurus
  Clone ID: 09-LIB34-051-Q1-E1-C1
atcagtactcctctgtattcgtggttacttcccatggcattcattcatctgatttctcatcccaggtcacgctctgtgtgttagtaaccctggaaagggaaggatgagacagacctactcactgactgccccacctccagcgtttgtgcgtcctgcccggatcgggttggtggcagggcccatttgtgtgttggagcccggggttccaggtcaggctggttcaggggcccgtctt

SEQ ID NO: 2048 - DNA, 245 bp, Bos taurus
  Clone ID: 09-LIB34-051-Q1-E1-C9
ctgagcactttgaccaatgtctatttaatactaggatgtgagttacctatgatgtgcatgcatgctcagtcatgtctgattctttgtgaccccatggactgtagcccaccaggctcctcttccccatggagttttccaggcaagaatactagcgtggcttgccatttcttactccaagggatttttttctgacccaggaactgaacctgcatctcccaagattcctgcattagcaggtgtattcc

SEQ ID NO: 2049 - DNA, 232 bp, Bos taurus
  Clone ID: 09-LIB34-054-Q1-E1-C1
aaaagtgcccttgattttaattttaatacactttccccctgaaaagcagtctgctttttcctcagtactctgttcagtgcggtttttatggaggatggtgagagacgaagtaatggattttgctaatcattttgtgattcaaacgcatgctgtattttaaaaacaatcgacagaaccacacaggcttatttttaaattgtataaatcatgagacaatgtgacaatggttatt

SEQ ID NO: 2050 - DNA, 349 bp, Bos taurus
  Clone ID: 09-LIB34-055-Q1-E1-C9
aagtggcacaaaggacccacttcctaggcggcacggtgccttgcctggttcatacctgtctagcagcagccagtactagtaacggtggcaatgctgcgatggtaacaagaatagcattccaagaagccgcagccattgaagatttatatgccttatctccccaccggaaaaatggtgcctaaagtaaatcagaggcaaaaacataggtcatcctgtggaatgcatctcggagttaccaagtcaccctgcaagcagaagttctggcctcaggctcaggctcgaactcagtccgagctgtcttccctcctccatgaggcatccccatgccctgaccgcccccaaccacagg

SEQ ID NO: 2051 - DNA, 375 bp, Bos taurus
  Clone ID: 09-LIB34-056-Q1-E1-C1
gagaacctgaccaaatctcaccataagggcaacagtgtttagtttcagtgcaagtcgctcagttgtgtccgactgtttgtaaccccatggactatacagtagggggttttccgtgccataatgctggagtgggtggccgttcccttctccgggggttcttcccggcccggggatcgagcccaagtctcctgcattgcgggccgattctttgccagctgagccatcagggacaccccataagagcaacagatgttgagaaagtctgtggtattacttatactacacaacagaggatacatccaaacaggttgagaataacccaacctgtgagttaagctccatcttcagacgattaaaggtgaaattctgtttcgt

SEQ ID NO: 2052 - DNA, 226 bp, Bos taurus
  Clone ID: 09-LIB34-057-Q1-E1-C1
acggcggcggctctggatccactgcccacatcccgctctcgcaggcagacatgagggcagagagaacttccttcctcctggccctggggctcctggtggctgggatccgcagtgtccactgcctcccagagaatgtggtggtgaaggaccagcacagaagggtggatggccacacgttagcctccagcaacaccgacttcgccttcagcctctacaagcagttggt

SEQ ID NO: 2053 - DNA, 230 bp, Bos taurus
  Clone ID: 09-LIB34-057-Q1-E1-C9
gggtcgacccaagcgtcaacttactccttcctaactttcacatatgtagaagattccattaagactgtttactgtgaagataaatgtggaaactgctctctcaaggcactggaagatgaagacgtctgtaaaaatgtatttctggctaccaaggagaaaacagctgaggcttcacagcgacatcaccacccacacggttcagtcagagcctaatttccgtagcaactcaa

SEQ ID NO: 2054 - DNA, 228 bp, Bos taurus
  Clone ID: 09-LIB34-058-Q1-E1-C1
gaaagattgaaactatgagagaaaaagtactgacttcatctgccagacagagactcaggtgtgccagtattcaaaaatttggagaaagagctttaaaagcatggtcagtagctcgcctgagccagaaatttcccaaggctgagtttgtagaagttaccaagctagtgacagatctcacaaaagtccacaaggaatgctgccatggtgacctacttgaatgcgcagatg

SEQ ID NO: 2055 - DNA, 204 bp, Bos taurus
  Clone ID: 09-LIB34-059-Q1-E1-C1
ggcgcggagaagagctcggggtagtcggagcgctcggagtttgccacttatcggtcatccttggtgtccgcagcactctctccctctctctagggcggcgacctccggcggccggaaagtcaccatgtccatcctgaaggtccacgccagagagatctttgactctcgtgggaatcccaccgtttgagggttgattctcttcac

SEQ ID NO: 2056 - DNA, 238 bp, Bos taurus
  Clone ID: 09-LIB34-060-Q1-E1-C1
cagagagccggagccagagggacggccaagcccaggagccagggaaccgacgaccgagtcatgtggctggaaatactccttgcctcagtgctgggctttgtcatctactggttcgtctccaaggacaaggaggagactttgccccttgaagatggatggtgggggcctggggtgaggcccacagctggggaggataagagcatccgcccattcaaggtggaaacatcagatgaggaga

SEQ ID NO: 2057 - DNA, 316 bp, Bos taurus
  Clone ID: 09-LIB34-060-Q1-E1-C9
atagtactcgggcggccatggcggggttggcaggcaggtttgccaggcgctggttctctgggcttctcggcagccccctgcaggtcccagcccttgggttacacgtgcgcggccccgccatgctagccagccagaaggactttaacaacgcggtgagccaggtgaagctcctgaaggaggatccgggcaatgaggtgaagctgaaactctacgcgctctacaagcaggccactgaaggaccttgtaacgtgcccaaaccaggtatgctggactttatcaataagaccaaatgggatgcatggaacgctcttggcag

SEQ ID NO: 2058 - DNA, 355 bp, Bos taurus
  Clone ID: 09-LIB34-061-Q1-E1-C1
aacccacacaaaactttggcacaatgaagtgggtgacttttatttctcttctccttctcttcagctctgcttattccaggggtgtgtttcgtcgagatacacacaagagtgagattgctcatcggtttaaagatttgggagaagaacattttaaaggcctggtactgattgccttttctcagtatctccagcagtgtccatttgatgagcatgtaaaattagtgaacgaactaactgagtttgcaaaaacatgtgttgctgatgagtcccatgccggctgtgaaaagtcacttcacactctctttggagatgaattgtgtaaagttgcatcccttcgtgaaacctatgggtacat

SEQ ID NO: 2059 - DNA, 407 bp, Bos taurus
  Clone ID: 09-LIB34-061-Q1-E1-C9
ccacgggcccgtaagaactggttttgtgcaaacatggagaaattgacttccataaaatttaagtcaaagaaattttgacccaaaccatatttttattcagctgagaggtggttgcagcgtttggttagcatgtctttctttttctttttccagtattctacttgcgttaatgagaacagaaacgtaaactataacctaggggtttctgttggatggttggcaactaagaatggatgaagaacaacaaagacatgttctccactttcttatttctcaaaacaatgttatcttcgtctttttaatcttaggtttttaacagattaaacctttaaagcaagaagtgaattctgtcttttcagacccagaaatacacatgaatactttgctatgattacatttgagatatg

SEQ ID NO: 2060 - DNA, 197 bp, Bos taurus
  unsure (22),(43),(49): unsure at all n locations; Clone ID: 09-LIB34-062-Q1-E1-C1
cgtccgcggacgcgtgggttgngttacaccctgatgggcgcanggaatngtcagagtggaccgagtccctttggccgcaaaattggtagacctgccgtgtgttatggagagtttgaaaaccattgataaaaaaaccttttacaagacagctgatgtctgtcagatgcttgtctctacagttgatggtgatctgtatt

SEQ ID NO: 2061 - DNA, 211 bp, Bos taurus
  Clone ID: 09-LIB34-062-Q1-E1-C9
cggacgcgtgggtattggtaccctttatctactatttggtgcttgggccggtatagtaggaacagctctaagccttctaattcgcgctgaattaggccaacccggaactctgctcggagacgaccaaatctacaacgtagttgtaaccgcacacgcatttgtaataatcttcttcatagtaataccaatcataattggaggattcggtaaa

SEQ ID NO: 2062 - DNA, 274 bp, Bos taurus
  Clone ID: 09-LIB34-066-Q1-E1-C1
ccggctcgacccaagcgtacgggacttgcccctttggactcattcactttcagtgcgtcctaaggtctttgactttcaattctctcgataagtgctgacttaccacatcagcctgctagaggctggcattgtctactgtgggaatatcccagtgtcaatactcactcgccatctggatcatggccttgggatgggttatgtcggcataaccctggatcgtggagtctgttgaccttacctctacacctacatggtctggaaattcgatatgtgt

SEQ ID NO: 2063 - DNA, 205 bp, Bos taurus
  Clone ID: 09-LIB34-066-Q1-E1-C9
acgggaatgctgccatggtgacctacttgaatgcgcagatgacagggcagatcttgccaagtacatatgtgataatcaagatacaatctccagtaaactgaaggaatgctgtgataagcctttgttggaaaaatcccactgcattgctgaggtagaaaaagatgccatacctgaaaacctgcccccattaactgctgactttgct

SEQ ID NO: 2064 - DNA, 197 bp, Bos taurus
  Clone ID: 09-LIB34-068-Q1-E1-C9
caacatgactgacaatgatcttatcgatattcttgaccctttttatcatcgttcaactaaaagtttcaaaacacaacttttatcacaatccagaactgacaccaacaaaaatattaaaacaaaacaccccttgagaaacaaaatgaacgaaaatttatttacctcttttattacccctgtaattttaggtctccctc

SEQ ID NO: 2065 - DNA, 217 bp, Bos taurus
  Clone ID: 09-LIB34-069-Q1-E1-C1
atcttgattgttccccagaaagggaaacttctcatttacactgagtttggcaagatgcttgttcagcccaacgagatctgcgtcattcagagaggaatgcggttcagcatcgatgtcttcgaggagactagaggctacatcctggaggtttatggagtccacttcgagttgcctgacctgggaccaattggagccaatgggcttggccaatcctcgt

SEQ ID NO: 2066 - DNA, 232 bp, Bos taurus
  unsure (26),(190): unsure at all n locations; Clone ID: 09-LIB34-070-Q1-E1-C1
caacttcttctctgccagctgtgtcncctgtgcggatcaatcatcatttcccaaactctgtcaactgtgtgcggggaaagggacagacaagtgtgcctgctccaaccacgaaccatacttcggctactcaggggcctttaaatgtctgatggagggcgctggggatgtggcctttgtcaagcactcaacnggtattccgacaacctgcctaacccaagaagacagggaaaaa

SEQ ID NO: 2067 - DNA, 247 bp, Bos taurus
  unsure (194): unsure at all n locations; Clone ID: 09-LIB34-070-Q1-E1-C9
ggaggactcagttctttgtgccattgccaaaaagcacaagcaaaccccagctctggttgtccttcgttaccagatacaacgtggggttgttgttctggccaagagttacaacaagaagcggatcaaagagaacatacaggtgtttgactttgaactgactccagaagacatgaaagcaatcgatggcctcaacnaaaaataaaagatattaatgaatttcccttgttggtgtccggtcaaccctgat

SEQ ID NO: 2068 - DNA, 327 bp, Bos taurus
  Clone ID: 09-LIB34-071-Q1-E1-C1
acgcccccttcgacatctggatcaacggtgaccgcagcgactccctgatgtggaatgatcgggagcagacaccatgtgatggacgtcatcggtgacagcttcagccgggcgtccaacatcatggactagctcttccattaccggttcttcctccggcggctccagtacggataatgctacgcccgcttcatctcggtctccacggggtgaatcttctgcaatcgcaaatcgcgctttgcccggaacgtcaggccattcaccttgatggaaatcttcagcttccacaaatgtgtttcagcacttctacggtatgatgcaccaagccca

SEQ ID NO: 2069 - DNA, 350 bp, Bos taurus
  Clone ID: 09-LIB34-072-Q1-E1-C1
aggctggagaactggttatcgtatacaataaatgacctgatgtattcatattttgtatttccagaatgggatgaatattacagcaaggttttaggaaaatctaccaaattatgtgagattatgggaaaagctgaaatgtggttgattcgaactaactgggattttgaatttcctcaccctttcttacctaactttgaatttgttggaggactgcactgcaagcctgcaaaacccttgcctaaggagtttgaagagtttgttcaaagttctggaaaaaatggagtcgtggtgtttactctgggatcaatggtcaaaaacctcacagaagaaaactctaaaatgattgcatc

SEQ ID NO: 2070 - DNA, 381 bp, Bos taurus
  Clone ID: 09-LIB34-072-Q1-E1-C9
gggccgagacacgcgtctaggctgaataactggatatcgtatacaataaatgacctgatgtattcatattttgtatttccagaatgggatgaatattacagcaaggttttaggaaaatctaccaaattatgtgagattatgggaaaagctgaaatgtggttgattcgaactaactgggattttgaatttcctcaccctttcttacctaactttgaatttgttggaggactgcactgcaagcctgcaaaacccttgcctaaggagtttgaagagtttgttcaaagttctggaaaaaatggagtcgtggtgtttactctgggatcaatggtcaaaaacctcacagaagaaaactctaaaatgattgcatcagcccttgcccaa

SEQ ID NO: 2071 - DNA, 414 bp, Bos taurus
  Clone ID: 09-LIB34-073-Q1-E1-C1
acgggccaactgcaaagttctgcatcgccactcagacatcatggcggacaaccgggatccagccagcgaccagatgaaacactggaaggagcagagggccgcgcagaaacctgatgtcctgaccactggaggtggtaatccagtaggagacaaactcaatagtctgacggtagggccccgagggccccttctcgtccaggatgtggttttcactgatgaaatggctcactttgaccgggagagaattcctgagagagtcgtgcatgccaaaggagcaagggcttttggctactttgaggtcacacatgacattaccagatactccaaggcgaaggtgtttgagcatattggaaagaggacgcccattgcagttcgcttctccactgttgctggagaatcgggctcagctgacac

SEQ ID NO: 2072 - DNA, 400 bp, Bos taurus
  Clone ID: 09-LIB34-074-Q1-E1-C1
aacggaagagaaccgccggcagttccgcgaactcctcttcactgtggacagctccgtcagccagagcatcgggggtgtgatcctcttccatgagaccctctaccagaaggacggccagggaaaactgttcagagacatcctcaaggaaaaagggatcgtggtgggaatcaagttagatcaaggagttgctccgcttgcaggaacaaacaaagaaaccaccgttcaagggcttgatggcctttctgaacgctgtgctcagtataagaaagatggtgctgactttgggaagtggcgtgctgtgctgaagattgacaaccagtgtccatcccatcttgctatccaggaaaacgccaacaccctcgcccgctatgccagcatctgtcagcagaatggtctggta

SEQ ID NO: 2073 - DNA, 392 bp, Bos taurus
  unsure (320): unsure at all n locations; Clone ID: 09-LIB34-075-Q1-E1-C1
tgaacctggggcaggaacaggctgaaccgtgtaccctcccttaccaggcaacctagcccatgcaggagcttcagtagatctaaccattttctctttacacttagcaggagtttcctcaattttaggagccatcaacttcattacaacaattatcaacataaagccccccgcaatgtcacaataccaaacccctctgttcgtatgatccgtaataattaccgccgtactactactactctcgctccctgtattagcagccggcatcacaatgctattaacagaccggaacccaaatacaaccttcttcgacccggcaggangaggagaccctattctatatcaacacttattctgattctttggacaccccgaagtctatattttaatcttac

SEQ ID NO: 2074 - DNA, 358 bp, Bos taurus
  Clone ID: 09-LIB34-075-Q1-E1-C9
gtcgtattatcgtgaagcaggcatccagccttgcccaatttgacttcctctccctccgcccttcattgcctcattgcacagattacaggtggcgtgttctgtgataatgaaaagcatcagaatagcttttgtactttgtggttttcgctattttgaattttttgatccaaaacactgattatcagtatatagtttggagtttggcttcgtaatcctggggtttttccctgctttcgtgttctgtcagcccccaccctttagctcttcctctcctcaagcagccatcccaccgtgagaatgagcggggtctgcagcagacgcaagctccaagagtccgctctccggacgagcttcacca

SEQ ID NO: 2075 - DNA, 325 bp, Bos taurus
  Clone ID: 09-LIB34-076-Q1-E1-C1
ccgggacgaccacgcgtccgcggaagcgtggggccgcagcagaatgcacaatgcttgatcgctttgaattttgttacttggatttaaatactactaatatttcaggtctgcaaatttgcaagtaacatttcagagaagttaagaggtgactgggaagtcttttgatgagcatgtccttgaaattcttatttacttttatcttcataaaggatttgttttattagcatctctaattcccccaagataaatttccccacgcacaaaatggtttttgagagcacttaaagtttacttcagcatcagtccaatagcacatttaatcagt

SEQ ID NO: 2076 - DNA, 236 bp, Bos taurus
  Clone ID: 09-LIB34-077-Q1-E1-C1
gtcgtttaaatgggcgccctgggcatcacggtcgccctgctggtgtggttggccaccctgctgttcatctccatctggaagcacatctacagcagctggaaactgccccctggccctttcccactgcgcatcatcgggaatcttttacagctggatattacgaacattcccaaatccttcatcaggctggcggagaggtaccggccggtgttcacactgtacctgtgctctcagcg

SEQ ID NO: 2077 - DNA, 437 bp, Bos taurus
  Clone ID: 09-LIB34-077-Q1-E1-C9
aggacgcaactgtgagtgtctctgtcctagcctctcaacttgctttcctgtgtccagtgagtatcttcctgcctgaatgggcgctttatcctactggtgctgaggaaggcagggtctgtacagctgttccagtctaggaggatagcactgcagactccagtactagcctgtccagagcagcaagtgagaggaaacaagccagcattgtaagaggacatgcttctcctccctctctccgtgctgctcctgctcacacagccctggagattcctgggagcagaaatgacaaccttttctcagaaaatactggccaatgcctgtaccctggttatgtgtagccccctggagagtggcttgcctggtcatgatggacaagatgggagagaatgtcccatggagagaagggggatccaggttcacaagacctgcagggcgag

SEQ ID NO: 2078 - DNA, 470 bp, Bos taurus
  unsure (26)...(27),(74): unsure at all n locations; Clone ID: 09-LIB34-078-Q1-E1-C1
cctatagtaagtcgaatgtagatgannaagaagttttggggaaaatacctatacgaaattgctagaagacatcnctacttttatgcaccagaactcctttactatgctaataaatataatggagtttttcaagaatgctgccaagctgaagataaaggtgcctgcctgctaccaaagattgaaactatgagagaaaaagtactgacttcatctgccagacagagactcaggtgtgccagtattcaaaaatttggagaaagagctttaaaagcatggtcagtagctcgcctgagccagaaatttcccaaagctgagtttgtagaagttaccaagctagtgacagatctcacaaaagtccacaaggaatgctgccatggtgacctacttgaatgcgcagatgacagggcagatcttgccaagtacatatgttataatcaagatacaatctccagtaaactgaaggaatgctg

SEQ ID NO: 2079 - DNA, 360 bp, Bos taurus
  Clone ID: 09-LIB34-079-Q1-E1-C1
cgctgactattctcaaccaaccataaagatattggtaccctttatctactatttggtgcttgggccggtatagtaggaacagctctaagccttctaattcgcgctgaattaggccaacccggaactctgctcggagacgaccaaatctacaacgtagttgtaaccgcacacgcatttgtaataatcttcttcatagtaataccaatcataattggaggattcggtaactgacttgttcccctaataattggtgctcccgatatagcatttccccgaataaataatataagcttctgactcctcgctccctcattcctactactcctcgcatcctctatagtttaagctggggcaagaaca

SEQ ID NO: 2080 - DNA, 436 bp, Bos taurus
  Clone ID: 09-LIB34-080-Q1-E1-C1
gggccggcccacgcgtccgcagaactgtgcagaaactccggcgtgaggtagaaaaggccaaacgggccctgtcttcccaacatcaagcaagaattgaaattgagtccttctatgaaggagaagacttctcggagaccctgactcgggctaaatttgaagagctaaacatggacctgttccgttccaccatgaagcctgtccagaaagtgttggaagattctgatttaaagaagtctgatattgatgaaattgttcttgttggtggctctactagaatcccaaagattcaacagctggttaaagagttttttaatggcaaggagccatcccgtggcataaacccagatgaggctgtggcatatggtgccgctgtccaggctggtgtgctctctggtgatcaagatacaggtgacctggtactgcttgatgtatgtcc

SEQ ID NO: 2081 - DNA, 366 bp, Bos taurus
  Clone ID: 09-LIB34-081-Q1-E1-C1
aggacgagtgggctgtgcatggggcacgcggagatggccaaggcctttgaggaatggaataagacagagctggactcattcctgattgaaatcacagccaatattctcaagttccaagatgctgatggcaaacacctgctgccaaagatccgggacagcgcggggcagaagggcaccgggaagtggaccgccatctccgccctggagtacggcgtgcccgtcaccctcatcggagaagccgtcttcgcgagatgcttatcatctctgaaggatgagaggatccaagccagcaataagctgaacgggcctcaaaatgtcccgtttgaaggatacaagatatcatttcctggaggacattcgaaaggc

SEQ ID NO: 2082 - DNA, 411 bp, Bos taurus
  unsure (317): unsure at all n locations; Clone ID: 09-LIB34-081-Q1-E1-C9
cacgcgtccataaatcccactggcaatgctaaattcagagcaaatagagcctgcgcaatgggataaagtcctcaaaattgaaatgtgacattgctcccaacatctcccaactccctggaattctttttggctcaataatcctggtaaacaattcatttccaaaacttgcacttcagaagcaatgggaaaaatcagcagtcttccaaaccaattatttaagtgctgcttttgtgatttcttgaacaagtgaagatgccatcacatcctcctcgcatctcttctatctggccctgtgcttgctcgccttcaacagctcntgcacggcgggacccgagaccctctgcggggctgagttggtggatgctctccagttcctgtgcggagacaggggcttttatttcaacaagccca

SEQ ID NO: 2083 - DNA, 364 bp, Bos taurus
  unsure (340): unsure at all n locations; Clone ID: 09-LIB34-082-Q1-E1-C1
ggatctcacaactggggaactgtcaaagatgaattaactgacttggaacaatcaaatgtgactgaggaaacacctgaaggtgaagaacatccagttgcggacactgaaaataaggagaatgaagttgaagaagtaaaggaagagggtccaaaagaaatgactttggatgagtggaaggctattcaaaataaggaccgggcaaaagtagaatttaatatccgaaaaccaaatgaaggtgctgatgggcagtggaagaagggatttgttcttcataagtcaaaaagtgaagaggctcatgctgaagactcagttatggatcatcatttccggaagccagcanatgatataacatctcagctggaga

SEQ ID NO: 2084 - DNA, 278 bp, Bos taurus
  unsure (25),(88): unsure at all n locations; Clone ID: 09-LIB34-083-Q1-E1-C1
agcctgactgctaccaaagattganactatgagagaaaaagtactgacttcatctgccagacagagactcaggtgtgccagtattcanaaatttggagaaagagctttaaaagcatggtcagtagctcgcctgagccagaaatttcccaaggctgagtttgtagaagttaccaagctagtgacagatttcacaaaagtccacaaggaatgctgccatggtgacctacttgaatgcgcagatgacagggcagatcttgccaagtacatatgtgataatc

SEQ ID NO: 2085 - DNA, 343 bp, Bos taurus
  Clone ID: 09-LIB34-084-Q1-E1-C1
ggtcgacgacgcgtccgagcagcacagccagtgctgggatggagatgggctcctaccctctgcccacaagctccagcacagagggtggcccaccaggcctcccacaggctgagggggcgacacccccagctttagctccagaagagtggtcagaacgcaggtcacacattcagacaacagagcaggtgcagaccaagtcctgcagaacgagggggaatgacctaggaaactttgggtttttgaagtaaattcttaatgtttcatattgttaatatcttgaaatttgttaaatgttgaaagccttattactattttcagattctttcaataaacagacttgttt

SEQ ID NO: 2086 - DNA, 281 bp, Bos taurus
  unsure (227): unsure at all n locations; Clone ID: 09-LIB34-084-Q1-E1-C9
acgcgggcgattcagtatacgtaaaaaacatacatggggatcagtgaatctgcttgtactcaaatgtatgtcttctctggagttttctaagggtttttttttttgtttacagaggggaggggcgggaggggcagggaggggaggtgacttcaactctgtcaccatctttggtgaatctagcggggcctctgtcgtctctgccctggtcctgtccccgctggctgcanggctgttccacagagctatagcacagagtggaatcatcaccgtaccggggttac

SEQ ID NO: 2087 - DNA, 418 bp, Bos taurus
  Clone ID: 09-LIB34-085-Q1-E1-C1
aattccaaggccgacccgcgcgtccgtgctactagagtgtataagagatttttttgaaatctcttaaaaaacacagcaaggaattcctatttcatgtgctgtgtttttgttttagcagtgaggaagagaggagacctgggcaggagaggtgagggtgtccatcaattttaagtagttaaggctactgaaacattaaaatggtaaatgtgaatcccaagcttttctttttggattttgtcagggaaaagaagaaaacctttgtttctaagaaatctttggaaattagaagaatggatttcaggtggatttaagtcaaagctaattccccaacagcaagatcatttgaaactagtttttatccctttccttcccctagatcaaatcaatattaattgtgccttatttcacttacatagac

SEQ ID NO: 2088 - DNA, 385 bp, Bos taurus
  Clone ID: 09-LIB34-086-Q1-E1-C9
gcgtccggcgtcaagctgcctaggacagacctcgagtgtatggcgctgcagggaccggctccggggtccggataacgggccgaccccgcagctcctgacacggggcgagggtcttctctggtctgagaatggctacctcccgatatgagccagtggctgagattggtgtcggtgcctatgggacagtgtacaaggcccgtgatccccacagtggccactttgtggccctcaagagtgtaagagtccccaatggaggaggtgctggagggggcctgcccttcagcaccgttcgggaggtggccttactgcggcgtctggaggcttttgagcatcccaatgttgtcaggcttatggacgtctgtgcaacagcccgaactgaccggga

SEQ ID NO: 2089 - DNA, 399 bp, Bos taurus
  Clone ID: 10-BOVMS1-001-Q1-E1-C5
attgtttttaaaaagcctatacagagattccatgtagaaattactgtgttattgtccaagagattagcagtgggcatcaaaacctcaaagttattgaatcttcaatgtaacaatcagagcttaaaaaaaataataaatattaaattgaacagattatttctcttgttaatctgtctcaatcaattataaaggagcttcctaaatttgagtttattaatcctttcatttgcattgttaaagtgcctttacactcctttttctattacaaatgaaactggagaatgaaatatgtacatttacattagaaaaaaattttttttaatagcaaaaacctttcttcatgcttcaagatataataagaagcctgtgcactatattaaagagtatatgctgtgagaa

SEQ ID NO: 2090 - DNA, 376 bp, Bos taurus
  Clone ID: 10-BOVMS1-002-Q1-E1-C5
acgatcaacgtatcccctaagccgaatcaacctacttattactatgctgttatcatcacgactatacgcaactaagtgccttcccgccatggtcctaatcatatttgatagtctaattgatacaacactactcccagcactcattattaatactcgatgcagaagccatacagactgcctaaacgactgagtccacttccaactcaattcacaatgcggttccctacttacaaaatccacactaatttaattcgatcacacagtaagctctctaagtttcctcatattaccatattgagtacagactgtacaaatatcttgatataaggtcttcatcttctatcatgatatataccattcatagtaataataccac

SEQ ID NO: 2091 - DNA, 449 bp, Bos taurus
  Clone ID: 10-BOVMS1-003-Q1-E1-C5
atcgagagcggccgccctttttttttttttttatgtgttgtcatgcagatataggctgactaggagagtgaatacataggcttggattatagctactgcaaactctagaattgttagtaggattagaatggtgaatgtaattagagctgttgtagtgctaatgcttattagtgcaagtgtagctcctccgattaggtgaattaataggtgtcctgcagtgatgttagctgttaaccgcacggcgagggctataggttgaataaaaaggctgatagtttcaataattactagtattgggattagtggggtgggtgttccttgtggtaagaaatgggcaagtgatgctttagttttattgcggaatcctgtaattacggctcctgctcacaaggggatggctatgcctaagtttattgatagttgtgttgttggtgtgaatgaatggggta

SEQ ID NO: 2092 - DNA, 368 bp, Bos taurus
  Clone ID: 10-BOVMS1-004-Q1-E1-C5
atcagaacagagacgctcactcaggttgaagcttattaacacgcgtgtgagaagtgatagtgcgtcaatcatgtcatcaaactttgggacactgacctgcattatgtaaagtagcgtctgagagaagatgtgagatataaatctgtctggcattgcagataattcgtcttttctaacatgacgggctacagtgatcgtgcgaaactgtcgagagtcgtaaaatttactcaggctgtgatgagactaggacgagataagtaacgtgcctggaattacttgagatgtattttgcacgatcatcgtcattccaactattgcaatctgttaaatgaattatctgacctacatctacgtcacagttctcgcta

SEQ ID NO: 2093 - DNA, 336 bp, Bos taurus
  Clone ID: 10-BOVMS1-006-Q1-E1-C5
gcgtccgcttaaaactaattattcccatcctattggccgtagcattccttacgttagtggaacgaaaagttctaggctatatacaactccgaaaaggtccaaatgtcgtaggtccatatggcctacttcaacccatcgccgatgcaatcaaacttttcattaaagaaccactacgacccgctacatcttcagcctcaatatttatcctagcacctatcatagctttaagcctagccttaaccatgtgaattcccctaacaataacctatcctcttatcaacataaacctaggagtcctatttatactagccatatcaagcctagccgtatactcca

SEQ ID NO: 2094 - DNA, 343 bp, Bos taurus
  Clone ID: 10-BOVMS1-006-Q1-E1-C9
atgcgacgtcatagctcttctatagtgtcacctaaattcaattcactggccgtcgttttacaacgtcgtgactgggaaaaccctggcgttacccaacttaatcgccttgcagcacatccccctttcgccagctggcgtaatagcgaagaggcccgcaccgatcgcccttcccaacagttgcgcagcctgaatggcgaatgggacgcgccctgtagcggcgcattaagcgcggcgggtgtggtggttacgcgcagcgtgaccgctacacttgccagcgccctagcgcccgctcctttcgctttcatcgcttcctttctcgcgacgttcgccggctttccccgtc

SEQ ID NO: 2095 - DNA, 83 bp, Bos taurus
  Clone ID: 10-BOVMS1-007-Q1-E1-C5
aaaaaaaaaaaacaaaaaaaaaaaaaaaaaaaaaaaaaaaaaaaaaaaaaaaaaaaaaaaaaaaaaaaaaaaaaaaaaaaaaa

SEQ ID NO: 2096 - DNA, 412 bp, Bos taurus
  Clone ID: 10-BOVMS1-008-Q1-E1-C5
gtaaactgggaaataaaaatggtcactgtagagtttgcagatgaagtacggttgtccttcatttgcactgaagtagattgcaaagtggttcatgaattcattggtggctacatatttctctcaacacgtgcaaaagaccaaaatgagagtttagatgaagagatgttctacaaacttaccagtggttgggtgtgaacagaaatgctgtgtaatgaaactccgtggccataacagttgtttaactttaaaagctgttgtttgttatatgctgcttaataaagtaagcttgaaattcattattttatcatgaaaacttttttgccttaccagaccagttaatatgtgcactaacaagcacgactattaatctgctatcatgatacaatgtacggacttgaatatggcacatgtt

SEQ ID NO: 2097 - DNA, 337 bp, Bos taurus
  Clone ID: 10-BOVMS1-009-Q1-E1-C5
ccacgcgaccggagaaaccagtggaaaggatatgtgccttgtattatagtgagacatggacctaataaaaagagcctttgtttatttaatttttagtttcagtacattaaatttactcatacaagcattcgaaaaatgtacaaatttttcctgttttaacacaagtatagtaaaacataaaaaccccaagcacagaatacgtagaatttacagttcatcatcaaattagcagaatattaaataattacacaactatagtcatttaagaatatttatagagttacatgcaattttgtagagttgacataaacaaatggcacatgaatgggataatttt

SEQ ID NO: 2098 - DNA, 298 bp, Bos taurus
  Clone ID: 10-BOVMS1-010-Q1-E1-C5
caagacaatagagaacacagtagagctgtcgttaaatttatgaaacaacaaaatattactaactgcccaaaatatcaatttgatgtagttcttttcatgcaagtttaaattcaattgttagttataattgttggacctccttgagatagtaacaacaaaataaagcaagctatctgcacctcaaaaaaaaaaaagcaactaaaaatagtcagaaaaaaataaatgtcaaggccgacgtttaaaaaattcgagtcggggaaaatctcggtctgagccaaatttgtcgctttgaaacaaa

SEQ ID NO: 2099 - DNA, 273 bp, Bos taurus
  Clone ID: 10-BOVMS1-012-Q1-E1-C5
cgacccacgcgtccgaacaagacgtccgcccacgcgtctgcccacgcgtccgcccacgcgtccgaaaaaaaaaaaaaaaaaaaaaaaaaaaaaaaaaaaaaaaaaataaaaaaaaaaaaaaaaagaaaaaaaaaaaaaagaaaaaaaaaaaaaaaaaaaaaaaaaaaaaaaaaaaaaaaaaaaaaaaaaaaaaaaaagaaaaaaataaaaaaaattaatagttataaaaaaaaaatgtatggggagcagatttaataaatttatagatatttt

SEQ ID NO: 2100 - DNA, 98 bp, Bos taurus
  Clone ID: 10-BOVMS1-012-Q1-E1-C9
aaaaaaaaaaaaaaaaaaaaaaaaaaaaaaaaaaaaaaaaaaaaaaaaaaaaaaaaaaaaaaaaaaaaaaaaaaaaaaaaaaaaaaaaaaaaaaaaaa

SEQ ID NO: 2101 - DNA, 431 bp, Bos taurus
  Clone ID: 10-BOVMS1-013-Q1-E1-C5
gaggcatgatatatttaaagtgtgaaagggaaaatgcaagcaagaatactctacacaccaaggctgtcattcagatttgaaggataagtcaaaaactttaaagacaagcgaaagctaaaagaattcatcaccatactagctttacaacatatgttaaaggaacgtgtctagtggaaacagaaaaggctgccagtgtaaataagaaaattatgggatgaaaaactcaccagtaaaggcaaacatacagcaatggtatgaaatcagcctcccgcaaagctagtagggaagatagaaggagaagtactaaagtcatcgctatccacaatgagcacttaagggatataccatacaactagatgtaaaatgtcataaagagtaattgtgatggtggggaaagtactaatgcatggtatttaacatgcagttgatag

SEQ ID NO: 2102 - DNA, 368 bp, Bos taurus
  Clone ID: 10-BOVMS1-014-Q1-E1-C5
atgcgacgtcatagctcttctatagtgtcacctaaattcaattcactggccgtcgttttacaacgtcgtgactgggaaaaccctggcgttacccaacttaatcgccttgcagcacatccccctttcgccagctggcgtaatagcgaagaggcccgcaccgatcgcccttcccaacagttgcgcagcctgaatggcgaatgggacgcgccctgtagcggcgcattaagcgcggcgggtgtagtggttacgcgcagcgtgaccgctacacttgccagcgccctagcgcccgctcctttcgctttcttcccttcctttctcgccacgtacgccgggttttcccggtcaagctctaaatcgggggctccctt

SEQ ID NO: 2103 - DNA, 302 bp, Bos taurus
  Clone ID: 10-BOVMS1-014-Q1-E1-C9
aagacgcgtgggaaacgctcaatcacgtgccataaaaaaaaacattataataaataaatatacaaaaaatataaaaaaataacatatcataaacccccaaaataaaaaaaaaaaaaaaaaaaaaaaaaaaaaaaaagggctgaccctctaaaggttccaaacttacttacccttccatccaaattcatacctcttcaatattgtcaccaaaattcatttcactggccttctttttacaacttctttactgaaaaaaccctggatttacccaacttaatcgccttgcataacatccccctttc

SEQ ID NO: 2104 - DNA, 436 bp, Bos taurus
  Clone ID: 10-BOVMS1-016-Q1-E1-C5
tgctatgataaattcttaagctcagatctccgtacagcaaagtaaaatttttaggctagaatattttttatttttaattaaactttatattttgagataattacagatttcatgtgcagttttactaaataatggagaggtcctctgtacctttagtaagtttcccctcagtagggaaagtatcacaacctggacattggcctcattacagcccagatacagaacttccatccccggaaggattcctcactctgtccttttacagtcgtacatgcttctctcctgctcctcttcctgtagcatcactaggctgttctcctttcctgtaatgttttttcttttcaaggatgttctataaatggaatcatatagtatataacctcttgggattgacttttctcactcagcacaattttctggagcttcaactcacacg

SEQ ID NO: 2105 - DNA, 403 bp, Bos taurus
  Clone ID: 10-BOVMS1-017-Q1-E1-C5
cttgcctgaaaaaattgtggagatatccagacataaaatccaaactcttgatattataccaaggtctgaaggaaacgcaatggctttctgcatctttgaatatgtttattttgcaagaccagatagtatatttgaaaaccagatggtttacacagtaagatatcgctgtggtcagcagctggccattgaagcccccgtggatgcagatttggttagcactgtcccagaatccgctacacctgctgctcttggttacgcaacaaagtgtgggcttccatacgtggaggtgctgtgtaaaaaccggtatgtaggaagaacattcattcagccaaacatgaggttaagacaacttggtgttgcgaaaaaatttggagtactgtcagacaactttaaaggaaaaaga

SEQ ID NO: 2106 - DNA, 275 bp, Bos taurus
  Clone ID: 10-BOVMS1-017-Q1-E1-C9
tgcaaagtcaaatcctgggttatagatcaaaagaaacctgttcgattctatcatgattggaatgacaaagagattgaagtattgaataaacacttatttctgacttcaaaagcaatggtctacttggttaatctttccgaaataagactacattagaaagaaaaacaaatgggtgagacaacttaaagagtgggtggacaagtatgactcaggtgccttggtcattccttttaatggggccatgggactcaagttgcaataattgagtgctgagg

SEQ ID NO: 2107 - DNA, 299 bp, Bos taurus
  Clone ID: 10-BOVMS1-018-Q1-E1-C9
cttaaaaggctaatgacagtgggatctaagacacagtccactggctcagttcccaggattagcttactctgtgacttgtgttagtcaggacaaccttgtgcttctcagattttgaagtgctgctggtaagctatgtgccagctttgcctttctcttgagcgtgagcatttcagatcaaaggggtcagcattcaccgtaaagctaatttgcctttggctgggtgtccaacttgaaagaacagagcccgtgtggtttagttacatgtcttactatacgtacctgcactttcagcttctgta

SEQ ID NO: 2108 - DNA, 289 bp, Bos taurus
  Clone ID: 10-BOVMS1-020-Q1-E1-C9
cgacgaggccggcccctccatcgtccaccgcaaatgcttctagacgcctctccgacagccgcgacttctccccaggacgacgaatctgctcgcggcgcaggcggctgacctcgagccaccgcgcagcagctgctctccaaccatcagcgttgccgctgccgcaaactgacacactgtttataatgtgtacatacattgtttacctcattttgttatttttaaaacgaagccctgtggaaggaaatggaaaacttgaagcattaaactcagccgttctgttttgctgcgt

SEQ ID NO: 2109 - DNA, 321 bp, Bos taurus
  Clone ID: 10-BOVMS1-022-Q1-E1-C5
ggagcactcaggccatcctcaaggatacccagatccacctggctgatgctctgcggggccatgaggacttgcaggagcagctggccatggtggagcgcacagccaacctgctgcaggctgagatcgaggagctgagggccaccctggagcagacagagaggagcaggaagatctcacagcaagagctcctgaatgccagtgatcgtgtccagctcctgcatacccagttcaccagcctgatcaacaccaggtcgaagctagatacagacatcactcaaattccacgagagatggaagacattatccacgaagctcgcaacg

SEQ ID NO: 2110 - DNA, 372 bp, Bos taurus
  Clone ID: 10-BOVMS1-022-Q1-E1-C9
tgaaggttggatgtacggcactgtgcagaggactggcaggactggcatgctcccagccaactacgttgaagctatttagacacttcaaagcatcaatcctgtctacatgacctacaaatcttgttagtatttcagtttagactctccactattctccaagttctcaaactgcctaatagtttttgttatgatttacggttgcaccatcccttaatttgtttctacacatacctaaataattcaccagtgtattagtacaattaatctatccaattattaaactagacttacctctattttctggacttgcacataaaacctgagacaacattaaacccataggttttttttatgtaagtaaaaaatttcctt

SEQ ID NO: 2111 - DNA, 453 bp, Bos taurus
  unsure (443): unsure at all n locations; Clone ID: 10-BOVMS1-023-Q1-E1-C5
ccacgcaaccggaaggcgttccagtttgtggaagcccatggagaagtctgcccagccaactggacacccgagtctcctacaatcaagccccatccaactgcttccagagaatattttgagaaggtaaatcagtagaccgtcccgtgcacacctgcagcttcccacaccagaaaagagccacagtgggaactcacttgtagcttttcaaagattagtatttatagcaggcaaaaaaaaccgaacccaatgatgcttatattcataaatagtactacgctaaatgttttgtttttgtaatgttggccaaagcttttaaaatgttttcagttactaatgtaatgagtccaaggcaaggtgtggatggatggctagtttctacagagtgtgtgtgtggttgacctgtttcctggatcatgtcttcaatgggaaaaggaaacagatcnttttcctcag

SEQ ID NO: 2112 - DNA, 452 bp, Bos taurus
  Clone ID: 10-BOVMS1-023-Q1-E1-C9
tccggggccacccacgcgtccggaggagacatgctcagcatctctgataggagaggaagagctcgtaaccgtatgggacatgaggatgaagaaaattccttgactgcaatgagttctcttgtgccttttggcagttttggtggtatgcatacagatgtcagcccctttcaggcaatggaccgaatgatgttaaatatgcgaaacagtatgcaggaattacaaagaaactttggtcacctttcaatggatccaaatggacattcatttagttcctcctccgtgatgacttattccaaagtaggagatgaaccgccaaaggttttccaggcctcaacacaaacccgtagggctccaggaggaataaaggaaaccaggaaagcattaagagattccgacagtggactagaaaaaatggctgttggtcatcacctccatgaccgagctcatgtcat

SEQ ID NO: 2113 - DNA, 391 bp, Bos taurus
  Clone ID: 10-LIB188-001-Q1-E1-C5
acactttgatgaagatgagctctggactgaggggacctaccggggggtgaacctgcgcatcatcgcagcccatgaaattggccatgccctggggctggggcactcccgatacacccaggccctcatggctcctgtctacgctggctaccggccctacttcaagctgcaccctgatgatgtggctgggatccaggctctctatggcaagaagagcccagagatagaggaggaggaggaggaagaagacacggcactcccgactatacccctagtgcccacagaacccagtcccatgccagacccctgcagcagtgacctggatgccgtgatgctagggccccgaggaaagacctacgccttcaagggaaactatgtgtggaccgtgacagat

SEQ ID NO: 2114 - DNA, 394 bp, Bos taurus
  unsure (370): unsure at all n locations; Clone ID: 10-LIB188-001-Q1-E1-C9
acttatgatcggccagcccaccgggcactttgacaagcttgttgttgttcaaatgaagttccctcaaatgaggagtgttggccaaagagccattgtcaaccgcagagatgctgttgaaactcagtcccaacttagccaaattattcagtcctttcaggctagctgcatcaactttggtgattttgttgccatcgagatgtaattcagtaagggaaggaggaagaccttgagggatggtagttatatttgtgtcagcaatgcggatgtaggagagcttcttcattccctgaaaggctccattttcaatgcctgagctcttcagccggttggtgccaagttctacgacgatcaatcgggtcaatcaattganaacagacttccgcactttggtgat

SEQ ID NO: 2115 - DNA, 431 bp, Bos taurus
  Clone ID: 10-LIB188-002-Q1-E1-C9
cgccatgggcgcgggatacacctgacaggtagaacacaacaaggaaaccttccagaagaacgtgtcctcctcatgtgatgttgcaccaccatctcccatcggggtcttcaccatccccccatccttcgccgacatcttcctcacgaagtcagccaagctgtcctgtctggtcacaaacctggcctcctatgatggcctgaacatcagctggtcccgtcagaacggcaaggccctggagacccacacgtattttgagcgacacctcaacgacaccttcagcgcccggggtgaggcctcggtctgctcggaggactgggagtccggagaggagttcacgtgcacagtggcccactcggacctgcccttcccagaaaagaacaccgtctccaagcccaaagatgtcgccatgaaaccgccgtccgtgtatcact

SEQ ID NO: 2116 - DNA, 460 bp, Bos taurus
  Clone ID: 10-LIB188-003-Q1-E1-C5
catgcacccgtgcgccatggcggccggatacacagaattatcagggataactggaaaatcaccagagaaatgctcaatgaaaatcaagctctttgactcagacctctcaggcctgaaacacaccctctattcatccaggcaacaatgcctcttgcttcttaacaggcatgctattggtcaaggtcatcaaaatggcttacaaaataacttttcaaattttgcttttgggccaacgtctgggcttatgaggatcaagcagtcctgcgaaggctgggaacagcaggtcccaaaggctccaggttccagcccttccttcccagacacaatgtcaaacacacattttatattttgaaatatggaagcatcttttaaatactcttaaggcatttatttattaaaacgttctctgccaagatttcacattaacttaaaattcaaatcagtctttacatttctctac

SEQ ID NO: 2117 - DNA, 433 bp, Bos taurus
  unsure (343): unsure at all n locations; Clone ID: 10-LIB188-004-Q1-E1-C9
acataatttattagatttagttacaacagaggtgatttcaatgggaatttcttatactgtcctacttattaaaaaaatttttatcatttgctcccaaatctgttatatcacaatgtatttttgaattagacatttaattatgtcactttcagcaaatttatttcataaatattagagatctcactttaaattattttatgaatatttccaaaacatgttttccaattattatttttatagtgaagacaaataattgacctatatttacatataaatattctctgcacagtactatttttttaaagagaatagtacggaaagtgcaaaagctcaggctctctanggcacagccaatctttgcaatagcacaatttaatcatgcctcctgattttttacattttgaattttattttctcccctcatctacttttt

SEQ ID NO: 2118 - DNA, 459 bp, Bos taurus
  Clone ID: 10-LIB188-005-Q1-E1-C5
catgctaacgagcgccatgggcgcgggatacttattgaggaaagaggccaccttgaatttgccacggtggtctccagatcggttgctgagaatgggctcatcacacttcagtggtccttcctgctcgtaaaccagccagacatagcggtgcaggcctgtgcccttgggaggcccagagcccacataatcggagagaaccgtgccactgctgatgttgttgcccttcatgttgaccaccaggaaatggtgccattccctgtatttggggtccttcctgctgggagcatccggatctgtcaagaccaaggtgtacaaaaatgctccagcgaaactgtcttaaatatttttctacaggtgtaaaaccaaagtttcctgcaaaccccagtccacgcccttcatgaatctactgtgtatctattttgcctctctagttctagaaaagtagagacaactttgaat

SEQ ID NO: 2119 - DNA, 387 bp, Bos taurus
  Clone ID: 10-LIB188-006-Q1-E1-C5
acaagaaaaaatacgtcaccaccttgttatacaaacccatatgaagaggtgggagccgccggggccccggggcagcgtgcacctccaggctccacgcatgcatgctcttcgctagacggaacggactgtaaattccccatttcacactctcagtaaggcatttcatacccgccctacacctacctgagggtttgttccagacacagcagctcccggagcacctcggtctgtaacagcgccctcagcacccggtggctgtgagccgcggggcccctcgaggccgatgatggagtaggacggccggcagcccccaccctgcagtgtgaaggatggtgcaggcctaaatttaaatcccatgaacgtggagatttttcttaagccaaaaat

SEQ ID NO: 2120 - DNA, 390 bp, Bos taurus
  Clone ID: 10-LIB188-006-Q1-E1-C9
acttgctgatgctctgtttggaggcccgggtggtctccacgttgcgggtgatggtgctgccgtctgccttccagaccacggtcacgctacccgggtagaagtcgctgatgagacacaccagggtggccttgttgccgttgagctcctccgtggagggcgggaacagggtgaccgagggtggggacttgggctgacccaggacggtcactgctgtcccgctgccgaatacagcggaagtgctactggagtcagcagttgcgcagaaataatccgcctcgtcctcagcctggagcgaactgatggtcagggtggctgtgttgccagatttgaagccggagaatcggtcggggacccccgagggtcgatctgtagttcgagcggccgcccggg

SEQ ID NO: 2121 - DNA, 271 bp, Bos taurus
  Clone ID: 10-LIB188-007-Q1-E1-C5
gccatgggcgcgggatacattgtttggtatatttagctcatccagacgcgattgcacttcgaattgctgctactgtcctacttaataacgaaatttttatcatttgcgcacagttctgttatatcaacatgcacttatgaatcagacatggtaatggttcacatccacctcagttacttcaacagatactattgatgtcatcatgggttactttatggatatgtccaagacatgtgttcccatctacactttccttcatgatcgccaataa

SEQ ID NO: 2122 - DNA, 433 bp, Bos taurus
  Clone ID: 10-LIB188-008-Q1-E1-C5
acttcctgaacaagattgatgtcatcaagcaggatgactacgtgcccagcgaccaggatctgctccgctgccgtgtcctgacttctggaatctttgagaccaagttccaggtggacaaagtcaacttccacatgcttgacgtgggcggccagcgcgatgaacgccgcaaatggatccaatgcttcaatgatgtgactgccatcatcttcgtggttgccagcagcagctacaacatggtcattcgggaggacaaccagaccaaccgcctgcaggaggctctgaacctcttcaagagcatctggaataacagatggctgcgcaccatctctgtgattctgttcctcaacaagcaagatctgctggctgagaaagtccttgctggaaaatcgaagattgaggactactttccagaatttgctcgctacactactcc

SEQ ID NO: 2123 - DNA, 397 bp, Bos taurus
  Clone ID: 10-LIB188-008-Q1-E1-C9
ggatacactgtatccctgaatgtcgttctctagactggattgacttgttctccttgtgtcttcagtgtggctttcttcgtcagcattgtaagttgagcgagtgccactgcatagcatgagactcccgtcccacgggctggtactcctggacacgcagtcactgtaacgggagcaatcacaaaactgtaatttccttaccaaatctcttcctttcagtagcctcgcctgcctaacttagtgaacgaaaagcattactttgacaggcgtttttaagtgtctcatttggttctttcatttgaaaaactattcagggggaaaggggcaaacttttagtttcttttctttttataaatgccctctggggggaaaaaattagcatctcagtatgaacatgaaa

SEQ ID NO: 2124 - DNA, 397 bp, Bos taurus
  Clone ID: 10-LIB188-009-Q1-E1-C5
acctaggaatgtctctgaacaattgaacaaaatcaacacgataaaactgtcctatcgaagaaaccaaaagcatccatcggcctcagaggttctgagggctaggctcagagcagcccgttcccattcctgcagctggttctgtgccccacagaagtttctcatcccacagggagggccggggtgggtgagggaccagtcccctcctcctagcatgctagggtatctcagagtcaccagtggggcatgcctttccccaaccccagtcctgtcctaaagtaaaaggagaccctcgtgggcatcaccgccaaagccagggaacaaggtgaggcagctcaggtgccttcctggactctccgccaaagttttactccagtctgctcagttggtgcctgatgcc

SEQ ID NO: 2125 - DNA, 417 bp, Bos taurus
  Clone ID: 10-LIB188-010-Q1-E1-C5
acacagtctatgacagagccgagaacaagggcacttgccaatttcgagttaaagtaagagtgagacgctgcggcaagctccatgccccagagaacggctacatgaagtgctccagtgacggcgataattatggggctgtgtgtgaattctcctgcgtcggaggctacgagctccaggggagctctgcccgagtatgtcagtccaacctggcttggtctggcactgagcccacctgcacagccatgaatgtcaatgtcggcgtgagaacagcagctgcacttttggatcagttttatgagaaaaggagactgttcattgtgtccacccccgcagcccgaaacctcctctaccggctgcagctggggatgctccagcaagcacagtgtggcctggatcttcgacacatcactgtggtgg

SEQ ID NO: 2126 - DNA, 386 bp, Bos taurus
  Clone ID: 10-LIB188-010-Q1-E1-C9
acttgttttggctcctacaagggaactggcaaaccaagtagccaaagacttcaaagatgtaactaggaaactcagtgtggcgtgtttttatggtggaacatcatatcaaagccaaattaatcatattcgaaatggtattgacatcttggttgggaccccaggtcgtatcaaagaccatctgcagagcggccgcttagatctttctaaactgcgccacgttgtgcttgatgaagtggatcaaatgttagatttaggttttgctgaacaagttgaagacattctccatgagtcctacaaaactgattctgaagacaatcctcagactttgcttttttctgcaacttgcccacagtgggtatacaaagttgcaaaaaaatatatgaaat

SEQ ID NO: 2127 - DNA, 428 bp, Bos taurus
  Clone ID: 10-LIB188-011-Q1-E1-C5
actgctcaaacccgcggaggaaacgcccgtccggccccacgtcgcagccgaacatcgcctggatattgtgagacccggcctcgctctggttgtagtagccgcgcagggtgttcaggttctttcgatacagcagtgtgttttccttggagattcgcgtctcgtcatcccaatactccggcccctccttctctatccacggcgcccgtggttctttcctcggatccggggcgtcgctgtcgaaccgcacgaactgcgtgtcgtccacgtagccgacggtgatgaagcggggctccccgtcgccgggccgggatacagcggtgtagaaatacttcatagagtgggagccagctcgggtctcggtcagggccagagcccccaagagcagcacgaagagggttcgcggccccatgactcgcaactgcccgggc

SEQ ID NO: 2128 - DNA, 437 bp, Bos taurus
  Clone ID: 10-LIB188-012-Q1-E1-C5
gccatgggcccgggatacttgctgatgctctgtttgtgaggcccgggtggtctccacgttgcgggtgatggtgctgccgtctgccttccagaccacggtcacgctacccgggtagaagtcgctgatgagacacaccagggtggccttgttgccgttgagctcctccgtggagggcgggaacagggtgaccgagggtggggacttgggctgacccacgacggctagtggggtcccgctgccgacaaccgcatgacgaccgctgtcatatgactgacagtaatagtcggcctcgtcctcggcctgggccccggcgatggtcagtgtggctgttttgcctgatctggacccacagaatctgccatagattccctgtggccgcaggttatctttataaatgaccctcacaaggacctggcccggcttctgtcgggatcact

SEQ ID NO: 2129 - DNA, 369 bp, Bos taurus
  Clone ID: 10-LIB188-012-Q1-E1-C9
actattttgaccgtgatgatgtggctttgaagaactttgccaaatactttcttcaccaatctcatgaggagagggaacatgctgagagactgatgaagctgcagaaccagcgaggcggccgaatcttccttcaggatatcaagaaaccagaccgtgatgactgggagaatgggctgactgcaatggaatgtgcgctgtgcttggagagaagtgtgaatcagtcactactggaactgcacaaactggccactgaaaaaaatgatccccatctgtgtgatttcattgagactcattacctgaatgagcaggtggaagccatcaaagaattgggtgaccacataaccaacctgcgcaagatgggggctcctg

SEQ ID NO: 2130 - DNA, 434 bp, Bos taurus
  Clone ID: 10-LIB188-013-Q1-E1-C5
cgcgacgggcgcgggatacaatgccaggtcatgctggtcgactggtgtttgggatcttgaatggcagagcctgtgtgatgatgcagggcaggttccacatgtatgaaggctatccgttttggaaggtgacattcccagtgagggttttccggcttctgggtgtggagaccctagtggtcaccaacgcagctggagggctcaaccccaactttgaggttggcgatatcatgctgatccgtgatcacatcaacctacctggtttcagtggtgagaaccctctcagagggcccaatgatgaaaggtttggagttcgtttccctgccatgtctgatgcctacgatcgggatatgaggcagaacgctcacagtactagtgcccgggcctggccccaacgggagatatgcaggttcggaacccaaatgttcgaccatgcc

SEQ ID NO: 2131 - DNA, 228 bp, Bos taurus
  Clone ID: 10-LIB188-014-Q1-E1-C5
actgtgaaactcacgcccgggcccgcatgaggcccccggagggctatgacacagtcaccctttatcccaaagcttaagtcctggcagaacgagctcgcacacacccatgcgcacccacacaggctggtattaatggctttggggcagatttatagcaaagtgctgacgccaaatctagaaccaagattttagacacttactgtatttttaggagaaagaatgggaggt

SEQ ID NO: 2132 - DNA, 431 bp, Bos taurus
  Clone ID: 10-LIB188-014-Q1-E1-C9
cggatacacggacggaggtttcatggcgacgtctttgggcttggagacggcgttcttttctgggaagggcatgtccgagtgggccactgtgcacgtgaactcctctccggactcccagtcctcagagcataccgaggcctcaccccgggcgctgaatgtgtcattgaggtgtcgctcaaaatacgtgtgggtctccagggccttgccgttctgacgggaccagctgatgttcaggccatcatacgaggccaggtttgtgaccatacaggacagcttggctgacttcgtgaggaagatgtcggcgacggatggggggatggtgaagaccccgatgggagatggtggtgcatcatcacatgaagaggacacgttcttctggaacggttccttgttgtgttctacctgtcatgtgtagacacttttatcagttc

SEQ ID NO: 2133 - DNA, 360 bp, Bos taurus
  Clone ID: 10-LIB188-015-Q1-E1-C5
acatgagcaggacagagtcactcgagcccctccagggagctgtggctaaattcttctctgccagctgtgttccctgcattgatagacaagcataccccaacctgtgtcaactgtgcaagggggaaggggagaacagtgtgcctgctcctcccgggaaccatacttcggttattctggtgccctcaagtttctgcaagacggggctggaaacgttgcttttgttaaagagaccacagtgtttgagaacttgccaaagaaagctgacagggaccaatatgaacttctctgcctgaacaacagtccggcgccagtggatgcgttcaaggaatgccacctggcccaagtcccttctcatgctgt

SEQ ID NO: 2134 - DNA, 410 bp, Bos taurus
  unsure (387): unsure at all n locations; Clone ID: 10-LIB188-016-Q1-E1-C5
gccatggcggcgggatacatcactcagctgcggcagcagcacagccgcgacggcgccctggagctggccaggagtgacctggatgatgacataatcccagaggaggacatcatttcccgaagccaattccccgagagctggttgtggaccgtcattgaggaccttaaacaagcagacaaaaatggaatctccacgaagctcatgaacgtgtttttgaaagactccatcaccacttgggagattctggccgtgagcttgtcagacaagaaagggatctgtgtggctgacccctatgaggtcactgtgatgcaggatttctttatcgacctgcgtctcccctactcggtggtgcgcaacgagcaagtggagatccgagcgatcctctancacttacgggaggcggaaaatct

SEQ ID NO: 2135 - DNA, 434 bp, Bos taurus
  Clone ID: 10-LIB188-016-Q1-E1-C9
acaaatcaatgttttgaaaataatgatctcaaactttctaagttaaattttaaaaaacctgatcgtttgccatatggggtgggtttgctcttagaaccgcatgctgtagaaatgctcacagtgcatataggactcagtccttagatgttccttttcttttaagaaataacctctttgaagttgtgacgtcgcgctctgtccacttcgcgtcgcccctctgtgcacacgcatcgcattggaggccgtgcagttagcggctctacacgctcgcctggcgagatgtcactgttttctttctttaaaaaaacaagtcctgttccaaaatcgttgttggatggggtggggggtgtaccacaatcatctggctttttcacatggattatgtttggatcttgggaagaaacccttatttccctccagaaacagtgacctat

SEQ ID NO: 2136 - DNA, 418 bp, Bos taurus
  unsure (400): unsure at all n locations; Clone ID: 10-LIB188-018-Q1-E1-C5
acaagtagccagtggcgggcagagggggtgtgaggtggtattggcagaggtgagggaatggcatgcagcactggaattccttaggaggggagggtccccattgctccccaaggtgtgtgaggggttgtggggaagggggttagccgactcggagaagcaggatctctggactgggccttgtggcttcctgtgtcctccgtgggcccaacccgtcacaaggagatgaagtccatggcctgcagcagaggcagggacagcagcagcagcagcagccacgaggtgttctggatcagcaggcttatgcccccacacctgaccagtttatctctcaacacagagacatccttattggagacggagggattcgggccagagaggcggagttcacacgtgtagatcncctcatccttggtggtga

SEQ ID NO: 2137 - DNA, 381 bp, Bos taurus
  Clone ID: 10-LIB188-018-Q1-E1-C9
acaagtccttcatcagggactacccagtggtgtctatcgaggaccccttcgaccaggatgactgggaagcttggcagaagttcactgccagcgcagggatccaggtggtgggggatgacctcacggtgaccaaccccaggcggatcgccaaggccgtgagcgagaaatcgtgcaactgtctcctgctgaaagtgaaccagattggctctgtgaccgagtccctgcaggcgtgcaagctggcccagtccaacgggtggggcgtcatggtgtctcatcgctccggggagactgaggacaccttcattgctgacctggtggtggggctgtgcacggggcagatcaagactggtgccccttgccgatccgagcgcttggccgagt

SEQ ID NO: 2138 - DNA, 416 bp, Bos taurus
  unsure (76): unsure at all n locations; Clone ID: 10-LIB188-020-Q1-E1-C5
gccatgggcccgggatacccaagcacgagtgctccgagagctacacgttgacccccggaggtgggggagctcatcngagaaggtgcgcaaagcgcatcaggagaccttccctgctctctgccaactgggcaaatacactacgaacaacagctcagaacagcgtgtctctctggacattgacctctgggacaagttcagtgaactctccaccaagtgcatcattaagactgtggagttcgccaagcaactgcccggcttcaccaccctcaccattgcggaccagatcaccctcctcaaggctgcctgcctggatatcctgatcctgcggatctgcacgcggtacatattttctgtaaataagcctgcacaggggagcttctttaaggaatattgccccaaactcattaagagaaaag

SEQ ID NO: 2139 - DNA, 433 bp, Bos taurus
  unsure (394): unsure at all n locations; Clone ID: 10-LIB188-020-Q1-E1-C9
acgtgattacagagctagggtttccagcagggctccagatggtcaggcatggcttctatagcaggtctaaggaagcagcggggacgtcacaggacgaggagagggcaggtaactaccagaggcccctgtgggcatcagcaggggcctcacactgctcggtgacatcagatgcaggtctaaggagccaacgagtgactgcaggggctcgcccacccacagcttacttggcgagcgggtttctgaagctcctgccggcaaacttggccttgctgcccagttcctcttcaattcttaggaagcagaaagagagatggggagagaaagacagatgtcaaacttcaatgcaataaattttcccacccagagaggtagtcaaggacacacttcttgctangaacttggggacccaaccctcgctcagtctgcccgaata

SEQ ID NO: 2140 - DNA, 408 bp, Bos taurus
  unsure (389): unsure at all n locations; Clone ID: 10-LIB188-021-Q1-E1-C5
acagtccaactggggctggggtggcggcggccacaggcccctccccataaattaagtccctgcagccacagctgtgggcaaggcatacttgtggggggagaaggccgtcaggcagcatccttgatgcccagctaaggaatggattagggcacagggctcagagggaagaggccagaggaaaaagaagaggtatggtgcggagagggggtaaggtcccccccagtcttggtcccaggggaaaagaggccagttggtccagttttgtgggtttggagaagggaatgtattagtaagcacaagggggaggccaccgtcgggcacccccggaagagacaggccaggccccaaccctggcagaagggagtgcgagagctcccaggggctctcanggaatgtcaatgctaaaaa

SEQ ID NO: 2141 - DNA, 443 bp, Bos taurus
  Clone ID: 10-LIB188-022-Q1-E1-C5
acatgaacaataaacatagatgagaaaaatcagttgcactgaaacacttcagccaactgtagaacagagagggtgtggacactgagagggcaggggtggcaattccagaccagcttccctcaaagggctcgtggtccaagcccaaaaccagagggtgctctgggcaggaccgtgcagtgcagactctgggcaggcagacaagaaggaccagtcacaacaaggactgctgctgggcacgagtttattagcttctggcctctcgctcctgcttgatgaagttgatcagcccattggtggaagaatcgtgagaagtcactgggctgctcccgtcaagctcaggttcaattttcttagccagctgctttcccagctccactccccactggtcaaagctgttgatgtcccagatgatgccctgaacgaagatcttgtgctcatacatg

SEQ ID NO: 2142 - DNA, 286 bp, Bos taurus
  Clone ID: 10-LIB188-022-Q1-E1-C9
acctgtgtggtggggatgactgaagccccgcgacagcccaagcatcgaggacggctgctccgtgctccagctaacagttctccgcagtcagcccgcggctaacagcccctgtgcccgtccccgggaggatgacattagcgctgcccgccccacccgctcttttgttagtttagtttcctacgcattacctggctttcccggctagtccctctttatagccaaagaaatgaacattccaaggatttggaagtggaatctatgatgtgaaacactttgcctctcgagt

SEQ ID NO: 2143 - DNA, 232 bp, Bos taurus
  Clone ID: 10-LIB188-023-Q1-E1-C5
aattgtacacactagttatcagcagacatcccacacattatttcttcttggacacacccacagtgctacttcggcggtctgtgggcgtggtgtgctggcctcggacacggattcccggtaagtggcgcatccccctgtgggcgcgaatcttcttcatgcgctccaggtcttcatggattttgttgtctacaccgttggccatcacctgactgtatttctcgtccttcaactc

SEQ ID NO: 2144 - DNA, 424 bp, Bos taurus
  Clone ID: 10-LIB188-023-Q1-E1-C9
gatactcccgagacagcagcacaggtggtgcagtgggtgagctttgctgatagcgacatagtgccaccggccagcacctgggtgttccctaccttaggcatcatgcaccacaacaagcaggccacagagaatgcaaaggaggaggtgaggcgaattctggggctgctggatgctcacttgaagacgagaacttttctggtgggcgaacgcgtgacgctggctgacatcacagttgtctgcaccctgttgtggctttacaaacaggttctggagccttctttccgccaggccttccctaataccaaccgctggttcctcacctgcattaaccagccccagttccgggctgtcttgggagaggtgaaactctgtgagaaaatggcccagtttgatgctaaaaagtttgcagagagccagcctaaaa

SEQ ID NO: 2145 - DNA, 416 bp, Bos taurus
  Clone ID: 10-LIB188-024-Q1-E1-C5
ccatggcggccggatacttgagcaggacagattcactcaagcccctccagggagctgtggctaaattcttctctgccagctgtgttccctgcattgatagacaagcataccccaacctgtgtcaactgtgcaagggggagggggagaaccagtgtgcctgctcctcccgggaaccatacttcggttattctggtgccttcaagtgtctgcaggacggggctggagacgtggcttttgttaaagagacgacagtgtttgagaacttgccagagaaggctgacagggaccagtatgagcttctctgcctgaacaacagtcgggcgccagtggatgcgttcaaggagtgccacctggcccaggtcccttctcatgctgtcgtggcccgaagtgtggatggcaaggaagacttgatctgg

SEQ ID NO: 2146 - DNA, 400 bp, Bos taurus
  Clone ID: 10-LIB188-025-Q1-E1-C5
gatacaagcctatcactgagcccagaaatccaggcggccttgcatgtcgaagtggtgggtgtggtgtccactgggcatgtgacccagcataatgacttatcccgcatgcccctgctcaaagctgtgcttaaggagaccctgcgtctctatcctgtggtctctgcgaactctcgggttgacgtcaacaaggaaattgaatttggtggcttcatctttcccaataatgcccactttgtgccctgccagtacataatttcccgagactctaagatctacctctatcctgacagcctccatccccatctttggctgaggaataaccaacctgatggtctcacaaccgaacatcctctatggcactgtaccctttggctatagggttcaggcttatcagggcccc

SEQ ID NO: 2147 - DNA, 252 bp, Bos taurus
  Clone ID: 10-LIB188-026-Q1-E1-C5
gccgcatggcgcgggatattttatttttttttttttttttttttgggttaacaattctttattatgagtcaggttccgaacaaggtaaaaagcagcggcaagaggagttcaggtacggggatgagaacaccaagcctggctagctgggccactgccataggtcaaatgggagccctgggatggaagggatctggagaggggatctggggtcaatctacaggagacgacacggatcagcggatggtgtagcgt

SEQ ID NO: 2148 - DNA, 406 bp, Bos taurus
  Clone ID: 10-LIB188-026-Q1-E1-C9
acatcggacacggacctgcccaatgcctttgaaggaccaattaccataactattgtaaaccgtgatggcacccgttataccaagaaaggcgaatacagaactaacccagaagacatcaaccccagcgtcgttagccccagcagccctcctgacgatgagatgagcagcggctcccccagtgagagaagcacttcaggaggctacagcatcttccacacgcacctcccaactgtgcacccgtccccagaccaagacggcccctgggtctccagcgagccagagaatacctcggataccagagactacggctcgtcccacgaccccagtggaagatcctatacaactcacgcatctgaatcagctggacactcaagtgggagtgaagaacatggggcaaacacaacct

SEQ ID NO: 2149 - DNA, 394 bp, Bos taurus
  Clone ID: 10-LIB188-027-Q1-E1-C9
actctgcaatgccagatccaggagcccccatcttgcgcaggttggttatgtggtcacccaattctttgatggcttccacctgctcattcaggtaatgagtctcaatgaaatcacacagatggggatcatttttttcagtggccagtttgtgcagttccagtagtgactgattcacacttctctccaagcacagcgcacattccattgcagtcagcccattctcccagtcatcacggtctggtttcttgatatcctgaaggaagattcggccgcctcgctggttctgcagcttcatcagtctctcagcatgttccctctcctcatgagattggtgaagaaagtatttggcaaagttcttacctgcccgggcggccgctcgaacagaacttcgtta

SEQ ID NO: 2150 - DNA, 363 bp, Bos taurus
  Clone ID: 10-LIB188-028-Q1-E1-C5
actttcaaaacacagcctcagtttccttctgtcagtcacagcccctgaccataagattcgttatctgcagttctggctggtggattctgcaggtctctcccaccactgatcctctagccctagaagcatccttgccaacatcacgtgcctgttacttccctttgtccatcttcaggccacttagggatgaccccctggcagccaataccctgatataaaattaacacaaagtctgacttggtgaatattagttttgaacagaaaagtagaaaatctgaagatgcaatgtgtgttgaaggcagactcgagcagatcaagtgttccacccatgtgccaccaagacaatgggtggaagtgcacccg

SEQ ID NO: 2151 - DNA, 406 bp, Bos taurus
  Clone ID: 10-LIB2809-001-Q1-E1-C5
tcggataccacttgctactcattctgttacaaccagcatcttaggtctgatcaaaactgcccctagctcactgtggtagacagaaggcccttctgttgaactgagtccatcctccttacggtgactgggctttcaaacggcacccctgcgcatccacctaaacacttatatacacattaatgtcttgtaataaaaatattttatcacaattttttttcagttaacagtttttttccaaccattttggaattcacatcttggacttctctcttaatgcgcatatgtccacttcattcattttgcacacaggattccacctgataatggactcacattttgtgattagctttactatggctgaagatttcaactgcttatcattttcttcggataaaatcactcccat

SEQ ID NO: 2152 - DNA, 391 bp, Bos taurus
  Clone ID: 10-LIB2809-002-Q1-E1-C5
acaaaaaaacctaaaaattgtttcaggaatgtagagaaatatccaacttaaatagcgaaaaagtgcgccataattactgctgcactgcagtcatttctgcatttcccatgtttcttaaataactatcttgtctgataacacacaatataaagagcaattatgaaaaacagacatttacatatacttctaaagtcttattgagaatatcctgttggcatcggataaccaatcataggcgcagctgcagtagcaggatatgcatatgcctgttggttcataccattgtgcatatttggaacgttacttccatattgctgagtgctatcataaccgttctggtaagtccctgttggatttacagtcctaaaactggtctgtataccagcagaca

SEQ ID NO: 2153 - DNA, 434 bp, Bos taurus
  Clone ID: 10-LIB2809-003-Q1-E1-C5
ggcgatacagcagaaaggcctgaatgggcatatctctctggggatagggcactgctttctggggaacaggcaggactttggactgagaaagggacagcacggactgaggaggaaacatgacagttggaggaagaggctggtgaggctggtgcatccaagactggagcagaggcagaggaaggtgcagattttcaacatcagtgagagtcaggctctggctttcagtaaagggctcaactggatatttagggaagggcatttctttgtgcttaggagccatagcctccttcactttggagactcccattacttcaagctgaaggaaaggccggaccaccacaagggttttagttacaagaaggaagtttttgtggaggctgttaaggattggcccaaggaaaggatagactaaaaactgtttcctgggcaaaggg

SEQ ID NO: 2154 - DNA, 490 bp, Bos taurus
  Clone ID: 10-LIB2809-004-Q1-E1-C9
tcccggcggccatggccgggcgatacagcagaaaggcctgaatgggcatatctctctggggatagggcactgctttctggggaacaggcaggactttggactgagaaagggacagcacggactgaggaggaaacatgacagttggaggaagaggctggtgaggctggtgcatccaagactggagcagaggcagaggaaggtgcagattttcaacatcagtgagagtcaggctctggctttcagtaaagggctcaactggatatttagggaagggcatttctttgtgcttaggagccatagcctccttcactttggagactcccattacttcaggctgaaggaaaggcggcaccaccacaggggtttgagtaagaggagggatgttttgtgggaggctgttagggatgggcccagggaagggatagactagagactgtgtctgggcaaaggggtggattttatcctggagttcatcctctgtttgctgctg

SEQ ID NO: 2155 - DNA, 447 bp, Bos taurus
  Clone ID: 10-LIB2809-006-Q1-E1-C9
aaaaaacaataacagcacagaatatggactcttccagataaataataaaatttggtgcaaagacgaccagaaccctcactcaagcaacatctgtaacatctcctgtgacaagttcctggatgatgatcttactgatgacattatgtgtgtcaagaagattctggataaagtaggaattaactactggttggcccataaagcactctgttctgagaagctggatcagtggctctgtgagaagttgtgaacacctgctgtctttgctgcttctgtcctctttctgttcctggaactcctctgccccgtggctacctcgttttgcttctttgtacccccttgaagctaactcgtctctgagccctgggccctgtagtgacaatggacatgtaaggactaatctccacgggtgcatgaatggcgctctggacttttgacccttgctcgatg

SEQ ID NO: 2156 - DNA, 293 bp, Bos taurus
  Clone ID: 10-LIB2809-007-Q1-E1-C5
tacaactaaattaggagttgatattaacataaattactccacaattattcttacgtcacaaataactactatcccacataaaaatggaaaaatcccacccagttaatgaaaacgtatcctgtggaggtttccatggcaatgagtttatgcattcggagattttgtccggctagttatccaccctttatctgacgcatttattccatctctcacatagaaccatatacattcctgacggcatctagtacacgtcgctcgtggtggacacacttcatggtgcacactgctactat

SEQ ID NO: 2157 - DNA, 246 bp, Bos taurus
  Clone ID: 10-LIB2809-008-Q1-E1-C5
gccatcggcccgggataccgcaaaaacgcctgactgggcgtctctctctggggatagggcactgctttctggggaacaggcatgactttggactgatatcgggacagcaccgactcatgaggaaacatgacagttggacgaatatgctggtgaggctggtgcatccaagactggagcataggcacaggaaggtgcagattttcaacatcagtgacagtcaggctcaggctttcactatagggctca

SEQ ID NO: 2158 - DNA, 411 bp, Bos taurus
  Clone ID: 10-LIB2809-011-Q1-E1-C5
acagcagaaaggcctgaatgggcatatctctctggggatagggcactgctttctggggaacaggcaggactttggactgagaaagggacagcacggactgaggaggaaacatgacagttggaggaagaggctggtgaggctggtgcatccaagactggagcagaggcagaggaaggtgcagattttcaacatcagtgagagtcaggctctggctttcagtaaagggctcaactggatatttagggaagggcatttctttgtgcttaggagccatagcctccttcactttggagactcccattacttcaggctgaaggaaaggcggcaccaccacaggggtttgagtaagaggagggatgttttgtgggaggctgttagggatgggcccagggaagggatagactagagact

SEQ ID NO: 2159 - DNA, 266 bp, Bos taurus
  Clone ID: 10-LIB2809-012-Q1-E1-C9
acactcaccacggccctggcgcgggcccggggagcaccttgacttcggcctcagtgccctccatcacatcatgctcgctgaacgcatgccctgaggagtccccgctgctcgtcggccccatgctgattgagttaaccataactcgtggacctgaagcttgtggatcagcagaacccgacggtgaagtctggtggtcgctacacccccatggagtgcatctctcctcacaacgtggccatcatcactccattccgcaaccggcagga

SEQ ID NO: 2160 - DNA, 374 bp, Bos taurus
  unsure (354): unsure at all n locations; Clone ID: 10-LIB2809-013-Q1-E1-C5
acagcagaaaggcctgaatgggcatatctctctggggatagggcactgctttctggggaacaggcaggactttggactgagaaagggacagcacggactgaggaggaaacatgacagttggaggaagaggctggtgaggctggtgcatccaagactggagcagaggcagaggaaggtgcagattttcaacatcagtgagagtcaggctctggctttcagtaaagggctcaactggatatttagggaagggcatttctttgtgcttaggagccatagcctccttcactttggagactcccattacttcaggctgaaggaaaggcggcaccaccacaggggtttgagtaagagganggatgttttgtgggaagctg

SEQ ID NO: 2161 - DNA, 381 bp, Bos taurus
  Clone ID: 10-LIB2809-014-Q1-E1-C5
acagcagaaaggcctgaatgggcatatctctctggggatagggcactgctttctggggaacaggcaggactttggactgagaaagggacagcacggactgaggaggaaacatgacagttggaggaagaggctggtgaggctggtgcatccaagactggagcagaggcagaggaaggtgcagattttcaacatcagtgagagtcaggctctggctttcagtaaagggctcaactggatatttagggaagggcatttctttgtgcttaggagtcatagcctccttcactttggagactcccattacttcaggctgaaggaaaggcggcaccaccacaggggtttgagtaagaggaaggatgttttgtgggaagctgttaggga

SEQ ID NO: 2162 - DNA, 417 bp, Bos taurus
  Clone ID: 10-LIB2809-015-Q1-E1-C9
ccgctatgggcccgaaatacttgtaagctcaccactaacaatggtattgatagtagggatttctgttttatcctgatttttctttggtggaatggtcacaaatgataaatttgggtgtgggtgacatgccatggtaattggctgagcttagcaggacttggcaggcacagtatttgacaaaacttgccattgaaaaatttgggcaggtgaccaaactgcagctggctttgcataatatgggtatggcagaaattgattattaattagtgcaactggtttctgttggtagtaattgagtccataactaggatacctacgcagcacatactgaattgggataaatttggctattttgtcactgaagaatctttcatccttcccacagcttattggttgttcttggttttgctcctgggc

SEQ ID NO: 2163 - DNA, 450 bp, Bos taurus
  unsure (394): unsure at all n locations; Clone ID: 10-LIB2809-017-Q1-E1-C5
gccatgggcgcgggatacagcagaaaggcctgaatgggcatatctctctggggatagggcactgctttctggggaacaggcaggactttggactgagaaagggacagcacggactgaggaggaaacatgacagttggaggaagaggctggtgaggctggtgcatccaagactggagcagaggcagaggaaggtgcagattttcaacatcagtgagagtcaggctctggctttcagtaaagggctcaactggatatttagggaagggcatttctttgtgcttaggagccatagcctccttcactttggagactcccattacttcaggctgaaggaaaggcggcaccaccacaggggtttgagtaagaggagggatgttttgtgggaagctgttanggatgggcccaaggaagggatagactagagactgtgtctgggcaaaggggtggatt

SEQ ID NO: 2164 - DNA, 416 bp, Bos taurus
  unsure (412): unsure at all n locations; Clone ID: 10-LIB2809-019-Q1-E1-C9
acttcaacatcaggaacagctgcccaaatcaacgtgattccaccatctccgtggaagagaatggggtgtcagcagaaagccggttctcagttcagatgttcaagtttgctggaaattatgacctagttttcctgcattgtgaggtttctctctgtgatttcattaaagaagagtgccaaccgtcttgctcaagaagtcaactccgcagtgaaggggtggctattgatccagcccgagttctagatctgggacccatcactcgcaaaggtgcccagtctcttggtgtcatgagtggaacacccaacactgcagggttcctggtggcctggcccctggttctcctgcctgtcctcctggctgggctgttctgagagctcagctgggcatctggccttgaagcttgtgttcttcnctct

SEQ ID NO: 2165 - DNA, 373 bp, Bos taurus
  Clone ID: 10-LIB2809-020-Q1-E1-C5
accccaactggaaattgttcccaatagtgctgaggaacgacttcacagtatgaaagagggaatccatgcccaacagaaagaacctatgataggagtgaatcaggaactggcctacttctaccctgagcttttcagacaattctaccagctggatgcctatccatctggtgcctggtattacgttccactaggcacacaatacactgatgccccatcattctctgacatccctaatcccattggctctgagaacagtgaaaagactactatgccactgtggtgaagagtcaagtgaattctgagggactccacagttatggtctttgatggttctgaaaattccatgctctacatgtcttttcatctatcatgt

SEQ ID NO: 2166 - DNA, 393 bp, Bos taurus
  Clone ID: 10-LIB2809-021-Q1-E1-C9
cgccatgggcgcgggatactgtcaatgtgggtcgtgtggagactggtgttctcaaacctggcatggtggtcacctttgctccagtcaatgtaacaactgaagtgaagtctgtagaaatgcaccatgaagcattgagtgaagcccttcctggggacaatgtgggctttaatgtcaaaaacgtgtctgtcaaagatgtccgtcgtggcaatgtggctggtgacagcaaaaatgatccacccatggaagctgctggcttcacagctcaggtgattattttgaaccatccaggccaaatcagtgctggatatgcacctgtgctggattgtcacacagctcacattgcttgcaagtttgctgagctgaaggagaagattgatcgtcgttctgggaaaa

SEQ ID NO: 2167 - DNA, 444 bp, Bos taurus
  unsure (406): unsure at all n locations; Clone ID: 10-LIB2809-022-Q1-E1-C5
gccatgggcccgggatacagcagaaaggcctgaatgggcatatctctctggggatagggcactgctttctggggaacaggcaggactttggactgagaaagggacagcacggactgaggaggaagcatgacagttggaggaagaggctggtgaagctggtgcatccaagactggagcagaggcagaggaaggtgcagattttcaacatcagtgagagtcaggctctggctttcagtaaagggctcaactggatatttagggaagggcatttctttgtgcttaggagccatagcctccttcactttggagactcccattacttcaggctgaaggaaaggcggcaccaccacaggggtttgagtaagaggagggatgttttgtgggaggctgttagggatgggcccanggaacggatagactagagactgtgtctgggcaaagggg

SEQ ID NO: 2168 - DNA, 351 bp, Bos taurus
  Clone ID: 10-LIB2809-023-Q1-E1-C5
gattgtggaaagcctttcaagcagtgaggaatctattacacgcatcaataagaaaattgagaagtttcagagtgaggaacagcagcaaacagaggatgaactccaggataaaatccacccctttgcccagacacagtctctagtctatcccttccctgggcccatccataacagcctcccacaaaacatccctcctcttactcaaacccctgtggtggtgccgcctttccttcagcctgaagtaatgggagtctccaaagtgaaggaggctatggctcctaagcacaaagaaatgcccttccctaaatatccagttgagccctttactgaaagccagagcctgactctcac

SEQ ID NO: 2169 - DNA, 359 bp, Bos taurus
  Clone ID: 10-LIB2809-025-Q1-E1-C5
gcataaaggccagaatgggcatatctctctggggatacggcactgctttctggggaacaggcagggctttggactgagaaagggacagcacggactgaggaggaaacatgacagttggcggaagatgctggtgaggctggtgcatccaagactggagcacatgcagaggaatgtgcatattttcaacatcagtgacagtcaggctctggctttcagtaaacggctcaactggatatttacggaaaggcatttctttgtgcataggaaccaaaatctccttcactttggagactcccattacttcaagctgaacgaaaggcgacaccaccacaggggtttgcgtaagaagaaggatgttt

SEQ ID NO: 2170 - DNA, 422 bp, Bos taurus
  Clone ID: 10-LIB2809-026-Q1-E1-C9
accaataacaccaattttatagacatcctggagaggcaaacgcaagggtttgtcagttgggcgagttggtggcacaatgcaatccacagcttcaagcagggtggttccactggcattgccgtccttacgggtgactttccatcccttgaaccatggcatattagcacttggttctagcatgttgtcaccattccagccagaaattggcacaaatgctactgtgtcggggttgtagccaattttcctaatataagtgctgacttccttaacaatttcttcgtatctcttctggctatagggtggctcaatggaatccattttgttaacgccaacaattagctgtttcacacccagcgtgtaagccaaaagggcatgctcacgggtctgcccgttcttggagataccggcttcaaattcaacaa

SEQ ID NO: 2171 - DNA, 231 bp, Bos taurus
  Clone ID: 10-LIB2809-027-Q1-E1-C5
aggagccccaccaacagacagaaacatagaggaaaaggcagacgacgtccacaaaatgtccgtatcaggcagcggcttcaaagccgaagtgggggttaaaagtaaaatgaaattttaattggcggaagaaccaaaccattaacaagggggacccaatgatgacgtggaggccgtggaagcccgtggctacaaaaaaagttgagccgtaaaccccgtcggagatagtaaaag

SEQ ID NO: 2172 - DNA, 348 bp, Bos taurus
  Clone ID: 10-LIB2809-029-Q1-E1-C5
acagcagaaaggcctgaatgggcatatctctctggggatagggcactgctttctggggaacacgcaggactttggactgagaaagggacagcacggactgaggaggaaaacatgacagttggaggaagaggctggtgaggctggtgcatcgaagactggatcagaggcagaggaaggtgcagattttcaacatcagtgacagtcaggctctggcttgtcagtaaagggctcaactggatatttagggaagggcatttctttgtgcttaggagccatatcctccttcactttggagactcccattacttcaggctgaacgaaaggcggcaccaccacaggggtttgagt

SEQ ID NO: 2173 - DNA, 398 bp, Bos taurus
  Clone ID: 10-LIB2809-029-Q1-E1-C9
cgggatacactggagattcgcaagcccagcccctatgacaggggcacttactgctgcaaagcagtcaatgaccttgggacagtggagatcgaatgcaaactgtacgtgaaaggactcttcatctaccagtcactggatgctattgatgggaaacacaccagaaggacaaattcttgttctcctttaggggaactttttgaccatggttgcgactctctttccacagtttttatggcagttggagcttcaattgctgttcgcttatgaactcatcccgactggttgtttttctgctcttttattgggatgttcatgttttagtgtacccactggcagacttacgtttcaagcgtgttgaggtttggaaaagtggatgtaactgaaattcagatagcctt

SEQ ID NO: 2174 - DNA, 366 bp, Bos taurus
  Clone ID: 10-LIB2809-030-Q1-E1-C5
acagcaaaaaggcctgaatgggcatatctctctggggatagggcactgctttctggggaacaggcaggactttggactgagaaagggacagcacggactgaggaggaaacatgacagttggaggaagaggctggtgaggctggtgcatccaagactggagcagaggcagaggaaggtgcagattttcaacatcagtgagagtcaggctctggctttcagtaaagggctcaactggatatttagggaagggcatttctttgtgcttaggagccatagcctccttcactttggagactcccattacttcaggctgaaggaaaggcggcaccaccacaggggtttgagtaagacgacggatgttttgtg

SEQ ID NO: 2175 - DNA, 331 bp, Bos taurus
  Clone ID: 10-LIB2809-032-Q1-E1-C5
tgcgggcccctcacacactggctggacccccccgccgggttggggtcttcattgaccaagaatcacgagacatcttcttcgacaacatgactgatggattggatagcgatactttctccaaggcctccatctgtggccacctccggcccttcttctgcatgtggtcctgtggcaaaaatcccctgactatctgcccactcacagacgggcttgagggactcatggtagttgtcgatgccagtgacatttcataggagatcccactgtcacccatggcggaggactctggctgcggtgatatacataccctccaatcgaagtcaatccctct

SEQ ID NO: 2176 - DNA, 273 bp, Bos taurus
  Clone ID: 10-LIB3057-001-Q1-K1-C5
gcgctccccgcccgtcgctctccgttggctgtctcgttagtcagccgccggctcgtcaaccacccgccgtagtcctcgagcttgcgactcgaggacaagcgtcctcagcgcggagaggccggactcggagtcgtcgcctgagtgcctttcatctgagaagtcagggcactgtgtagaacttctgccatacaggccgtgggtcttgcagcacatttgtaagcaatggctggcatccggaagaaactggtgattgttggagatggagccctgggc

SEQ ID NO: 2177 - DNA, 213 bp, Bos taurus
  Clone ID: 10-LIB3057-003-Q1-K1-C5
caccagacgactcaaggtcctgtggacagctcaccagctatgatggctgcaggcccggagacctccctgctcctggctatcgccctgctctgcctgccctggactcatgtggtgggcgcctatccagccatgtccttgaccggcctgtatgccaacgctgcgctccgggctcagcacctgcatcagctggctgctgacacctttaaagagttt

SEQ ID NO: 2178 - DNA, 445 bp, Bos taurus
  Clone ID: 10-LIB3057-003-Q1-K1-C9
gcggctgctgacccccaacaggcattcacccactaaaccccctagaagtcccactggtcaacacctctgtcctattggcttccggagtttctattacctgagcccatcatagtttaatagaaggggaccgaaagcatatattacaagccctatttatcaccatcacattaggagtctacttcacactactacaagcctcagaatactatgaagcaccttttactatctacgacggagtttacggctcaactttgtttgtagccacaggcttccacggcctccacgtcatcattgggtccaccttcttaattgtctgcttcttacgccaattaaaatctcattttacttctaaccaccacttctgctttgaagccgctgtctgataccgtgactttccatagacgtagtctgactttacctctatgtgcctatctattgatgaggc

SEQ ID NO: 2179 - DNA, 448 bp, Bos taurus
  unsure (262): unsure at all n locations; Clone ID: 10-LIB3057-005-Q1-K1-C5
tggtgaagtgtgtttcttgaaatcatcaccaccatggacagcaaaggttcgtcgcagaaagggtcccgcctgctcctgctgctggtggtgtcaaatctactcttgtgccagggtgtggtctccacccccgtctgtcccaatgggcctggcaactgccaggtatcccttcgagacctgtttgaccgggcagtcatggtgtcccactacatccatgacctctcctcggaaatgttcaacgaatttgataaacggtatgcccagngcaaagggttcattaccatggccctcaacagctgccatacctcctcccttcctacccctgaagataaagaacaagcccaacagacccaccatgaagtccttatgagcttgattcttgggttgctgcgctcctggaatgaccctctgtatcacctagtcaccgaggtacggggtatgaaaggagccc

SEQ ID NO: 2180 - DNA, 410 bp, Bos taurus
  unsure (264): unsure at all n locations; Clone ID: 10-LIB3057-006-Q1-K1-C5
tgaaagtgaacgtgcctgaggagtctcggaatggggagacgagccccaggaccaaaatgacatggatgaaagccgaggactcttctaaagttagtagtggaacacctatcaaaattgaagatccaaatcagtttgttcctttaaacaccaacccgaatgaggtactagaaaagagaaataagattcgagaacaaaatcgatatgacttgaaaacagcaggaccacagtctcagttgcttgctggaattgttgtggataagcctncttctaccatgcagtttgaagatgatgatcatgccccaccagctccttccaaccccttcagtcatctcacagaaggagaacttgaagagtataagaggacagtcgaacgtaaacagcaaggtctggaagaaaaccatgagctattt

SEQ ID NO: 2181 - DNA, 395 bp, Bos taurus
  Clone ID: 10-LIB3057-007-Q1-K1-C9
tcctaatatcttgcctccgaccgttttggtacctaataaatcctataaataacactttacttcttacagcgccatcaacaactcctatcttcttcttcttcccaggaactctatattgcctacacaaactacccttctcttatttcttttttcctttcaatctcattattattcttgtctgaggctctggatgatgatgatgatggtactagccccatcctacctgggctgcctgatgatgtttcaaaacactgccttgcactcgtgcctcgttcgaacttcccagccatgggtggtgtctgcaagagatggaggggctttattcgaagcaaagaatttataaccgtgcgaaaattggctgggatgcatgaggaatggctctatatcttgacagc

SEQ ID NO: 2182 - DNA, 413 bp, Bos taurus
  Clone ID: 10-LIB3057-009-Q1-K1-C5
ggcgcctgtgctttaaattgctctcgtactgggatagaaaaccaagagggagttccctacacgttttctgtatatttttttttttttcctttggtctttttcaagcttgaacaaggttccttaggcctgatgagttgttaagacagtgctttgccattgtcattttggctgattgcttcttttaagtgcatttgatagtttaaagaaaaatcctaattggctttgtctcctttacattctgctttctcccttcccaagtactgaaacaactttctaattgtcaggttagaaattaaattgctgagataaagagtttttttaagtgtatctttaaaaacccaaatgtttattgcagtggttaaatgtaatgtcttaacattcttggtggaggcttgcctgttttttttccccca

SEQ ID NO: 2183 - DNA, 406 bp, Bos taurus
  Clone ID: 10-LIB3057-009-Q1-K1-C9
gtatgatcccattgccatttactttattgttttgggttcgagtttatacccttttttgtttcctgtctagagaagatcctttagcatttgttggagagctggtttggtggtgctgaattctctcagcttttgcttgtcttaaagcttttgatttctccttcatatttgaatgagatccttgctgggtacagtaatctgggctgtaggttattttctttcatcactttaagtatgtcttgccattccctgctggcctgaagagtttctattgaaagatcagctgttatcctcatgggaatctccttgtgtgttatttgttgcttttcccttgctgcttttaatatgcattctctgcgtttgatctttgttaatctgattaatatgtgtctaggggtgtgtcgccttg

SEQ ID NO: 2184 - DNA, 365 bp, Bos taurus
  unsure (7): unsure at all n locations; Clone ID: 10-LIB3057-011-Q1-K1-C5
cggctgnagaggcgcggcggcataaggacggtacccttgccgggctactacagcactagggtgtcagttggtcccgcccagaacacttcaattctgccctggaaggatatatttaataactgattcgtgtgtcccttgaatacaagaaaatggaaactgaacagccagaggaaacctttcccaacactgaaaccaatggcgaatttggtaaacgccctgctgaagatatggaagaggaacaagcttttaaaagatctagaaacactgatgagatggttgaattacgcattctgcttcagagcaagaatgctggggcagtgattggaaaaggaggcaagaatattaaggctctccgtacagactac

SEQ ID NO: 2185 - DNA, 287 bp, Bos taurus
  Clone ID: 10-LIB3057-012-Q1-K1-C5
ttcagtgcatgatgttcatcgccacctttagcaaggagatcctacctgtgttcaggaagttcattcaagatcccatggaggtgtttgtatacgacctgacctagctcactcttctcgttctacaacttttctttgtgaaactcatggaccgttagatgattcgtttgctatactacctccttgtgttgcataagctcatctttattaagctatttactctgtaaattctttttccattggtatcttgttttctctcttttttgtttttccttattcggattcaagtt

SEQ ID NO: 2186 - DNA, 414 bp, Bos taurus
  unsure (405): unsure at all n locations; Clone ID: 10-LIB3057-013-Q1-K1-C5
cggacgcgtgggcgcgagcggccgccctttttttttttttttttttttttttttggttgcatctacacagggtttttatttttattcaactataagcaaacagcaaaattaacacaatattcaccaactccagaacagttttcttttttaaaccaaagtgtgattaatttaacaagcacagactttcagattctgataaccttttacccaacccagccctgctgctcatctagatggccaggctttaacagcaaagcaatttcttctatggagctttttccagtattgctctttaaaggagccacagtgggacactgacacgcagtaaccagcctgagacgttgggggtcccctggttgtcttggtgagacagagccgtgaaaacacatgccagtaggtaccttnacacacaat

SEQ ID NO: 2187 - DNA, 277 bp, Bos taurus
  Clone ID: 10-LIB3057-014-Q1-K1-C5
gttcaccagacgactcagggtcctgtggacagctcaccagctatgatggctgcaggccgccggacctccctgctcctggctttcgccctgctctgcctgccctggactcaggtggtgggcgccttcccagccatgtccttgtccggcctgtttgccaacgctgtgctccgggctcagcacctgcatcagctggctgctgacaccttcaaagagtttgagcgcacctacatcccggagggacagagatactccatccagaacacccaggttgccttct

SEQ ID NO: 2188 - DNA, 368 bp, Bos taurus
  Clone ID: 10-LIB3057-015-Q1-K1-C5
ggactccgagaggccagcggacctcggaaccggcagcactcgctctcaaccaggcacgcaccagtctcggaaccatggcggcagtggcggcagcgtcggctgaattgctcatcatcggctggtacattttccgcgtgctgctgcaggtgttcctggaatgctgcatttactgggtaggattcgcttttcgaaatcctccagggacacagcccattgcgagaagtgaggtgttcaggtactccctgcagaagctggcatacacggtgtcgagaaccggacggcacgtgctgggagagcgccgtcagcgggccctcaactgaggccccagccccctcccctgggcggccgtgtcaccaggtgctcctgtg

SEQ ID NO: 2189 - DNA, 428 bp, Bos taurus
  Clone ID: 10-LIB3057-016-Q1-K1-C5
atttggaattcggaagatcaggttcagattcacacttacttcaagcctcccaggtgcggtcggaccatccaggtagctgattttgtaagataccactacaacgggacattcctggacgggacactgtttgattcgagtcacaatcgcatgaaaacatatgacacctatgtgggaattggctggctgatccctggaatggataaagggctgttggggatgtgtgtgggagaaaaacgcatcatcaccattcctccttttctggcctatggagaagatggagacgggaaagacattcctggtcaggcatctctggtgtttgatgttgcgttattggacctccataaccctaaggatggcatttccattgagaataaagtagtgcctgaaaactgtgagcggcgaagtcaaagcggtgactttctcaggta

SEQ ID NO: 2190 - DNA, 248 bp, Bos taurus
  Clone ID: 10-LIB3057-018-Q1-K1-C5
gcctgctcctgctgctggtggtgtcaaatctactcttgtgccagggtgtggtctggaccgtcgactgtcccaatttgcctggcaactgccaggtatccattctagacctgtttgaccgggcagtcatggtgtcccactacatccatgctgaagatatagaacaagcccaacagacccaccatgaattccttatgagcttgattcttggtttgctgcgctcctggaatgaccctctctatcacctattt

SEQ ID NO: 2191 - DNA, 341 bp, Bos taurus
  Clone ID: 10-LIB3057-019-Q1-K1-C5
tgactattctcaaccaaccataaagatattggtaccctttatctactatttggtgcttgggccggtatagtaggaacagctctaagccttctaattcgcgctgaattaggccaacccggaactctgctcggagacgaccaaatctacaacgtagttgtaaccgcacacgcatttgtaataatcttcttcatagtaataccaatcataattggaggattcggtaactgacttgttcccctaataattggtgctcccgatatagcatttccccgaataaataatataagcttctgactccgtcctccctcattcctactactcctcgcatcctctataagttg

SEQ ID NO: 2192 - DNA, 434 bp, Bos taurus
  Clone ID: 10-LIB3057-020-Q1-K1-C5
aaaggagccccagatgctatcctatcgagggccatagagattgaggaagaaaacaaacgacttctggaaggcatggagatgatatttggccaggtaattcctggagccaaagagactgagccctaccctgtgtggtcaggactcccgtccctgcaaactaaggatgaagatgcacgttattccgctttttataacctgctccactgcctgcgcagggattcaagcaagattgacacttaccttaagctcctgaattgcagaatcatctacaacaacaactgctaagcccacattcatcctatccatttctgagatggttcttaatgatccattccctggcaaacttctctgagctttatagctttgtaatgcatgcttggctctaatgggtttcatcttaaataaaaacagactctgtagcgatgtcaaaatct

SEQ ID NO: 2193 - DNA, 421 bp, Bos taurus
  Clone ID: 10-LIB3057-020-Q1-K1-C9
gggaagttggcccagcggctgctgggtcggctgctcggcggtggtggcgggtgtatgtgaagccggtggacgccgccgcggggctccaggaagatgttaccaagtacttcggtgaattccccagcgcaggggaacggagtgttgagttccagggatgcagccagacacacagcgggagcaaaacgctacaaatacctgaggaggcttttccgtttccggcagatggactttgagtttgctgcctggcagatgctctacctattcacttccccacagagagtttatagaaactttcactataggaagcagacaaaagatcagtgggccagggatgacccggctttcttggtcctgttaagtatctggctctgtgtgtccacgataggatttggctttgtgctggacatggggttttttgaga

SEQ ID NO: 2194 - DNA, 206 bp, Bos taurus
  Clone ID: 10-LIB3057-021-Q1-K1-C5
cttctagttgccagccatctgttgtttgctggttcttccggaagcaggagagcagaccggggggcttgagcagcgcgtcgtgactgcgcatgtttgtgtcaaatttgtcataggtctgcttgaggatctgcccagcccggagggtgccatcttacagctcccgcatcaggacagagatactccattcagaacacccaggttgtctt

SEQ ID NO: 2195 - DNA, 211 bp, Bos taurus
  unsure (110)...(114),(116),(118),(121)...(123),(127): unsure at all n locations; Clone ID: 10-LIB3057-023-Q1-K1-C9
tagatcgcgagcggccgcccttttttttttttttttttttttttttttttttttttttgttttttgtttttttttttttagtaaatatgctgtatctgaaaggaaattannnnntnangtnnnattntttttaaaaataaattaaatttaataaaaaaggtttatttaatttttatattttttttattaatatattttattttttataaat

SEQ ID NO: 2196 - DNA, 405 bp, Bos taurus
  Clone ID: 10-LIB3057-024-Q1-K1-C5
cggacgcgtgggcaagggatcaggttaccgttgtattcgcatcaaccataaaatggatcctctgattggacaggcagcgcagcggattggactgagcagtcaggagctgttcaggcttctcccaagtgaactcacgctctgggttgacccgtacgaagtgtcctacagaatcggcgaggatggctccatctgtgtgctgtacgaagcctcaccagcaggaggtagcacccaaaacagcaccaacgtgcaaatggtagacagcagaatcagctgtaaggaggaacttctcttgggcagaacaagcccttcgaaaaactacaatatgatgactgtatcaagttaagatatagtctatggatggatcatcttataatggatggataatatttgatttttgctttgggt

SEQ ID NO: 2197 - DNA, 408 bp, Bos taurus
  Clone ID: 10-LIB3057-025-Q1-K1-C5
gcgggcaggcacagcccccgccccatggccacccgtcggatccagaggcggagggagggccggtgggagccgggcaccgccctgctggccccgcttgtgctgggcctgggcctggtgctggcctgcctcggcctcctgctggccgtggtcagcctggggagccgggcatcgctgtttgcccagcaggagccttcccagagggacctggtggcagaggaagacccggacccgctggacctgaatccccagccggaggaaagccaggatgctgttcctttcctgaaactggttcggcctcgcagaaatgcatctaaaggccagaaaccacgggcgcgcagagcaattgcagcccactatgaagttcgcccacgaccaggacaagatggagcacaggcagaacacccacat

SEQ ID NO: 2198 - DNA, 328 bp, Bos taurus
  Clone ID: 10-LIB3058-001-Q1-K1-C9
gcatctacaaccctgaagtgcttgacattacagaggaaactctgcattcccgcttcctggacggcgtacgcaatgttgccagcgtgtgcctgcagattggttacccaaccagactatctgtgccccattctatcataaatgggtacaagcccgtgctgactatgtctgacgagactgattacaccttaccacttgctgaaaaggtcatggtcttcttggatgatccatctatctttgtgactgctgcccctgtggctaatgccctgactgttgactctgctgtcaccatcgggatcatactcaacgtggtaaccgtagaacaaccata

SEQ ID NO: 2199 - DNA, 350 bp, Bos taurus
  Clone ID: 10-LIB3058-002-Q1-K1-C5
cggacgcgtgggcgaccaacgtcaccgcgcccctggacgccgccatcgtggggttccgcggactctgcctgcaggcggactacgcgggggcggtatccgtcgctggctgccgcgacggcttgcagtggtcgctctaccccgacggctccgtacgcccgcccgcgtggctcctccttcaatggcagtgcctggctgctgatgccagcgggggtgtgacggtgaaactctgcgacggggctggatcgtcttgcgagcgctgggtgttccgcaacgacggcaccatcttcaacaccgggaccgggatggtcttggacgccaggccatctgcgggggctaatgctactggtagc

SEQ ID NO: 2200 - DNA, 428 bp, Bos taurus
  Clone ID: 10-LIB3058-003-Q1-K1-C5
gaagaaacccccggaagctgacatgaatatatttgaagatattggggattatgtgccctgcacaaccaagactcctggagacatggagcgggagagataccgggaacgggagcgtgatcgggagagagacagagaccgtgacagagaacgggagcgagaacgagaccgagagcgggagcgggaccgagaacgagaagaagagaagaagaggcacagctactttgagaagccaaaagtggacgatgagcccatggatgttgacaaaggacccggatctgtcaaggagttgatcaagtctatcaatgaaaagtttgcaggatctgccggctgtgaaggcactgaatcgctgaagaagccagaggacatgatgcacctgagagattgctttggcatgtccaatagctatgctgagtgctatccagccacga

SEQ ID NO: 2201 - DNA, 441 bp, Bos taurus
  Clone ID: 10-LIB3058-004-Q1-K1-C5
ccagagtctccttcacccacatccctggcttcaccctaaatggctcagtgcctgagggtggggaccaagccctgcctagacacttgccttctttgccaagctaatctgtagggccggacctatgacctaaggacacactaatcgaactgcaaactatgagtcttctaccccaagaggtggctatggccaccccttctatgggcctgggtctcccaaacctaggggtcaggctccattaggttttgcctattcccgtctcttcctatccaaccactcaaattaacctttccttgcctgagaccagttgggagcactggagtgcagggaggagaggggaagggccatactgggctgccaggtgctagtctcctttgcactgagggccagatgatcaccatgagaggaggagggccatgggaaaccgagaactcactattcaag

SEQ ID NO: 2202 - DNA, 410 bp, Bos taurus
  Clone ID: 10-LIB3058-007-Q1-K1-C5
cccagctggcggctcaggcagagaagcagcaccatgaccggcaagaaagtctgcattgtaggctctggcaactggtggctgtccctgatgtggtccaggctgcagcggatgccgacatcctgatctttgtggtgccccatcagttcatcggcaagatctgtgatcagctcaagggccacctgaaggccgacaccattggcgtgtctcttattaagggggtagacgaaggccccaaggggctgaagctcatctctgaagtgattggggagcgccttggcatccccatgagcgtgctgatgggggccaacattgccaacgaggtggctgatgagaagttctgtgagacaaccattggtagcaagaaccaggctcatggacagcttctgaaagagttgatgcagacacccaat

SEQ ID NO: 2203 - DNA, 252 bp, Bos taurus
  Clone ID: 10-LIB3058-009-Q1-K1-C5
cggacgcgtgggatggagcgattgtttaagtgaatatgagcaaagaagatctcctaagcataaactaagctgggacgagcatatcaaaatccgtactgaaagtaattacgctgtggataaccgtggcacagatacctctgcagcagctcactacgcaagagcgaccgtggaggatgatgaggtgttccatcagagacacatcattatgccggaaggactctctagaatccgtactgaagttaagaacggatc

SEQ ID NO: 2204 - DNA, 252 bp, Bos taurus
  Clone ID: 10-LIB3058-010-Q1-K1-C5
gtttaatgcagtgatctacactttggcacattaaatttttcagtgattacctttatgttagtttacgctgctggctttggtgcccttgaagattttaatagtgaccaaaatatatctgtgcagttaaggctcgcttttgactattgttattgaagcctgattttaagagaataataatcaaaaatacctcgtgaacttgctatgtgctctgtttctagttaaaatgtaataaagattatcttcctgcactgt

SEQ ID NO: 2205 - DNA, 431 bp, Bos taurus
  unsure (309): unsure at all n locations; Clone ID: 10-LIB3058-011-Q1-K1-C5
ggagactgcaggcttcggttgaggaaacgggtatttcatgtctcagggggtagattttcacagttgcagcttttcggctggtatgcataattgataattgcatctgtagggcagattgtgacaagagatggacggtcagaagaaaaattggaaggacaaggttgttgacctcctctactggagagacattaagaagactggagtggtgtttggtgccagcttgttcctgctgctctcgctgacagtattcagcattgtgagtgtaacggcctacattgccttggccctgctctctgtgactatcagctntaggatatataagggtgtgatccaggctatccagaaatctgatgaaggccacccattcagggcatatttggaatctgaagttgctatatctgaggagttggttcagaagtacagcaattctg

SEQ ID NO: 2206 - DNA, 399 bp, Bos taurus
  Clone ID: 10-LIB3058-011-Q1-K1-C9
gcgtccggcatacacaggtgcccagccaggttaccttaccgcacagacctggtcagaaaggggggcgacgacctgatggctatctctcactcgcgaattgcgcataccatcatgaacgctctagctgacggagcacatacaggtctaaacgcactgaagacaatacctgatgccttaactcttagacttcgtcacgatcctcaagaacataatagatactaaaatgttcatggctgaaatgatgaccgaagctgcctacatactagccttggcccagtccaccgctcgggacttaaccaccacagtcatccaaactgttattaaagcccaagcgaagattatagcaaagatagatgatgtatccacgggtgacatagccattatttgaacatgatcatg

SEQ ID NO: 2207 - DNA, 348 bp, Bos taurus
  Clone ID: 10-LIB3058-013-Q1-K1-C5
gtcgaattcagaccacgatgcgcgctcggggctgcgggcggctggcgctgccgctgctgctgctctcggcagctgccctggccgaaggcgacgccaaagggctcaaggagggcgagacccacggcaatttcatggaggacgagcaatggctgtcgtccatctcgcagtacagcggcaagatcaagcactggaaccgcttccgagatgaggtagaggatgactacatcaagagctgagaggacaatcagcaaggagatgaagccctggataccaccaaggacccgtgccagaaggtgaagtgcagcccgcataaaacgtgcatcgcccagagctaccagcgggccatgt

SEQ ID NO: 2208 - DNA, 324 bp, Bos taurus
  Clone ID: 10-LIB3058-014-Q1-K1-C9
accatgctgaacgacgccaaggtcggtttcatgacacatgaccacatgatgcgggtgagcctgaaggcagacagcctgaaggtctacccgcaactgaaagagagcctgccagataacctagaaacaccttagggactcgatggatggcttggactggacagctcttacagagctggctcgatcagcgactcttgttgcgaaatgaccaataactagctacaggagaagcccttggagtgtccagcaagagacccaatggagatggaatatacaacatctggacatgtggtctaagcaggatttgatatagtctccccttgagct

SEQ ID NO: 2209 - DNA, 452 bp, Bos taurus
  Clone ID: 10-LIB3058-015-Q1-K1-C5
ctcttcctctgtgacactaacacctgtaaatttgatggtgaatgtttaagaattggagacactgtgacatgcgtctgtcagttcaagtgcaacagtgactatgtgcctgtgtgtggttccaatggggagagctatcagaatgagtgttatctgcggcaggctgcgtgcaaacagcagagtgagatactggtggtgtctgaaggatcctgtgccacagatgcaggatcaggatctggagatggagtccatgaaggctcaggagaaaccagtcaaaaggagacatccacctgtgatatttgccagtttggtgcagaatgtgatgaagatgctgaggatgtctggtgtgtgtgcaacattgactgttctcaaaccaacttcaatcccctgtgtgcttctgatgggaaatcttatgataatgcatgtcaaatcaaagaagcgtcatgtcagaaaca

SEQ ID NO: 2210 - DNA, 424 bp, Bos taurus
  Clone ID: 10-LIB3058-016-Q1-K1-C9
ggtatgctgacatgtcatgtttactgctgtaaacattgagcaatcacagagtgatgagacgtttgtaaataattctcagagatcaggaacggccgtgcctcctgaatccacaataacgagagctctacacagtggagaaatagttaaatgtgaccaggtcttctctgttgaaccggaaagtgaaatttcaaccacagcagatgattatagttcagaggaagaagaatttggtgttgatgattcttactctgaacatggagcacagtacaatcagacccacctagagatgatggaaagtgaattggctgggaaacagcatgagattgaagagctcaacagagaactagaagaaatgagggctacctatgggactgaagggctgaagcagttgcaagaatttgaagctgccattaaacagagagat

SEQ ID NO: 2211 - DNA, 309 bp, Bos taurus
  Clone ID: 10-LIB3058-017-Q1-K1-C5
gggcagaagaaatgggagcagctcttgggctgagtgtgggattaggggagccagaaatggctgctctaccagggagtgagcagctactgtaactttttaaaattaagacaaaatgccttgaagaaaatgacttcatttttctaagtgtaacctcagtatttatgtaatttgtacagggaccgtgcccgaacctatctgctccactctggggtagatcttgtaggtgggtcaacatacggcgagggtcttttaccctgtgtcatagcctacctttatgacctgtatcagatagggagcttttttaaaaca

SEQ ID NO: 2212 - DNA, 331 bp, Bos taurus
  Clone ID: 10-LIB3058-020-Q1-K1-C5
aaggctacgtagtaccaaaaaaactgtaggacagaatccaaggtacttttggctgcagagagagcactaggttttgaggcctgctttctctggaggtgacatctgtaatgctgctacacaaagccaaggtttctcacaatagtctggggtgttagttgctcagtcatgtccagctctttgcaaccccatggactgtagcctgccaagctcctctgtccatggacttctacaggcaagaattctagaatgggtagccattcccttctccaggggatcttcctgacacagggatcaaacttcggtctcctgcattgcaggcaagattcttttt

SEQ ID NO: 2213 - DNA, 405 bp, Bos taurus
  Clone ID: 10-LIB3058-022-Q1-K1-C5
tcgacctgatggcgtcgctgccttcactggctcagcagcaggggaggctgcttctggctgccaacgtggctaccctgggcctcctcatggcccggctcctgagcacctctacagctctgcaggggacgcccgcatcccgaggtttattcgcagctgccatgctcttcctgtcgcaatcccacgtggcccggtccacgcccggctcagagcaggcagtgctggccctgtcccccgactactagggcgtctgggcggatctgcaggagctatggttcctgggcatgcaggccttcacgggctgcgtgcccctgcttccctgactggcccctgccgtcctgcgctcccgctggccccaggagctgctgcagctgctgggcagcgtcagccccaactctgtcaagcctg

SEQ ID NO: 2214 - DNA, 421 bp, Bos taurus
  Clone ID: 10-LIB3058-026-Q1-K1-C9
caaaaatattaaaacaaaacaccccttgagaaacaaaatgaacgaaaatttatttacctcttttattacccctgtaattttaggtctccctctcgtaacccttatcgtactattcccaagcctactattcccaacatcaaaccgactagtaagcaatcgctttgtaaccctccaacaatgaatacttcaacttgtatcaaaacaaataatgagtatccacaattctaaaggacaaacatgaacattaatattaatatctctgatcctatttattggatcaacaaacctactaggcctattaccccattcattcacaccaacaacacaactatcaataaacctaggcatagccatccccctgtgagcaggagccgtaattacaggattccgcaataaaactaaagcatcacttgcccatttc

SEQ ID NO: 2215 - DNA, 407 bp, Bos taurus
  Clone ID: 10-LIB3058-027-Q1-K1-C5
cagaaacttctgcaattgaataaaaaatcacatggcttctttaatgacatgaatgtcgtcaatatgatctctatgtgttttgataaaatgattcattagagtgtttattttcttgggttctaaaacccctgtcaacagtgcctgcagccatgaaattaaaagactcttgttccttggaagaaaaactatgacaaatctagacagcatatgaaaaagtagagatatcactttgttcaaaatgatccatatatgaatagaatgggctgatttaattcagattaccattatatctactcctgtgggcaagaatcccttagaagaaatagagtagccatgatagtaaaaaaaaggagtctgaaatgcagtgcttggatacaacctcaaaaacaacagaatgatctctgttc

SEQ ID NO: 2216 - DNA, 304 bp, Bos taurus
  Clone ID: 10-LIB3058-031-Q1-K1-C5
cgtactcgtggtcgttcgcgttggatttcagttaggttcctgagggtccatggttggggccatgagtgacttgtacgagcccatcgatgatggttccgagagccaggtgttctgttcctgctcctactatactactactcactttttagacttcttataactatatttataactttcataattacatgtatttttattttttctttttttataatatttatatattattttttaatttaatttttttatttattttttttatataatccattatttttttttttttattcatttttttttctat

SEQ ID NO: 2217 - DNA, 365 bp, Bos taurus
  Clone ID: 10-LIB3058-032-Q1-K1-C5
cgaaaaaagcaagaacttgtaaatgataaaaagagctaattcatcaaaaagacttaacaatcctaaatgtgtgtgcaactaacagttgttttaaaatgtaaggtaaagcctcatagttttgaaaaagaaattagcaaattcataattatagttggatatgtcaatactctcataattgatagaacaattaaataaggtatcagtaaggatatagaagctttccaggtgtgctacagctaaaatagtgcttcgaagaaaatgcatatctacaaataattattttaggaaaaaaagttctaaaatcaatgttctaatattctgccttgaggtaaaagaagaaatcaaaacataccttaagtttaaga

SEQ ID NO: 2218 - DNA, 429 bp, Bos taurus
  unsure (376): unsure at all n locations; Clone ID: 10-LIB3058-034-Q1-K1-C5
aaaggccttggcccgtgaggctttctgtaagtaatttggctggatctgaatattactgggggaagaaaacacaacatagtaaaataaaatttacaacagaaaataattaatatttttaaaaacataatgcacagatgtagtatcttttttttctcctgaggaacaaaagccccctaatcccagttgtcacacctttttttccccctttttctttaggccatccagtgaagagagagagactgaaatatctctgaaggattctacactagataactaggttgacatacctggaatataaagaacatttgagaagtttgtaatggttttcatttgaaatatttagactgctgaaagttttaaatttttataaacatangttttgatgtttaaaacttgttttgagggagaatccccttatctttgttaaaa

SEQ ID NO: 2219 - DNA, 426 bp, Bos taurus
  Clone ID: 10-LIB3058-036-Q1-K1-C5
ggctgctgcaatatgtggactttctgttcctggccgctgagaacaaggatgattgctgggaaggaaccaaggcctcgctgagactgctgatggaggctggttaccgggtctcgaaaaagaaggctcggatctgcaaggaggaggttggccaatcgcaagccagaagatgaaggttctgtgggttgccgtggtggtcgcgcttctggcaagatgccaagcggatatggaaggagagctggggcccgaggagcccctgactacgcagcagccccgggggaaggacagccagccttgggagcaagcgctgggccgcttctgggattacctgcgctgggtgcagaccctgtctgaccaggtgcaggaggagctgctcaacacccaggtcattcaggaactgacggcgcttattgaggagaccatgaagga

SEQ ID NO: 2220 - DNA, 429 bp, Bos taurus
  Clone ID: 10-LIB3058-038-Q1-K1-C9
cttgtttgcgccgcctcttccgagtctcattttcctggctgatgccttcagtgagctgcaggtccctccactcatgggcaccatcgtcatggcacagggtcaccgcgactgtggagaagattggtttcgacccaagctcaactacagagtgcccagccggggccacaagctgactgtgaccttgtcctgtggccgacccgccatcccagctacaacctgggaggattacatttggttccaggccccattgacactgaaaggcttccacgagtgaatgggaatgctcatcgtgcacacagtggctaaattatcttcccctggtggcgccacgtcacccatctgcttggagctagttaattcctggtgagaggaaggttctgtccttctggctgcctgccccccttagactttctggtggactgatggtat

SEQ ID NO: 2221 - DNA, 288 bp, Bos taurus
  Clone ID: 10-LIB3058-039-Q1-K1-C9
gacccacgcaaccgacgcccaccgcagcccaccttcacccttgcacccacccaaaccccggagggggcagcggcaaacggcaaccaaccacaccaaagccaagcaccaagcccacaaccaaagacacgaaacaaacacaagacaaacacagaaccacacagagcccaacccacgccacaacccgacgcacacccacaccacaaccccacacaccaacaaaccgacaaccagagcacagaacacaacccaccaacaccaaacgacaccgcaacgcaacaacaaccaaaa

SEQ ID NO: 2222 - DNA, 418 bp, Bos taurus
  Clone ID: 10-LIB3058-040-Q1-K1-C5
aatactctatcctttacagtggttggaataaaaattgggatgagtgggttccagaaagcagagtactcaagtatgtggataccaacttacagaaacagagggaacttcagaaagccaatcaggagcagtatgcagaggggaagatgcgaggggctgcccctggaaagaaaactgctgggctgcagcagaaaaatcttgacgtgaagacaaaaaagaacaaacagaagacacctggaaatggagatggtggcagcaccagcgagacacctcagcctcctcgcaagaaaagggctcgagtagatcctactgttgaaaatgaagagacattcatgagcagggttgaagtaaaagtcaagattcccgaagaactgaagccatggcttgtcgatgactgggacttaattacccggcaaaaaca

SEQ ID NO: 2223 - DNA, 415 bp, Bos taurus
  unsure (250): unsure at all n locations; Clone ID: 10-LIB3058-041-Q1-K1-C5
cgggagcgtgggaaaaaaaattaaaaaaaaaaaaaaaaaaaaaaaaaaaaaaagaaaaagaaaaaaaaaaaaaaaaaaaaaaaaaaaaaaaaaaaaaaaaaaaaaaaaaaaaaaaaaaaaaaaaaaaaaaaaaaaaaaaaaaaaaaaaaaaaaaaaaaaaaaaaaaaaaaaggggcacagaaaaaaaaaaaccaaagaacaagcccaggaaagaccaaaaaaaaaagcgaagaaaggaaacccaaaaaancaaacaaaaagaaagaagaggaaaaaagaacaagaacggaaaaaaaagagcacaccacaaaaaaaagccccgaaaaaaaaacaaccaaaaggcaggagacacaaaacacaaaaaggacagaacaaaacaaggaccaaaaaaaggccaaaaccaaaaggaaaaagg

SEQ ID NO: 2224 - DNA, 422 bp, Bos taurus
  Clone ID: 10-LIB3058-042-Q1-K1-C5
cgcgagcggccgccctttttttttttttttttattacgtaaggttttcttttatttaaaagatcattcacaaaataccatatccatagatttactttctgtcatatagctgaatgtgttaagtgtttggaattccattcttacatttaaaagtcaactggattgcccagaagtttagatgaatttgttttgttcttaatcttttccacattggagatgtaagtaggtcatctgaaagcatcaggtttgattacaaccacataatgcatgtctttctttaggtaagtattggtgttacacaaatggttcttatctcagaagcaaagatgacaggtggaaggaaggacaggaggcagagttctgtgaattgctgagacctggggacagggagaagccgagggcggcagctaacgaggagctgtc

SEQ ID NO: 2225 - DNA, 402 bp, Bos taurus
  Clone ID: 10-LIB3058-042-Q1-K1-C9
cagctgcagcccgacgccgagcgaacttaacggcctcagctgctagcggagcggcagcggcgccttcccttcccccccggagaccaccagatcacctctccccacggcctcgccatggcgacctacggacagaactgcgcgcggccaatgtgtattcctccatcatatgctgaccttggcaaagctgccagagatatattcaacaaaggatttggttttgggttggtgaaactggatgtgaaaacaaagtcgtgcagcggcgtggaattctcaacatctggttcatctaatacagacactggtaaagttactgggaccttggagaccaaatataaatggtgtgagtatggtctgactttcacagaaaaggggaacactgataacactctgggaacagaaatc

SEQ ID NO: 2226 - DNA, 438 bp, Bos taurus
  Clone ID: 10-LIB3058-044-Q1-K1-C5
cggacgcgtgggcgcgaccgcggcttttgcttcatccgcctggagtccagaacactggctgaaattgcaaaagcagagctggatggcaccatattgaagagcagacctctccgaattcgttttgctacacatggagcagccctaactgttaagaacctttctccggtggtttccaatgagctactagagcaagcattttcccagtttggtccagtagagaaagctgttgttgttgtggatgatcgtggtagagccaccggaaaaggttttgtggaatttgcagcaaaacctccagcacgaaaggctctggaaagatgtggtgatggggcgttcttgctaacaacgacccctcgtccggtcattgtggagcccatggaacagtttgatgatgaagatggtttgccagagaaactaatgcagaaaactcaacagtatcat

SEQ ID NO: 2227 - DNA, 178 bp, Bos taurus
  Clone ID: 10-LIB3058-044-Q1-K1-C9
gaatttgttaatgcaccacacaagtgcgtgtatataaagactgattcaacatacaaggtagcattacatattgtaggttagcattacagcattatgcagtttcacacaattcatgttagcttgtatgttgaatttgttaatgcaccacacaagtgcggaataaagactgattcacatt

SEQ ID NO: 2228 - DNA, 431 bp, Bos taurus
  unsure (411): unsure at all n locations; Clone ID: 10-LIB3058-045-Q1-K1-C5
cggacgcgtgggcggacgcgtgggcggtgggcgcagctagcgggttgggcgcggagcgggggtgcagcttggtttccccccgacacccctccccctcaaacgcgagccccacccctccgccggccaggcccacccggccgaactatcccctgcggcgcgagcccggggcggctccgggcgcccctccagcagaaccccccaccatgggcagccagagctccaaggctccccggggcgacgtgaccgccgaggaggcagcaggcgcttcccccgccaaggtcaacggacaggagaacggccacgtgaaaagcaatggagacttatcccccaaaggtgaaggggagtcgccccccgtgaacggaacagaggaggcagcggtggccactggtgatgctatcgagccagcacccnctagccagggcgctgaggct

SEQ ID NO: 2229 - DNA, 420 bp, Bos taurus
  Clone ID: 10-LIB3058-046-Q1-K1-C5
cccacgcgtccgcggtacgcgtgtttctttttgagctacttcttgcaaaattcctcctctcctgggaagcccaaaactggcaagaaaagcaaacagcaaaccttcatcaagccttctcctgaggaagcccagctgtggtcagaagcatttgatgagctgctagccagtaaatatggtcttgctgcattcagggcttttttaaaatctgaattctgtgaagaaaatattgaattctggctggcctgtgaagacttcaaaaaaaccaagtcaccccaaaagctgtcctcaaaagcaaagaaaatatatactgacttcatagaaaaagaagctccaaaagagatcaacatagactttcaaaccaaaagtctgattgcccaaaacatacaggaggctaccagtggctgcttcacaactgcccag

SEQ ID NO: 2230 - DNA, 124 bp, Bos taurus
  Clone ID: 10-LIB3058-047-Q1-K1-C9
ctttctgctgaggggaaaaaatgtaaaactttctgaaaattcactgctgcctttgtggaaagtgtttcagcaaaggttcttgtatagagggaatagggaatttcaaaataaaaaattaagtatg

SEQ ID NO: 2231 - DNA, 289 bp, Bos taurus
  Clone ID: 10-LIB3058-048-Q1-K1-C5
cggacgcgtggggcgagcggccgcccatgtttttttttttttttatttcttagagtgggtattgtacacgctgtgtttgtgggaagtcacggcctctgaaggaactcaggggtgaactgcattctgagccggctccagtcaggctgagcacggcagttaagcagaagcctgcttctctttataggttgccatcatcttcttgatttcagcaatagctttcccaggattcagcgtgtacaataaacactctaagaaataaataaaaatttacagaaataccaatgattta

SEQ ID NO: 2232 - DNA, 405 bp, Bos taurus
  Clone ID: 10-LIB3058-048-Q1-K1-C9
cgctgccggcctgatggctccgtggcttcctgcaggcccgaggctcagctctcacctgctgggctcagcaccggggctctgcttgccatcgtcacctgcgtgggcacgctgctggccctggtggtgctcttcgtggctctgcggcgccagaagcaagaagccctgatggtgctcgaggaggaggacgtgcgcgagaacatcatcacctacgacgacgagggcggcggtgaggaggacacggaggccttcgacatcagcgccctgcagaaccctgacggggcggccccgccggcgcctggcccacccgcgcgccgcgatgtgctgccctgggcgcgggcaccacgccagccccggccccccggccctgccgacgtggcgcagctgctggcgctgcggctgcgcgag

SEQ ID NO: 2233 - DNA, 421 bp, Bos taurus
  Clone ID: 10-LIB3058-049-Q1-K1-C5
ctgtcccagaaaagggtcagaggtccatgctgcttctcgggcacagacttcgtatcctttgccaccggaaatgtccccacaggccacctaaggatggatacaacgcaaaatcctatgaaactcaagatgcaaacccccgagaggtgcgtttagaggtcctttcaggaggaggcaaccctgtcaggtcagcctccctcatcaggctgggaacgatggagcggtgaaaaaggccatgttcctggtgagccgcgggtgttgcatacagatcgctgtgcatgggacgctgagggccctggcttgaaaggacgtatagggaatgcgtgcctttagtttcaacaattctttcatgagctgtatgtttccaaatgctgtcaaccaccagtccaggtccttttttgatccacctcaaatgggcaaatgc

SEQ ID NO: 2234 - DNA, 448 bp, Bos taurus
  Clone ID: 10-LIB3058-051-Q1-K1-C5
agagaccatatgttttacatacaatacttagaagctaagtaactagatctaagaaacatacaggatttcaatagatgatttagtcacagatctctggaatagttcataaaatattttaaagggtttgtttaagcgtgatgtttaagcatttttggccagaatgttttttatatatgcaggaaaggtttgaagcagttgtactagaaaccaatctttattttttaccccactactaggtaagggacctggaaaccaagaagtgactgctcatccaatccataaagctatgttaacagattggaggtagtagcattttcattaccagtgactgaaattacacctgtttactccctgatcaagcaggagtacttgctattcctgaaaatcttgtccttaggttcaaactgaagttgggggaagtgatgtacatttgagaagccatatatct

SEQ ID NO: 2235 - DNA, 430 bp, Bos taurus
  Clone ID: 10-LIB3058-052-Q1-K1-C5
gcggctccagctagcaggtttgaggcatggagggcagcgtcggcaaggtgggcggcctggggcgcaccttatgcgtgctgactggggcttcccggggcttcggacggacgctggcccaagtcctggccccgctgatgtcgcctcgctccgtgctggtcctaagcgcccgcaatgacgaggccctgcggcagctggagaccgagctgggcgccgagtggccgggtctgcgtatcgtgcgggtgcccgccgacctgggcgccgagaccggcttgcagcaactggtcggtgctctgtgcgacctccccaggcccgaaagcctgcagcgagtgctgctcatcaacaatgcgggcactcttggagatgtatccaaacgttgggtggacctgactgacccaactgaagtgaacaactactggactctgaacttgga

SEQ ID NO: 2236 - DNA, 409 bp, Bos taurus
  unsure (395): unsure at all n locations; Clone ID: 10-LIB3058-054-Q1-K1-C9
gcatttgccccttctcccagctgcaataggtagatttgggcaaatgctcttattgttttgctgggagaagggggtcaaagcaaggatctttctcccatagaaagagagcactgaccccgatggcgatggactatttaagccctaactcagccaaccttacttatagcataagggagcatagtgtttgtgtagacaaagggggcgcttggccttatacctcgttagagaagagaaacagggtgtagtcagcatcttcttactcccttctccctgataacagctaccatgacaaccctgtggtttccaaggagctgaggatagagagaaactagttcatatgaaaaatagactggcctaaggagcagcagtcgctagtggctaacagtgtaaactgngccagccctctggt

SEQ ID NO: 2237 - DNA, 447 bp, Bos taurus
  Clone ID: 10-LIB3058-056-Q1-K1-C9
cggacgcgtgggtccgacattgccctgcggattgtggccccaggcaaaggcattctggccgcagatgagtctgtaggcagcatggccaagcgactgagccaaatcggggtggagaacaccgaggagaaccgccggttgtatcgccaggttctgtttagtgccgatgaccgtgtgaagaagtgcatcggcggtgtcatcttcttccatgagacactctaccagaaagacgataatggtgtccccttcgtccgcaccatccaggataaggggattgtcgtgggcatcaaggttgacaagggtgtggtgcctctagccggaactgatggagaaaccaccactcaagggctggatgggctctcggagcgctgtgcccagtacaagaaggatggcgctgactttgccaagtggcgctgcgtgctgaaaatcagtgagcgcacaccctcagca

SEQ ID NO: 2238 - DNA, 392 bp, Bos taurus
  unsure (270): unsure at all n locations; Clone ID: 10-LIB3058-057-Q1-K1-C5
ggcatcggaccccgctctgatcgcgtccccgcgccgccagcccgtgcggccccgggcgcaggttcccagggggcgccgggcggggcaagccggggcgccccctccccaggatctcggtcaagcgccgcgttcagacaaaggggcgggagacggagacagacgcttccgtgacagcgcccggtggccgaggagaaggagcaggaggacgaggcggtgcggggtccggtggcgcggccccaggtccgagcgctcaccggcggcgcgcgcggnggcgcagggccctggcgggaggcgcccggccgggagtcccacggagcgcccgttccgggccgggaccccggccgcgacccccggcctcacgctcgctcgtcccctgccggcttcgcggggac

SEQ ID NO: 2239 - DNA, 406 bp, Bos taurus
  Clone ID: 10-LIB3058-058-Q1-K1-C5
ggacggtgggcggacgctgggctcttttaggcctacttggagctagagatcaccctgggtcacgagcagattcagaagtacacagactgcctgcaattctacgtgaacaacactctcaaagaactgatgaggctcttacttgtccacgatctgtgggattgcttaaaattcgcagtactgacgaggctcctgacttacgttggcactctcttcaatggcctgaccctgctgctcatggctgtggtatgaatgtttactatacctgtagtgtatgttaagcaccaggcacagattgaccaatatctgggacttgcgaggactaacataaatgctggagtgggaccgattcaggctaaaatcccacgtgctcataggcacactgagtaagtggataccccatcgggga

SEQ ID NO: 2240 - DNA, 454 bp, Bos taurus
  Clone ID: 10-LIB34-002-Q1-E1-C5
gtaccggtcatgccaattcggcgccgacccacgcgaccacctggttttcctccttgctgtagcctttgtgcatgctctagagagaggccgagattatgagaaagataaagtctgcaaggaccttgccagcctgggaagagatgacttcacatctttgtcaatggtcctatacagcagaaaatttcccagtggcacctttgaacagatcagccatcttgtgaatgaagttgtttccttaacagtaacctgctgtgcggaaggggccgatcctgactgctatgacaacaggacttcagcattgtctgacaagtcctgtgaaagcaactctccattcccagtgcaccctggaactcctgagtgctgcacccatgagggccttgaaaagaagctctgtatggctgccctgaagcaccagccacaagaatttccaacttacgtagagccaacaaatgac

SEQ ID NO: 2241 - DNA, 380 bp, Bos taurus
  Clone ID: 10-LIB34-003-Q1-E1-C5
cacaccccgctctcgcaggcagacatgaggacagagagaacttccttcctcctggctctggggctcctggtgtctgggttctgctccagggtccactgcctcccagagaatgtgaccccagaagaacagcacaaagggacgtctgtggatggccactcattagcctccagcaacactgacttcgccttcagcctctacaagcagttggctttgaaggaccccaatacgaatgtcatcttctcgcctctgagcatctccatagccttggccttcctgtccctgggggctcatgaccacactgtgacagagatcctggaaggtctcaagttcaacctcacatagacccccgagacagaaatccatcacggcttccagcacct

SEQ ID NO: 2242 - DNA, 413 bp, Bos taurus
  unsure (287),(315),(349): unsure at all n locations; Clone ID: 10-LIB34-004-Q1-E1-C5
cccaaacttcaaaggcttccaggcagcggttgctgccggagccaaggaagtggccatctttggagccgcctctgaactcttcaccaagaagaacatcaactgctccatagatgagagtttgcagcggtttgatgaaatcttgaaggcagctcgggcagccagtatctctgtgcgggggtacgtctcctgtgtgcttggatgtccctacgaagggaagatctccccggctaaagtcgctgaggtcaccaagaagctgtactccatgggctgctacgagatctccctgngggacaccatcggcgtgggcacccctgnggccatgaaggacatgctgtctgctgtcctgcangaggtgccagtgacagccctggccgtccactgccatgacacctacggccaggccctggccaaca

SEQ ID NO: 2243 - DNA, 402 bp, Bos taurus
  Clone ID: 10-LIB34-005-Q1-E1-C5
ctggtcaaatttcgggaaggtgaacgtccgtctctgagactgcagttgctaagcaaccttttccatgggatggataagaatactcctgtaagatatacagtgtattgcagcctcattaaagtggcagcatcttgtggggccatccagtatattccaactgagctggatcaagttagaaaatggatttctgactggaacctcaccactgaaaaaaaacacacccttttaagactactttatgaggcacttgtggattgtaagaaaagtgatgccgcatcaaaagttatggtggaattgttaggcagttacacggaggacaatgcttcccaggctcgagttgatgcccacaggtgtattgtgcgagcattgaaagatccaaatgcattcctttttgaccatctt

SEQ ID NO: 2244 - DNA, 395 bp, Bos taurus
  unsure (346): unsure at all n locations; Clone ID: 10-LIB34-006-Q1-E1-C5
ccctgaccctggcacctgggacagcttcctggagaagttcatggccggggaagtgtgctacgggtcctggtaccagcacgtgcaggagtggtgggagctgagtcacacccaccctgttctctacctcttctacgaggacatcaaggaggaccccacatgggagattcagaagatcctggagtttataaggcgctccctgcctgatgagactgtggatcacattgtccagcgcacatctttcaaagagatgaggacgaaccccatgaccaactacagcaccatacccactgcaatcatggaccacagcatctctggcttcatgaggaaacgcatcactggtgattgngaatccaccttcactgtggtccagagtgagctcgttgaagcccactatg

SEQ ID NO: 2245 - DNA, 422 bp, Bos taurus
  unsure (290): unsure at all n locations; Clone ID: 10-LIB34-007-Q1-E1-C5
gcggcggcagcaggctggatttggcgctggggctggggccggcggtgcccagggaggtctgggcttcgcggccccggcccaggccccacaatacttaagcttttcctcttgttgctggggccggtggctgcggatataactgacggcaacagtgaacatctcaagcgggagcattcgcttatcaagccctaccacgggatcggttccagctccacgctcctctgggacttccaaggaagcacaatgctcacgagccagtatgtgcgtctgacccctgacgagcgcagcanagagggctctatctggaaccacctgccttgcttcctcaaagactgggagatgcacgttcacttcagagttcatggcgcaggaaagaaacatctccatggagatggcattgccttgtgggtaacccgggaacg

SEQ ID NO: 2246 - DNA, 399 bp, Bos taurus
  Clone ID: 10-LIB34-007-Q1-E1-C9
ggtcacctacagccgcagaccccttccccagccccagtctgtagctgcctcgagcagggagctggtggctcttccatccccagaccagccaagcctgtgagtgacaccccagacagaggaaccagagccatgcggagtctcagcggactgctgttgttactgactgcctgcctggcagtaaacgccagctccgtgcccacattgcccgatgacattcaagtgcaggagaacttcgacctgtctaggatctatgggaagtggttcaatgtggccgtgggctccacctgcccatggctgaagaggttcaaggagaagatgaccatgagcacagtggtgttgaaagcggggccgacgagcaaggagattagcgtcactaacactcacaggcggaaaggtgtc

SEQ ID NO: 2247 - DNA, 406 bp, Bos taurus
  Clone ID: 10-LIB34-008-Q1-E1-C5
aggagcccttccttgttctcgcttttgtgctcgccagtctttaacggaacggtctcccataagcaatttacaatgactggtaaaacgaaatatacccaaagctcgcagcaacaaaaaaggatacagttctttctggccagcttcctgcttctgccctttctgctcgtctgcatcgtagagtctctcctgaatctttttattcctaagaagagaaaatctgtcaccggagagattgtccttagtaacggagctggacacggtattggcatgcagactgcttacgaatttgcaaaacttaagtgcaagctggtcctgtgggatataaataagcatggacttgatgaaacagccagtgaatgcaagagactgggtgcaaaggctcatacctttgtagtagactgtacta

SEQ ID NO: 2248 - DNA, 259 bp, Bos taurus
  Clone ID: 10-LIB34-009-Q1-E1-C5
aacaaaatccaagtgcacagatgcagcacttcactgcgcatgggtaattctgcagtatggtgggatgctttaatggatataaaatagtaaaagtgaaatattactgttttaaggaaaacttggggttgcaaataacaaaggtgatgcataaagaagtgggttagatcagtttctttcactcaattaacgctttacccaagcaaggtttaatgctctgaaataaagaatccaccacctcccaaaaaaaaaaacacaaaaa

SEQ ID NO: 2249 - DNA, 350 bp, Bos taurus
  Clone ID: 10-LIB34-010-Q1-E1-C9
agaagcttcacactgagaggtaggcagagagcagcacacacagctgacaggaaactcagaggagggaatcaccagcagtgtggccatggagctaatcccaggcctttccatggaaacctgggttctcctgtctagcaacctggtgctcctttatcgatatggaacttactcacacggactattcaataagctgggagttcctgggccaagacctctgccttactttggaaatgttctgtcctagcgagagggtgtatgtgagtttgatgacgaatgttttaaatgagtatgggaaaatctgcgggatctctgaaggtcaacatcatctgtcggttatcacaggatccaga

SEQ ID NO: 2250 - DNA, 352 bp, Bos taurus
  Clone ID: 10-LIB34-011-Q1-E1-C5
cagatcccccaagggcaccatggccgccctgggcatcacggtcgccctgctggtgtggatggccaccctgctgttcatctccatctggaagcacatctacagcagctggaaactgccccctggccctttcccactgcccatcatcgggaatcttttacagctggatattaagaacattcccaaatccttcaccaggctggcggagaggtacgggccggtgttcaccctgtacctgggctctcagcgtgccgtggtcgtgcatggctacaagcccgtgaaggaggtcctgcttgactacaagaacaatttttctggcagaggagaaaaccctgggttcaagatgcacaagaac

SEQ ID NO: 2251 - DNA, 411 bp, Bos taurus
  Clone ID: 10-LIB34-012-Q1-E1-C5
caccccactccagtactcttgcctggaaaatcccatggatggaggagcctggtaggctgcagtccatggggtcgctaagagtcgggcacgactgagcgacttcactttcacttttcacttgcatgcattggagaaggaaatggcaacccactccagtgttcttgcctggagaatcccagggatggtggagcctggtgggctgccgtctctggggtcacacagagtcggacacgaccaaagtgacttagcagcagcaactattgcatgtagagattgaagaacactcttctgttatactccaaagagtatgtatgccctcttcgcacagtatgggccctggcataatcagcatagtcctaggaaagcttaggaaattccactaccccctgggcacaaatcagcgctgccata

SEQ ID NO: 2252 - DNA, 385 bp, Bos taurus
  Clone ID: 10-LIB34-013-Q1-E1-C5
ttcgcgcggtcgacccacgcgaccgaagacgcgtgggccggaatgccgaccgcctacgacctgagcagtgttattgccggaggctccactgtgggccacaacaacctgattcccctatccaacacggggattgtcaatcacacccactcccggatgggctccataatgagcacggggattgtccaaggatcctctggcgcccagggcagcagtggccgcagctccagcgcccactatgcactcaacagccagttcaccatgggctgccccgccatctccatggcctcacccatgtccatcccgaccaacaccatgcactatgggagctaggcccctgcggcgtgcaacggactgacagcaccatgaaaccaactgaagaccctgc

SEQ ID NO: 2253 - DNA, 401 bp, Bos taurus
  unsure (390): unsure at all n locations; Clone ID: 10-LIB34-014-Q1-E1-C5
aagaaggcacccagcaaggactgggcagggcagggagtcagtagaccaaccaggggtgcgcagggtcttcagcctttcttccaccactgccgtccaggaggatggaggccttcaacgaatcttccccgttcaacttctccctcccgcacaactttggcaagcggcccaccgaccgggcgctgagtgtcattctggtgatcatgctgttaaccatcatgctctcgctgggttgcaccatggagttcagcaagatcaaggcgcacttctggaggcccaaggggctggccgtcgctctggtggcgcagtttggcatcatgcccctcactgcctttggactgggcaagttcttccagctgaataacgttgaggccctagccatcctgatctgcngctgctcaccg

SEQ ID NO: 2254 - DNA, 398 bp, Bos taurus
  Clone ID: 10-LIB34-015-Q1-E1-C5
cgcaggtttgaaggaggccgaagccgggctcgcgccggaaccatgtttcgcaaccagtatgacaatgatgtcactgtttggagccctcagggcagaattcatcaaattgagtatgcaatggaagctgtcaaacaaggttcagccacagttggtctgaaatcaaaaactcatgcagtgttggttgcattgaagagagcacagtcagaacttgcagctcatcagaaaaaaattctccatgttgataaccatattggtatctcaattgcgggacttactgctgatgctcgactattatgtaattttatgcgccaggagtgtttggattccagatttgtatttgacagacctcttcctgtgtctcgtcttgtatctctaattggaagcaaaacccagatacc

SEQ ID NO: 2255 - DNA, 417 bp, Bos taurus
  Clone ID: 10-LIB34-016-Q1-E1-C5
aatcgagtctcggaaccccgggcccgccgacaccatgagttggtcctcgcaccctccgagtgtaatcttctacattctttcattgctttcttcagcatgcctggcatatgttgctacccgagacaactgctgcatcttagatgaaagatttggtagttattgcccaactacctgtggaattgcagatttcctgaataattaccaaaccagtgtagacaaagatctacgaactttggaaggcatcttatatcatgttgagaacacaacatcagaagccagagagctggtcaaagcaatcgatatcagctataaccctgatcaaccatcaaagccaaataacatacagagtgctaccaagaattccaagagtatgatggaagacattatgagatatgaaacactgatatcaacacatga

SEQ ID NO: 2256 - DNA, 382 bp, Bos taurus
  Clone ID: 10-LIB34-016-Q1-E1-C9
atacaacaagtctctggcagagcaccgaaccccagatgtgctcaagaaatgccagcaggcagagaaaatcttgaaggagcaagagcggctggcctacataaaccctgacctggccttggaggagaagaacaaaggcaatgagtgttttcagaaaggggactacccccaggccatgaagcactacacggaagccatcaaacggaaccccaaagacgccaagctgtacagcaaccgagctgcctgctacaccaagctcctggagttccagctggcgctcaaggactgtgaggagtgcatccagctggagccaaccttcatcaagggttatacccggaaagcagctgccctggaggcgatgaaggactacacgaaagccatggat

SEQ ID NO: 2257 - DNA, 413 bp, Bos taurus
  Clone ID: 10-LIB34-017-Q1-E1-C5
aaagtcccacccactaataaaaattgtaaacaatgcattcatcgaccttccagccccatcaaacatttcatcatgatgaaatttcggttccctcctgggaatctgcctaatcctacaaatcctcacaggcctattcctagcaatacactacacatccgacacaacaacagcattctcctctgttacccatatctgccgagacgtgaactacggctgaatcatccgatacatacacgcaaacggagcttcaatgttttttatctgcttatatatgcacgtaggacgaggcttatattacgggtcttacacttttctagaaacatgaaatattggagtaatccttctgctcacagtaatagccacagcatttataggatacgtcctaccatgaggacaaatatcattctgaagag

SEQ ID NO: 2258 - DNA, 413 bp, Bos taurus
  Clone ID: 10-LIB34-018-Q1-E1-C5
agggagagtggaaaattccatctcaagagcaaacaccttcttgggggcgaaagcaacctctgggctcctgggctcccacgcctccgccatcacggcctacgccctgtcgctgaccgaggcccccgaggacctgcggagagttgcccacaacaacctcatggccatggccaaggacatcggtgataagctgtactggggctcagtcaccacttctccaagcaacgtcctgtcacccactccggctccacgtagcccagcagaccccattccccaggctccagccatgtcgattgaaaccacggcctacggcctgctacacctgctgctatgggagggcaaggctgagttggccgaccaggctgcatcctggctgacccgccagggcagcttccaagggggattccgcagcaccc

SEQ ID NO: 2259 - DNA, 411 bp, Bos taurus
  unsure (380): unsure at all n locations; Clone ID: 10-LIB34-021-Q1-E1-C5
ggtgggcaaaatgtgggctggccgcgtcctgcatgctgcgctctcccgggccccccgcgagagccgggcgcagtcagcgctggctcagctgcgtggcatcctggaggaggagctggaaagcatccgcggagctggcacctggaagagcgagcgggtcatcacgtcccgtcaggggccgcacatccacgtggacggcgccccgggaggaattattaacttctgtgccaacaactacctgggcctgagcagccaccctgaggtcattcaggcaggtctgcggaccctaaaggagtttggagccggccttagctcagtccgcttcatctgtggcacccagagcatccacaaagacctagaagcaaagatagccgcttccacanagggaggatgcatcctctatccagctgtttg

SEQ ID NO: 2260 - DNA, 372 bp, Bos taurus
  Clone ID: 10-LIB34-022-Q1-E1-C5
gcggcatgtgcaaggatgacattaattcctatgaatgttggtgtcaagctggatttgaaggaacgaactgtgaattagatgcaacatgcagcattaagaatggcagatgcaagcagttttgtaaaagggacacagataacaaggtggtttgttcctgtactgacggataccgacttgcagaagaccaaaagtcctgcgaaccagcagtgccatttccctgtggacgagtctctgtctcacatatttctaagaagctcacccgtgctgagactattttttccaatacgaactatgaaaattcttctgaggctgaaataatttgggataacgtcactcaaagcaaccaatcattcgatgaattcagtcgtgtgg

SEQ ID NO: 2261 - DNA, 425 bp, Bos taurus
  Clone ID: 10-LIB34-022-Q1-E1-C9
gtgagttggtgtggagttcgtctccgcacgcgtgaccgcgctgggatggattcctcctcgtcttcctccgcggcgggtttgggctcggtagacccgcagctgcagcatttcattgaggtggagactcagaagcagcgcttccagcagctggtgcaccagatgacggaactttgttgggaaaagtgcatggacaagcctgggccaaagttggacagtcgggctgaggcctgttttgtgaactgcgttgagcgcttcattgacacaagccaattcatcttgaatcgactggaacagacgcagaaatccaagccagtcttctcagaaagcctttctgactgacctcagcattacctctttggaaaaggaaggtagttcaagagatgaagagcagttgatggggtagttgaagaaaaggctatgggggg

SEQ ID NO: 2262 - DNA, 418 bp, Bos taurus
  Clone ID: 10-LIB34-023-Q1-E1-C5
gccgactctcatcgaaaagccaataaatcctctgagttggtatcagccaaccgtctttttggagacaaatccattacattcaatgagacctaccaggacatcagtgaggtggtatatggggccaagctccagcccctggacttcaagggaaatgcagagcagtccagattgactatcaaccaatggatatccaataagactgaagggcgtatcactgatgtcattcccccacaagccatcaatgagttcactgtcctggtgctagtcaacaccatttacttcaagggcctgtggaagtcaaagttcagtcccgagaacacaaggaaggaactgttctacaaggctgatggggagtcatgttcagtactcatgatgtaccaggaaagcaagttccgctatcggagagtaccagaaagca

SEQ ID NO: 2263 - DNA, 367 bp, Bos taurus
  Clone ID: 10-LIB34-024-Q1-E1-C5
ctcgtgggacgacgcacgcgtctgcagtgcatcataagccagagagctggtcaaagcaatccaaatcagctataaccctgatcaaccatcaaagccaaataacatagagagtgctaccaagaattccaagagtatgatggaagaaattatgaaatatgaaacactgataacaacacatgaatcaacaattcgatttttgcaagaaatatataactcaaatagtcaagaaatcgttaacctaagagatagagtggtccagcttgaagcaaactgtcaagagccttgtcaagatacagtgaaaatacatgatgtaactgggagagattgccaagatgttgccaataagggggccaaagagagtggactt

SEQ ID NO: 2264 - DNA, 326 bp, Bos taurus
  Clone ID: 10-LIB34-024-Q1-E1-C9
gtccacccacgcatccgggaatgctgccatggtgacctacttgaatgcgcagatgacagggcagatcttgccaagtacatatgtgataatcaagatacaatctccagtaaactcaatgaatgctgggataagcctttgttggaacaatcccactgcagtgctgaggtagaaaaacatgccatacctgaaaacctgcccccattaactgctgactttgctgaagataacgatgtttgcaaaaactatcatgaatcacaagatgccttcctgggctcgtttttgttataatattcaataatgcatcctgaagacgctctctcagtgct

SEQ ID NO: 2265 - DNA, 411 bp, Bos taurus
  Clone ID: 10-LIB34-026-Q1-E1-C5
ctactataacatcacaaagggtgggccttacctgcaccccgtggggttggagcttctggtagaccataaggctctggaccctgccgattggaccgtccagaaggtgttctttcaaggccgctactatgaaaatctgacccagctggaggagcagtttgaggctggccaggtgaatgtggtggtgatcccagacgatggcacaggtgggttctggtccctgaagtcccaggtgcctccgggtccaactccccctctgcagttccatcctcagggcccccgcttcagtgtccagggcaatcgagtggcctcctcattgtggactttctcctttggcctcggagctttcagtggtcctacggtctttgacgttcgattccagtgagaacggctggcttatgagatcagcctgca

SEQ ID NO: 2266 - DNA, 334 bp, Bos taurus
  Clone ID: 10-LIB34-027-Q1-E1-C5
aataccaagagggctctcctggaagtgtacaacatgatgagcagggaagtaaaccagttcaaagagacctggaaccgcacgcgccacgtcatcatcatcatgactgacggtttgcacaacatgggtggggatccagtcactgtcattcacgatattcggtacttgctagacattggtagaaatcgcaaaaaccccagggaggattatctggatatctatgtgttcggggttggacctctactgaaccaagagaacatcaatgctttggcttccaagaaggataaagagaaacacgtgttcagactccagggcatggaaaacctggaggatgttt

SEQ ID NO: 2267 - DNA, 213 bp, Bos taurus
  Clone ID: 10-LIB34-028-Q1-E1-C5
tccgggtccacccacacgtccgataatgaaaatgcacgtttcatagtttgagccgaaaggaaaggacaaagcaccttgtcggtagtgaccgtgtaccatgccaagctcagaggcaaagtctcctgcaaaaagttcgacctcggggtttccatacgctgagcccccgaaacactcaagaagcctcaggacaccaagggttccatggtccttgac

SEQ ID NO: 2268 - DNA, 383 bp, Bos taurus
  Clone ID: 10-LIB34-028-Q1-E1-C9
tgcccttttggcttacaccctgggtgtgaaacaactaattgttggcgttaacaaaatggattccactgagccaccctatagccagaagagatacgaagaaattgttaaggaagtcagcacctatattaagaaaattggctacaaccccgacacagtagcatttgtgccaatttctggctggaatggtgacaacatgctagaaccaagtgctaatatgccatggttcaagggatggaaagtcacccgtaaggacggcaatgccagtggaaccaccctgcttgaagctctggattgcattctgccaccaactcgcccaactgacaaacccttgcgtttgcctctccaggatgtctataaaattggtggtattggtactgtccctg

SEQ ID NO: 2269 - DNA, 416 bp, Bos taurus
  unsure (328): unsure at all n locations; Clone ID: 10-LIB34-029-Q1-E1-C5
gtgataatcaagatacaatctccagtaaactgaaggaatgctgtgataagcctttgttggaaaaatcccactgcattgctgaggtagaaaaagatgccatacctgaaaacctgcccccattaactgctgactttgctgaagataaggatgtttgcaaaaactatcaggaagcaaaagatgccttcctgggctcgtttttgtatgaatattcaagaatgcatcctgaatatgctgtctcagtgctattgagacttgccaaggaatatgaagccacactggaggaatgctgtgccaaagatgatccacatgcatgctattccacagtgtntgacagacttaagcatcttgtggatgagcctcagaatttaatcaaacaaaactgtgaccaattcgaaaaacttggagagtatggattc

SEQ ID NO: 2270 - DNA, 409 bp, Bos taurus
  Clone ID: 10-LIB34-030-Q1-E1-C5
actgaatatgctgtctcagtgctattgagacttgccaaggaatatgaagccacactggaggaatgctgtgccaaagatgatccacatgcatgctattccacagtgtttgacaaacttaagcatcttgtggatgagcctcagaatttaatcaaacaaaactgtgaccaattcgaaaaacttggagagtatggattccaaaatgcgctcatagttcgttacaccaggaaagtaccccaagtgtcaactccaactctcgtggaggtttcaagaagcctaggaaaagtgggtactaggtgttgtacaaagccggaatcagaaagaatgccctgtactgaagactatctgagcttgatcctgaaccggttgtgcgtgctgcatgagaagacaccagtgagtgaaaaagtcacca

SEQ ID NO: 2271 - DNA, 418 bp, Bos taurus
  Clone ID: 10-LIB34-031-Q1-E1-C5
gatctagatcgcgagcggccgccctttttttttttttttatcttttctataaaagtttattttgtgattttttttcccaagaagtgttaggggaaaatgttgaaattatgtaaaggtaaggaaccatggtatataaaaataatttaaacacacatattaataagaaagcaacattgcattctagcaacaactaggaggtaatcttgcccaagatttttccaaagtcattaaatacgttttagacgacagtacacagacacacacgcatgtgcacacacacatatatacagctcaagtgtcctttttctgtgcatcctggctaactgatacagctaagggggaaagacaaagaagactgcttgagtgtccctaagttgaacaaaggtgcattggtacaataaagtttgccaattcctgg

SEQ ID NO: 2272 - DNA, 370 bp, Bos taurus
  Clone ID: 10-LIB34-034-Q1-E1-C5
atcaaagccaaataacatagagagtgctaccaagaattccaagagtatgatggaagaaattatgaaatatgaaacactgatatcaacacatgaatcaacaattcgatttttgcaagaaatatataactcaaatagtcaaaaaatcgttaacctaagagataaagtggtccagcttgaagcaaactgtcaagagccttgtcaagatacagtgaaaatacatgatgtaactgggagagattgccaagatgttgccaataagggggccaaagagagtggactttactttatcagacctctgaaagctaagcagcagttcttagtctactgtgaaattgatgggtctggaaatggatggactgtgtttcagaag

SEQ ID NO: 2273 - DNA, 443 bp, Bos taurus
  Clone ID: 10-LIB34-034-Q1-E1-C9
ccaggctcggagccccgggcccgccgacaccatgagttggtcctcgcaccctccgagtgtaatcttctacattctttcattgctttcttcagcatgcctggcatatgttgctacccgagacaactgctgcatcttagatgaaagatttggtagttattgcccaactacctgtggaattgcagatttcctgaataattaccaaaccagtgtagacaaagatctacgaactttggaaggcatcttatatcaggttgagaacaaaacatcagaagccagagagctggtcaaagcaatccaaatcagctataaccctgatcaaccatcaaagccaaataacatagagagtgctaccaagaattccaagagtatgatggaagaaattatgaaatatgaaacactgataacaacacatgaatcaacaattcgatttttgcaagaaatat

SEQ ID NO: 2274 - DNA, 231 bp, Bos taurus
  Clone ID: 10-LIB34-035-Q1-E1-C5
gataaatcttcggggtgaccaacctggacagtgtccgatccacagcttgcggctcagagctaaaagatttggacccagccctgttcaaagtccccgtcatctggggacaagctgggaaaaccagcatccacatgatgtcacagtgcacccgtaacgtgggagttccccagaactagctgagcagtctcaacggtccgatcgaagatgctggcacagaggtggtcaaggcca

SEQ ID NO: 2275 - DNA, 412 bp, Bos taurus
  Clone ID: 10-LIB34-036-Q1-E1-C5
gggacacaggtgtcgtgaaaaccaccgttaaacctaagccaaaatgggaaaggagaagacccacatcaacatcgttgtcattgggcacgtagattcagggaagtctaccacgactggccatctgatctataaatgtggcgggatcgacaagagaacaattgaaaagttcgagaaggaggctgccgagatgggaaagggctccttcaaatatgcctgggtcttggacaaacttaaagctgaacgtgagcgtggtatcaccattgatatctccctgtggaaatttgagaccagcaagtactatgttaccatcattgatgccccaggacacagagacttcatcaaaaacatgattacaggcacatcccaggctgactgtgctgtcctgatcgttgctgctggtgttggtgaattt

SEQ ID NO: 2276 - DNA, 403 bp, Bos taurus
  Clone ID: 10-LIB34-036-Q1-E1-C9
ggactcctttcaatgtgtgaatgggaaacgcattcctcagaagaaggcctgtgatggtgtcaatgactgtgtagacaagagtgatgagctgtgctgtaaagactgccgaggtgaaggttttctctgtaaatcgggtgtttgtattccaaagcagtataagtgcaatggtgagctggactgtatcacgggagaagatgaagttggttgtgaagaaactggacaccctgaaattaaagaagcagcagaaatgttgactgctgatatggatgcagaaagaaaatttacaaagtcatttttgcctaaactatcctgtggagttaaaaacaacatgcacattcgaaggaaacgagtcgtaggaggcaagccagcaaaaatgggagaattcccgtggcagatggcaatc

SEQ ID NO: 2277 - DNA, 421 bp, Bos taurus
  Clone ID: 10-LIB34-037-Q1-E1-C4
cggtgcctcagacagccccaggacaagaagcctgaggagctcaccatcccaggggacgctggaggaccctgcgcaccacacacacagaagaagcctgtgaagaaggtcgtgaaagaagagaagaagcccaggaaacctggctctgccttactcaacaagcctgtcacctttggatcctcggaacacttagtgaatcccaaactaactgtccaggagggtgcagccaaagcccctaccgtgccgccgacctcagcgtctctcaacgccaaggtgctggagaacttcctaaccaagtccaggccggagctcctgaagtatgtggttaaagttgtcctggactacaacaccgcccacagcaaggtggccctgtccgagaactacaccgtcgcgtccgtggctgacgcgtctctgaactaccggc

SEQ ID NO: 2278 - DNA, 420 bp, Bos taurus
  Clone ID: 10-LIB34-038-Q1-E1-C9
ccactgcccacaccccgctctcgcaggcagacatgaggacagagagaatgccccccctcctggctctggggatcctggtggctgggctctgctccagggtccactgcctcccagagaatgtgaccccagaagaacagcacaaagtgacatctgtggatggccactcattagcctccagcaacactgacttcgccttcagcctctacaagcagttggctttgaaggaccccaataagaacgtcatcttctcccctctgagcatctccatagccttggccttcttgtccctgggggctcatggccccactgtgacagagatcctggaaggtctcaagttcaacctcacagagacccccgagacagaaatccacagggcttccagcacctcctgcagacgttcaatcagcccagcaaccagct

SEQ ID NO: 2279 - DNA, 433 bp, Bos taurus
  Clone ID: 10-LIB34-039-Q1-E1-C5
aaacaatggatcccaaaggccagagagtgaagcttaatgatggccacttcattcctgtcctgggatttggaacctttgcacctcgagaggttcctaagagtgaagctctggaagtcaccaaatttgctatagaggctgggttccgccatattgacagtgctcatttgtaccaaaatgaagagcaggttggccaggccattcgaagcaagattgccgatggcactgtaaagagagaagacattttctacacttcaaagctttggtccacttcccttcgtccagaattggtccgaccagccttggaaaagtcactgaataatcttcaactggactatgtcgatctttatattattcattttccagtggctctgaagccaggggagacacttttcccaacagatgaaaatggaaaaccaatatttgactcagtgga

SEQ ID NO: 2280 - DNA, 417 bp, Bos taurus
  Clone ID: 10-LIB34-040-Q1-E1-C5
ctgattctttggacaccccgaagtctatattttaatcttacctgggtttggaataatctctcatatcgtgacctactactcaggaaaaaaagaaccattcggatatatgggaatagtttgggctataatgtcaatcggatttctaggtttcatcgtatgagcccaccatatattcactgtcggaatagacgtcgacacacgagcctacttcacatcagccactataattattgctattccaaccggggtaaaagtcttcagctgattggcaacacttcatggaggtaatatcaaatggtctcctgctataatgtgagccctaggctttattttcttatttacagtagggggtttaactggaattgtcttagccaactcttccctcgatattgttcttcacgacacatactacgttgt

SEQ ID NO: 2281 - DNA, 197 bp, Bos taurus
  Clone ID: 10-LIB34-041-Q1-E1-C5
cgcaagactctagactgagtcgtagtatgctgtgccaaagatgatccacatgcatgctattccacagtgttggccaaacttaagcaccttgtggataaccctaagaatttaaccaaccaggagggtgacaaattcaaaaaacttggaaattaggaatccaaaaaggggcccaaagtccgtaacaccaggaagttacc

SEQ ID NO: 2282 - DNA, 426 bp, Bos taurus
  Clone ID: 10-LIB34-042-Q1-E1-C9
gactcgcgggtcgacgcacgcctctagagccagtcggctcagagggctccctcctggctagctggatgtccggtttgcgggcgcttctggggctcgggctgctggttgcaggctcgcgcctgtcacgcgtcagagtccaggccggctcctgtcgcgcaggagccacctggtgggtaccgcagcgactgatctcgggtggccgcggggactcagaagtcatggcgagttcagcagtgaagtacctgagccaggaggaggcccaagccgtggaccaggagctgtttaatgagtaccagttcagcgtggaccaacttatggagctggccggtctgagctgtgccacagccattgccaaggcatatccccccacgtccttgtccaggagcccccctaccgtcctggtcatctgtggcgctgggaataacg

SEQ ID NO: 2283 - DNA, 409 bp, Bos taurus
  Clone ID: 10-LIB34-044-Q1-E1-C5
agtagtcccaacactcattattattacccgatgaggaaaccaatcagaacgcctaaacgccggacgctatttcctattctatacactagctggctccctacccctattagtcgcactaatttatatccaaaacacagtaggatccctaaatttcctaatattacagtactgagtacaacctgttcataactcgtgatctaatgtcttcatatgactagcatgtataatagctttcatagtaaaaataccactatatggcctccacctttgactacctaaagctcacgtagaagcccccatcgcaggctccatagtccttgcagcagttctactaaaactaggggggtacggtatgctacgattcagactaattctaaaccctatgaccgactttatagcatacccattc

SEQ ID NO: 2284 - DNA, 335 bp, Bos taurus
  Clone ID: 10-LIB34-045-Q1-E1-C5
atgaagatgactcagcctcagagagctgcctgccctcataagggacaacctctgaccccgtgaccctgcgtcgaaggatgctggctgctgctgccgagctgatacttcagaagcagcaggcctcctaacgctgccttgacttcctcggctgcctccgccatagccgcgtgcccggcctgctgaagaggcctgtcgtcagttgtgcctgctgtgtgaagaagctggcttgactgcatcaccgctgtataaagcatgtggacttaatagtgtttggacatctgacagatttaatccttttttgtaatactttctatgtgacatttctcttcccttag

SEQ ID NO: 2285 - DNA, 285 bp, Bos taurus
  Clone ID: 10-LIB34-046-Q1-E1-C5
aaggctcggagccccgggcccgccgacaccatgagttggtcctcgcaccctccgagtgtaatcttctacattctttcattgctttcttcagcatgcctggcatatgttgctacccgagacaactgctgcatcttagatgaaagatttggtagttattgcccaactacctgtgggattgcagatttcctgaataattaccaggccagtgtagacaaagatttacgaactttgggaggcatcttatatcacgttgagaacattacatcagaagcgagagagctggtc

SEQ ID NO: 2286 - DNA, 419 bp, Bos taurus
  Clone ID: 10-LIB34-046-Q1-E1-C9
agaccccacaaaactttggcacaatgaagtgggtgacttttatttctcttctccttctcttcagctctgcttattccaggggtgtgtttcgtcgagatacacacaagagtgagattgctcatcggtttaaagatttgggagaagaacattttaaaggcctggtactgattgccttttctcagtatctccagcagtgtccatttgatgagcatgtaaaattagtgaacgaactaactgagtttgcaaaaacatgtgttgctgatgagtcccatgccggctgtgaaaagtcacttcacactctctttggagatgaattgtgtaaagttgcatcccttcgtgaaacctatggtgacatgggtgactgctgtgagaaacaagagcctgaaagaaatgaatgcttcctgagccacaaagatgat

SEQ ID NO: 2287 - DNA, 105 bp, Bos taurus
  Clone ID: 10-LIB34-047-Q1-E1-C5
ctgtcaccaaacttgtgactgatttcatggctaagaagttttcactggatcagttaattacccatgttttaccacttgaaaaaataaacgaaggatttgacctgc

SEQ ID NO: 2288 - DNA, 355 bp, Bos taurus
  Clone ID: 10-LIB34-048-Q1-E1-C5
gccacagcaactgtgggccagaagaaagtggagagaaagccccctgacgctgatggctgcctgcacgcggacccggatctgggtgtgttgtgtcctacaggatgtaagttgcaagatactttggtaagacaggagagaccaatccgaaagagtatagaagatttacgtaatactgtggactctgtttcccggacctcttcttccacctttcaatatataactctgctaaaaaacatgtggaaaggaaggcagaatcaagtacaagataatgaaaatgtagtatacgagtactcctcacatctggaaaagcaccagttatatatacatgagactgtgaagaatagtatcccaacta

SEQ ID NO: 2289 - DNA, 421 bp, Bos taurus
  Clone ID: 10-LIB34-048-Q1-E1-C9
atttggcacaatgaagtgggtgacttttatttctcttctccttctcttcagctctgcttattccaggggtgtgtttcgtcgagatacacacaagagtgagattgctcatcggtttaaagatttgggagaagaacattttaaaggcctggtactgattgccttttctcagtatctccagcagtgtccatttgatgagcatgtgaaattagtgaacgaactaactgagtttgcaaaaacatgtgttgctgatgagtcccatgccggctgtgaaaagtcacttcacactctctttggagatgaattgtgtaaagttgcatcccttcgtgaaacctatggtgacatggctgactgctgtgagaaacaagagcctgaaagaaatgaatgcttcctgagccacaaagatgatagcccagacctccct

SEQ ID NO: 2290 - DNA, 393 bp, Bos taurus
  Clone ID: 10-LIB34-049-Q1-E1-C5
actcacggaaagataaggcaacttgtgtggagaaaatattaaacaaacagcaggatgattttggaaaatctgtaaccgactgcacgagcaatttttgtttattccaatcaaattccaaggaccttctgttcagggatgacactaaatgtttggcttcaattgcgaaaaaaacatgactcctacttaggggatgactacgtcagagctatgaccaacctgagacaatgctcaacctcaaaactcctggaagcatgcactttccacaaaccttaaaatccaagagtggagccaacacctgatggagatgggagctcatgggacccataagcttcatctggtttcgctggtctgagtgatttggttgccctcacaatttggtggtggcgcctctgc

SEQ ID NO: 2291 - DNA, 412 bp, Bos taurus
  Clone ID: 10-LIB34-049-Q1-E1-C9
agcgagtctgagcgagggctgtacacctgcacggctcagggcatttggaagaacgagctggtaggagagaagatgcctcggtgtttgccagtgtgcgggaagccactccaccctgtcgagcagaggcagcgcatcattggaggcctgaaggccaagctgggcaacttcccctggcaggcctacaccaacatccacgggcccgggggtggcgcgctgctgggggaccgctggatcctcacggccgcgcacaccatcaaccccaaggaccacgaggcgcagggcagccccaacatagacgtgttcctgggccacatcaatgtggaagatatcaccaagctgtccaaccacccggtccgtagggtcataatccacccagactaccgccaggaagagtcccacaatttcgaggggg

SEQ ID NO: 2292 - DNA, 434 bp, Bos taurus
  unsure (351): unsure at all n locations; Clone ID: 10-LIB34-050-Q1-E1-C5
agagaagaaccctggggtgtggctcaacacggcccagccgctctgcaaggcctttatggtgactgatgaggacatcaggaagcaggaagagctggtgcagcaagtccgcaagcggctggaggaggcgctgatggccgacatgctggctcacgtggaggagctggcccgggacggtgaggcaccattggacagggcgggcgctgacgacgaggaggacgaggacgaggaggaggaggagcccgaccaggacccagagatggagcacgtctagagcaggggccccgcctgccagcccgcccacatggggccacctcagactcggccctcaccctgccctggtgtgccccctcncctgggccgcaggagcttggctgaaggacagcccctcgcctgacggaccccccacatctgcttctctgaagggcccagcccgt

SEQ ID NO: 2293 - DNA, 237 bp, Bos taurus
  Clone ID: 10-LIB34-052-Q1-E1-C5
aaggaaggcagaatcaagtacaagataatgaaaatgtagtaaacgagtactcctcacatctggaaaagcaccagttatatatagatgagactgtgaagaataatatcccaactaagcttcgtgtgctccgttcaattctggagaatttgagaagcaaaatacaaaaattagaatcggatgtctcaactcagatggaatactgccgcaccccgtgtactgttacttgcaatattcctg

SEQ ID NO: 2294 - DNA, 241 bp, Bos taurus
  Clone ID: 10-LIB34-052-Q1-E1-C9
gtactgattgccttttctcagtatctccagcagtgtccatttgatgagcatgtaaaattagtgaacgaactaactgagtttgcaaaaacatgtgttgctgatgagtcccatgccggctgtgaaaagtcacttcacactctctttggagatgaattgtgtaaagttgcatcccttcgtgaaacctatggtgacatggctgactgctgtgagaaacaagagcctgaaagaaatgaatgcttcc

SEQ ID NO: 2295 - DNA, 238 bp, Bos taurus
  Clone ID: 10-LIB34-054-Q1-E1-C5
acacactctatcaggtcattgcaaacagacctgccttactggactgtgccttctttgggtctcctctgcctaccatcgagtggtttaagggcgctaaagggagtgctcttcgtgaagatatttatgttttacatgaaaatggaactttggaaattcctgtggcccagaaggacagtacaggaacctatacatgtgtcgcacggaataagttaggaatggcaaagaatgatgttcaccc

SEQ ID NO: 2296 - DNA, 277 bp, Bos taurus
  Clone ID: 10-LIB34-056-Q1-E1-C5
ctagttctagatcgcgagcggccgccctttttttttttttttttttttttttttttttttttttttttttttttttttttttttttttttttttttttttttttttttaacctcaaaaaaaaaagtttatttttagagtgagaacatgtcactattttaaaatcctggttcattcaagggaagtagtcttgggacaggatacaatcaaatcaggatatacacacttcagtgatttttatacggagtcacatacttaatattaaggcacattttacgg

SEQ ID NO: 2297 - DNA, 338 bp, Bos taurus
  Clone ID: 10-LIB34-056-Q1-E1-C9
aaaactttggcacaatgaagtgggtgacttttatttctcttctccttctcttcagctctgcttattccaggggtgtgtttcgtcgagatacacacaagagtgagattgctcatcggtttaaagatttgggagaagaacattttaaaggcctggtactgattgccttttctcagtatctccagcagtgtccatttgatgagcatgtaaaattagtgaacgaactaactgagtttgcaaaaacatgtgttgctgatgagtcccatgccggctgtgaaaagtcacttcacactctctttggagatgaattgtgtaaagttgcatcccttcgtgaaacctat

SEQ ID NO: 2298 - DNA, 218 bp, Bos taurus
  Clone ID: 10-LIB34-057-Q1-E1-C5
ctagtgacagatctcacaaaagtccacaaggaatgctgccatggtgacctacttgaatgcgcagatgacagggcagatcttgccaagtacatatgtgataatcaagatacaatctccagtaaactgaaggaatgctgtgataagcctttgttggaaaaatcccactgcattgctgaggtagaaaaagatgccatacctgaaaacctgcccccattaac

SEQ ID NO: 2299 - DNA, 224 bp, Bos taurus
  Clone ID: 10-LIB34-058-Q1-E1-C9
cctgaaaacacctccattcttccaggctttaggcatcaccacgaagatctccaggggcacaattgaaatcctgagtgatgtgcagctgattaagacaggagacaaagtaggcgccagcgaagccacgctgctgaacatgctgaacatctcccccttctccttcgggctggtcatccagcaggtgtttgacaatggcagcatctacaaccctgaagtgcttgaca

SEQ ID NO: 2300 - DNA, 205 bp, Bos taurus
  Clone ID: 10-LIB34-059-Q1-E1-C5
ctccagctgcctgcctgctgacacaccggggcctctctgaagccaccatgaaatccttcgttctgctcttttgcctggctcagctctggggctgccactcgatcccgcttgacccggttgcaggttataaggaaccggcctgtgatgacccagacacagagcaagcagccttggctgccgtggactacatcaacaagcaccttct

SEQ ID NO: 2301 - DNA, 209 bp, Bos taurus
  Clone ID: 10-LIB34-059-Q1-E1-C9
cttgtcctgcatacagattcctcaggagacatgtagtctgctattcccatctcttcacgaatattccagtttgatgtgatccacagttaaaggctttcacacagtcgatgaagtataagtagatgtttttttaagtctcttgctttttctatgatctagcataagttggcaagttgatttctggttcctctgccatttccaaatccagc

SEQ ID NO: 2302 - DNA, 235 bp, Bos taurus
  Clone ID: 10-LIB34-060-Q1-E1-C5
cttggaccctgtgaaggtgtgtggagttcctgcagctgagctttgggggcaagcctgctgggaacgggacttctaaaacgacaaatatgtctggaaggctgtggtccaaggccatttttgctggctataaacggggtctacggaaccaaagggaacacactgctctcctgaaaattgaaggtgtatatgctcgagatgaaactgattctatttaggcaagagatgtgcttatgtg

SEQ ID NO: 2303 - DNA, 165 bp, Bos taurus
  Clone ID: 10-LIB34-062-Q1-E1-C5
gggtgcattttcattctcttctccttctcttcagctctgcttattccaggggtgtgtttcgtcgagatacacacaagagtgagattgctcatcggtttaaagatttgggagaagaacattttaaaggcctggtactgattgccttttctcagtatctccagcagg

SEQ ID NO: 2304 - DNA, 309 bp, Bos taurus
  unsure (121),(264): unsure at all n locations; Clone ID: 10-LIB34-063-Q1-E1-C5
ccggggccacccacgcgtcagcagacgcttgggacttgtcaaagcaatggaaagtggagtaattccaagttgcggtgtcaacccgtggactgtggcgctcctgaaccaatcagcatggtanagttgaagatcaagagagtactctaattgggttcatcactcgctactcttgtgagatggcatattacagcatggaatatgaagggagcgaggtgtatcactgcagtggcaatgggagctgggtgaacaaggtgctgggcatanagccgccaaaatgcattgcagtccgtggcaccccagcgagctttt

SEQ ID NO: 2305 - DNA, 372 bp, Bos taurus
  unsure (256): unsure at all n locations; Clone ID: 10-LIB34-064-Q1-E1-C5
tccgggtcaccagcgtcgagaagaggcacatgtcctctcagaacccagagcgaatacagagcctggtgggctgggactcccatctttctagaatcttcctattgctgctttgtagtctcagcccaggggctcaccccaaatcctgaagcctgtctggtgttctcctcggtcaatggcagctccatctcctgccagccacctgcccaaatcccccacagcctcccagctgacaccatctttctggctgtggagttcntcaacctgactcagctgcctgccgacttcctccaaggcgtccctaacctccaggaactccacctttccagcaaccgactggaagacttctcccccaagttcctgctggccgtgccc

SEQ ID NO: 2306 - DNA, 215 bp, Bos taurus
  Clone ID: 10-LIB34-065-Q1-E1-C5
cggacgcgtgggctgggggttcctggcccaagacctctgcctctttttggaaacgttctatcctaccgaaagggtgtttgtgagtttgatgaagaatgttttaaaaagtatgggaaaatgtgggggatttttgaaggtaaacatcctctgttggttatcacggatccagacatgatcaaaacagtactagtgaaagaatgttattctgtcttcac

SEQ ID NO: 2307 - DNA, 197 bp, Bos taurus
  Clone ID: 10-LIB34-065-Q1-E1-C9
acggacacttgggccacaggcaactacccctcctggactttatacatccaggtcatgacatttagtgaggcagaaatttttccatttaatccatttgatcttaccaaggtttggcctcacggcgactatccccttattccagttggtaaattggtcttaaaccggaacccagttaattactttgctgaggttgaaca

SEQ ID NO: 2308 - DNA, 235 bp, Bos taurus
  Clone ID: 10-LIB34-067-Q1-E1-C5
gtccagcatcaagctgaaagaggagcagcgcatgacgacaacatcaccctggatgcttcccgccaggcagacgtggcctgaggaccatgtgttcatttccacccccagtatcaactacacaagccgtgacatgcagcgcttctttacagacctgcactttgaggaaggctggtacatgtggctccagtcacgtgacctgctggcaggcctcccagcacctggcgtggaagtgtat

SEQ ID NO: 2309 - DNA, 210 bp, Bos taurus
  Clone ID: 10-LIB34-068-Q1-E1-C5
aattgtgtaaagttgcatcccttcgtgaaacctatggtgacatggctgactgctgtgagaaacaagagcctgaaagaaatgaatgcttcctgagccacaaagatgatagcccagacctccctaaattgaaaccagaccccaatactttgtgtgatgagtttaaggcagatgaaaagaagttttggggaaaatacctatacgaaattgcta

SEQ ID NO: 2310 - DNA, 210 bp, Bos taurus
  Clone ID: 10-LIB34-069-Q1-E1-C5
gttctagatcgcgagcggccgcccggcctggccaggccccgcgctatggagttcttctgggcctctctcttgggtctgtgctgcagtctggccgctgctaaccgccacaccgtcttctggaacagttcaaaccccaagttttggaatgaggactacacagtacatgtgcggatagatgactacctggacatcatctgtcctcatttacga

SEQ ID NO: 2311 - DNA, 199 bp, Bos taurus
  Clone ID: 10-LIB34-070-Q1-E1-C5
gtggtctcaggtttggacttgttcagttggatcatcttaagccaccagatgaaggatccatttattcccatggagatctagcatccaggatgctaccagaccgatatcgagggagagcttgtgcccatggagaccctgaatatgcaacacccttagttcaaggacaacgagctgtgctagcagctgcgtggcctcatct

SEQ ID NO: 2312 - DNA, 397 bp, Bos taurus
  Clone ID: 10-LIB34-071-Q1-E1-C5
agtgtccacgatgctcaactatgactatgtgtgggatatggtcttctaccccaatggggccatagaagtcaaattgcatgccacgggctacatcagctcagcgttcctctttggtgctgcccgaagatacggaaaccaggttggggaacacacactgggccccgtccacacccacagtgcccactacaaggtggatctggacgtgggaggactggaaaactgggtctgggctgaggatatggcttttgtccccacggcgataccctggagccctgagcaccagatacagaggctgcaggtgacccggaagcagctggagaccgaggagcaggctgccttccccctgggaggggcttcccctcgctacctgtacctggccagcaagcagagcaacaag

SEQ ID NO: 2313 - DNA, 389 bp, Bos taurus
  Clone ID: 10-LIB34-071-Q1-E1-C9
aacgtcagtccaaagcttactccctttaggtgctaaatcgctactattttagccatttttgcatgacaatgtttccaaaatgcatcaatcttccttgccctgttagagtagactaaaaacagttaagcttgttttgatgttatttctttaggtaagtgaatagctgttctgtgctgtgatcaactgttgcttagggactattgagaaatgtgggtctgttaattcttacttgaaatgggtctgtactttggtacttttaataaatgtttaatttcatcttcttccgattagccagctgtttttggatatgtttcacctttagatcaaaaccaatacaatattgtaaggtaataagcctccaattaaagtcaataaatttatattaaaaa

SEQ ID NO: 2314 - DNA, 410 bp, Bos taurus
  Clone ID: 10-LIB34-072-Q1-E1-C5
aactaattctacatagctagcggacgccccttgtatgtacattctattagccatgagtaaggagagttctactgaagcctgaccatcgattgggaggatcacttggctgtcagtcatttttcatttgaaggacagttggtattcagagcccttctttttgtcgcaatacaagctccttttgacctgtttgaaatcagaacgatgacgaacaacattaagttgtatgttcgcatagtactcatcatggataaccgcgaagagctaatcactgagtacctgactttcattacatgtgtggtggattctgatgatcttcctctgaacatttcccgtgagatgttgcaagggagcagattttgaaaatttacacggaggaatttggtcaaaaagtgcttggaactcttcactga

SEQ ID NO: 2315 - DNA, 413 bp, Bos taurus
  unsure (55),(297),(306),(329),(344): unsure at all n locations; Clone ID: 10-LIB34-074-Q1-E1-C5
cggacgcgtgggggcgtcgacgcacctaaaaataagacagctaagagccccgtangggtgcaacccatactgaatgagaacaccttctgcctcggcctgtccaagttccaagaccacacctgctaaggcgaagccgggagcgccttcctcgttcaagacaagggagacgacacctggtatgccggccggattctgagctttgacaagagctgtgctgtggctgagtatggtgtgtacgtgaaggtgacctccattctggactgggttccgaaaaccatcgctaacaactaaggcggngctggctangagcagctgcctggaaggacgangggaaagctgcacangagtggaggggacacgagtgcagtgtggcgctggtgggttccagccaaataaagagcttgctttgcctc

SEQ ID NO: 2316 - DNA, 386 bp, Bos taurus
  Clone ID: 10-LIB34-075-Q1-E1-C5
cccacacgtccgacacccactaataaaaattgtaaacaatgcattcatcgaccttccagccccatcaaacatttcatcatgatgaaatttcggttccctcctgtgaatctgcctaatcctacagatcctcacaggcctattcctagcaatacactacacatccgacacaacaacagcattctcctctgttacccatatctgccgagacgtgaactacggctgaatcatccgatacatacacgcaaacggagcttcaatgttttttatctgcttatatatgcacgtaggacgaggcttatattacgggtcttacacttttctataaacatggaatattggagtaatccttctggtcacaataatagccacagcatttataagatacg

SEQ ID NO: 2317 - DNA, 446 bp, Bos taurus
  Clone ID: 10-LIB34-076-Q1-E1-C5
accaaacaaaactttggcacaatgaagtgggtgacttttatttctcttctccttctcttcagctctgcttattccaggggtgtgtttcgtcgagatacacacaagagtgagattgctcatcggtttaaagatttgggagaagaacattttaaaggcctggtactgattgccttttctcagtatctccagcagtgtccatttgatgagcatgtaaaattagtgaacgaactaactgagtttgcaaaaacatgtgttgctgatgagtctcatgccggctgtgaaaagtcacttcacactctctttggagatgaattgtgtaaagttgcatcccttcgtgaaacctatggtgacatggctgactgctgtgagaaacaagagcctgaaagaaatgaatgcttcctgagccacagtgatgatagcccagacctccctaaattgaaaccaga

SEQ ID NO: 2318 - DNA, 444 bp, Bos taurus
  unsure (350),(416): unsure at all n locations; Clone ID: 10-LIB34-077-Q1-E1-C5
ggcctgaaggaaaaaacactcaagaagtggctcaggatgcccatgaagaggcggcttgagctttatcttcccaagttctctattgagggctcctatcagctggaggaagtcctccccaagctggggatcagagacatcttcacctccgacgccgacctgaccggcatctccaaccactccagcatccgggtctctgagatggtgcacaaagctgtggtggaggtggatgagtctggaacccaagcggctgcagccacggggatggtcatcacgttcaaatctgcccgattgggctctcaaaggatagtcttcaacaggccttttctggtgctcattgtgaagaacagcanacacatccttttcttaagcaaagtgactcgcccttgagatgaggatttctcaaggggcctccatantggaagatgaatgtgcacgatggctgtc

SEQ ID NO: 2319 - DNA, 427 bp, Bos taurus
  Clone ID: 10-LIB34-078-Q1-E1-C9
agtcgtagtactgctgtacgtcatcacacccaagtagtacgctttttgagcgagagacttcagcttaaacatttgtcacattctcatcattatgacaaacagaatctgctcacaataggctgcttatgggaaggagaagtcaaggctcagccatctcatcaaatttgcccataaagtgtctactgcacatctggaagatgttctgccacttgctgaacatattacaacattcctctctcagtgctgtgactctgtctctgacgactgcatcatggagcttcctgaatatgcagtaaaactctgtgacaccttatcgactacaaattcaatgtttacagactgttgtcaagactggacatccatcgagatatttgtgtgcgcttagatcatgccatcttcctgaaactctgaattgccagatgtcaag

SEQ ID NO: 2320 - DNA, 306 bp, Bos taurus
  Clone ID: 10-LIB34-079-Q1-E1-C5
cggtttctggaggcgaagaacgcggttggccaatcgcaagccagaagatgaaggttctgtgggttgccgtggtggtcgcgcttctggcaggatgccaggcggatatggagggagagctggggcccgaggagcccctgactacccagcagccccgggggaaggacagccagccttgggagcaggcgctgggccgcttctgggattacctgcgctgggtgcagaccctgtctgaccaggtgcaggaggagctgctcaacacccaggtcattcaggaactgacggcgctgatggaggagaccatgaaag

SEQ ID NO: 2321 - DNA, 418 bp, Bos taurus
  Clone ID: 10-LIB34-079-Q1-E1-C9
agatgtcatcttctcccctctgagcatctccatagccttggccttcctgtccctgggggctcatgaccacactgtgacagagatcctggaaggtctcaagttcaacctcacagagacccccgagacagaaatccaccagggcttccagcacctcctgcagacgttcaatcagcccagcaaccagctgcagctgagcgtgggcaacgccatgtttgtgtcagaggagctgaagctgctggacaaattcaggaaagatgccgaggctttttacgcctctgaggttttatccactaacttcaaggattctgaagctgccgtaaagcttatcaatgaatatgtgaagaataaaactcatggaaaaattgagaagctcttcaatgatcttgacgtgctcacaaatttaatcttgttgaattag

SEQ ID NO: 2322 - DNA, 403 bp, Bos taurus
  Clone ID: 10-LIB34-080-Q1-E1-C5
aacggacgcgtgggttgtgggggaagttaaaaaatagaatgaacttcatttttgaaataagttgcccaactgttcttttttttggtttttgttttattttttttatttttttattttatttttaaactttatataattgtattagttttgccaaatatcaaaatgaatccgccacaggtatacatgtgttccccatccccatccaactgttctttagcatgaattatttttatatttttcaaactgactgtgatgtttattccactattagattttaacttgctctttgcctgtatggtaatacttatattttatgcattcagcacaggaaacagcttcatatctttgcaaatggggcatttcaaaatgtgacttgtttcagtccgaaatggcaagattttct

SEQ ID NO: 2323 - DNA, 412 bp, Bos taurus
  Clone ID: 10-LIB34-081-Q1-E1-C5
gttcgccatcttagggagaagatgtactcgtccgtggtgcacctagcgcgggcgaaccccttcaacgcgcctcacctgcagttggtgcacgatggtctcgcggggccccgcagcgaccccgccgggcccccgggcccaccccgccgctctcgcaacctggcagccgccgctgtagaagagtacagttgtgaatatggctccgcgaagttttatgcactgtgtggctttggtggggtcttaagttgtggtctgacacacactgctgttgttcctctggacttagtgaaatgccgtatgcaggtggacccacaaaagtacaagagcatatttaatggattttcagttacactcaaagaggatggttttcgtggtttggccaaaggatgggctccgactttcattggctaatccc

SEQ ID NO: 2324 - DNA, 391 bp, Bos taurus
  Clone ID: 10-LIB34-082-Q1-E1-C5
atcaagttcaacctcacagagactcccgagagagaaatccaccaaggtttccagcacctcctgcagatgctcagtcgacccagcaatgagctgcagctaagcgtgggcaacaccatgttcgtgcaggagcagctaaagctgctggacaagttcagggaagatgccttggcgctgtacacctccgaggccttctcgaccaacttcaaggatcctgaaactgccaagagtctaataaatgactatgtgaagaataaaactcgggggaaaattgtggacttgttcaaggacctcgacccactcacaaaggtgattctggtgaattacatctactttaaagctcagtggaggacgccctttgatcccaaacaaacttacaagtcacagttccatg

SEQ ID NO: 2325 - DNA, 404 bp, Bos taurus
  Clone ID: 10-LIB34-083-Q1-E1-C5
cggacgcgtgggcgcggtttctggaggcgaagaacgcggttggccaatcgcaagccagaagatgaaggttctgtgggttgccgtggtggtcgcgcttctggcaggatgccaggcggatatggagggagagctggggcccgaggagcccctgactacccagcagccccgggggaaggacagccagccttgggagcaggcgctgggccgcttctgggattacctgcgctgggtgcagaccctgtctgaccaggtgcaggaggagctgctcaacacccaggtcattcaggaactgacggcgctgatggaggagaccatgaacgaggtgaaggcctacaacgaggagctggagggacagctaggccccatggcccaggagacacaggcccgcgtgtccaaggagctgc

SEQ ID NO: 2326 - DNA, 362 bp, Bos taurus
  Clone ID: 10-LIB34-083-Q1-E1-C9
agcaggaacaggctgaaccgtgtaccctcccttagcaggcaacctagcccatgcaggagcttcagtagatctaaccattttctctttacacttagcaggagtttcctcaattttaggagccatcaacttcattacaacaattatcaacataaagccccccgcaatgtcacaataccaaacccctctgttcgtatgatccgtaataattaccgccgtactactactactctcgctccctgtattagcagccggcatcacaatgctattaacagaccggaacctaaatacaaccttcttcgacccgggaagaggaagagaccctattctaaatcaacacttaatccgaatccttggacaccccg

SEQ ID NO: 2327 - DNA, 421 bp, Bos taurus
  unsure (367): unsure at all n locations; Clone ID: 10-LIB34-084-Q1-E1-C5
aacacatactacgttgtcgcacatttccactatgttttatcaatatgagctgtatttgctattatagggggatttgttcattgattcccactattctcacgttatactctcaacgatacatgagccaaaatccacttcgcaattatatttgtaggcgtcaatataaccttcttcccacaacactttctaggactatctggcatgcctcgacgatactccgactacccagatgcatacacaatatgaaatactatctcatcaatatgctcattcatttccctaacagcagttatactaatagttttcatcatctgagaagcatttgcatctaaacgagaagtcttgactgtagacttaaccacgacanatctagaatgattaaacggatgccctcgaccatatcacacatttgaagaaccca

SEQ ID NO: 2328 - DNA, 417 bp, Bos taurus
  Clone ID: 10-LIB34-085-Q1-E1-C9
ccgggccgacccaagcgtcagccaggagtgagcagctgctctcagacgacacaacacacagacacagggactggctgacgcctcaggctgcccaccagccagcgcgtgcccaccgcttgccctcctcaggcacgcccaccatgtggcccctgtggcctcttgcagccctgctggccctgagccaggccctgccctttgagcaaaaagccttctgggacttcaccctggatgatgggctgcccatgctgaacgatgaggaagcttcgggtgcagaaacaacctcgggcatcccagacctggactccctcccacccacctacagcgccatgtgcccttttggctgccactgccatctgagggttgttcagtgctccgacctgggtctgaaggctgtgcccaacgagatctcgcctgaca

SEQ ID NO: 2329 - DNA, 431 bp, Bos taurus
  unsure (10): unsure at all n locations; Clone ID: 10-LIB34-086-Q1-E1-C5
ccgggtggcncacgcgtccgtgtatattctgagaaaaccctcaccgatccctgcaccctggttgtgtgtgctccaccagcagatagccttcgtggtcatgatggacgagatgggaaagaaggcccccagggagagaagggggatccagggcctccaggtatgcctggaccagctggaagagagggcccctcagggaggcaggggagcatgggacctccaggcacaccaggccccaaaggagaacctgggcccgaaggaggagtgggtgccccaggcatgcccggctccccaggccccgcaggtctcaaaggagagagaggtacccctgggcctggtggagccatcggtccacagggaccttcaggtgccatgggtcccccaggactgaagggagacagaggtgatcctggagaaaaaggagcaaaggggga

SEQ ID NO: 2330 - DNA, 260 bp, Bos taurus
  Clone ID: 11-BOVMS1-003-Q1-E1-C3
aaaaatttaaaaaaaaaaaaaaaaaaaaaaaaaaaaaaaaaaaaaaaataaaaaaataaaaaaaaaaaaaaaaaatataaaaatataataatttaaaaaataaatcgggtttatttatatggaaagttattttcatttctgaatataaaagggggggcgccttcaatggttttaatttttattccgggttttgtgatgttttattccttttctaagttttcccaatttttttttttatgggtttttttttaaaatttttt

SEQ ID NO: 2331 - DNA, 323 bp, Bos taurus
  Clone ID: 11-BOVMS1-005-Q1-E1-C11
aatgcgacgtcatagctcttcaatagtgtcacctaaattcaattcactggacgtcgtgttacaacgtcgtgactgggaaaaccctgacgttacccaacttagtcgccatgcaccacatcaccctttcaccaactggcgtgatagccaataggtccgcaacgatcgtccttcccaacagttgcgcaacctgaatggagaatgggagacgccctgtagcggctcattaagcgcggatggtgtggtggttactcgcagcgtgatcgctacacttgccagcgctctatcacccgcaccgttcgctttcctctctacccttctcgcca

SEQ ID NO: 2332 - DNA, 419 bp, Bos taurus
  Clone ID: 11-BOVMS1-005-Q1-E1-C3
attaaggacatcttaggggccctcttactaattctagctctaatactactagtactattcgcacccgacctcctcggagacccagataactacaccccagccaatccactcaacacaccccctcacatcaaacccgagtgatacttcttatttgcatacgcaatcttacgatcaatccccaacaaactaggaggagtactagccctagccttctctatcctaattcttgctctaatccccctactacacacctccaaacaacgaagcataatattccgaccactcagccaatgcctattctgagccctagtagcagacctactgacactcacatgaattggaggacaaccagtcgaacacccatatatcaccatcggacaactagcatctgtcctatactttctcctcatcctagtgct

SEQ ID NO: 2333 - DNA, 371 bp, Bos taurus
  unsure (19): unsure at all n locations; Clone ID: 11-BOVMS1-006-Q1-E1-C3
gtcggcccatcgggtcgancacgcgtccgctccaatacaaacagaacaagcttccagacccactcttgcatcacctactcttgaagaaaaagaagaagaaaagaagaaagctgagaagaacgtgacttctgaaacaaaaaagaaagacaaagaagatgtcaaaatgaaaactgagaaggaaactgccatggatgtgaaaagaaaagagcctagcaaagccccagaaaccaaacaagggacaataaaagttgcagcacaagcacctactaaaaaagaggaaaagaaggaagattccaagaaaacaaaaacacctacagaagaactacccaagggaaaaaaacaggaaaagaaagaacaacacgtggaaccag

SEQ ID NO: 2334 - DNA, 473 bp, Bos taurus
  Clone ID: 11-BOVMS1-007-Q1-E1-C3
gggtcgacgacgcgtccggataaacatactttagaccctttaattctaaaatgtttgaagaccaaatagctactccttcaacaatatttatcaatggattaagaactgaagtttaagattgaatggatttctcttttttgggatcctgtcctgcagctttttaagtgtccctctgtatttagatttgcaggttttaaacagtactgttaaagtgataaacctgagagtatgctgagtgtccttttcaggttgcctgcctgctcttgtgttcaggtaattacaccataattaagcagagttgggtatcatcaaactgccaaatttggcatagataatagttatttaatctgtacctatctaaacttcatgatatttaaagactattaccacagataacttgtgataaaactattgaggtatattaaaaagttttaaatcaccactgtttactgttgccagaaatagtactgact

SEQ ID NO: 2335 - DNA, 315 bp, Bos taurus
  unsure (230): unsure at all n locations; Clone ID: 11-BOVMS1-008-Q1-E1-C3
cttacatacgcgtgcatgcgacgtcatagctcttctaaagtgtcacctaaattcaattcactggccgtcgttttacaacgtcatgactgggaaaaccctggcgttacccaacttaatcgccttgcagcacatccccctttcgccagctggcgtaatagcgaaaaggcccgcaccgatcgcccttcccaacagttgcgcaacctgaatggcgaatgggacccaccctgtancggcgcattaaacgccgcgggtgtggtggttactcgcaccgtgaccgctacacttgccagggccctagcccccgctcctttagct

SEQ ID NO: 2336 - DNA, 405 bp, Bos taurus
  unsure (403): unsure at all n locations; Clone ID: 11-BOVMS1-009-Q1-E1-C11
atgcgacgtcatagctcttctatagtgtcacctaaattcaattcactggccgtcgttttacaacgtcgtgactgggaaaaccctggcgttacccaacttaatcgccttgcagcacatccccctttcgccagctggcgtaatagcgaagaggcccgcaccgatcgcccttcccaacagttgcgcagcctgaatggcgaatgggacgcgccctgtagcggcgcattaagcgcggcgggtgtggtggttacgcgcagcgtgaccgctacacttgccagcgccctagcgcccgctcctttcgctttcttcccttcctttctcgccacgttcgccggctttccccgtcaagctctaaatcgggggctccctttaaggttccgatttagtgctttacggcacctcgacncc

SEQ ID NO: 2337 - DNA, 441 bp, Bos taurus
  Clone ID: 11-BOVMS1-009-Q1-E1-C3
caacgcgtccgaaaaaaaccctgagctagaatttcaagacaaagtagatcttgacaaactggtgaaagaagcatttcatgaatttcaaaaagatgagagtcgactaaaggaaattgaaaaacaagatgacatgacttctttttacaacactccccctctgggaaaaagaggaacatgcagctatttgacaaaggtcgtgatgaatctgctgctggaaggagaagtcaagccaagcaatgatgacccatgtctggttagctagtgaggaacgtggtagagactttgttaagacaggttttccagcagtgtgttgtttgtgttgaagcttaatcaaggcagccattaatgagtgggctgaccatgctggtgaagtggtcgccacacccttggtggaattattggactttttgcatgccataaccaatctaatggtaagaaatg

SEQ ID NO: 2338 - DNA, 416 bp, Bos taurus
  unsure (325): unsure at all n locations; Clone ID: 11-BOVMS1-011-Q1-E1-C11
gttgaaccatgccaaccgcatggctgctgaggccctgaagaactacaggagcactcaagccatcctcaaggatacccagatccacctggatgatgctctgcggggccaggaggacttgaaggagcagctggccatggtggagcgcagagccaacctgctgcaggctgagatcgaggagctgagggccaccctggagcagacagagaggagcaggaagatcgcagagcaggagctcctggatgccagtgagcgtgtccagctcctgcacacccagaacaccagcctgatcaacaccaagaagaagctagagacagacatcactcanatccagggagagatggaggacattatccaggaagctcgcaacgcagaagagaaagccaagaaggccatcactgatgcagccatgatggctg

SEQ ID NO: 2339 - DNA, 455 bp, Bos taurus
  Clone ID: 11-BOVMS1-012-Q1-E1-C3
cgccgctgtcgcctccctccagtcgccatcatgatcatctaccgggacctcattagccatgacgagatgttctccgacatctacaagatccgggaggtcgcggacgggctgtgtctggaggtggaggggaagatggtcagtaggacagagggtaacatcgatgactcgctcattggtggaaatgcctccgctgaaggccccgagggcgaaggtaccgaaagcacagtaatcactggtgtcgatattgtcatgaaccatcacttgcaggaaaccagcttcacaaaagaagcctacaagaagtacatcaaagattacatgaagtcaatcaaagggaaacttgaagaacagagaccagaaagagtaaaaccttttatgacaggggctgcagaacaaatcaagcacatccttgctaatttcaaaaactatcagttctttattggggaaaacatgaatcc

SEQ ID NO: 2340 - DNA, 331 bp, Bos taurus
  Clone ID: 11-BOVMS1-013-Q1-E1-C11
gacacgtcaacatgactgacaatgatcttatcaatattcttgaccctttttatcatctttcaactaaaagtttcagaacacaacttttatcacaatccagaactgacaccaacacaagtattaacacaaaacaccccttgagaaacaaaatgaacgaaaatttatttacctcttttattacccctgtaattttaggtctccctcgcgtaacccttatcgtactattcccaagcctactattcccaacatcaaaccgactagtaagcaatcgctttgtaaccctccaacagtgaatacttcaacttgtatcataacatataatgagtatcca

SEQ ID NO: 2341 - DNA, 327 bp, Bos taurus
  Clone ID: 11-BOVMS1-015-Q1-E1-C11
cacgtcatcatcgcattctgacttccccaactaaaagtatactctgagaaaacaagcccatacgaatgtggatttgaccccataggatcagcccgccttcccttctctataaaattctttctggtagccatcacattcctcttatttgacctagaaattgcactcctcctaccactgccatgagcctcacaaacagcaaatctaaacacaatgcttaccatagccctcttcctaattatcctcctagctgtaagcctagcctatgagtgaactcaaaaaggactagaatgaaccgaataaaaaaaaaaaaaaaagggcggccgctct

SEQ ID NO: 2342 - DNA, 236 bp, Bos taurus
  Clone ID: 11-BOVMS1-017-Q1-E1-C3
gtccctggagactattgccaaatgttgtaaagactggtcaccaggttctcagaagcaatctgtggttctagcaggttctaccccatctgtgtgtggatgtccagtggtttttatttctgattaaaaaaagaaaattccaggtgtgccacacccactttcctgcagtgttttaatattgtgtggaattgttactaccgagtgaattaatccacaataaaaaggctcactgctccttt

SEQ ID NO: 2343 - DNA, 377 bp, Bos taurus
  Clone ID: 11-BOVMS1-018-Q1-E1-C3
cgaccaacgcgtccgaatagttacattcgtaggcttcatcttagccctagagatcagtaatataactaataatcgatggttcactaccctcacacgccttcaagttctcaaccttgctaaggtagttccccacaattatacatcgcctagctccatacataagtttatcaataagccataaatcagcatcctcccttctagacctattctgactagtagccatcctaccataggccatctcactcgcccaattaaaagcatctagcctgatcacataccaaaaaggcctgatcaaactatatgtcatcgccttcttaatcacaatccttatcagcataatcttatttaatttccacgagtagtttctataataacca

SEQ ID NO: 2344 - DNA, 95 bp, Bos taurus
  Clone ID: 11-BOVMS1-020-Q1-E1-C3
aaaaaaaacaaacaaaaaaaataaaaaaaaacaaaacaaaaaaaaacaaaaaaaaaaaaaaaaaaaaaaaaaaaaaaaaaaaaaaaaaaaaaaaa

SEQ ID NO: 2345 - DNA, 445 bp, Bos taurus
  Clone ID: 11-BOVMS1-021-Q1-E1-C3
attcatctctgacatgacactgttgccatgtaaatgcctttaataagccatttaaatttactgtgagattgtaccttctacccatatttacaaatatatagctcaaaggcagttaaactcattagtattcagccattgagaatgataataatagcatatgctatataagctccttaattatctactacttagactactacatttaccttcgaaaatgagatttctctttgtttttcactgtggtgttataaattttcatttgaaaatggggactctcaagcaatgatataattgtgtataaaaactgatgtcttataatgattttcagtaattattaagtgaaaggtaattccttagtaattgaactattatgaataagagatatggcaatatgtgaaagttcatcatgatactacaattgaggaactaaattaacactacatta

SEQ ID NO: 2346 - DNA, 239 bp, Bos taurus
  Clone ID: 11-BOVMS1-022-Q1-E1-C3
ctgccttccccttccagcctggaagtgtcgtggaggtatgcatctccttcaaccagacggacctaaccatcaagctgcctgatggatacgaattcaagttccccaaccgcctcaacctggaggccatcaactacctgtctgcaggtggtgacttcaagatcaagtgtgtggcctttgagtgacatatgggccagccagcccatggcccccaataaaggcagctgcctgtgctccccctg

SEQ ID NO: 2347 - DNA, 298 bp, Bos taurus
  Clone ID: 11-LIB188-001-Q1-E1-C3
tggccgcgcgatacctgtgtggtggggatgactgaagccccgcgacagcccaagcatcgaggacggctgctccgtgctccagctaacagttctccgcagtcagcccgcggctaacagcccctgtgcccgtccccgggaggatgacattagcgctgcccgccccacccgctcttttgttagtttagtttcctacgcattacctggctttcccggctagtccctctttatagccaaagaaatgaacattccaaggatttggaagtggaatctatgatgtgaaacactttgcctctcgagt

SEQ ID NO: 2348 - DNA, 406 bp, Bos taurus
  Clone ID: 11-LIB188-003-Q1-E1-C3
ccatggccgccggatactttcagaaaacagcctcagtttccttctgtcagtcacagcccctgaccataagattcgttatctgcagttctgactggtggattctgcaggtctctcccaccactgatcctctagccctagaagcatccttgccaacatcacgtgcctgttacttccctttgtccatcttcaggccacttagggatgaccccctggcagccaataccctgatataaaattaacacaaagtctgacttggtgaatattagttttgaacagaaaagtagaaaatctgaagatgcaatgtgtgttgaaggcagactcgagcagatcaagtgttccacccatgtgccaccaagacaatgggtggaggtgcacgcggcaagaggaaaacgggaccattcatggg

SEQ ID NO: 2349 - DNA, 392 bp, Bos taurus
  Clone ID: 11-LIB188-004-Q1-E1-C3
gccggaccactctgctaagggacgcgagggacagccgattatgactatcactttggcccaggcaccaagctgacggttgtagatgatctgagccaggtccacccgcccaaggtggctgtgttcgaaccctcggaagcagagatctcccggacccagaaggccacgctcgtgtgcctggccacgggcttctaccccgaccacgtggagctgacctggtgggtgaacaggaagcaggtcacgactggggtcagcacggaccctgaaccctataaggaggaccctgcacgggatgactccagatactgtctgagcagccggctgagggtgactgcggccttctggcacaacccccgcaaccacttccgatgccaagtccagttccacgggctcac

SEQ ID NO: 2350 - DNA, 310 bp, Bos taurus
  Clone ID: 11-LIB188-005-Q1-E1-C11
tcccgagcgcaatgggcgcgggatacctgtgtagtggggatgactgaagccccgcgacagcccaagcatcgaggacggctgctccgtgctccagctaacagttctccgcagtcagcccgcggctaacagcccctgtgcccgtccccgggaggatgacattagcgctgcccgccccacccgctcttttgttagtttagtttcctacgcattacctggctttcccggctagtccctctttatagccaaagaaatgaacattccaaggatttggaagtggaatctatgatgtgaaacactttgcctctcgagt

SEQ ID NO: 2351 - DNA, 392 bp, Bos taurus
  Clone ID: 11-LIB188-006-Q1-E1-C3
ctcccgaccgtagtgggcccgggctacctgaccacggtcctcaaggaatcaaagtttaaggaaacaggagttatcaccccagaagagtttgtggcagctggagatcacttagtccaccactgtccaacatggcaatgggctacaggggaagaattgaaagtgaaggcttacctaccatcaggcaaacaatttttggtcaccaaaaatgttccatgctataagcggtgtaaacagatggaatattcagatgaattggaagctatcattgaagaagatgatggcgatgggggatgggtagatacttatcataatacaggtattgcaggaataaccgaagcagttaaggagattacactggaaagcaaggacagtataaaactccaagattgctc

SEQ ID NO: 2352 - DNA, 206 bp, Bos taurus
  Clone ID: 11-LIB188-007-Q1-E1-C3
gggatccacctggaaggccatcaggctcagcttgatctccacctggctggtctgggaccccacccacatgtagacctcttggccattgtctaagagcatgatgtcatcgtctgccaggtcatcttggcagaaatcagagcacttctcagtcactgcgaagtagcccttctcattggagcatcggaagagccgcgtgtgcttcatgt

SEQ ID NO: 2353 - DNA, 387 bp, Bos taurus
  Clone ID: 11-LIB188-009-Q1-E1-C11
tggccgcgggatacaggctatctatgtgcctgctgatgacttgacggatcctgccccggccactacctttgcccatttggatgctaccactgtgttgtcccgtgctattgctgagctgggcatctatccagctgtggatcctttggactccacgtctcgcatcatggatcccaacattgttggcagtgagcattatgatgttgcccgtggggtgcaaaagattctgcaggactacaaatccctccaggacatcattgctatcctgggtatggatgaactttctgaagaagataagttaactgtgtctcgtgcacggaaaatccagcgtttcttgtctcagccattccaggtggctgaggtctttactggtcatttggggaagctggt

SEQ ID NO: 2354 - DNA, 232 bp, Bos taurus
  Clone ID: 11-LIB188-009-Q1-E1-C3
acctgcacacgctggatgtcaatgtggccttgcgcaaaatcgccaacttgctgaacctatgcaacgagatcgtgcaagacagcgaccacatgattatccgcacactgagcacttttaccacctacatcatgggcttccaagttgggaaggagtttgatgaagatctaacgggcatatacgaccgcatgtgcatgagcacagtgagctgggatggggacaagctctagtgtgt

SEQ ID NO: 2355 - DNA, 379 bp, Bos taurus
  Clone ID: 11-LIB188-010-Q1-E1-C3
acttgctgttgctctgtttggaggcccgggtggtctccacgttgcgggtgatggtgctgccgtctgccttccagaccacggtcacgctacccgggtagaagtcgctgatgagacacaccagggtggccttgttgccgttgagctcctccgtggagggcgggaacagggtgaccgagggtggggacttgggctgactcaggacggtcaatatggtcccgctgccgaaaacagcattatgactgctgtcagctgactgacagtaatagtcggcctcgtcctcggtctgggccccgctgatggttagcgtggctgttttgcctgagctggagccagacaaccggtcagagatccctgaaggccgcttagcatctttataaat

SEQ ID NO: 2356 - DNA, 315 bp, Bos taurus
  unsure (176): unsure at all n locations; Clone ID: 11-LIB188-011-Q1-E1-C11
ccgaggtctcatgctgcccgtgcgccatggaggccggataccaaatcaaatatgaggagctgcagacactggctgggaagcacggggatgaccttcgtcgcacgaagacggagatttctgagatgaaccggaacatcaaccgtctccaggctgagatcgagggtctcaaaggccanagggcttccctggaggctgccatcgctgacgctgagcagcgtggtgagatggctgttaaggatgctcaggccaagctggccgagctggaggccgctctgaggaacgccaagcaggacatggcgcggcagctgcgcgagt

SEQ ID NO: 2357 - DNA, 451 bp, Bos taurus
  Clone ID: 11-LIB188-011-Q1-E1-C3
gccatgggcgcgggatacaaaaaccttacataaattaaaaggatgaataaatttacaggtgtgaatgcaaactgtttccaactcaaggcaagtaaccagaacagtgctctggtgggaaatcttcagtaagaaaggaaagcaggtcctacggcttggaccttcccaaccccgtgtaagaccggccaagacagaaatgacaactgtttcaaggactcttgccagcctctagagaaatcctggaataggcagctctgacacattaataccctgcacagactgagagactcagtctcccagattcttatcaagccattggatttctcttccataaacattctcacctcaactcgaggtgagagagccgcatataactaggggtttaaatcaaagatatgcacagggtattaaacatataccaaggtaagagttaacttgaatacaaggtcaaaat

SEQ ID NO: 2358 - DNA, 244 bp, Bos taurus
  Clone ID: 11-LIB188-012-Q1-E1-C3
accgtatcaagttttagacactctcgtggtcgtaagaagccatcgacaggttgcccttggcggcatatgggacctgctggtcacggaagcagtgggtagtggctcggtagaggaagtcagagatgcagagaacgcatggatcccttcctccatggagaagtggcctgtaattcctggcgctgaaattggggctcccaaatctgtcttggaataggccaaagtgtaccacatcacaaaattgggg

SEQ ID NO: 2359 - DNA, 376 bp, Bos taurus
  unsure (79): unsure at all n locations; Clone ID: 11-LIB188-014-Q1-E1-C3
actcagtgtaaggctgacggtttacttgctgcaagccgtgtatcgtgcaattacattctcccagttgattacattccanatggccttcaggtaatcgggcctgacatttttatactgaaggtaataagcatgctcccacacgtcaatccccagcagggggataagacctgttgttccttgcaggggatcctggttagaacaagcagcaatctgtaagcgtccctgctccttattgaagccgagccaaccccaaccggagccttggacaccaacagatacagcagtcaacttttccttaaatttggcaaaggaaccaaagtcacgtttgatggcttccagcaattccccttggggttctccaccaccgttagggctc

SEQ ID NO: 2360 - DNA, 443 bp, Bos taurus
  Clone ID: 11-LIB188-015-Q1-E1-C11
cgccatggaagcgggatacgtcgcagaggccctggggccactggagagctttgaagcctggcctgatgacttgctcatcagcacctaccccaagtcgggcaccacctgggcaagcgagatcctggacctgatctaccaggagggtgacctggagaagtgtcagagagcccctgtcttcttgcgggtgcccttccttgagttcagcgcccctggggttcccacaggtgttgagcttctgaaagatacaccagccccacggctcctcaagacacacttgcctctggccctgcttccgaagaccctgctggatcagaaagtcaaggtgatctacatcgcccgcaacgccaagggtgtggccgtctcctattaccacttctatcgcatggccaaggtgcaccctgaccctggcacctgggacagctttctggagaagttcatggccg

SEQ ID NO: 2361 - DNA, 434 bp, Bos taurus
  Clone ID: 11-LIB188-015-Q1-E1-C3
cgccatagccgcgggatacctgcagggaagattgctattgacagaggctatgacatcgcccaaatatcccgacacctgaacttcatcagccttttgacctatgactttcacggagcctggcgccagacagtcggacaccacagccccctgtttcgaggccaggaagatgcaagttctgacagattcagtaacgctgactacgctgtgagctacatgctgaggttgggggctccagccaataagctggtgatgggtatccccacttttgggaggagctacactctggcctcttccaagacagatgtgggagcccccatctcaaggccaggaattccaggccagttcaccaaggagaaacggattcttgcctattatgagatctgtgacttcctccacggagccaccaaccacagattccgttgacagcaggtccc

SEQ ID NO: 2362 - DNA, 361 bp, Bos taurus
  unsure (135),(182),(269): unsure at all n locations; Clone ID: 11-LIB188-016-Q1-E1-C3
cggagacctggtgaaaagggcaggcggatccgggaattgactgccgtggttcaaaaaagatttggcttcccgaaaggcattgtaaaacttaatgctgaaaaggtaccaacaagaagacggtgtgccaatgccaangcagagtctctgcgttacaaactcctaagaggccttgctgtgcgganggcctgctatggtgtgctgcagttcatcatggagagtggggccaaatgctgcgaagtcgtggtgtctgggaaacttcgaagacaganggctaaatccatgaagtttgtggatggccccatgatccaagtggggaacctgttaactactatgtggacaacgccgtgcgccatgtgctgct

SEQ ID NO: 2363 - DNA, 234 bp, Bos taurus
  Clone ID: 11-LIB188-017-Q1-E1-C11
ccatggacgccggatacgtgggagaccaggatgccactatgtccatcctggatatatccatgatgacaggcttctcacctgatgttgaagacctcaaaacgctgagcactggtgtcgacagatacatctctaagtatgagatgaacagagactccaacaagaacacactcatcatctacctggacaaggtctcacacacagtggaggactgtctgtccttcaaagttcaccagt

SEQ ID NO: 2364 - DNA, 149 bp, Bos taurus
  Clone ID: 11-LIB188-018-Q1-E1-C3
ccatagcggccggagacatcagcaaacgacacttcgggcatacacccaacaacctcacagaacacatgcttcctccccaaatgatacattatgccctgcagagcaaaggaaacccctcgatgattcagacacacgtgcaacgatcctgt

SEQ ID NO: 2365 - DNA, 423 bp, Bos taurus
  Clone ID: 11-LIB188-019-Q1-E1-C11
acagtattaaaaatgctattactcgggtattaattttgttgttgtttagtcgctaagttgtttctgactcttttgagaccccacagactgtataccgctaggctcctctgtccataggacttcccaggcaaggatactggagtgggttgccatctcctcccctaggggatcttcccaactgagggactgaacctgtgtctaatgcatcgcaggtggagtctttaccactgagccaccagggaagcccacttcttttgttcatctcctcttattagttaacagggaaagtaaaaaaagggggtctgtaagaatctttcattcttgttttcaacttcctgtgatacagtatcttctcaaagggtttgaaaggagcacatctccttgtttagactgaaaagactggaaatctcttctgtgcaccca

SEQ ID NO: 2366 - DNA, 397 bp, Bos taurus
  Clone ID: 11-LIB188-019-Q1-E1-C3
actcagtgtaaggctgacggtttacttgctgcaagccgtgtatcgtgcagttacattctcccagttgatcacattccaaatggccttcaggtaatcgggcctgacatttttatactgaaggtaataagcatgctcccacacgtcaatccccagcagggggataagacctgttgttccttgcaggggatcctggttagaacaagcagcaatctgtaagcgtccctgctccttattgaagccgagccaaccccaaccggagccttggacaccaacagatacagcagtcaacttttccttaaatttggcaaaggaaccaaagtcacgtttgatggcttccagcaattccccttggggttctccaccaccgttagggctcagatttgtccagaagatgctg

SEQ ID NO: 2367 - DNA, 287 bp, Bos taurus
  Clone ID: 11-LIB188-020-Q1-E1-C3
tgctcctctctgtggcttcaaacctggccgtgtgcacctccacgtcatccacgaaccaggagaactgcacctcggggttatcgtggcccacgttcaacaacaaaaaacttgacctcgggcgttcctgtgatcatcagggtgtctttgggtttcggtgggaagatgaagacagatggttccctcacgcaaggctggttatgacacttggagcagtcaatggagaccccaacagccttgtccaccctggtgcagccggcccggtgggctacatttcacgtgaaagtctg

SEQ ID NO: 2368 - DNA, 362 bp, Bos taurus
  Clone ID: 11-LIB188-021-Q1-E1-C11
tggccgcgggataccattctcacattagaaccctggtgctaatataactttatagccttaacccttgtaaaggacaatctggacctcatctccagcccccacccctagcattcagtcataatgtgattcctagagagggtggggggagccaagtgaaagggtgctcgggcccaatggccttcactccggaaagctgtgcccggcatcgtcactgactatcctgtaaggaacaccaccaggtcctggcttcagcccagggaaagaaaggagtgttgcaaaagggactccagaggcaggcaggcaactgcttccatttactgtggggggggttctccccacaacctaagtgaggagcaaccctc

SEQ ID NO: 2369 - DNA, 376 bp, Bos taurus
  Clone ID: 11-LIB188-021-Q1-E1-C3
gacacaagctttattttatttgtctatcttttttgggataacaagggggttaattaagtaaatggcaatccagcaatttctccccgtgataagcaaacgcaggcataattgcgtttcaaaggagttcagaggaaagaaaggctggaggggtcaggaggacctcgaggtcagggcctggtcatctggcgacgtgcagagctctctaaaggggcctgaagctcatctcatgggcaagtgggtgcaaacgccccgatacttgcaaaagcaactttcacgcctcactcctcctggctcttccggcggtattgctgcagtgctttctctgccacattctccatgaagttatgactggagacttcctgcgggaccgtcactg

SEQ ID NO: 2370 - DNA, 397 bp, Bos taurus
  unsure (193): unsure at all n locations; Clone ID: 11-LIB188-023-Q1-E1-C3
ccgctagaactggcgtcccaccttcaacagcttccccttgttcatgatcatgtacgtgtaatagcggatcttggcttgctcgccggggtccgtgcgcatgtggaagttgacgttgagagtctccccaggcttgagctccacgcggggcacagagaggtgcaggtagttattggagttcccctgagtgttgtanggtaaggcctgcatggtcctggtggcctgtcgactctcctgtccagccgctcctgcacacgcactcgccacagtcacagtcgccattatctccgcagagcagccccttgtgtctcacgcatgagaagttgtcacactggcagtaaggcccgtaaatgtttccgtacggggacaagtggcagacacactgcccgcagtagcagtc

SEQ ID NO: 2371 - DNA, 434 bp, Bos taurus
  unsure (399): unsure at all n locations; Clone ID: 11-LIB188-024-Q1-E1-C11
cggatactgagtgtactggggcctccggaggaagaaccggtcctggaagagctcgtccatgatgctggacgcccgggtgaagctgtcctccatgacgtccatcgcgtggctctgctcccggtcattctccatcagggaatcgatgcggtcaccgttgatccagaagtagaagggggagctctggtttaggaactcctcaagctggtggccaaccagtcccgatccgcttctgcacacccgcgcgtagaacttcatgcaggtctgcttgaggcagggcttacattcctcccaaagggctgtcatggtctcattgcacaccccctgggacgccttcagcttgttttcagaatccctggtgtcattcagggcgtcctctttcttcttcttggcttcctctanggagctgagcagtaatttgcgctcttcattggttt

SEQ ID NO: 2372 - DNA, 292 bp, Bos taurus
  Clone ID: 11-LIB188-025-Q1-E1-C11
gggacacctgtgaggtggggatgactgaagccccgcgacagcccaagcatcgaggacggctgctccgtgctccagctaacagttctccgcagtcagcccgcggctaacagccccctgtgcccgtccccgggaggatgacattagcgctgcccgccccacccgctcttttgttagtttagtttcctacgcattacctggctttcccggctagtccctctttatagccaaagaaatgaacattccaaggatttggaagtggaatctatgatgtgaaacactttgcctctcgagt

SEQ ID NO: 2373 - DNA, 384 bp, Bos taurus
  Clone ID: 11-LIB188-026-Q1-E1-C3
cggcatacaaccagatcatcagaattgaagaggaactgggcagcaaggccaagtttgccggcaagagcttcagaaacccgctcgccaagtaagctgtgggtgggcgagcccctgcagtcactcgttggctccttagacctgcatctgatgtcaccgagcagtgtgaggcccctgctgatgcccacaggggcctctggtagttacctgccctctcctcgtcctgtgacgtccccgctgcttccttatacctgctatagaagccatgcctgaccatctggagccctgctggaaaccctagctctgtaatcacgtacctatgatgccaaggtgaagaagtgagacctaggaaggccacccccccgcccaccagcgcaactgcccctg

SEQ ID NO: 2374 - DNA, 349 bp, Bos taurus
  Clone ID: 11-LIB188-027-Q1-E1-C3
gccaagggcgcgggatacaggatgatcctaaggccgatcattttgcgaactactggggccggaccggcagacacccgaaccactttagacctgcaggcctgcctgacaagtcacaacatgctgcctcatcgcagtcctgggttcaagatggtgagaagcatgaaacttcgcaaccctaccagtcttgtgggtgttgctcttgcgaggccgaaacatcccaacacgcaccacagaaaccctcaataattccgcaaggaacatttacgcaggttttttgtggtaacttttccagaagtgttctggaaacgataaggtcaatgaactgagcaacgatattgggagtgaatca

SEQ ID NO: 2375 - DNA, 236 bp, Bos taurus
  Clone ID: 11-LIB188-028-Q1-E1-C11
gccataggcccgggatacttggcacgggtcacgcgtgggtcctctccgggctcgggggtcgcatcctcaggagtagtgtagcgagcaaattctggaaagtagtcctcaatcttcgattttccagcaaggactttctcagccagcagatcttgcttgttgaggaacagaatcacagagatggtgcgcagccatctgttattccagatgctcttgaataggttcaaaacctcctgcaa

SEQ ID NO: 2376 - DNA, 378 bp, Bos taurus
  unsure (116),(368): unsure at all n locations; Clone ID: 11-LIB2809-002-Q1-E1-C11
atggccccgggatacaccagcaaaggcctgattggccatatctccctgggaatagggaactgctttctggggaacaggcaggactttggactgaaaaagggacagcacggactgangaggaaacatgacagttggaggaagaagctggtgaggctggtgcatccaagactggagcagaggcagaggaaggtgcagattttcaacatcagtgagagtcaggctctggctttcagtaaagggctcaactggatatttagggaagggcatttctttgtgcttaggagccatagcctccttcactttggagactcccattacttcaagctgaaggaaaagccgcaccaccacaagggtttgagtaagaaganggatgttttg

SEQ ID NO: 2377 - DNA, 416 bp, Bos taurus
  unsure (398),(408),(412): unsure at all n locations; Clone ID: 11-LIB2809-002-Q1-E1-C3
tggccgcggcatacatgtaagccccactttctcccactttgaagctgttgctccctgacgcagctgacctgcccttgaagtaaaacctgtccctgaatcctgactagaattcctgtgcctgaccttctaaatctcaaacactgttttaggcctgttatgatgaatccacagcagatggctttaactttggggtggacttgttttcagataccaatgctcagtcgctcagtcgcgtctgactctttgcaacgtgtctgactctttgtaacgtgtccaactctttgtgaccacatggactgcagcacgccagacctccctgctgctgctgctaagtcacttcagttgtgtccgactctgtgcgactgcagacggcagcccaacaagctctcgcgtcctgngattttctangcangagt

SEQ ID NO: 2378 - DNA, 436 bp, Bos taurus
  Clone ID: 11-LIB2809-003-Q1-E1-C3
catgaccgcggcgatacaccagaaaggactgaatgggcatatctctctggggatagggcactgctttctggggaacaggcaggactttggactgagaaagggacagcacggactgaggaggaaacatgacagttggaggaagaggctggtgaggctggtgcatccaagactggagcagaggcagaggaaggtgcagattttcaacatcagtgagagtcaggctctggctttcagtaaagggctcaactggatatttagggaagggcatttctttgtgcttaggagccatagcctccttcactttggagactcccattacttcaggctgaaggaaaggcggcaccaccacaggggtttgagtaagaggagggatgttttgtgggaggctgttagggatgggcccacggaagggatagactagagactgtgtctgggc

SEQ ID NO: 2379 - DNA, 365 bp, Bos taurus
  Clone ID: 11-LIB2809-006-Q1-E1-C3
acggctcagagcccagtctggccagccgtctccggaacctcagcagcccgctgggcctcatggctgtcaaccaagaagcctgggaccacgggctggcctacctaccctttaacaacaagaagccgagcccctgtgagttcatcaacaccaccgcccgcgtgccctgtttcctggcgggagattttcgagcctcagagcagattctgctggccactgcccacaccctccttctccgggagcacaaccggctggccagagaactaaagaaactcaaccctcactggaatggagagaagctctaccaggaagcccggaaaatcctgggagccttcatacagatcatcacctttagggactacctaccc

SEQ ID NO: 2380 - DNA, 157 bp, Bos taurus
  unsure (152): unsure at all n locations; Clone ID: 11-LIB2809-008-Q1-E1-C3
tgggcccgggatactgttgcattaaaagcgccatcagggacatcgagcaagggtcaaaagtccagagcgtcattcatgcacccctggagattagtccttacatgtccattgtcactacagggcccaaggctcagagatgagttagcttcaanggggt

SEQ ID NO: 2381 - DNA, 337 bp, Bos taurus
  Clone ID: 11-LIB2809-009-Q1-E1-C3
gactagacttgcaaccctctaaaaccttcttaattctacatcttactccaattcactcccctctcaagtttataatacctgtaacccaaagggtggaatatcaaggtccttttttttttttaaaatcctcacacccatttaatatcccttgcattctttggtcaggattgaaagggtcaagttcttaatcacttcacatccatctacctacccctgcccttttctttttcctattacagaagctttcaactgcattacttgtgaaggagtcagtggaacataaccactgcatcaatttaatcaggtgtgtttgtccaacaggcatatctctcagggc

SEQ ID NO: 2382 - DNA, 173 bp, Bos taurus
  Clone ID: 11-LIB2809-010-Q1-E1-C3
ggataaatgccactgcagtggctcagtaaatcagttatggttcctttggtcgctcgctcctcacctacttggatacctgtggtaactcgacagctaatacatgccgacgggcgctggggcccttcccgggggggatccgtgcatctaggggggtgaaacccaacccggtcagc

SEQ ID NO: 2383 - DNA, 246 bp, Bos taurus
  Clone ID: 11-LIB2809-012-Q1-E1-C3
ctgctgcatccaacactggagcagacgcagacgaaggtgtagattttcaacatcagtgagagtcaggctctggctttcagtaaaggggtcaactgcatatttagggaagggcatttctttgtgcttaggagccatagcctccttcactttgcggactcgcattacttcaagccgaaggaaaggcagcaccaccacaggggtttcagtaagacgagggatgttttctggcaggctgtcagggatggg

SEQ ID NO: 2384 - DNA, 448 bp, Bos taurus
  Clone ID: 11-LIB2809-013-Q1-E1-C11
ccaaggcggcgggatacagtggctagtgctgggctactttttcaagctgtacgtcgccaataatctgaatgagatgacgtcctacatggcctatccgctctttgagacggtgaaggccactgataaatggctgctgttgttcctctacagcttccagatctacgccgacttttccggctattcggcgattgcgctgggccttgcattgctattcgggtaccgcctgccggagaatttcaaccggccatacatcgcgacctcgatcgccgacttctggcgccgctggcatatctcgctgtcgagctggctacggaactacctctacatcccgctcggcggcaacaagcacggcaaggcccgcacctacttcaacctgatggcgacgatggctctcggaggcctctggcacggtgcggccgtcagctatctggtgtggggcttcatgcac

SEQ ID NO: 2385 - DNA, 421 bp, Bos taurus
  unsure (395),(407),(412): unsure at all n locations; Clone ID: 11-LIB2809-014-Q1-E1-C3
cgccaaggccgcgggatacagcagaaaggcctgaatgggcatatctctctggggatagggcactgctttctggggaacaggcaggactttggactgagaaagggacagcacggactgaggaggaaacatgacagttggaggaagaggctggtgaggctggtgcatccaagactggagcagaggcagaggaaggtgcagattttcaacatcagtgagagtcaggctctggctttcagtaaagggctcaactggatatttagggaagggcatttctttgtgcttaggagccatagcctccttcactttggagactcccattacttcaggctgaaggaaaggcggcaccaccacaggggtttgagtaagaggagggatgttttgtgggaagctgttanggatgggcccanggaanggatagact

SEQ ID NO: 2386 - DNA, 321 bp, Bos taurus
  Clone ID: 11-LIB2809-016-Q1-E1-C11
ttccaagtattctatactgtcacctaaatcgtacgtgtatgatatataaggttatgtattaattgtagccgcgttctaacgacaatatgtacaagcctaattgtgtagcatctggcttactgaagcagacccgatcatctctctcgtaaactgccgtcagagtcggtttggttggacgaaccttctgagtttctggtaactccgtcgcgcagccggaaatggtcatcgaaccaatcagcagggtcatcgctagccacatcctctatgccggacgcatcttggccggcatcttcggtgccacaggtgcggttgctggcgcct

SEQ ID NO: 2387 - DNA, 304 bp, Bos taurus
  Clone ID: 11-LIB2809-016-Q1-E1-C3
tgaatgggcatatctctctggggatagggcactgctttctggggaacaggcacgactttggactgacaatgggacagcacggactgatgaggaaacatgacggttggaggaagaggctggtgaggctggtgcatccaagactggagcagacgccgaggaaggtgcagattttcaacatcactgagagtcaggctctggctttcagtaaagggctcaactggacacttatggaagggcatttctttgtgcttaggacccacagcctccgtcactttggagactcccattatcttcttgctcaacg

SEQ ID NO: 2388 - DNA, 361 bp, Bos taurus
  Clone ID: 11-LIB2809-017-Q1-E1-C3
gccaagggcgcgggatccagcagaaaggcctgaatgggcatatctctctggggatagggcactgctttctggggaacaggcaggactttggactgagaaagggacagcacggactgaggaggaaacatgacagttggaggaagaggctggtgaggctggtgcatccaagactggagcagaggcagaggaaggtgcagattttcaacatcagtgagagtcaggctctggctttcagtaaagggctcaactggatatttagggaagggcatttctttgtgcttaggagccatagcctccttcactttggagactcccattacttcaggctgaaggaaaggcggcgccaccacaggggtttgag

SEQ ID NO: 2389 - DNA, 385 bp, Bos taurus
  Clone ID: 11-LIB2809-018-Q1-E1-C3
gccatgggagcgggatacggctacacttacatggatccttattaagtttgaaaagtgcctgaaagtttgggcaccagaaagacaccccaacaacatgtgtctaaactgcaacttcaggttaatatgactaaagcagttacattgtgagaagtgctgaaggtatgtgatgtctttcccggcatagagatggccttggttcttcaccagatggtgtagccaccatctgaaccacccacgaagaagtttcccttccgctgagttacgaggacattggctccctgcatgactgccagctgagcagcattgggatggcatcccgggggaggaggaagaatgttttcagcagtaacgccagctccaaatcctggccctgcatcataccctc

SEQ ID NO: 2390 - DNA, 421 bp, Bos taurus
  Clone ID: 11-LIB2809-020-Q1-E1-C11
gggatccttgtacttgtgtaggtgggggttgtctactgagtaaggaatactgtttttaaggttctaaagctaaattcaaatgatgcattaatgacccaaaaactcagatctgatggtgtctgaatttctaacagtccttgctttgtgggtatgctgacaacttatctggatgccttacatcttttctaaacagtgttgcctctgaacgtgctctgctccctcaccgctccctctttggagcccctttgcaccccagagcctgcagaagtggctggtataaaagggggcctggctagagaatgatcagtgtaactgtgtgcacgattcctttctgggcttcattttggaaactttgcttagggctacttttcctaactgcccacatttgatggacggtagaacgaattttgaatgtaattga

SEQ ID NO: 2391 - DNA, 423 bp, Bos taurus
  Clone ID: 11-LIB2809-021-Q1-E1-C3
gatagtcattatataaactaataacttacactgccacacacaaaacatatggtccacaaaaacattctcctttccttctgaaggttttacgatgcattgttatcattaaccagtcttttactattaaacttaaatggccaattgagacaaacagttctgagaccgttcttccaccactgattaagactggggtggcaggtattggggataatattcatttagccttctgagctttctgggcagacttggtgaccttgccagctccagctgccttcttgtccactgctttgatgacacccacagcgactgtctgtctcatgtcacgcacagcaaaacggtccaggggaggataatcagagaagctctcgacacacatgggcttgccaggaagcatatcaccgaatggagcgtcacaagattttc

SEQ ID NO: 2392 - DNA, 382 bp, Bos taurus
  unsure (63): unsure at all n locations; Clone ID: 11-LIB2809-024-Q1-E1-C3
atgctccccaccaccatgggcccgcgaaaactttcaacattggtggggaaaattggcatgcangaaacaagagactttgctcccaatggggcaacataagcagaaggagctgaattcaacaaggcaatggtttttaaagggtaaaccccaaaactgggggtttaaaaatttcctaaatttgaacttcaagtcctacaaggtgaaaccccaaaccgatttgcaaaagtgccctcccaacaactggaaatcagtatgactccatgaggcatctggctattcttggtccctggtggggtcacctcaactcacacaaagagagacttgaggtgaggcctgagcccaaatcacctgaagtttccctctgaaaagttggtggaaccac

SEQ ID NO: 2393 - DNA, 223 bp, Bos taurus
  Clone ID: 11-LIB2809-025-Q1-E1-C3
cgtacgtgtatgatacataaggttatgtattaattgtagccgcgttctaacgacaatatgtacaagcctaattgtgtagcatctggcttacggaagcagaccctatcatctctctcgtaaactgccgtcagagtcggtttggttggacgaaccttctgagtttctggtaacgccgtcccgcacccggaaatggtcagcgagccaatcagcagggtcatcgcta

SEQ ID NO: 2394 - DNA, 162 bp, Bos taurus
  Clone ID: 11-LIB2809-027-Q1-E1-C11
acctttgtcttaggttgaatccatggcttcatagctttctgatgctgataaacagtcttgagatactggggcaaggcgaatttctggtaacgctggctgatttttttcagaaaatttaggcgattcttttcttcttcagtcagtttagttttcttagtgagt

SEQ ID NO: 2395 - DNA, 392 bp, Bos taurus
  Clone ID: 11-LIB2809-027-Q1-E1-C3
acctggtaagatagtggaaagcctttcaagcagtgaggaatccattacacgcatcaattaaaaaaattgagaaatttcagagtgaggaacagcagcatacagaggatgaactccaggataaaatccacccctttgcccagacacagtctctagtctatcccttccctgggcccatccataacagcctcccacaaaacatccctcctcttactcaaacccctgtggtggtgccgcctttccttcagcctgaagtaatgggagtctccaaagtgaaggaggctatggctcctaagcacaaagaaatgcccttccctaaatatccagttgagccctttactgaaagccagagcctgactctcactgatgttgaaaatccgcaccttcctctgcct

SEQ ID NO: 2396 - DNA, 468 bp, Bos taurus
  unsure (395): unsure at all n locations; Clone ID: 11-LIB2809-030-Q1-E1-C3
gcatgcctccagccgccaagggcgcgggatacccaggcatcccacggtctcggcaacgctgtaagttgatagcagccaggtcaaagccgtggatcttgtgagtgggctggaaaagcttgttgcgcagctcactcgtcaccattttatcctgattcatcagtttggacttcttggccagcagaccccgcaccagagggtcaattccaccgtctttgattatcctccaggtgttgaagaagagggtgtgtagggggagctctgcttccggaccccatggctggtaattctcatccaggcgggacacagtggagggaacctccatgtggccaaagcggaaggcaaaggtgaagacattggaaattcggggatccacagagttattatagccttggtanggcgggattcacttccggatctcaataacctaccacaatgggtaggtagtccctaaaggtgatgatctgtatg

SEQ ID NO: 2397 - DNA, 385 bp, Bos taurus
  Clone ID: 11-LIB2809-032-Q1-E1-C11
gccatgagcgcgggatactggatgaagctgatgaaatgttaagccgtggattcaaggaccagatctatgacatattccagaagctcaacagcaacacccaggtggttttgctgtcagctacaatgccttctgatgtgcttgaggtgaccaagaagttcatgagggacccaattagaattcttgtcaagaaggaagagttgacgctggagggtatccgtcagttctacatcaatgtggaacgagaggagtggaagctggacacactgtgcggcttgtatgaaaccctgaccattacccaggcagtcatcttcatcaacacccgaaggaaggtggattggctcaccgagaagatgcatgcccgagacttcaccgtctctgccatgca

SEQ ID NO: 2398 - DNA, 458 bp, Bos taurus
  Clone ID: 11-LIB3057-002-Q1-K1-C11
ccggaatcctcgttcgacccacgcgtcacgcgtgcatggagagttcaccccaaacattcatttacccactaaacccactaaaaatcgcactggtcaatttctatgttctaatgtcttcccaagtttctattaccttatcccatcataatttaatataatggtacctaaatcatatattacaatccctatttatcaccattacattatgaatctactttacactactacaaacctttaaattctattaaacacctattacctaacttttacctactttaactcttaactttttttttatccacaagctttcattttcttcacctctataattttttcctacttcttaaatatattcttttttctctcaattaaaatttattttaattttaaaaacctatttttattttaaaatcaatttctttaaattcatacttttttaaaactaatttttaattttc

SEQ ID NO: 2399 - DNA, 342 bp, Bos taurus
  Clone ID: 11-LIB3057-002-Q1-K1-C3
gtgatcagggacaggcagccctggggacatccttcggtctactggtaggctattgcaggtacgtgtttatcctcattctgaccttacttctatttttatgtcttcttaactacttatttatacctttttcatttaccaaattttattattctatatatttcttattattcttatataaattttttttctatattttaattttttttattattcttatattttttatattttattttaaattttatttttttatatttttatttatttttttataatttttttttaatttttttttatatattatatttattattatatataatatattttttattattttta

SEQ ID NO: 2400 - DNA, 334 bp, Bos taurus
  Clone ID: 11-LIB3057-003-Q1-K1-C3
ggggcagtgcagccggacggtgaggcgagctgtctggcctttagcccttcatcctgggttaaggagatgaccaaccagtacagtattctcttcaaacaagagcaagcccatgatgatgccatctggtcagctgcctgggggtcaaacaagaaagaaaactctgagacagtggtcacgggatccctggatgacctggtgaaggtctggaaatggcctgatgagaagctggacctacagtggagtctggagggccatcagctgggtgtggagtctgtggacatcagtcacaccctgcccattgctgcatacagttctcttgatgctcatattcgtc

SEQ ID NO: 2401 - DNA, 377 bp, Bos taurus
  unsure (352): unsure at all n locations; Clone ID: 11-LIB3057-004-Q1-K1-C11
aaacaaacgacttctggaaggcatggagatgatatttggccaggttattcctggagccaaagagactgagccctaccctgtgtggtcaggactcccgtccctgcaaactaaggatgaagatgcacgttattccgctttttataacctgctccactgcctgcgcagggattcaagcaagattgacacttaccttaagctcctgaattgcagaatcatctacaacaacaactgctaagcccacattcatcctatccatttctgagatggttcttaatgatccattccctggcaaacttctctgagctttatagctttgtaatgcatgcttggctctaatgggtttcatcttaanataaaacagactcttgagcgatgtc

SEQ ID NO: 2402 - DNA, 259 bp, Bos taurus
  Clone ID: 11-LIB3057-004-Q1-K1-C3
ccgaaaaacctgccttacacggtgtcaagaaccggacggcacgtgctggaaaagcgccgccggcgggcccccaactgaggccccagccccttcccctgggcggccgtgtcaccaggtgctcctgtgccattccaccagcatgggagccagcgccgcgcaggaatggggcgtcccctgtgccctttcgccagaggagcacttgccaaggtcagtgaggggctggtaggcccctggagaagcatcaccgacattgacgaca

SEQ ID NO: 2403 - DNA, 339 bp, Bos taurus
  Clone ID: 11-LIB3057-005-Q1-K1-C3
atcacgagcggtcgaccgttagtgttaacaaaatggagttcactgagcctccctattatgataggagatgctaatacattgacatggaagactgtaacgatataacgatgatcgtgtacaaccccatctcagggaccattgtgccaacagatggcttgactggcgacagcatgctataacggagtgctcatatgccatggttcatggtatagtaagtcaccacgaaaggacggcaatgccagtggaaccactatgcttgaaactttggatagcattctgccactgacttgaacaactgacgaaaccttgcgttagtctctactagatgtatataacact

SEQ ID NO: 2404 - DNA, 411 bp, Bos taurus
  Clone ID: 11-LIB3057-006-Q1-K1-C11
ttttgaattccccacaagagttgttttcaaagcaaacattccaaatgaatgtggctctgctatggaatgtctccattgtgctccaagtgtctcttctctggatgtgattttaaatcactggctcctttaagctgttcccctgctgccctttacaagaaagagcactgactttgtcctcaggcagaggatgtgtaatcttgggtgaaagtaaattataacttattcgagtttcattctgaaaccggtctattaggtatcttgcagtagatcataccacgagacagtccattgttcttaaatgagaaagctcccattgctttgggttctgagcatgctgtacacctgtgcccgctgaagcacgttaataaacgtcgctgatgaagacagctggagcatttatcgccccattcc

SEQ ID NO: 2405 - DNA, 420 bp, Bos taurus
  Clone ID: 11-LIB3057-008-Q1-K1-C3
ctttagagaagaaactgagaagaatcaaaggtttaaatcaggaagtgacttcgaaggacatgcttcgaaccctggcccaagcaaagaaggaatgctgggaccggttcctccaggagaagttagcatctgagttctttgtggatggacttgattctgatgagagcaccttggaacatttcaagaggtggctccagccagataaggtagccatcagtacagaggaggtccagtatctgattcctccagagtcacaggttgagaagccagcgcccagggacgagccaacagcagcagaacaataaattacacacatacatgcccagcagctgtcttgggtccggagggaaaagcggagcactcgttggtggtgacggtggcagcaaggaggtatctagggagggaaaaagcccagccttctac

SEQ ID NO: 2406 - DNA, 470 bp, Bos taurus
  Clone ID: 11-LIB3057-009-Q1-K1-C3
ccgggttggaccaagccttccgaggaaccagccgcccaacaaccgtcctttccgtgccgttttaaggggccggccgcctggccggccgggcgccctttccgggaacaaagggctctccgaaccggaaccccggtcccgacgcgcggcgggggcgcgccgcgccgcgccccgggggacgcgggcgacggcccgccggcggggacggcggcggaccggctatccgaggccaaccgaggctcccgcggcgctgccgtatcgttccgcctgggcgggattctgacttagaggcgttcagtcataatcccacagatggtagcttcgccccattggctcctcagccaagcacatacaccaaatgtctgaacctgcggatcctctcgtactgagcaggattaccatggcaacaacacatcatcagtagggtaaaactaacctgtctcacgacggtctaatcccagctcacgttccct

SEQ ID NO: 2407 - DNA, 360 bp, Bos taurus
  Clone ID: 11-LIB3057-010-Q1-K1-C11
cgcgagcggccgccctttttttttttttttttaaggcaatgttagaaaactttaaatagaggatcaagatccaatcggtaaggcatcacagatcgtaaaaagtaactggggctgcattcagcatagcaaatagacaatctgagcaagcagcggcctcgtgagggcagggagcgagtgggccaggggcgctgggcagtgggcgccggctgcggctctgggacaggtcggcctgaggtaactggtctgagcacccgctccggtccagccctgcctgcaatggcggctgctccccatctgggcatgcgggcaccaataaagcccacacatgctgccaggcctgggttccggcccctgcgggct

SEQ ID NO: 2408 - DNA, 133 bp, Bos taurus
  Clone ID: 11-LIB3057-010-Q1-K1-C3
ctcttatagacttcatactgtgtactcttcagtgcttagtaacagcttttggatgcaagttttgctcaacatgctttcgcactcagctttttacaggtaggtagtgcttaagaaaagttagaggactaaagcc

SEQ ID NO: 2409 - DNA, 426 bp, Bos taurus
  Clone ID: 11-LIB3057-011-Q1-K1-C3
gcgaggtctaagaagacaatgttggtccccaagaacatcacctcggaagctacatgctgtgtggccaaagcatttaccaaggccacagtgatgggaaatgtcagagtggagaaccacaccgagtgccactgcagcacttgttattatcacaaatcctaatagtttgcagtgggccttgctgatgatggctgacttgctcaaaaggaaaattaatttgtccagtgtctatggctttgtgagataaaaccctccttttccttgccataccatttttaacctgctttgagaatatactgcagctttattgcttttctccttatcctacaatataatcagtagtcttgatcttttcatttggaatgaaatatggcatttaacatgaccataaaaagctgattccactggaaataaagtcttttaatcatc

SEQ ID NO: 2410 - DNA, 385 bp, Bos taurus
  Clone ID: 11-LIB3057-013-Q1-K1-C3
ccttaagctcctgaattgcacaatcattctactaccaccacctgctagccccacattcatcgtatccatttctgagggggttctaaatgatccattccctggcaaacttctctgagctttatagcttcgtaatgcatgcttggctctaatgggtttcatcttaaataaaaacagactctgtagcgatgtcaacaaaacaaatgacatacacacaaatcaagaagaacactttcgtgggcaccctcttctggatggcgcccaaggtcatcaagcactcagcctatgacttcaaggctgatatctggtcgctgaagatcacagccatcgatcttgccaagggcgagctctagaactccgacctgcattccatgcgcgtcctgtttct

SEQ ID NO: 2411 - DNA, 399 bp, Bos taurus
  Clone ID: 11-LIB3057-014-Q1-K1-C3
gccccagatgctatcctatcgagggccatagagattgaggaagaaaacaaacgagttgtggaaggcatggagatgatatttggccaggttattcctggagccaaagagactgagccctaccctgtgtggtcaggactcccgtccctgcaaactaaggatgaagatgcacgttattccgctttttataacctgctccactgcctgcgcagggattcaagcaagattgacacttaccttaagctcctgaattgcagaatcatctacaacaacaactgctaagcccacattcatcctatccatttctgagatggttcttaatgatccattccctggcaaacttttctgagcttattagcttgtaatgcatgcttggctctaatgggtttcatctttaataaa

SEQ ID NO: 2412 - DNA, 449 bp, Bos taurus
  Clone ID: 11-LIB3057-015-Q1-K1-C11
cacaacaactgctaagcccacattcattctttccatttctgagatggttcttaatgagccattgtttgtcaaacggctctgagctttatagctttgtaatgcatgcttggctctaatgggtttcatcttaaataatatcagactctgtatcgaaaaatattttaatttttggtcttccgtttttatataattcaatctttcttactctttcatttctactttttttcttttatattttattttattaattttttatttatctttttttttttttttatatttattttttttttttttaatttttttttttttttgtggtgtttttttatttttttttatatttttatatttatatttattcttttttatattttttcattttttatattttttatttatttttttttttatatttttttttttttatattttattttttattttttttt

SEQ ID NO: 2413 - DNA, 222 bp, Bos taurus
  Clone ID: 11-LIB3057-015-Q1-K1-C3
gcctgcgcagggattcaagcaagattgacacttaccttaagctcctgaattgcagaatgatcgacaacaacaactgctaagcccacattcatcctatccatttctgagatggttcttaatgatccattccctggcaaacttctctgagctttatagctttgtaatgcatgcttggctctaatgggtttcatcttaaataaaaacagactctgtagcgatgtc

SEQ ID NO: 2414 - DNA, 413 bp, Bos taurus
  Clone ID: 11-LIB3057-016-Q1-K1-C3
gtggacattcgcaaatcgctccttgcccaggagcagaacaggttccagtagcttgtatgtcagcgtggacatccgcgtccgagtgaagggtggtggtcacgtcgcccagatttacgccatccgccagtccatctccaaagccttggtggcctattaccagaaatatgtggatgaggcttccaagaaggagatcaaagacatcctcatccagtatgaccggaccctgctggtagccgatccccgtcgctgcgaatccaagaagtttggaggtcctggtgcccgtgcccgctaccagaaatcctaccgataagcccgtcatgaagcccagcgtttccctttacagcacctttataataaatgttgtgggatttaaagtttcaggaaaaaaaaatatattttatttttattttttt

SEQ ID NO: 2415 - DNA, 311 bp, Bos taurus
  Clone ID: 11-LIB3057-017-Q1-K1-C3
atcaccgagctcccggtggagtccttcaagaacgccacgggcgtgaggtggatcaaccgggacaacaaccggattcgaaaggtggaccagagggtgctggagaaactccccagcctggtgttcctctacatggagaagaaccagctcgaagaggtgcccgcggccctgccccggaacttggagcagctgaggctaagccagaaccagatctccaggatcccgcccggggtcttcagcaagctggagatcctgctgctgctggacctgcagcacaacaagctttgttactgctatcttaagcctgacacctt

SEQ ID NO: 2416 - DNA, 440 bp, Bos taurus
  Clone ID: 11-LIB3057-018-Q1-K1-C3
gttcttcgtggctgatttcatcaatgctttacctatactgttttggattaacttctgcaggcagcgtataccactgggcttaatcattggacagagtgcagtgaaaggaccccatgaaagctgatcgttttagcaaaacacgaatttgttatgatttcaccaagatgggcacacatcaacctgggaagctcagtgaaccagagaccaggtgtaatgctacccttccttctctctgcctcagctctcaaggattggtcacctacatgttattagtagtattatttgatttctattcctatttactatcagaaggcatagcctttatgggcttcatcactctgccctgctaccttaaccatccttcttgttttggcctttttgaccacttacaggagcctaatttctttcatggtctttttccacagtcccataattttttt

SEQ ID NO: 2417 - DNA, 357 bp, Bos taurus
  Clone ID: 11-LIB3057-019-Q1-K1-C3
aacaagcccaacagacccaccatgaagtccttatgagcttgattcttgggttgctgcgctcctggaatgaccctctctatcacctagtcaccgaggtgcggggtatgaaaggagccccagatgctatcctatcgagggccatagagattgaggaagaaaacaaacgacttctggaaggcatggagatgatatttggccaggttattcctggagccaaagagactgagccctaccctgtgtggtcaggactcccgtccctgcaaactaaggatgaagatgcacgttattccgctttttataacctgctccactgcctgcgcatggattcaagcaagattgacaacttacccttaagct

SEQ ID NO: 2418 - DNA, 358 bp, Bos taurus
  Clone ID: 11-LIB3057-020-Q1-K1-C3
ggattcccggatgcacccacgcatacgcgaatggtctacaccaggcgccccactaacgtgcggtgcgtgacgggcgagggggcggccaactttcaagccgcgcacagtgtcccgaaacgaagggctctccgcacctgaccccgtacccgacgcgcgacgaactcgcgccgctccaaaccaaagaggactatgcacatcattccccttcatataacctgcaccactcgcctgcacaaggattcaagctacattgacacttaccctatactcctcaattgcaaaatcatctacaacaacaactgctcagcccacattcaaactatccatgggtgagcatctatttaatgatccattccct

SEQ ID NO: 2419 - DNA, 277 bp, Bos taurus
  Clone ID: 11-LIB3057-022-Q1-K1-C11
aattaccgactcgacccacgcatcctcagcaataaaaattctaaactatgcatttatccaccatccacccccatcatgcatttcgtcaacattaaatttcccaacccccctcataatcacaccaaccccacaaatcctcacaattcatatacctagcaatacactacacataaccacacatcaacatcattctaactcatctacccatatactaccatacatcaactaccttcccaatcatcctattcatacactcaaacccaacttcaatgatatt

SEQ ID NO: 2420 - DNA, 404 bp, Bos taurus
  Clone ID: 11-LIB3057-022-Q1-K1-C3
catagactgaggctcttcaacttcttactaccatagatcctgcgtcaaccgctgaaccatcaccgccatcatctataagccgcacgctgtgcgcatcactatctagtagaacaatgataagcaacatcacgctgtagacactctaccatgacccacatattggctaccattgatcatttctgaaaaattctggctcttcaaagagtatcatgactgaaacaaaggcttccgcaaagactttcttcatgtgctcctgcaactccgaaaaatgcaatgaccacattatgttctgccaagagttcaccagcactaaccccaacttgctgctggttatctttcaagtgacaggcgtcaaactcctgccaccgctgggcatcgacatcgcagtcattattactttctac

SEQ ID NO: 2421 - DNA, 427 bp, Bos taurus
  Clone ID: 11-LIB3057-025-Q1-K1-C3
gttcaccagacgactcagggtcctgtggacagctcaccagctatgatggctgcaggcgcggcggacctacctgctgctggctttcgccctgctctgcctgccctggactcaggtggtgggcgccttcccagccatgtccttgtccggcctgtttgccaacgctgtgctccgggctcagcacctgcatcagctggctgctgacaccttcaaagagtttgagcgcacctacatcccggagggacagagatactccatccagaacacccaggttgccttctgcttctctgaaaccatcccggcccccacgggcaagaatgaggcccagcagaaatcacaggacttggagctgcttcgcatctcactgctcctcatccagtcgtggcttgggcccctgcagttcctcagcagagtcttcaccaacagcttg

SEQ ID NO: 2422 - DNA, 310 bp, Bos taurus
  Clone ID: 11-LIB3058-001-Q1-K1-C3
cggccgccctttttttttttttttggtttcagtgggtcttttttttaaactggtttatttaaataaggagaattctttcatatggaaagagctagtacaatcacatatttgaaagggcagactatggctaaaaggtgtaacgtgcagcttgtttctacgtggtttgggggagcttttaccttagatgggaaaatggaaccctggattcaccaggccatggtggcaccctcctccttcacccttaccttcggttcaatacctgggggttctactttcaaatatgttattgtactagatgattccatatgaa

SEQ ID NO: 2423 - DNA, 445 bp, Bos taurus
  Clone ID: 11-LIB3058-002-Q1-K1-C3
ggccgcccttttgttccacacgagatttctgctctcgttgagctcatcttaggacacctgcgttatcttttaacagatgtgccgacccagccaaactccccacctgacaatgtcttccgcccggatcggcccggcgaggccggtccttggagccaaaaggaggggcggtgccccgcttccgacccacggaataagtaaaataacgttaaaagtagtggtatttcactagcgcccggaggctcccacttatcctacacctctcaggtcatttcacaaagtcggactagagtcaagctcaacagggtcttctttccccgctgattccgccaagcccgttcccttggctgtggtttcgctggatagtagacagggacagtgggaatctcgttaatccattcatgcgcgtcactaattagatgacgaggcatttggctaccttaagaga

SEQ ID NO: 2424 - DNA, 430 bp, Bos taurus
  Clone ID: 11-LIB3058-003-Q1-K1-C3
gtccggttggagacagatccattcaaactgcactgcttccagacactgacagggataaagtttgtggtgctggcggatcctagacaggctgggatagattctcttctccgaaaaatttatgagatttattcagattttgccctgaagaatccattttactccctggaaatgcccatcaggtgtgaactgtttgaccagaacctgaagttagccctggaggtggcagagaaggctggaacctttggacctgggtcttaggctgaacctgcagtggaccccaccaaattcttaagagatcctacagcaggaatcctgcggtttccactttgatggagatcctggcagcattgttattgcacttgaaaatgggaagatgctgagcctgatgacatgttctgatcccgagccttaataccattctctctttcct

SEQ ID NO: 2425 - DNA, 412 bp, Bos taurus
  Clone ID: 11-LIB3058-004-Q1-K1-C11
cgccaaagcggctctgatgccggcggtcttcgtggaagagggaagatggcgcttgacggaccggagcagatggagctggaagaggggaaagcaggcagtggactccgccaatattatctgtccaagattgaagaactccagctgattgtgaatgataagagccaaaatctccggaggctacaggcacagaggaatgagcttaatgcaaaagttcgcctgctgcgggaggagctacagctgctgcaggaacagggctcctacgtgggggaagtagtccgggccatggataagaaaaaagtgctagtcaaggtacatccggagggcaagtttgtcgtcgacgtggacaagaacatcgacatcaatgatgtgacacccaattgccgggtggccctcagaaatgatagctacactt

SEQ ID NO: 2426 - DNA, 434 bp, Bos taurus
  Clone ID: 11-LIB3058-004-Q1-K1-C3
cggacgcgtgggctcggccgcggacgcgtcctgggatctgagttcgctgcgttgcaacttcgggtcattctgcgaatgtgacttccagcccgactttcagggtctggagtgtgacctggcccagcacctgtcgggccagcacttggccaggtcgctggtggtgaaggcactgaaggctttcctgcatgatccagcccccaccaagccgctggtcctcactctgcatgggtggaccggcactggcaagtcctatgtcagctccctgctggcgcactacctcttccgggatggcctgcgtagcccccacgtgcatcactattgcccggtcatccactttccccaccccaaccacttggagcgctaccagaaggatcttaagagctgggtgcaggggaacctcactgtctgcaaccgctccctctttctcttcgatg

SEQ ID NO: 2427 - DNA, 416 bp, Bos taurus
  Clone ID: 11-LIB3058-005-Q1-K1-C3
tcgggcggctcggacggagcacggttttccttgccagtgaatcgtgtagagtacactgccagtctcttggcttctcttcaccatggcttcttctgatatccaagtgaaggaactggagaagcgtgcctcaggccaggcttttgagctgattctcagccctcgatcaaaagaatctgtcccagaatttcccctttcccctcctaagaagaaggatctttccctggaagaaattcagaagaaattagaagctgcagatgaaagacgcaagtcccatgaagctgaggtcttgaagcaacttgctgagaaacgggagcacagagaagaagtgcttcataaggcgatatgagagaacaacaacttgagtaggatggcggtagagaaagctgcccacaatatggaggccaacaaagagaacc

SEQ ID NO: 2428 - DNA, 424 bp, Bos taurus
  Clone ID: 11-LIB3058-008-Q1-K1-C3
agcaggtggagattctcaacaaataccctcacttcaagactaagattgaagggctggacatccacttcatccacgtgaagccccctaacctgccctgcggccaaaccccaaagcccttgctgatggtgcacggctggcctggctccttctacgagttttataagatcatcccgttcctgactgaccctaagaaccacggcctgagtgatgagcatgtttttgaagtcatctgtccatccattcctggctacagcttctccgaggcatcctccaagaagggcttcaactcagtggccactgccaggatcttttataagctgatgctgcggctgggcttccagaaattctatattcaaggcggagactggggggccctgatctgcaccaacatggcccagctggtgcccagccacatcaagggcct

SEQ ID NO: 2429 - DNA, 424 bp, Bos taurus
  Clone ID: 11-LIB3058-010-Q1-K1-C11
gcagccacggttgcccggccagggacccgatccgaacagtcatcgtcagaatgtcgggcaaagaccgaattgaaatctttccctcgcgaatggcacagaccatcatgaaggctcggttaaaaggagcacagacaggtcgaaacctcctgaagaaaaaatctgatgccttaactcttcgatttcgacagatccttaagaagataatagagactaaaatgttgatgggtgaagtgatgagagaagctgccttttcacttgctgaggccaagttcacagcaggggacttcagcaccacagttatccaaaatgtaaataaggcccaagtgaagattagagcaaagaaagataatgtagcaggtgttacattgccagtatttgaacattatcatgaaggaactgacagttatgaactgactggtttagc

SEQ ID NO: 2430 - DNA, 366 bp, Bos taurus
  Clone ID: 11-LIB3058-010-Q1-K1-C3
gcatctggaaaactttttgctcaaaaagataaaaagttttgtgaacacagaattatgaagttgcctgaaaaacggcagaagatagtgactatgttgttcagtaaagttcttggtgcaaatgtgtcttttatttttatttaaacactaaaggcacgttttggccaacccaatactgaatacttaaaggaaactcttccgtgttgtccttagccttacagcgtgcactgaatagttttgtataagaatccagagtgatatttgaaatacgcatgtgcttatattttctatatttgtaactttgcatgtacttgttttgtgttaaaagtttataaatatttaatatctgactaaaattaaacaggagct

SEQ ID NO: 2431 - DNA, 436 bp, Bos taurus
  unsure (321): unsure at all n locations; Clone ID: 11-LIB3058-011-Q1-K1-C3
ccaatgcatgacagtgcaaagtcaaagtgaagtcgctcagtcatgtctgaccctcagcgaccgcatggactgcagccttccaggctcctccgtccatgggatactggagtggggtgtcattgccttctccgagccaagacatgaaagcaacccaaatgcccattaagagatgactggattaataagatatacatacatatacagatacatatgatggaatattagtcctaaaaaagaacacaaagattgcttggacgaaggcatggcaacccactccaatattcttgcctggagaatcccatggacaaaagagcctgccangctgtactccatagggtcacacagagtcagacacgacttgaacaacttagcacggtttcatgcactgtgattgcaacgatgtgtatggacctagagaatattatgcttcatgaaa

SEQ ID NO: 2432 - DNA, 382 bp, Bos taurus
  Clone ID: 11-LIB3058-013-Q1-K1-C11
tcgcacatatatatggaatttagaaagatggtaacaataactctgtatacgagacagcaaaagagacactgatgtatagaacagtcttatggactctgtgggagagggagaaggtgggaagatttgggagaatggcaatgaaacatgtaaaatatcatgtaggaaacaagttgccagtccaggttcgatgcgcgatgttggatgcttggggctggtgcactgggacggcccatagggatggtatggggagggaagaaggaggagggttcgggatggggaacacatgtatacctggggtggattcattttgatatttggcaaatctaatacaatcatgtaaagtttaaaaataaaatacaattaggaaagataaaatttgaag

SEQ ID NO: 2433 - DNA, 439 bp, Bos taurus
  unsure (347),(365),(413),(429): unsure at all n locations; Clone ID: 11-LIB3058-013-Q1-K1-C3
cttggatattcttggttcatgtgctgctgaagcctagcttgaaggattttaagcattaccttgctggcatgtgaaatgagctctattatgtggtagtttgaacattctttggcattgcctttctttgggagttggaatgaaaactgaccttttccagtcctgtgaccattgttgtattttccaaatttgctgacatattgaatgtagcaccttaactgagcctttataggaaatccttaataggaataagatggttcttacacaactgaagcaactcttaaactttggttaaaaattcgtaggaaaatatttaaggaaattgcatttttatttgcagattttgtctntacattcttagttatctnttgcattacaaagtctttttcaattttttttctaaatttattatattntctctagaagcacttntaattttcaa

SEQ ID NO: 2434 - DNA, 348 bp, Bos taurus
  Clone ID: 11-LIB3058-014-Q1-K1-C3
tcgcccatgaagaacgccaccaagtacggcaacatgacacaggaccacgtgatgcacctgctcctgaaggcagaccccctgaaggtgtacccgcagctgaaggggagcctgccagaaaacctgaaacaccttaaggactccatggatggcttggactggaagctctttgagagctggctgcatcagtggctcttgtttgaaatgagcaagaactcgctggaggagaagccctttgagggtccaccaaaagacccaatggagatggagtatccgtcatctgggctgggggtgtaagcaggatttcagtaagtcgccccgtgagctcagcagacgcagacgccagtaccc

SEQ ID NO: 2435 - DNA, 397 bp, Bos taurus
  Clone ID: 11-LIB3058-015-Q1-K1-C11
gcaggagcagctgaagatcatcaagaaggagctaggcctggagaaggatgacaaggacgccatcgaggagaagttccgtgagcggctcaaggagctcgtggtccccaagcatgtcatggacgtggtggacgaggagctgagcaagctgggcctgctggacaaccattcctgcgagttcaatgtcacccgcaactacctggactggctgacgtccatcccgtggggcaagcacagcgacgagaacctagatctggcgcgggcccaggcggtgctggaggaggaccactacggcatggaagacgtcaagaagcgcatcctggagttcattgccgtcagccagctccggggctccacccaaggcaagaacctctgcttctatggccccccgggccttggc

SEQ ID NO: 2436 - DNA, 444 bp, Bos taurus
  unsure (53): unsure at all n locations; Clone ID: 11-LIB3058-015-Q1-K1-C3
gcggcacagggagcagctgcggcggttgcggcggcgacttcaggggtcgcggnggagggcgagcccggacccggggagaatgcggcggtcgaggggaccgctccgtccccaggccgcatctctccgccgaccccggcgcgcggcgagcctgaagtcaccgtggagatcggagaaacatacctatgccggcggcccgatagcacctggcattctgctgaagtgatccagtctcgagtgaacgatcaagaaggccgagaggaattctatgtacactacgtgggctttaaccggcgattggatgaatgggtcgacaagaaccggctggcgctgaccaaaacagtgaaagatgctgtgcagaagaactcagagaagtacctgagtgagctggccgagcagccggagcgcaagatcactcgaaaccaaaaacgcaagcatgatgagatc

SEQ ID NO: 2437 - DNA, 480 bp, Bos taurus
  Clone ID: 11-LIB3058-017-Q1-K1-C3
gatgagaagagttcattgatttgaggccatatttaggtaagaaacacaaagtctttggcatttaggaatatttcaacgtgttagctagtggatggaggtagagagtagccaagaaaccctcaaatcttatatatgaatccttaataaactcgagtccaaggctgctttgggattgtttagaactaatagaaatgcaagtacctctgaagacaggcctgggccccttcctgactgagtgggcagcccagacttacacatctgagaggataaagaacccaagtgacagagtgaccttgcttttactgtctcagagcacctatattcattttggacctgcagtccattcatgggtttgttcaggaagcttaacacttcttgagtttgattataaaatccatgttgacttttcttcagagaaggcctttagaggtcatcatatttgtcaacccacaaatggttgaaaaagagctgtctaatctc

SEQ ID NO: 2438 - DNA, 325 bp, Bos taurus
  unsure (240): unsure at all n locations; Clone ID: 11-LIB3058-018-Q1-K1-C3
agctatgacctgcccatggtggaggaaggggagcccgaccctgagttcgaggccatcctggacactgtggatcctaacagggacggccacgtcttcctgcaagagtacatggcctttatgatcagccgtgagaccgagaacgtcaagtccagcgaggagattgagagcgccttacgggccctgagctctgaagggaagccttatgtgaccaaggaggagctgtaccagaacctgactcgngaacaagccgactactgcgtctaccacatgaagccctacgtggacggcaggggccgcgaactccccactgcttttgactacgtcg

SEQ ID NO: 2439 - DNA, 412 bp, Bos taurus
  Clone ID: 11-LIB3058-019-Q1-K1-C11
ctagaagatttgctgaaccctattggttttactggatcaaatccaaataaagaaactgcatgtttagagttggagtttgactggttcagcagtgtggtaaagtttccagatatgtcagtgattgaagagcatgccaattggtctgtatcccgtgaagcaggatttagttattcccatgcaggactgagtaacagactagctagagacaatgaattaagagaaaatgataaagaacagctccgagcaatttgtacacgagatcctctatctgaaatcactgagcaagagaaagattttctgtggagccacagacactattgtgtaactatccccgaaattctacccaaattgcttctgtctgttaaatggaactctagagatgaagtagctcagatgtactgcttggtaaaag

SEQ ID NO: 2440 - DNA, 300 bp, Bos taurus
  Clone ID: 11-LIB3058-020-Q1-K1-C3
gtccgggcaggggagctggaccaggcaaccagctggcccttcaccctgagcatcagtgaccggtatggtgaggaatagttaacgtacactttacatgcatagagttggtgcgccctgccaaggtttatgaaagttctgtggcatgttagctgctaaatgatgtacagctatctgcactgccatggactagtgcactgtgaagctcctgtgtccatggactcctacaggcgtgaattctagaatgggtagccattccattctacaggggatcttcctgacgcaggcatcaaacttaggtct

SEQ ID NO: 2441 - DNA, 359 bp, Bos taurus
  Clone ID: 11-LIB3058-021-Q1-K1-C3
caaacctacaaaggttcccctagcgtacattgtatcaagtccaaactcaaatgcctggcctccaagatgttccatcatgcagtcccaataacagattccccagcgccttcttttctcaaaggactccagctcccgcctcaggcaggtctcttccatctggtcacatgcatcaccacctgatccagaacccaggggaataaacagaaaagaaacactggcccaaactgagaaggcatagtttctaatctcaactctatcacttatccactggataactgggggccaactgagcttagtttcctcatctgtagaatggaaattattactcttttcatgtaggaagcatgcagcatgaggag

SEQ ID NO: 2442 - DNA, 408 bp, Bos taurus
  Clone ID: 11-LIB3058-023-Q1-K1-C11
gtgggtattatcggtggcaaacctaaacagtcatattactttgctggatttcaagatgacagtttgatttacatggatcctcattactgccaatcttttgtagatgtcagcataaaggatttccctcttgagacattccactgcccttctcccaaaaagatgtcatttcgaaaaatggatcctagctgtacaataggattttactgtcgaaatgttcaggacttcaaacgagcttctgaagaaatcactaagatgctgaaaatttcttctaaggagaaatatcccttatttacttttgtaaatggtcattccagagactatgattttacatctactacaaccaacgaagaagaccttttctcagaggatgaaaagaaaagaataaaaagatttagcacagaagagttt

SEQ ID NO: 2443 - DNA, 363 bp, Bos taurus
  Clone ID: 11-LIB3058-023-Q1-K1-C3
atcaaaaacaacctgaaagaggccattgaaaccatcgtggccgccatgagcaacctggtgcccgctgtggagctggccaacccagagaaccagttcagagtggattacattctgagcgtgatgaacgtgccggactttgatttccctcccgaattctacgagcatgccaaggctctctgggaggatgaaggggtgcgtgcctgctatgagcgctccaacgagtaccagctgattgactgcgcccagtacttcctggacaagattgatgtcatcaagcaggatgactacgtgcccagcgaccaggatctgttccgctgccgtgtcctgacttttggaatctttgagaccaagttccaggtggac

SEQ ID NO: 2444 - DNA, 298 bp, Bos taurus
  Clone ID: 11-LIB3058-025-Q1-K1-C11
cgacccacgcgtccgcaaaaatattaaaacaaatcaccccttgagaaacaaaatgaacgaaaatttatttacggggtttattgcccctgtaattttaggtctccctctcgtaacccttatcgtactattcccaagcctactattcccaacatctaaccgactagtaagcaatcgctttgtaaccattcaacaatgaatacttaaacttgtataaacacacataatgagtctcctcaattctaaaggacaaacatgaacactaatattaatatctgagatcctatttattggatcaaca

SEQ ID NO: 2445 - DNA, 434 bp, Bos taurus
  Clone ID: 11-LIB3058-025-Q1-K1-C3
accgggtcgacatacgcgtgcggaaacagcctactgaaggcctagtgatgttgaaaatgcattccagagaccggtagcgctggcagcatggctgaccaactgactgaaagagcaagattgcagaattcaaagaagctttttcactatttgacaaggatggtgatggaactataacaacaaaggaattgggaactgtaatgagatctcttgggcagaatcccacagaagcagagttacaggacatgattaatgaagtggatgctgatggtaatggcacaattgacttcccggaatttctgacaatgatggcaagaaaaatgaaagatacagacagtgaagaagaaattagagaagcattccgtgtgtttgataaagatggtaatggctatattagtgcaacagaacttcgccatgtgatgacaaaccttggagag

SEQ ID NO: 2446 - DNA, 393 bp, Bos taurus
  Clone ID: 11-LIB3058-027-Q1-K1-C11
gtccagttctaatcaaaagctgccttcctggcacggacttatgtaccgagtcaggtttcaagggtggtgaaactctggagagaaaacctctcaaaagtcaatcagaaagcagcagaatcccttgctgatccaacagaatatgaaaaccttttccctggattaaaggaagcctttgttgtagaagaatgggtgaaggaaacgcatgccgacctatggccggccaaacagtacccacttgtcaccccaaatgaagaaagaaatgttatggaagaggcaaaaggctttcaaccctcaagatctgcagctcagcaggaacttgatgggaaacctgcttctcctactcctgttatcgggacctcccagacagccaacaaagaagaaaagagtttactt

SEQ ID NO: 2447 - DNA, 391 bp, Bos taurus
  Clone ID: 11-LIB3058-027-Q1-K1-C3
ccgggttggaccgagccttccgggccggggaaggaaagagtgactctaataagcccctgattgttctgcatccccgtgggcagaagaagtatggctggaattagtgggacttagttgacggcaagggaaaggctggacaggaagtcccaactgtgagctgctctgtccccggggaccctgagcaactggagattgcaaaggaggacgcccaggcagagaacagttccatcatgagcttctttaaaaccctggtttcacctcacaaagccgaaactaaaaaagatccagaagacacggcgtctaagggagaaagtgtctctgatggacaagccgggcagaagacatccgaggtccaggctaaaggcgccaagaaaaagcacctgcatagccc

SEQ ID NO: 2448 - DNA, 344 bp, Bos taurus
  Clone ID: 11-LIB3058-030-Q1-K1-C3
gcggtcactgcaccatcgctggtcaagcgggatgcctgcttcacttctctgatgaacaccctgatggcgtcgctgccttcactggttcagcagcaggagaggctgcttctggctgccgacgtggctaccctgggcctcctcatggcccggcgcctgagcaccttgccagctctgcaggggacgcccgcatccctgggtatgttcgcggctgccattctcttgctgtcgcaatcgcacgtggcccgggccacgcccggctcgagagcaggcggtgctggccctgtgggccgctacgagggcgtttgggcggatatgcggtggctctgggtcctgggcatgcaggc

SEQ ID NO: 2449 - DNA, 429 bp, Bos taurus
  Clone ID: 11-LIB3058-031-Q1-K1-C11
gccagaactaccaccaggactcggaggtcgtcatcaaccgccagatcaacctggagctgtgacgccttctatgtctacctgtccatgtcgtactattttgaccgtgatgatgtggctttgaagaactttgccatatactttctttaccattctcatgaggagagggtacatgctttgagacttttgtagctttatatcctgttaggcgttcgaattttttttatatgttttttatatactttgtttttatttcttgttttttgttttttcttttttttttttttttttgtttttttattgttttttatgttttttttttattttttatttttttttttttttttttttttttttttgtttttatttgttttttttttatttttgttattttttttttttttttttatttttgtttttgttttttttttt

SEQ ID NO: 2450 - DNA, 390 bp, Bos taurus
  Clone ID: 11-LIB3058-034-Q1-K1-C11
tgaaagcgtcaggatggagtcttcattttctcatgatgcaaaatctagtctgggagagagttcacagaagagatttacaataaaacacattccttattttaagcctcacacgctcacagagctggcgaacttggtgtccggggacagaaggaaacctcagccaggggaaaagtcatgacaggcagggtggcctctcttggttgagtttcagttcagttcagtcactcagttgtgtttgactctttgcgaccccatgaattgcagcacgccaggcctccctgtccatcaccagctcccggagttcacctaatttcatgtccatcgagtcggtgatgccatccagccatctcatcctctgtcggtgatgccatctagtgatctcattctctg

SEQ ID NO: 2451 - DNA, 451 bp, Bos taurus
  unsure (56),(380): unsure at all n locations; Clone ID: 11-LIB3058-036-Q1-K1-C11
ccacgcgtccgctggattttaatcttacctgggtttggtataatctttcatatcgngacctactactcaggaaaaggagaaccattcggatatatgggaatagtttgggctataatgtcaatcggatttctaggtttcatcgtatgagcccaccatatattcactgtcggaatagacgtcgacacacgagcctacttcacatcagccactataattattgctattccaaccggggtaaaagtcttcagctgattggcaacacttcatggaggtaatatcaaatggtctcctgctataatgtgagccctaggctttattttcttatttacagtagggggtttaactggaattgtcttagccaactcttccctcgatattgntcttcacgacacatactacgttgtcgcacatttccactatgttttatcaataggagctgtatttgctatta

SEQ ID NO: 2452 - DNA, 245 bp, Bos taurus
  Clone ID: 11-LIB3058-037-Q1-K1-C11
catgttcatcatagggagagccatggtaggtttggtggggtttaaactcctttcgtgaaaccaggtttttttggaactttaagttatgttctttgaccccgaaagcgcttctccagtcttacagatgatagtctccaaattctcaaattgtttccaagcttcaactcaaaagacacaagctggcccgccacaggcagcatctgacccttaactagattttgtcttgcatgttaaatgttttaaaa

SEQ ID NO: 2453 - DNA, 436 bp, Bos taurus
  unsure (281),(317): unsure at all n locations; Clone ID: 11-LIB3058-037-Q1-K1-C3
cgacccacgcgttcgcggagagtcgccgcggtttcctgctataacagtgcttgaacggaacccggctgctcgtgccgcgctaccccggccggccactcagagccagccctcgtcaccacttgacagcgccctccgaccggcccaaggtccccgccaccgctccagtgccgctcggccgtcgccgccaccaccaccaccaccgcccgttttcagccgcccaccatgacgaccgcatccccctcgcaggtgcgccagaactaccaccaggactcggaggccgncatcaaccgccagatcaacctggagctctacgcctnctatgtctacctgtccatgtcgtactattttgaccgtgatgatgtggctttgaagaactttgccaaatactttcttcaccaatctcatgaggagagggaacatgctgagagactgatga

SEQ ID NO: 2454 - DNA, 402 bp, Bos taurus
  unsure (336): unsure at all n locations; Clone ID: 11-LIB3058-039-Q1-K1-C3
gttctcatgatccttatctgtgccatttctacgtacggcgcatacaagcaacgcgcagcctggatcatcccattcttctgctaccagatctttgattttgccctcaacaccttggttgcggtcaccgtacttgtttatccaaactccatccaggaatacatacgacagctgcctcctgattttccttacaaagatgatatcatgtcagtgaatcctacctgtttggtcctcattattcttctgttcatcagcattatcttggcttttaagggttacttgattagctgtgtttggaactgctaccgatatatcaatggcaggaaactctctgatgtncctggttatgttaccagcaacgacactacggtgctgctaccccggacgatgatgccactgtgaaca

SEQ ID NO: 2455 - DNA, 382 bp, Bos taurus
  Clone ID: 11-LIB3058-041-Q1-K1-C3
gcggccgccccgctagcacaggcctctttccttctccgctccgccttcgccgccggtcgacaccgcaaccagttcgccatggatgatgatattgctgcgctcgtggtcgacaacggctccggcatgtgcaaggccggcttcgcgggcgacgatgctccccgggccgtcttcccgtccatcgtggggcgcccccggcaccagggcgtaatggtgggcatgggccagaaggactcgtacgtgggggatgaggctcagagcaagagaggcatcctgaccctcaagtaccccattgagcacggcatcgtcaccaactgggacgacatggagaagatctggcaccacaccttctacaacgaggctcctgtggcccctgaggagcacc

SEQ ID NO: 2456 - DNA, 428 bp, Bos taurus
  Clone ID: 11-LIB3058-042-Q1-K1-C3
gagaaaagcagaacatgtaatgataatttagctaattcatcaaaaagacataacaatgctaaatgtgtgtgcaactaacagttgttttaaaatgtaaggtaaagcctcatagttttgaaaaagaaattagcaaattcataattatagttggatatgtcaatactctcataattgatagaacaattaaataaggtatcagtaaggatatagaagcttcccaggtgtgctacagctaaaatagtgcttcgaagaaaatgcatatctacaaataattattttaggaaaaaaagttctaaaatcaatgttctaatattctgccttgaggtaaaagaagaaatcaaaacaaacctaaagtttaagacagaaggaactattaagaacaaaaaggaacaaaacagaaaatgaacaagcatagagaaattcaaaga

SEQ ID NO: 2457 - DNA, 405 bp, Bos taurus
  Clone ID: 11-LIB3058-044-Q1-K1-C3
cggacgcgtgggcggacgcgtggggttttctttgttcccaagatgcgcaggctgatcagccgaggggagtggcagtcggaggcacaggacaccatgaagacagggtcctcgaccaacaacaacgaggaggagaagtccaggctgttggagaaggagaaccgcgagctggagaagatcatcgccgagaaagaggagcgggtctctgaactgcgccatcagctccagtctcggcagcagctccgatcccggcgtcacccttcgacacccccagacccctcggggggcctgcccagggggccccctgagccccctgaccggcttagctgtgatggaagtcgagtccacttgctttacaagtgaaggaggtgtgaggggggacaggcaagtaaggggaaggaagaggag

SEQ ID NO: 2458 - DNA, 433 bp, Bos taurus
  Clone ID: 11-LIB3058-045-Q1-K1-C3
gacagactgaaggcaggaggagaagggttctgacagagcatgagatggttggatggcgtcaccaacccaatggacatgagtttgagcaagctctgggagatggtgaaggacagggaagcctggtgtgttgtggtccatggggtcgcaaagagtcagacacgatgagcgactgaacaacaaactgttgcgtgtatataaatcatcctgacatccatacagatttctgtgcgcgtgcatgtgtgtgtactgggaggtaacctggaggggtgatcagcatccagcaggggacactaggcccccaaattaaacaggaagcattatttcaggagtataatcctctctcttcatccacttgggcatttaatggttaatggtttacagacttccagctactgtagtatccggtctgggacagaagagacatgaagaaaac

SEQ ID NO: 2459 - DNA, 333 bp, Bos taurus
  Clone ID: 11-LIB3058-047-Q1-K1-C3
gttctagatcgcgagcggccgcccttttgttttttatattatttttttttatttttgggtttgtgtttttctggagtccttagggctttctttacatagttccatgtcatttgcatataatgacaattttacctcttcccttctgatttggataccttttatttattttttctttgattgctctggctaggacttccagtactatactgaatagaagtggtaaatgtgaacatccttatcttattccatactataatggaaggctttcaactttttaccactgagtaaaatgttcactgtgggtctgacataaatagcctttattatgcctaa

SEQ ID NO: 2460 - DNA, 437 bp, Bos taurus
  unsure (419): unsure at all n locations; Clone ID: 11-LIB3058-049-Q1-K1-C3
aggcttccggggcgagctgagatcgaggccctggcttctttcaagatgcggaagctctgtcgaacgtacggcaagcctgaggggcctggggacgcctgaagggccgtggcccggaacgtctgggacacggtgggcgaggaaaaaggtggcggaggtggaggcggcggcagtgaggagggagcccgtggcgcagaggtggaggacctgcgcgctcacattgacaagctgacggggatcctgcaggaggtgaagctgcagaacagcaccaaggaccgcgagctgcaggccctgcgggaccgcatgcttcgcatggagagggtcatccccctgacacaggatcacgaggatgagaatgaagaagctggtgagaccacgtgggcccagccccaagggtctgaggcagcagaggaggaagcccncagtgaccgagcgccccc

SEQ ID NO: 2461 - DNA, 411 bp, Bos taurus
  Clone ID: 11-LIB3058-053-Q1-K1-C11
tcgcacatctctgctcatggagcgggttttcctggactacggcaaggaagtccaagctggagtttgccatgtacccgggcccccaagtattcacggccgtggtggagccttacaactccatcctgaccacgcacacgaccctggagcactcggactgcgccttcatggtggacaacgaagccatgtacgacatctgccggcgcaacctggacatcgagcggtccacgtacaccaacctgaaccggctcatcagccatatcgtgtcctccatcacggcctccctgcgctttgacggcgccctcaacgtggacctgaccgagttccagaccaacctggtgccctatccccgcatccactttccactgttcacctacgcgcccatcatttcagccgagaagcctaccacgagca

SEQ ID NO: 2462 - DNA, 411 bp, Bos taurus
  Clone ID: 11-LIB3058-053-Q1-K1-C3
cccacgcgtccgcccacgcgtccggttttcaggagcggggcggcttgccgcgcatgctcaggcggagtctgcggagtggtgccgtggcggtggagcagcgcagcgtggtctgccagccggagatgcgtgacgttgtgttctgaggagcggccagcggcgcgatggagcgggccagggaccgtttacacttgagacggactacagaacagcacgtaccagaggtggaagtccaagtcaaacgtagaaggacagcctcactgaacaaccaggagtgtcacgtgtacctgaggcgatctcagcagcagcaagtacctgtggtggatttccaggcagaactgacacaggcattcttagctgagacaccaagaggtggttaaagcagtattggaacaccaagagctccatctacta

SEQ ID NO: 2463 - DNA, 365 bp, Bos taurus
  Clone ID: 11-LIB3058-054-Q1-K1-C3
gttctagatcgcgagtcggccgccctctgttatttcctccttagatatttgaaatacaactttattctgattctaaacgaaaaggaatgggaatgacagtaacaaacaagattccacctgtcaatattgtcatgtgactatagcagtcttatatttgaaactcaaggaggaaacaactgtgttccaaaacacctaaatatgcaggtccaaaaaatgaaggttattttcttaactgccacattcactccaaagcccatccatctgcttcagcatccacagattaagcacatgttctgcttagctatataataaagtggcaaacacgctgcaccactgacatgacaggacagttgcctataaaacta

SEQ ID NO: 2464 - DNA, 328 bp, Bos taurus
  Clone ID: 11-LIB3058-056-Q1-K1-C3
gaaggacgcggtttctggaggcgaagaacgcggttggccaatcgcaagccagaagatgaaggttctgagggttgccgtggtggtcgcgcttctggcaggatgccaggcggatatggagggagagctggggcccgaggagcccctgactacgcagcagccccgggggaaggacagccagccttgggagcaggcgctgggccgcttctgggattacctgcgctgggtgcagaccctgtctgaccaggtgcaggaggagctgctcaacacccaggtcattcaggaactgtcggtgctgatggaggagaccatgtaagaggtgaaggcctac

SEQ ID NO: 2465 - DNA, 397 bp, Bos taurus
  Clone ID: 11-LIB34-001-Q1-E1-C11
agagcaactgggctgtggaaagccaatctttgtacctgccaaagcacggaaaaagtttgtccctggaaatgggcgcatctggctagatgatgtccattgcaaaggggaagagcagtccctggagcagtgtcagcataggtcctgggggtatcatgactgcaaccacaaggaagatgtggttgtattctgcttggaagggcagcctgacatttgatgtttggcctgactcctgcagggcctgagtgtcctttgctttctcctggcctcaaatggcttagtgcaagtgctgggcctgcaggctcagctcccactccctcagcccctaagcaagaatctgaacactctgctctcagagccaagtacccccatcacctcctggagatatgagttgttgaat

SEQ ID NO: 2466 - DNA, 416 bp, Bos taurus
  Clone ID: 11-LIB34-001-Q1-E1-C3
aaaatttggagaaagagctttaaaagcatggtcagtagctcgcctgagccagaaatttcccaaggctgagtttgtagaagttaccaagctagtgacagatctcacaaaagtccacaaggaatgctgccatggtgacctacttgaatgcgcagatgacagggcagatcttgccaagtacatatgtgataatcaagatacaatctccagtaaactgaaggaatgctgtgataagcctttgttggaaaaatcccactgcattgctgaggtagaaaaagatgccatacctgaaaacctgcccccattaactgctgactttgctgaagataaggatgtttgcaaaaactatcaggaagcaaaagatgccttcctgggcccgtttttgtatgaatattcaagaaagcatcctgaatatgctg

SEQ ID NO: 2467 - DNA, 401 bp, Bos taurus
  Clone ID: 11-LIB34-002-Q1-E1-C11
agatgaggaacatcgtccccatgaacgtgcccagggaggtgacagtggacaccgtcctggctggataccacctggtcaagggcaccatggtgctgaccaacctgactgcactgcacagggaccccgcagagtgggccacccctgacacgttcaatccagagcattttctggaaaatggacagtttaagaaaagggaatcctttctgcctttctcaatacgaaagcggatgtgccttggagaacaattggccaggacagagttgtttattttctttacttcacttctgcaaaaatttaccttcaggcctccagagaatgagaagctgagcctaaagtttagagaaagcctgaccagctccccagccagctaccgcctctgtgctaatcctcgggcctgaaat

SEQ ID NO: 2468 - DNA, 414 bp, Bos taurus
  Clone ID: 11-LIB34-002-Q1-E1-C3
aatggccgtagcattccttacgttagtggaacgaaaagttctaggctatatacaactccgaaaaggtccaaatgtcgtaggtccatatggcctacttcaacccatcgccgatgcaatcaaacttttcattaaagaaccactacgacccgctacatcttcagcctcaatatttatcctagcacctatcatagctttaggcctagccttaaccatgtgaattcccctaccaataccctatcctcttatcaacataaacctaggagtcctatttatactagccatatcaagcctagccgtatactccattctctgatcaggctgagcttccaactcaaaatacgcactaatcggagccctacgagcagtagcacaaacaatctcatatgaagtaacgctagcaattatcctgttatc

SEQ ID NO: 2469 - DNA, 397 bp, Bos taurus
  Clone ID: 11-LIB34-003-Q1-E1-C11
gtcgaccacgcgtccgggagaaacaggacaggtcctggtatctacgaaagatatggacagactgaaaccgtaccaatccgttggaaatttaagggaatgaaaatttagcctggctcaatgggaaaaccttctcctgcttttgatgttaagattttagaatgtaacggcaacgttctaccacctggaaaagaaagcgatattggcattcgagttcgacctaaccgaccacttggcctttttacccattatatagataatcctacaaaaacagcttcaactctacgaggcaatttctatatcactggggacagaggctatatggatgaggatggatatttctggtttgtttcaagagcagatgatatcatattatcttccggttaccgaattggtccgt

SEQ ID NO: 2470 - DNA, 417 bp, Bos taurus
  Clone ID: 11-LIB34-004-Q1-E1-C3
cggaagatgacttcacatcagtgcaagcgcttcaacactttcattcatgaagatctttggaacatccgtagtatctgcagcaccaccaacattcagtgcaagaatggccagatgaactgccatgagggtgtagtgagggtcacagactgcagggagacaggaagctccagggctcccaactgcagataccgggccaaggccagcaccagacgtgttgtcattgcctgtgagggtaacccggaagtgcctgtgcactttgacaagtagataccactcaacaggggttatggcccagcagctggcccttaacttactccttaaatagtaatgagtaagcatttgagctgtcccacgccgactcccctgattctttgtctttttcatctttatataaaccattcggttaaacacattgca

SEQ ID NO: 2471 - DNA, 410 bp, Bos taurus
  Clone ID: 11-LIB34-005-Q1-E1-C3
tttgccgccgggacacaggtgtcgtgaaaaccaccgttaaacctaagccaaaatgggaaaggagaagacccacatcaacatcgttgtcattgggcacgtagattcagggaagtctaccacgactggccatctgatctataaatgtggcgggatcgacaagagaacaattgaaaagttcgagaaggaggctgccgagatgggaaagggctccttcaaatatgcctgggtcttggacaaacttaaagctgaacgtgagcgtggtatcaccattgatatctccctgtggaaatttgagaccagcaagtactatgttaccatcattgatgccccaggacacagagacttcatcaaaaacatgattacaggcacatcccaggctgactgtgctgtcctgatcgttgctgctggtg

SEQ ID NO: 2472 - DNA, 407 bp, Bos taurus
  Clone ID: 11-LIB34-006-Q1-E1-C11
cggacgcgtgggctcgagcccccttgtcccagctccggcctcggcatgttgcgcgctgttgcgcttgccgccgcccgcctcggaccccgccagggccgccgcctgctgtccgccgccacccaggccgtgccgacccccaaccagcagcctgaagtcttgtacaaccagatctttataaacaatgagtggcatgatgccgtcagcaagaaaaccttccccacggtcaatccatccactggggatgtcatctgtcacgtggctgaaggggacaaggcagacgtggacagagcagtgaaggctgcccgggccgcattccagctgggctcgccctggcgccgcatggacgcgtccgagaggggccggctgctgaaccgcctggctgatctgattgagcgagaccggaccta

SEQ ID NO: 2473 - DNA, 421 bp, Bos taurus
  Clone ID: 11-LIB34-006-Q1-E1-C3
cagacgcagatggcagcccaggactgtgccttccaccaggcgccaccccccaaggccgagctggagtcgacagtctttggcagcccaaggctggccagtgggctcttcccagaatggcagagctgggggaggatggagaacttggcctcttaccgatgaatgaagcaacctggtgaccggtcttgaccttacgcccccatgtaattctaggtctgtgttgctcaatcttaggaaggcgttgctactttccttcagtaggtttaggttggagcttttgagacctggctacaaaaaaagatagccccttgagaatttagtgtggagggtttgtatggatgacactgcccagtgttgctgtggaggatcaagttacagcctggaaccctatttttataaaagtaatattctgtctatacccttt

SEQ ID NO: 2474 - DNA, 383 bp, Bos taurus
  Clone ID: 11-LIB34-007-Q1-E1-C3
ggcttatttactagttattttttgttttctattctcatattttgttacccattttttggatcatctgacgtgtaagaaaactattaacccatgatttgtcagtgttatgtagatttatttacagtgtctttttgtgttagttgcttagatttttagataattgcaattaattttgattatttttcctttcttaagtttaagatttgaatgacctaaattcaatgggtttaatatgtgcttttcagaacctaagagaggaaagaagtttatagatgagttttcttctagattttcgttagttctatttcagagtataaccccagaactcaaattaattaggcttgtttatggccatcatttcaagatgaaatatcctcccctac

SEQ ID NO: 2475 - DNA, 418 bp, Bos taurus
  Clone ID: 11-LIB34-008-Q1-E1-C11
gtacccagttcttacctgcttgccttaaagggctctcggtcgaatggccttgtatttagagatctaagtgacacctcctcatgttctcatgtagtaggtacgaaatcaacttcagtgacacctcagcagtgctggttataatgatcctatgatgaattttatcaagcctaattgcgagagctgctatttagcaaatatttaaattgctcagactgagggaaataattttctggagtcttcaaaaataaattacattcattaaaaaaaaaatacattcatcaacaacaaccaccactatactttaagtaacttgactggtagagccaaccactgatatgcatgaacttttcattgtgtggcaggccataaagccacttgtttcagaagaagagtcctatgaagacacgatagcactatt

SEQ ID NO: 2476 - DNA, 379 bp, Bos taurus
  Clone ID: 11-LIB34-008-Q1-E1-C3
cgccgaatgcgatcaaagaagcccctgctcctcctaaagctgaagccaaagcataggctttgaatgccatagaaagcagtgttgaaaggtgtccacagccacaaaatagacaagatccggacgtcgccgatcttccggcggcccaaaacagtgcggatcacgaagcaccccaagtaccctcggaagaacacgcctacgagaaacacacttgaccactatgccatcatcagattcggcctcaccaccgagtcagccatgattaacatataagacaccatcacactgggatacagtgtagacgtcaaggccaacatgcaccatattaaacatgctgtgaagaagctctacgagactgacgtggctaacgtcaatactctga

SEQ ID NO: 2477 - DNA, 384 bp, Bos taurus
  Clone ID: 11-LIB34-009-Q1-E1-C11
gcagaggcaagctccaagagtccgctctccggccgagcttcaccaagaggacctggactgtttggtaaagacgcctcggcccttccttcctcagcgttgtttggtttgtgcacagttcctgtgggactaggaagtgtgttttccactggaaagacttctggtcccattgttacttgggctcattgtatctgagctgtcagcccctacaaggaaaaagcctcttctggtggatgctgagcttcctctgagctgcttaagtctccactggtctggcaaacacacctttctgccttgctatcacaaaaggaatgtggatttgtgtgtgttcccttcccagtcccttatctgatcctcagggaatctgcctgctttccttccatgggg

SEQ ID NO: 2478 - DNA, 294 bp, Bos taurus
  Clone ID: 11-LIB34-009-Q1-E1-C3
aaaaacagtgcttatggagctcttccaggattcaggcaacactgacattgagggcatagataccaccaatgcctgctacggtggcactgcctccctcttcaatgctgccaactggatggaatccagctcctgggatggtcgctatgcactggtggtctgtggggacatcgcagtctaccccagtggtaacgctcgccccacaggcggggctggagctgtggcaatgctggttgggcctgaggcccctctggtcctcgagagagggcttagaggaacccacatggagaatgtgta

SEQ ID NO: 2479 - DNA, 367 bp, Bos taurus
  Clone ID: 11-LIB34-010-Q1-E2-C11
ctccagcgaaaccacagccaagggaacgggcttggcggaatcagcggggaaagaagaccctgttgagcttgactctagtctggcacggtgaagagacatgagaggtgtagaataagtgggaggcccccggcgcccccccgtttcccgcgagggggcggggcggggtccgccggccttgcgggccgccggtgaaataccactactctgatcgttttttcactgacccggtgaggcgggggggcgagccccgaggggctctcgcttctggcgccaagcgcccggccgcgcgccggccgggcgctaaccgctccggggacagtggcacgtggggagtttgactggggcggtacacctgtcaaaacggtaa

SEQ ID NO: 2480 - DNA, 252 bp, Bos taurus
  Clone ID: 11-LIB34-010-Q1-E2-C3
gttctagatcgcgagcggccgccctttttttttttttttcaggttttaaaactttttatttgcataataaaaaaattgtgcattccaataattaaaatcatttgaacaacaagaaagaatggcactctgattaaactgcattttacagcgcgcagaacaccttggaccagctttttactctagatttcactgtcgtccctgctccagcatcctccttccagctcaataaagatcccttgaccctgaagaaaa

SEQ ID NO: 2481 - DNA, 412 bp, Bos taurus
  Clone ID: 11-LIB34-011-Q1-E1-C11
aagagctgtaaaatgtgccaaaagggaaatggaaatactgcattctgggaggtgttaacactaacacgattacccataaaacagagttactgcccccccccccacaaataacccctacaaaaggacactgttgaataaacatcagactggcacattcaggagttaccgacaaaaatcctcaggtgttagtttcacacaataattcttcctgcctctctcgtgtcttctccctcgtccagttcccatccatgcagctctatagcatatctctaggtaataacttccacatcaatctagtaaattcttcagttcatgtcacactaaaatgattggacttctgacgaccttatgatgcctgctgtattaagcatactgtagaaatcagaataaaaatcataattttcctcaatga

SEQ ID NO: 2482 - DNA, 438 bp, Bos taurus
  Clone ID: 11-LIB34-012-Q1-E1-C3
cgggtccgcccacgcgtccgattaattgaacattctttggcattgcctttctttggaattggaagctgagaagtcccataatctgtccttcaagcaggagaaccaggacacctagtgatataacttattccaaatctaaacttctgaaaattaagggtggggagggcaatacatcctaatttgagtccaaaaacctgagagccatgagtcagatatctaatataaggaaaaaaatgggtgtctcagttcaagagaagagagtaaaatgtgccctgactctgcttttttgttctaatgggtggattggctaatgctcacctgcactggttgggatcatgggttggatgatgctcgcttgcgttggtgacggaggtcttcttcactctacggattcagattttaatcacgtccagagataccctcacagatatgtttggg

SEQ ID NO: 2483 - DNA, 371 bp, Bos taurus
  unsure (3),(45): unsure at all n locations; Clone ID: 11-LIB34-013-Q1-E1-C3
agngactcctggtggctgggatacgcactgtccactgcctctcanacaatgtggtggcgaaggaccatcacaaaacggtggatggccacacgttagcctccagcaacaccgacttcgccttcagcctctacaatcagttggctttgggcaaccccactaagaatgtcatcttatccccgctgagtgtcaccatagccttggccttcctgtctctgggggcccgtggctccaccctgacaaaaatcctggaaggtctcaagttcaacctcagatagatccaggagaatggaatacaccatagctttcagcatctcatgcaggcgctcaatcaacccagcatacatctgcagctgagcctgggcaacgccatg

SEQ ID NO: 2484 - DNA, 406 bp, Bos taurus
  Clone ID: 11-LIB34-014-Q1-E1-C3
gggtccacgcacgcgtccgatctccattcccagtgcaccctggaactcctgagtgctgcacccatgagggccttgaaaagaagctctgtatggctgccctgaagcaccagccacaagaatttccaacttacgtagagccaacaaatgacgagatctgtgaggcattcaggaaagatcccaaggactttgctgatcgatttatgtatgaatattccattaattatggacaagctcctctgacacttttagtcggttacaccaagagttatctctctatggtagggtcctgctgtacttcaccaaacccaacagtatgctttttgaaagagagacttcagcttaaacaattttcacttctcaccattatgacaaacagaatctgctcacaatacgctgcttatgggaa

SEQ ID NO: 2485 - DNA, 404 bp, Bos taurus
  Clone ID: 11-LIB34-015-Q1-E1-C11
agggagctggtggctcttccatccccagaccagccaagcctgtgagtgacaccccagacagaggaaccagagccatgcggagtctcagcggactgctgttgttactgactgcctgcctggcggtaaacgccagctccgtgcccacattgcccgatgacattcaagtgcaggagaacttcgacctgtctaggatctatgggaagtggttcaatgtggccgtgggctccacctgcccatggctgaagaggttcaaggagaagatgaccatgagcacagtggtgttgaaagcggggccgacgagcaaggagatcagcgtcaccaacactcacaggcggaaaggtgtctgtgaatcgatctctggtacttatgagaaaacaagcactgatgggaagtttctctatcac

SEQ ID NO: 2486 - DNA, 421 bp, Bos taurus
  unsure (403): unsure at all n locations; Clone ID: 11-LIB34-017-Q1-E1-C3
gtcatgatggcgtctgtatgatctccgggggtagcggcgtcggagttcggccaaacataaaagatgacaacagcagctcggccaacttttgaacctgcaagaggtggaagaggaaaaggtgagggtgatttgagccagctctcaaagcagtattcaagcagagacctaccctctcatacaaagataaaatatagacagaccactcaggatgcccctgaagaggttcgaaaccgtgacttcaggagagagttggaggagagagagagagctgctgcaagagaaaaaaacagagatcggccaacccgagaacatacaacctcctcttcagtgtcaaagaagcctcgactggaccagattcctgctgccaaccttgatgcagatgatccactaacagatgaggaanatgaagatgaagattttg

SEQ ID NO: 2487 - DNA, 396 bp, Bos taurus
  Clone ID: 11-LIB34-018-Q1-E1-C3
acccatgggcaaactttataaggaattgcctgatccacaggaatcaattcagagagctgcggccaacttcttctctgccagctgtgtcccctgtgcggatcaatcatcatttcccaaactctgtcaactgtgtgcggggaaagggacagacaagtgtgcctgctccaaccacgaaccatacttcggctactcaggggcctttaaatgtctgatggagggcgctggggatgtggcctttgtcaagcactcaacggtattcgacaacctgcctaacccagaagacaggaaaaactatgagctgctctgcggggacaacacccggaagtctgtagataattaccaagaatgctacttggcaatggttccttcccatgcggttgtggctcgaactgtggg

SEQ ID NO: 2488 - DNA, 431 bp, Bos taurus
  Clone ID: 11-LIB34-019-Q1-E1-C4
ggcagctgaagctcggcgttcgggttacccctgcagcgacgccccctggtcccaccggtaccactgctgctcccgccccttcgtttctcggccgcgcaatgggcacccgcgacgacgagtacgactacctcttcaaagttgttcttattggagattctggtgttggaaagagtaatctcctgtctcgatttactcgaaatgagtttaatcttgaaagcaagagcaccattggagtagagtttgcaacaagaagcatccaggttgatgggaaaacaataaaggcacagatatgggacacggcatggcaagaacgataccgcgctataacatcagcatactatcgtggagctgtaggtgccttactggtttatgacattgctaaacatctcacatatgaaaatgtgaagcgatggctgaaagaactaagagat

SEQ ID NO: 2489 - DNA, 414 bp, Bos taurus
  Clone ID: 11-LIB34-020-Q1-E1-C11
ccaggaggagcgcgcgggcagcggtgaccgaggcgtgctgggattccagaagtggagaaggaggcaagatgaagactctactgctgttgatggggctgctgctcagctgggagagtggctgggcaatctcggacaaagagctccaggaaatgtccaccgaggggagtaagtacgtgaataaagaaattaaaaatgccctcaaggaggtgaaacagataaagacccaaatagaacaaaccaatgaagagcgcaaattactgctcagctccctagaggaagccaagaagaagaaagaggacgccctgaatgacaccagggattctgaaaacaagctgaaggcgtcccagggggtgtgcaatgagaccatgacagccctttgggaggaatgtaagccctgcctcaagcagacctgca

SEQ ID NO: 2490 - DNA, 413 bp, Bos taurus
  Clone ID: 11-LIB34-020-Q1-E2-C11
acaggaggagcgcgcgggcagcggtgaccgaggcgtgctgggattccagaagtggagaaggaggcaagatgaagactctactgctgttgatggggctgctgctcagctgggagagtggctgggcaatctcggacaaagagctccaggaaatgtccaccgaggggagtaagtacgtgaataaagaaattaaaaatgccctcaaggaggtgaaacagataaagacccaaatagaacaaaccaatgaagagcgcaaattactgctcagctccctagaggaagccaagaagaagaaagaggacgccctgaatgacaccagggattctgaaaacaagctgaaggcgtcgcagggggtgtgcaatgagaccatgacagccctttgggaggaatgtgagccctgcctcaagcagacctgc

SEQ ID NO: 2491 - DNA, 427 bp, Bos taurus
  unsure (410): unsure at all n locations; Clone ID: 11-LIB34-020-Q1-E2-C3
accccacaaaactttggcacaatgaagtgggtgacttttatttctcttctccttctcttcagctctgcttattccaggggtgtgtttcgtcgagatacacacaagagtgagattgctcatcggtttaaagatttgggagaagaacattttaaaggcctggtactgattgccttttctcagtatctccagcagtgtccatttgatgagcatctaaaattagtgaacgaactaactgagtttgcaaaaacatgtgttgctgatgagtcccatgccggctgtgaaaagtcacttcacactctctttggagatgaattgtgtaaagttgcatcccttcgtgaaacctatggtgacatggctgactgctgtgagaaacaagagcctgaaagaaatgaatgcttcctgagccacanagatgatagcccagacc

SEQ ID NO: 2492 - DNA, 443 bp, Bos taurus
  Clone ID: 11-LIB34-023-Q1-E1-C11
tgggtcgacgcaagcctctaaattgagtagtcatattcttttaccactcagaatgtgtgctgttggaaattgtcactaacatattagtcatatttttagtgtatggctcgggtgacattgaggtcaggttaaaaataagtgatattagtactaaatgctaaagatatctttgctgattacttgtcattaatcagtatgtggaagtgaaattacaaattcattgagaaaaagcccccttgcaatttgtacatataaatgctattgacttgcataagttccatccctgtgtaagcacatcctttctctttaaagagaaggaagaatggaaggaagggagggaaaggaagccagttactttcatttaatctaggccatttaactttgtaaagttaaatgagagaaatttccttcaaacagccttaaatttttttttttagaacgtt

SEQ ID NO: 2493 - DNA, 358 bp, Bos taurus
  Clone ID: 11-LIB34-023-Q1-E1-C3
gggtaactcgcaggaaaaggaggtgatacaggacgtggtggcagaaaaatgaagaggatcctggttttcctccttgctgtagcctttgtgcatgctctagagagaggccgagattatgagaaagataaagtctgcaaggaccttgccagcctgggaagagatgacttcacatctttgtcaatggtcctatacagcagaaaatttcccagtggcacctttgaacagatcagccatcttgtgaatgaagttgtttccttaacagtaacctgctgtgcggaaggggccgatcctgactgctaagacaacaggacttcagcattgtctgacaagtcctgtgaaagcaactctccattcccag

SEQ ID NO: 2494 - DNA, 457 bp, Bos taurus
  Clone ID: 11-LIB34-025-Q1-E1-C3
acggtccgagattccggggccaaccaacccgtcggctgactatgacgagggacaagatgacagacctaaggtaggtttgggtgcccgcggtcatcggccctatgacaagaagaaggaagaggcccccagcctgagacctgtgccccctcccatcagcggaggtggctatcgggctcgtcccgccacagcaactgtgggccagaagaaagtggagagaaagccccctgacgctgatggctgcctgcacgcggacccggatctgggtgtgttgtgtcctacaggatgtaagttgcaagatactttggtaagacaggagagaccaatccgaaagagtatagaagatttacgtaatactgtggactctgtttcccggacctcttcttccacctttcaatatataactctgctaaaaaacatgtggaaaggaaggcagaatcaagtacaagataatgaaaat

SEQ ID NO: 2495 - DNA, 413 bp, Bos taurus
  Clone ID: 11-LIB34-026-Q1-E1-C11
cgcaagcctccgcttagcaatttctgcagaaagcatccctaaaggcactcagcaagacaccaccaaactgaccgcatcaaagagaaatttcatcatctacagagggctccttttcaggtgttcctgcaaagcttggtgtgaagacagctttccaggcttacgtgtcttgcatgatgttcctgctgcaaggtgcccagatgctgcagatgctggagaaatccttgaggaagagccttcctatgtccttaaaggtttatgggaccgtcatgcacatgaaccatggaaacccattcaatctaaaggccctggtggacaagtggcctgattttcagaccgtggttatccgccctcaggagcaggacatgaaagatgaccttgatcactacactaatacttaccatgtctactctgaa

SEQ ID NO: 2496 - DNA, 421 bp, Bos taurus
  Clone ID: 11-LIB34-026-Q1-E1-C3
cttggagcctgttctgagatatgccatccaatattttaacaacaacaccagtcattcccacctctttgatctgaaagaagtaaaaagagcccaaagacaggtggtgtctggatggaactatgaagttaattactcaattgcacaaactaattgttccaaggaggaattttcattcttaactccagactgcaagtccctttcaagtggtgatactggtgaatgtacagataaagcacatgtagatgtcaagctaagaatttcttccttctcgcagaaatgtgacctttatccaggggaggattttttaccccccatggtttgtgtcggctgccccaaacctatacctgttgacagcccagacctggaggaagctctgaaccattccatcgcaaagcttaatgcagagcatgatggaaccttc

SEQ ID NO: 2497 - DNA, 329 bp, Bos taurus
  Clone ID: 11-LIB34-027-Q1-E1-C11
agtgttcgaaagtatccggaattggctgggctgtacgcctttgatgcgggtcgggaaaaatggtggtgggcgcggtcatctcggctcttgcgctgatgcttgctgtgtcaaggtgccgccaactgtctccttcaatcagcatgacatcatgcagacgctgctacagaggtgacagactaacagattcccagaaggctatgatttcaatctcattgccacactgtcaggaacgaactgacgaagccataatttccattcgagccccgctgctctattagatcataaagaggggaatactggaaaattgtatcctgcttagcctcttcgct

SEQ ID NO: 2498 - DNA, 397 bp, Bos taurus
  Clone ID: 11-LIB34-027-Q1-E1-C3
gacaggatatacagagaaacttacgatggtggcattgtcttttataaatatggagtaaaagctatttgattcatgtttgctgtgcttaagaactgagtggttttatttattcgattcctgcagttagggaaaaaatccaagaaatgtattgaatactccagaaaatgcagcgtttcaattgcatattttaaactctatcagtaagagctttgcaaaaggtaaaaagataataatctctttctcaaattgtttttatgttaaattatgcaaccagaatttgtagagggagaaaataacctgccatgcctgtgttagtctcagagactatgcctttagaatgccaaaccagattcacatcctgaaagtgttaggagaaccgcaatgtggtgagaaagca

SEQ ID NO: 2499 - DNA, 377 bp, Bos taurus
  Clone ID: 11-LIB34-029-Q1-E1-C11
gatgttaactcaaatattttatttcctctctgagcgctcacctgggaaatctgagaggaacagggaacttgaagaaaggatagtgactgatattaatttaaaagtgccaaaatgctggaatgttagccttcctggttctctttcaggtcaccgctctcaacattcctctcctcatctcaccatcgtgaggaaactgaggcagttaggaatttggccaagatcacaggatgacttcagaagttattgccaactacttctgaccaaactccttcttccgaagctcacttctctttatcttgccagtgatggttttgggcagctctgagacaaactccaccttcctcgggtacttgtatggggctgtcactgacttgaca

SEQ ID NO: 2500 - DNA, 342 bp, Bos taurus
  Clone ID: 11-LIB34-029-Q1-E1-C3
agaaaaagtcttagtgacatttatgtttacatatcatctcatgacctattttttaaaaatatcactgtaattatataagaagaaaagataaagataatttactgagaaatttaaatttttctcagttcccatgaggaagaacacattgctgtcttttgaaaataacttcagcaccatcatggcttgatgtttattcctgctttgaattaatcaggttttttaaaacttgcaattacatttatcctaatacagcactgattttgcagtagactgatttgtaattgctttcctttttccagtaaaataatctggtaataaaaaaaaaaggggagaggagagggg

SEQ ID NO: 2501 - DNA, 353 bp, Bos taurus
  Clone ID: 11-LIB34-030-Q1-E1-C3
cactggatagacgtagaccccccccccagtgcagggttaggacggggggccctgaggggaaactgggagacctgccttttctagcacgttcgcacctgctccctccaccctgcagtgggtaagggtctccacccggggacgggcagcctgccctttgcgtaactttcgtggtttggtgttctgtttatttacgaaccgggcaggttacaggtgtgttgcacgagtcctgaagttttgctgccatatactttttttctttttctaaaatttttggcttgtcagactcgctaagttattttcatgcagcaagggttttgtcgtgcccgaggtggcccaaccggcagaggtgagct

SEQ ID NO: 2502 - DNA, 422 bp, Bos taurus
  Clone ID: 11-LIB34-031-Q1-E1-C3
gcggcggctctggatccactgcccacatcccgctctcgcaggcagacatgagggcagagagaacttccttcctcctggccctggggctcctggtggctgggatccgcagtgtccactgcctcccagaaaatgtggtggtgaaggaccagcacagaagggtggatggccacacgttagcctccagcaacaccgacttcgccttcagcctctacaagcagttggctttgaagaaccccaataagaatgtcatcttatccccgctgagtgtctccatagccttggccttcctgtctctgggggcccgtggctccaccctgacagagatcctggaaggtctcaagttcaacctcacagagatccaggagaaagaaatacaccatagctttcagcacctcctgcaggcgctcaatcaacccagcaac

SEQ ID NO: 2503 - DNA, 407 bp, Bos taurus
  Clone ID: 11-LIB34-032-Q1-E1-C3
caaatatcaacgaagccctgctgcgggccatctttattttgaatgaagccaataacttgggaatgttggaccccaactctgtctcgctgatcatcttggtgtctgacggggatccaacagtaggtgaactgaaattgtcaaaaatccagaagaatgtgaagcagaacatacgagacaacatctccttgttcagtttggggataggatttgatgtggactatgactttttgaagagactctccaatgacaaccgtgggatcgcacaaaggatttacggaaaccaggacacttctgtccaactcaagaaattctacaaccaggtctcaactcccttgctccgaaatgttcagtttaactaatcccaaccgtcagtcacagacgtcactcagaacagcttccataactat

SEQ ID NO: 2504 - DNA, 427 bp, Bos taurus
  Clone ID: 11-LIB34-033-Q1-E1-C11
catcacagtacacaagcgccaggagaggccaaagaacctttactccaggacacaaacgtgtgacaaccgaaatcaggaagacttttctatcagtacccaggtcttagttttcacctgtagttctggatgtacattccatttccatccacaatgtacttttaataagattgtcttaagaaatgtatctgcatgaactgcgtgggaactaaagaaaagaaaaagaaccggacagttttccaaagatgttacaatttcttttgaaaagaaatcgtttattagcaccagtttcttgccactaagctgtttattatacatcctttaattaaaatttaaaactatatatgtaacttctttagatactagcaatgtctctgctaccatttccttcaggtgttgagctttaactctatttatgctgactcaacag

SEQ ID NO: 2505 - DNA, 395 bp, Bos taurus
  Clone ID: 11-LIB34-034-Q1-E1-C3
tctcaaccaaccataaagatattggtaccctttatctactatttggtgcttgggccggtatagtaggaacagctctaagccttctaattcgcgctgaattaggccaacccggaactctgctcggagacgaccaaatctacaacgtagttgtaaccgcacacgcatttgtaataatcttcttcatagtaataccaatcataattggaggattcggtaactgacttgttcccctaataattggtgctcccgatatagcatttccccgaataaataatataagcttctgactcctccctccctcattcctactactcctcgcatcctctatagttgaagctggggcaggaaaaggctgaaccgtgttacctcccttatcaagcaacctagcccatgca

SEQ ID NO: 2506 - DNA, 398 bp, Bos taurus
  Clone ID: 11-LIB34-035-Q1-E1-C11
ctcagtcaccagccctgacctaggacagtgaatcgataatggcactctccatcacgcggggccttctgctgctggcagccctgtgctgcctggcccccatctccctggctggagttctccaaggacacgctgtccaagagacagatgatacatcccaccaggaagcagcgtgccacaagattgcccccaacctggccaactttgccttcagcatataccaccatttggctcatcagtccaacaccagcaacatcttcttctcccccgtgagcattgcttcagcctttgctatgctctccctgggagccaagggcaacactcacactgagatcctgaagggcctgggtttcaacctcactgagctcgcagaggctgagatccacaaaggctttcagcat

SEQ ID NO: 2507 - DNA, 412 bp, Bos taurus
  Clone ID: 11-LIB34-036-Q1-E1-C3
gctcaccatggctcgggcattgagagtgccagttgcactgtggctgttgggcttgtgctggtctttggctaaagcccaccctctggctagagctcctgagcttgggcacggagttgaaggtgggaatgtggccaagccggatccagaagtgacggaacgctgctcggatggctggggctttgatgctaccaccctggatgagcatgggaacatgctgtttttaaaaggggagtttgtgtggaagggtcatgcctgggcccggcagttgatctcagagaggtggaaggatgcccccagtcccgtggatgctgcattccgctatgatcgtaacagtgtccttctgatcaagggggacaaattctgggtatatcctcctgagaagggggaagaatatccaaagttgctccaagag

SEQ ID NO: 2508 - DNA, 320 bp, Bos taurus
  Clone ID: 11-LIB34-038-Q1-E1-C3
atcccgttcctgactgaccctaagaaccacggcctgagtgatgagcatgtttttgaagtcatctgtccatccattcctggctacagcttctccgaggcatcctccaagaagggcttcaactcagtggccactgccaggatcttttataagctgatgctgcggctgggcttccagaaattctatattcaaggctgggactggggggccctgatctgcaccaacatggcccagctggtgcccagccacatcaagggcctgcacttgaacatggctttgattttaagaaatttctacaccctgacccttcctctggggacgtg

SEQ ID NO: 2509 - DNA, 423 bp, Bos taurus
  Clone ID: 11-LIB34-039-Q1-E1-C11
caccaagctaaatcaatttccatcatgacattcctacaagcaacaccatcatcttcacctgtcactgtgctaactggtgggccagtcctccacttggtgcctctttgatcggatttatctcgtcccagcagtgaatgctcattgcacaaaagacaaggttatcatactaatctctgatcaaaatcatttcatggcgtctcatttttcttaggataaaaatcaaattgtaattgtatatttgaaaattgctaagagagtaaatcttaaaagttcttgtcacaagaaaacaaattctgtagctatgtatgataacagatgttatgtagacttactatggtgatcatttcactatgtatgcaaatattgaatcattatgttgtgcatctggaaataacttcattttgtcaatgatacctcaataaa

SEQ ID NO: 2510 - DNA, 395 bp, Bos taurus
  Clone ID: 11-LIB34-040-Q1-E1-C11
cactgcatgtgtagtccttccttgttctgtcctgcatgtttctacctgtgcctgtccctgtgccgccccggggcaagtggagccgctttgccctcgtcttggctcatatggcacctgagggcccaggtttgaggtctgccccaccggaagctctgtcccaggatcctctgaagcctgaccggtcctttgggcatctgagagctcgggatggttgtggggggctggcccctctaacccttggggtcctgcttgggcaaattcagcctttgactggagcttgaatttaggcccccgtcttgtttatgtggccggagaggcagtcaagtgtggcctgtacacgtatgttgttgtggggcatggctgcctgggatctgtgagctccccagctcctcggc

SEQ ID NO: 2511 - DNA, 426 bp, Bos taurus
  Clone ID: 11-LIB34-041-Q1-E1-C11
ccctgacctatgacagtgaatcgataatggcactctccatcacgcggggccttctgctgctggcagccctgtgctgcctggcccccatctccctggctggagttctccaaggacacgctgtccaagagacagatgagacatcccaccaggaagcagcatgccacaagattgcccccaacctggccaactttgccttcagcatataccaccatttggctcatcagtccaacaccagcaacatcttcttctcccccgtgagcatcgcttcagcctttgcgatgctctccctgggagccaagggcaacactcacactgagatcctgaagggcctgggtttcaacctcactgagctcgcagaggctgagattcacaaaggctttcagcatcttctccacaccgctcaacagccaaaccaacagctgcaac

SEQ ID NO: 2512 - DNA, 169 bp, Bos taurus
  Clone ID: 11-LIB34-041-Q1-E1-C3
gctaaatgaaccgctcctgggattaccacttccaagacggcgcaggctctcacctgctcaagcgcacgcaatggaacttgtgcgtggagccgcctgatgtggtcgtctggagcgtgaccctcttctcgctgctggtggccgcaccgtcgctggagatcttgctccgtgg

SEQ ID NO: 2513 - DNA, 422 bp, Bos taurus
  Clone ID: 11-LIB34-042-Q1-E1-C3
attaagtttgtaacggccttcagggacctgcttttcaccacactggcttttccgatatccacatttgtatttctgtcattctggattctctttctctatgatagagaactcgtttaccctaaggccctagataacatctttccagtgtggctgaatcatggaatgggtcctatggatctactctgagacaggtacatgggtatatcctgtgtttgccaaactcagcccaaggggtctagcagccttcttctctctcagctacatctttaccatcggcatctacctatttggagagaagctcaaccactggaagtggggtgatacaatgcaacccaggaagaagaggaagtgatcagacacttttgcaagaactaagacggaagaaaacatgagaattttttcccaatccttttttttttttt

SEQ ID NO: 2514 - DNA, 290 bp, Bos taurus
  Clone ID: 11-LIB34-043-Q1-E1-C11
agacaagacgaagtatgagaacataattctgagaaggcatttagcttaggaaaccagaaattgtataccagtagagaaaaagtgctcttgcctggaaaatcccatggacaggggagcctggttggctgcagtccgtggggtcgctaggagtcggacaagactgagcgacttcactttcacttttcactttcatacattggggaacgaaatggcaacccactccagtgttcttgcctggagaaatccacggacgggggagcctgaatggctgccgtctaaggggttccaca

SEQ ID NO: 2515 - DNA, 129 bp, Bos taurus
  Clone ID: 11-LIB34-043-Q1-E1-C3
agcatgcgctgcggccggaaggtcgtccctgtgaccggcttgggttttggagctgctgtcgccatgttgtcggttgccgcccgctcgggcccattcgcgcccgtcctatcggccacgtcccgcggggtg

SEQ ID NO: 2516 - DNA, 419 bp, Bos taurus
  Clone ID: 11-LIB34-044-Q1-E1-C3
agccttcaaaaaaaacttggatgactttacaaatgacgggagtttgaagttccaacaaatgccaatcgtttaaattgatgggattaaactggtgcagaacaaaaccattctcaactaccttgccaccaaatacaacctctacgggaaagacatgaaagagagagccctgattgatatgtattcagagggtgtggcagatttgggggaaatgatcatgcactttccactgtgcccacctgctgaaaaagatgccaagctgaccctaatccgagaaaagacaacaaaccgttatctccctgcatttgaaaatgtgctgaagagccatggacaagactacctggtgggcaacaagctgatcaaggctgacatccacttggttgaacttctctactatgtggaagagctggaccccagccttt

SEQ ID NO: 2517 - DNA, 380 bp, Bos taurus
  Clone ID: 11-LIB34-045-Q1-E1-C3
gacagagaccaagatcctcctgcaggggactccggtggcccaaatgacagaggacgccatcgacggagagcggctgaagcaccttatccagaccccctccggctgtggggagcagaacatgattggtatgacgcccacggtcatcgccgtgcactacctggacagcaccgaccagtgggagaagttcggcttggagaagcggtaggagtccctggagctcatcagagaggggtacacccagcagctggccttcagacaagaaagctcagcctacgccgccttccaatatcgggcccccatcacctggctgacagcctacgtggtcaaggtctttgcactggccgccagactcatcgccataaactccaatgacctctgtg

SEQ ID NO: 2518 - DNA, 317 bp, Bos taurus
  Clone ID: 11-LIB34-046-Q1-E1-C3
gacagaactttgggacaatgaactgggtgacttttacatctcttctccttctcttcagctctgcttaatcgagaggatgtgtttctgtcgaggatacacacaatcagtgagattgctcaacggtttagagagttgggagaagagcattttaaacgcctgatacggaatgccgtttcgcaatatcgctaggagatgtccatttgatgagcatatatgattagtgaacgatctaactgagtttgcaaaaacatgtgttgctgatgagtcccatgccggctgtgaaaagtcacttcacactctctttggagatgaattgt

SEQ ID NO: 2519 - DNA, 318 bp, Bos taurus
  Clone ID: 11-LIB34-047-Q1-E1-C11
ctgggatctttttattacttttctctgataaaaggacaactacttgtgtcatgtcctactctcaactcatagattttttactgcttggcttcaagcataataatttggcgcatgtctaccaaaacatggcattagtcacttgcgtaacgtggccactaatagatttatccgtctacctccgtttttaactatcttttccacaaggcagcttgaaatgttggtcctaagcttcacttttggcatgcctttctgctaaacctgtgaatgtatgacttcttcactccaaatgcgcgactcagaatgtatgcatatcttaac

SEQ ID NO: 2520 - DNA, 443 bp, Bos taurus
  unsure (419),(421): unsure at all n locations; Clone ID: 11-LIB34-047-Q1-E1-C3
cggacgcgtgggttcagctgggtgctcctcttgagtcagccctatccacggcagagatgttttccgtgagggacctctgcctggtcctgagtttggtgggtgcaattaagacagaagatggtagtgatcctcccagtggtgactttttaactgaaggaggaggggtgcgtggcccaagacttgtggaaagacagcaatctgcctgcaaagagacaggctggcccttctgctctgatgaagactggaatacaaaatgcccttctggctgcaggatgaaagggttgattgatgaagtcgatcaagattttacaagcagaataaataaactaagagattcactatttaattatcagaagaacagtaaggactctaatacattgaccaagaacatagtggaactaatgagaggggattttgcnanagctaacaacaatgataataca

SEQ ID NO: 2521 - DNA, 240 bp, Bos taurus
  unsure (22): unsure at all n locations; Clone ID: 11-LIB34-048-Q1-E1-C3
agcctgactattcgcaagtacncatccgaagactgggcacccctaaggtaatacactggtgcttgagctgtgtacatcaggaacagcactacgcaatggtaggcgcgctgaaagacgtcatacgggaaaacagctcggacacgatcagatcgacaatgtagtatgtaactgctcatgcaattgtaagaggcatctgtatcgtaataccagacatgcttggaggattcggtcatggacatg

SEQ ID NO: 2522 - DNA, 429 bp, Bos taurus
  unsure (350): unsure at all n locations; Clone ID: 11-LIB34-049-Q1-E1-C3
caccaatggagccactgctcggaaatattcccacctggtggatgttggacaggttggggtgaatgtgcccattccagtgcctttgccaatgttctcattcacgggctctcgcgcttccttcaggggagacaccaatttctatggcaaacagggcatccaattctatactcagctaaagactatcacttctcaatggaaagaagaagatgcttctctttcctcacctgctgtagtcatgcctaccatgggccgttagaaacaagtctgttccagactcggtgcatactgagtaatcactgtttattcttgaccaactccaactgcctactttactcagatcagatccctgngattggaataccttgtaactaaagtctttctcatgaccattgaccccggttaagttgctaataaggagactcctagtgt

SEQ ID NO: 2523 - DNA, 437 bp, Bos taurus
  unsure (4),(335): unsure at all n locations; Clone ID: 11-LIB34-050-Q1-E1-C11
ttcncggtatccacccacgggcccggattaaactgattagttctctggcagttctgttctctgagggattggctttctttaaacgttatttatttactgtatttgtttttggccatgctgggtctttgttgctgcacatcagcgtttctctagttgcattgagcaggggcagccctctgttgtggagcgccggcttctcattgctgtggtttctctcgctatggagcatagggaagctccgggtgtacgggcttcagtaactgcagcacgcaggctcggcacttgcagcttgtgggctgagttactctgcagcacgtgggatatccctggactanggatcaaaaccatgtccactgcactggtaaatggattcttaaccactgaagcactgggaagtctgggattatctcgttcaatccaccctttggtcctttttg

SEQ ID NO: 2524 - DNA, 413 bp, Bos taurus
  unsure (404): unsure at all n locations; Clone ID: 11-LIB34-050-Q1-E1-C3
ccacccacgcctccggtcccaaacgaccaagacactacatggtgccttttgtgtgtttgagcagaacaagggcctgtccctgaggcgacaacactcaaagtttccttcgcactattttgggggcgttgcacaaacagtgatgttcttcaagtctgtgtcgacgatgctcaaatatgactatatgtgggatatggtcttctactccaatggggccatagaagtcacattgcatgccacgggcgacatcagctcagcgttcctcgttggtgctgccccaatatacggagaccatgttggggaacacacactgtgccccgtccagaatgacagtgctcactacaacgtggatccggacgtgtgaggactggcaaactgggtctgtgctgatgatatcgcatttgtcnccacagcta

SEQ ID NO: 2525 - DNA, 246 bp, Bos taurus
  Clone ID: 11-LIB34-051-Q1-E1-C11
atcaaggagggcgactgtccttttcaaagtaacaaaacttggcaggactgtgactacaaggactctgcacaagctgccacaggagagtgcacagcgaccgtggccaagagagggaatatgaagttctccgtggctatccagacctgcctgatcactccagccgagggccccgtggtgacagcccagtatgagtgccttggctgtgtgcatcccatatctaccaagagccccgacttggagcctgtt

SEQ ID NO: 2526 - DNA, 235 bp, Bos taurus
  Clone ID: 11-LIB34-051-Q1-E1-C3
attcgacccgatattgttaactttgttcacaccaacttgcgcaaaaacaacagacagccctatgctgtcagtgaattagcaggtcatcaaaccagtgctgagtcttggggtaccggcagagctgtggctcgaattcccagggttcgaggtggcgggactcaccgttccggtcagggcgcttttggaaacatgtgtcgtgggggccgcatgtttgcgccaactaagacctggcgac

SEQ ID NO: 2527 - DNA, 243 bp, Bos taurus
  Clone ID: 11-LIB34-052-Q1-E1-C3
gagctatagagaaagtaccgcaagggaacgatgaaagaaaaaactaaaagtataaaaaagcaaagattaccccttgtaccttttgcataatgaattaactagtataagacttaacaaaatgaattttagctaagcagcccgaaaccagacgagctactcacaaacagtttaccaagaactaactcatctatgtggcaaaatagtgagaagatttgtaagtagaggtgacatgcctaacgagcc

SEQ ID NO: 2528 - DNA, 243 bp, Bos taurus
  Clone ID: 11-LIB34-054-Q1-E1-C3
gatgatttcttgcaacttcgaaaaatttaaaaccatgaaacatctattactgctacttttctgtgcttttatagttcaggcccaatttcctactgactatgacgagggacaagatgacagacctaaggtaggtttgggtgcccgcggtcatcggccctatgacaagaagaaggaagaggcccccagcctgagacctgtgccccctcccatcagcggaggtggctatcgggctcgtcccgccac

SEQ ID NO: 2529 - DNA, 344 bp, Bos taurus
  Clone ID: 11-LIB34-055-Q1-E1-C11
acagaaacgtaaactataacctaggggtttctgttggatggttggcaactaagaatggaggaagaacaacaaagacatgttctccactttcttatttctcaaaacaatgttatcttcgtctttttaatcttaggtttttaacagattaaacctttaaagcaagaagtgaattctgtcttttcagacccagaaatacacatgaatactttgctatgattacattttagatattcatttatacttttctatatctaagactcatatcttgatttttactatcatatatgaatgaagcctttatatcttgtttttttgccaatcttgaaagatagatgggaaaagat

SEQ ID NO: 2530 - DNA, 355 bp, Bos taurus
  Clone ID: 11-LIB34-055-Q1-E1-C3
agcttcatgaagccgcaggtcgtgttcgttcttggcggtcccggcgccggcaaggggacccagtgcgcccgcatcgttgagaaatatggctacacacacctttctgcaggagaacttctccgtgatgaaaggaaaaacccagattcacagtatggtgaactcattgaaaagtacattaaagatggaaagattgtgccagttgagataaccatcagtttgttaaggagggaaatggatcagacaatggcagccaatgctcagaagaataaattcttgattgatgggtttccaagaaatcaggacaaccttcaaggctggaataagaccatggatgggaaagctgatgtatcttttg

SEQ ID NO: 2531 - DNA, 376 bp, Bos taurus
  Clone ID: 11-LIB34-056-Q1-E1-C3
aggcagcgccggcgtgacccacccgccatgctccccccagcgctcgtcttgctgttggggtttctctgccacgttgctatcgcaggacgaacctgccccaagccagatgagctaccgttttccacggtggttccactgaaacggacctatgagcccggggagcagatagtcttctcctgccagccgggctacgtgtcccggggagggatccggcggtttacatgcccgctcacaggactctggcccatcaacacgctgaaatgcatgcccagagtatgtccttttgctgggatcttagaaaacggaacggtacgctatacaacgtttgagtatcccaacaccatcggcttttcttgccacacggggttttatctga

SEQ ID NO: 2532 - DNA, 225 bp, Bos taurus
  Clone ID: 11-LIB34-057-Q1-E1-C11
accaatcataattggaggattcggtaactgacttgttcccctaataattggtgctcccgatatagcatttccccgaataaataatataagcttctgactcctccctccctcattcctactactcctcgcatcctctatagttgaagctggggcaggaacaggctgaaccgtgtaccctcccttagcaggcaacctagcccatgcaggagcttcagtagatctaac

SEQ ID NO: 2533 - DNA, 223 bp, Bos taurus
  Clone ID: 11-LIB34-057-Q1-E1-C3
gtgggacagagacaacgacaactacgaagggaactgtgcgaaagaggatcagtctggctggtggtttaacaggtgtcactctgcaaacctgaatggcttctaccacaagggtccctacaccgctaaaacggacaatgggattgtctggcacacctggcatggatggtggtattccttgaaatctgtggttatgaaaattaggccaaatgatttcattccaaat

SEQ ID NO: 2534 - DNA, 227 bp, Bos taurus
  Clone ID: 11-LIB34-058-Q1-E1-C3
gcttgtctgacaaggacctccgtgctgaggtggacacgttcatgtttgagggtcacgacaccacagccagtggcatctcctgcatcctctatgctctagcctcccacccacaacatcaccagacgtgtcgggaagagatccagaggctcctcgccgatggcgcttccaccacctgggaccatctggaccagatgccctacacgaccatgtgcatcaacgaggcgatg

SEQ ID NO: 2535 - DNA, 317 bp, Bos taurus
  Clone ID: 11-LIB34-060-Q1-E1-C11
ccggactcctcaaaggatgagtgcatggtgaagtggtgtgcaattggtcaccaggagaggacaaagtgtgatcggtggagtgggttcagcggcggggcaatagagtgtgaaacagcagagaacactgaagagtgcatcgccaagatcatgaaaggagaagctgatgccatgagcttggacggaggctacctctacatagcaggcaaatgtggcctggtgcctgtcctggcagagaactacaaaactgagggtgaaagttgcaagaacacaccagaaaaagggtatcttgctgtagctgtggttaaaacatcagatgc

SEQ ID NO: 2536 - DNA, 240 bp, Bos taurus
  Clone ID: 11-LIB34-060-Q1-E1-C3
aaaacgtaaactataacctaggggtttctgttggatggttggcaactaagaatggaggaagaacaacaaagacatgttctccactttcttatttctcaaaacaatgttatcttcgtctttttaatcttaggtttttaacagattaaacctttaaagcaagaagtgaattctgtcttttcagacccagaaatacacatgaatactttgctatgattacattttagatattcatttatactt

SEQ ID NO: 2537 - DNA, 233 bp, Bos taurus
  Clone ID: 11-LIB34-061-Q1-E1-C3
ccacgcgtccatttatttttttttttttttttttttttttttttttttttttttttttttcttttttttatattttttttttttttatccagggaaataccagactaagtccaaaggccgcactggcaattccaagctcccattgcacagcttcaggacaccgcttaggctacagcgaaaacttggaacggcaaaccggatcgagggagtacaagccgagggaagcctccacg

SEQ ID NO: 2538 - DNA, 211 bp, Bos taurus
  Clone ID: 11-LIB34-062-Q1-E1-C11
gcttttccaatcccctcatgggaaggacctgctgtttaaggactctgctgatgggtttttaaagattccttctaagatggattttgagctgtacttgggatatgaatatgtcactgctcttcagaatctaagagaaagtaaacccccggactcctcaaaggatgagtgcatggtgaagtggtgtgcaattggtcaccaggagaggacaaaa

SEQ ID NO: 2539 - DNA, 414 bp, Bos taurus
  Clone ID: 11-LIB34-063-Q1-E1-C3
ccatttttcccagaagatcggccttgcctccctgggtgaacctgatgagtacattgaaaaacttgcaacaatttactggtttactgtggaatttgggctctgcaagcattgagactccataaatgcatatggtgctgggctcctgtcatcctttggtgaattacagtattgcctatcatacaagccaaagctccttcctctggaactggagaagaccgctgtccatcagtatacgatcacagagttccagcctctgtattatgtggctgagagttttaatgatgccaacgataaagtgaggaactttgctgccacaatcccacggcccttctcagttcattatgacccatacactcaacggattgaggtcttggacaacacccagcatcttaagattttggctgactccatcac

SEQ ID NO: 2540 - DNA, 219 bp, Bos taurus
  Clone ID: 11-LIB34-065-Q1-E1-C3
gcctcgagcagggagctggtggctcttccatccccagaccagccaagcctgtgagtgacaccccagacagaggaaccagagccatgcggagtctcagcggactgctgttgttactgactgcctgcctggcggtaaacgccagctccgtgcccacattgcccgatgacattcaagtgcaggagaacttcgacctgtctaggatctatgggaagtggttca

SEQ ID NO: 2541 - DNA, 239 bp, Bos taurus
  Clone ID: 11-LIB34-067-Q1-E1-C3
agaacattcaagatcgggccaaccacttgggggtgatggctggtgacatctactctgtgtttcgcaatgctgcctcctttaaagaagtgtctgatggcctcctcgcttccagcaaggggcagctgcagaaaatgaaggagtctttagatgatgtgatggattatcttgttaacaacacacccctcaactggctggtaggtcccttttatccccaggtgaccgagtctgagagtgctcac

SEQ ID NO: 2542 - DNA, 215 bp, Bos taurus
  Clone ID: 11-LIB34-069-Q1-E1-C3
acgctgctctgacaaaatacaacagtgaaaacaagagtggcaaccagtttgtattgtaccgcataaccgaggttgccagaatggataatcctgacacattttattccttgaagtaccaaatcaaggagggcgactgtccttttcaaagtaacaaaacttggcaggactgtgactacaaggactctgcacaagctgccacagggagagtgcacagc

SEQ ID NO: 2543 - DNA, 246 bp, Bos taurus
  Clone ID: 11-LIB34-070-Q1-E1-C11
gagccactatgggtccgcccggcccagggcaccgcgccgctcgagcaccggcctagagccagaactgaagctacaagatggctgaccaggacccagggggcatcagccctctccaacaaatggtggcatccggcgcgggggctgtggtcacctccctcttcatgacccccctggatgtggtgaaggtacgcttgcagttctcagcgcccctcagtggccagttgagctaaatggcctcccctccac

SEQ ID NO: 2544 - DNA, 409 bp, Bos taurus
  Clone ID: 11-LIB34-071-Q1-E1-C3
agtgagctcactgcccacgcaaatggattacaagggccagaagctagctgaacagatgtttcagggaattatccttttttctgcaatacttggatttatctactggtacctgactgaacagttcgggtggactgtctatatagttatggctggatttgctttttcgtgtttgctgacacttcctccatggcccatttatcgccggtaccccctcaagtggatacctgttcaagactcaagcacagaagacaagataccaggggaacgaacagttaagagacatgctaaaaataattgatcgggggaacgaaaagttaagagacatgctaaaaattattgatcggtgttttcatgattcagctttactgttgtacctgcttttgttatgtgtgacatgagctaaattgtt

SEQ ID NO: 2545 - DNA, 355 bp, Bos taurus
  Clone ID: 11-LIB34-072-Q1-E1-C11
acagcaggcggcggacggccgggcctgcggaggagactgtggcttaggacactgccagcccaggatgatgcaagcccacgagctgttccagtactgttcggctgccagagctgcttgacttccggcagtacgtgcgcacccttccaaccaacacgctcatgggcttcggcgcattcgcggcgctcaccaccttctggtacgccacgcggccacgggccctgaagcctccatgcgacctggccatgcagtcagtggaggtgccgggcagtgatggtgcccggagatccacgctcctggacagtgacgagcccctggtgtatttctacgatgacgtcagaacgttatacgaaggttt

SEQ ID NO: 2546 - DNA, 416 bp, Bos taurus
  unsure (327),(334),(374): unsure at all n locations; Clone ID: 11-LIB34-072-Q1-E1-C3
gccctgacctaggacagtgaatcgataatggcactctccatcacgcggggccttctgctgctggcagccctgtgctgcctggcccccatctccctggctggagttctccaaggacacgctgtccaagagacagatgatacatcccaccaggaagcagcgtgccacaagattgcccccaacctggccaactttgccttcagcatataccaccatttggctcatcagtccaacaccagcaacatcttcttctcccccgtgagcattgcttcagcctttgctatgctctccctgggagccaagggcaacactcacactgagatcctgaanggcctgngtttcaacctcactgagctcgcagaggctgagattcacanaggctttcagcatcttctccaaaccctgaaccagcaaaacca

SEQ ID NO: 2547 - DNA, 431 bp, Bos taurus
  unsure (416): unsure at all n locations; Clone ID: 11-LIB34-073-Q1-E1-C3
gacccacgcgtccagtgtgccaggtccgctggggtaaccggccgcgctggtccctggctgcgccagcgcaggccgcggaggtctctgggtcagagccagcgctgtgctctttcggtctgttccgtgatggcagccgccgccgccgtggtcaccccgtcgggtttggaggatgaggtgtctcggtcccgcggcgaaggagcgggggagatggtcgtggagcgggggcccggcgcggcctaccacatgtttgtggtgatggaggacctggtggagaagctgaagttgctccgctatgaggaggatctcctccggaagaacaacctgaagcccccgtccagacactattttgcactgcctaccaatcccggggaacagttctacatgttttgcacccttgctgcttggttaattaacanagcaggacgcccctt

SEQ ID NO: 2548 - DNA, 208 bp, Bos taurus
  Clone ID: 11-LIB34-074-Q1-E1-C3
attcacatcaaaactggaaggaatgtttagggatatgagcatctcaaacacaactatggatgagttcaggcaacatctacaggctactggggtatctttaggtggtgttgatctcacagtccgggtgctcacaacaggatactggcccactcagtcagccacaccaaagtgcaacatcccaccagcaccaagacatgcttttgagata

SEQ ID NO: 2549 - DNA, 266 bp, Bos taurus
  Clone ID: 11-LIB34-075-Q1-E1-C3
tgggcgggtgtcaatggcccccggtgtaaaattcgttgtccctgcctttggaaagacctaccctgtcgaatacctggacagcaccaagttggcaggttatatgcacacactggtacagaacctggtcaacaatgggtacgtgcgggatgagacagtgcgggccgccccctacgactggcggctggagcctagccagcaggaggagtactacctgaagctttctggactggtggaggagattcatgccacatatgggaagcccgtct

SEQ ID NO: 2550 - DNA, 314 bp, Bos taurus
  Clone ID: 11-LIB34-076-Q1-E1-C3
ccacgcgtccggtgaacgctgcaaggcaagctgcaaccccaggactggacctcaatagatgggccgctgcagagtgtacagacgctgctgctcatggttctgcagcaggcctccggccgcccccacggtgcccatggcctcttcctgcgctaccgcgtggaggccttgaccctccgtggcatcaataacttccgccagtataactatgatctggtggcagttggcaaagctctggatggcatgttccgcaagcccaaccatcttctggagcgcctgcaacaattcttcttcttccaactgctccctgcgctctc

SEQ ID NO: 2551 - DNA, 456 bp, Bos taurus
  Clone ID: 11-LIB34-077-Q1-E1-C11
ctagataaagtcgtattatgtggagaaggtgaacatcaagccccaggtggatcgctacttgttgaagaacggacgccgcatcatcctgctggccgagggccggctggtcaacctgggctgtgccatgggccatcctagctttgtgatgagcaactccttcaccaaccaggtcctggcgcagatcgagctctggacccacccagacaagtaccccgtcggagtccacttcctgcccaagaagctggatgaagcagtggctgaagcccacctgggcaagctgaatgtgaagctgaccaagctgactgagaagcaggcccagtacctgggcgtgtcccgtgaaggcccgttcaagcctgatcactaccgctactgagaaccagaactgccctttgccttccagctgctgtccttggctgggtcccacctctcctccccaagagcaaatggcaccacctt

SEQ ID NO: 2552 - DNA, 234 bp, Bos taurus
  Clone ID: 11-LIB34-077-Q1-E1-C3
gtagtgtcccattattatgtggtttggggatttttcatttgttttttaaaattaaccatgtcagctgggattagactccctagaatctatcagtgggaaagtaacattgaaaaaatgcttttgggaattcaaatttcagacaaaaagtgcttaagagctggtattttttctaagtgcttctatttataccagaagcattaaagtaacccagtgccaagttccattcctgaaaaa

SEQ ID NO: 2553 - DNA, 432 bp, Bos taurus
  unsure (120): unsure at all n locations; Clone ID: 11-LIB34-078-Q1-E1-C3
ccatggccgccttacgtgccctgctgccccgcgtccgcgccccgctgcggccctggctcttctgcccggtgcagcgctccttcgcctcgagcgcagcctttgagtacatcatcacagcanagaagggaaggaacagcaacgtggggttgatccagctgaaccgccccaaggccctcaatgcgctctgcaacggcctgatcgtggagctcaaccaggcactgcaggccttcgaggaagacccagccgtgggggccattgtcctcacaggcggggagaaggtatttgcagctggagccgacatcaaggaaatgcagagcctcacgttccagaactgttactctggcgggtttttgagccactgggaacaactcacacgtgtcaagaagccagtcatagctgctgtcaatggctatgcccttggtggtggctgtg

SEQ ID NO: 2554 - DNA, 378 bp, Bos taurus
  Clone ID: 11-LIB34-079-Q1-E1-C3
gcacactccgagtgtaatcttctacattctttcattgctttcttcagcatgcctggcatatgttgctacccgagacaactgctgcatcttagatgaaagatttggtagttattgcccaactacctgtggaattgcagatttcctgaataattaccaaaccagtgtagacaaagatctacgaactttggaaggcatcttatatcaggttgagaacaaaacatcagaagccagagagctggtcaaagcaatccaaatcagctataaccctgatcaaccatcaaagccaaataacatagagagtgctaccaagaattccaagagtatgatggaagaaattatgaaatatgaaacactgataacaacacatgaatcaacaat

SEQ ID NO: 2555 - DNA, 407 bp, Bos taurus
  Clone ID: 11-LIB34-080-Q1-E1-C11
aatggggagctgatgaagtttaatgttgatgcattcaagaggttcaataagtacatcaacactgatgcaaagttccaggtgttcctgaagcagatcaacagctcgctggtggactccaacatgctggtgcgctgcgtcaccctgtcactggaccgattcgaaaaccaggtggacatgaaagttgcggaggtcctgtccgagtgccgcctgctcgcctacatatcccaggtacccacacagatgtccttcctcttccgcctcatcaatatcattcacgtgcagacgctgacccaggagaacgtcagctgcctcaacaccagcctggtgatcctgatgctggcccgacggaaagagcgactgcccctctacctgcggctgctgcagcggatggagcacagcaagaagta

SEQ ID NO: 2556 - DNA, 437 bp, Bos taurus
  Clone ID: 11-LIB34-080-Q1-E1-C3
cgggccgagccacgcgtccactctaacagttgatggatttaaggcaaatcttgtctttaaggagattgagaagaagcttgaagacgaaggagagcagtttgtgaagaaaatcggtggtatttttgcctttaaggtaaaggatggccctgggggtaaaaaacccacctgggtggtggacttgaaaaatggcaaaggataattgctccctaactcagataaaaaggccaactgcacaattacaatggccaactcggacttattggctttgatgactggtaaaatgaatcctcagacggccttctttcaaggcaaattgaaaatcaatggcaacatgggtctggctataaagttacaaaatctccagcttcagcctggcagagctaagctgtgaactcgctttgcctcctttgaaaatcaagatgaaatatatagatata

SEQ ID NO: 2557 - DNA, 434 bp, Bos taurus
  Clone ID: 11-LIB34-081-Q1-E1-C11
gtcaagttgcttttaagcttaatttttgtctttaactaattttttacctttgggaaagtcagagttctggaagtacaatcaagcctttattaactggagtacgtaaagaatgagctaataactgaatttagttcaacaagggctaagcaacacattttttaaatccttatttattgtagagtattagtatactgtcctaaaaattatatgtaaaatatggtttcatcttagatgatttaggatcttgcaatgccttactgttgtcattctggcataaattcccatgacaaggtactcaagttgatactggaagctgagcttgactatacaactaacattaagcattcatgaaaaactgctttgtttaataaaatctgatcagagttcttatgattactttccccttattgccgaaagtagattgcaataaaacc

SEQ ID NO: 2558 - DNA, 415 bp, Bos taurus
  Clone ID: 11-LIB34-081-Q1-E1-C3
gtcgacggacgcgtccgaaaattacccaaggctgagtttgtagaagttaccaagctagtgacagatctcacaaaagtccacaaggaatgctgccatggtgacctacttgaatgcgcagatgacagggcagatcttgccaagtacatatgtgataatcaagatacaatctccagtaaactgaaggaatgctgtgataagcctttgttggaaaaatcccactgcattgctgaggtagaaaaagatgccatacctgaaaacctgcccccattaactgctgactttgctgaagataaggatgtttgcaaaaactatcaggaagcaaaagatgccttcctgggctcgtttttgtatgaatattcaagaaggcatcctgaatatgctgtctcagtgctattgagacctgccaaggaatatg

SEQ ID NO: 2559 - DNA, 354 bp, Bos taurus
  unsure (267): unsure at all n locations; Clone ID: 11-LIB34-084-Q1-E1-C11
acacgcgtccactttttattatcaccgaagtactattctttaccggatttttctgagctttctaccactcaagcctcgcccccacccctgaactaggcggctgctgacccccaacaggcattcacccactaaaccccctagaagtcccactgctcaacacctctgtcctattggcttccggagtttctattacctgagcccatcatagtttaatagaaggggaccgaaagcatatattacaagccctatttatcaccatcacattangagtctacttcacactactacaagcctcagaatactatgaagcaccttttactatctccgacggaaattaccgctcaactttttttg

SEQ ID NO: 2560 - DNA, 418 bp, Bos taurus
  Clone ID: 11-LIB34-085-Q1-E1-C3
ttccaggccgacccagcgcgtccgagcgaaaccacagccaagggaacgggcttggcggaatcagcggggaaagaagaccctgttgagcttgactctagtctggcacggtgaagagacatgagaggtgtagaataagtgggaggcccccggcgcccccccgtttcccgcgagggggcggggcggggtccgccggccttgcgggccgccggtgaaataccactactctgatcgttttttcactgacccggtgaggcgggggggcgagccccgaggggctctcgcttctggcgtcaagcgcccggccgcgcgccggccgggcgcgacccgctccggggacagtgccaggtggggagtttgactggggcggtacacctgtcaaacggtaacgcaggtgtcctaaggcgagctcaaggaggac

SEQ ID NO: 2561 - DNA, 351 bp, Bos taurus
  Clone ID: 11-LIB34-086-Q1-E1-C11
ggggcatctccatctcaataagggtcggggatcgcaagtggcacttgcatcgtggctgttggccttgtggtagactgtggcttcatcccatcctccaggaacagctcccgatgttgagcactgcgattaagtgtagaatgtgagtcatctcgatccacaactgacagaacgcagatcgtatggctgctgctttgatccgacagactggatgagcatgggaacatgcagtgtttaccaggggagtttgtgtcgcatggtcatggctgcgaccggcagttgatctcacagatgtgaaacgatgcccctagtcacctgggtgctgcattgtgctatgctcggtacaatgtcctt

SEQ ID NO: 2562 - DNA, 390 bp, Bos taurus
  unsure (347): unsure at all n locations; Clone ID: 11-LIB34-086-Q1-E1-C3
ccgggtagaccacgcgtcccgttacatccagatacacactagagtgagattgctcatcggtttaaagatttgggagaagattattttaatcgcctgatactgattgccttttctcagtagctccagcattgtccatttgatgagcatgtgtaattattgaacgaactgtctgagtttgcgaaaccatgtgttgctgatgagtcacatgccggctgtgaaaagtcacttcagacgctctttggagataaattgtgtatagttgcatcgcttcgtgaaacctatggtgacatggctgactgctgtgaaaaacaagagcctgaaagaaatgaatgcttcctgagccactnagatcatagcctagacctcactaaattgaaaccagaccccaat

SEQ ID NO: 2563 - DNA, 443 bp, Bos taurus
  Clone ID: 12-BOVMS1-004-Q1-E1-C11
tccggtcgaccacgcgtccaattattttttttttttttttttttgtcattcataaatacaaaattttatttgcacttcattagtgtagaaggaccacaatgcttctcatatcacaacactcaagacacgccaagttattcaaatacataatgacttatttaccttgactaaacaaacagtgcagtttaataaaagatttggtgcagaaagaaagatccgtcaagctggtgtgattgactaaccacatccacaaagcacatcattaatccactatgatcaagttggggggattctggtgaagggttctgaatatctccctcttcatccctcccaaaatctggaatacttattctattgagctattacacaagttttaacaccttcctcgtgttatgtgtaaaataataaataaatttaagaaaaccattttaaaattatgcaca

SEQ ID NO: 2564 - DNA, 464 bp, Bos taurus
  unsure (453): unsure at all n locations; Clone ID: 12-BOVMS1-004-Q1-E1-C7
aatacttccagttcctttatcctaaaactggtgtaacaggaccctatgtgcttggaactgggcttatcttatatttactctccaaagaaatatacgtgataactccagagaccttctctgccatatcaacaatagggttccttgtctatatagttaaaaaatatggtgcttctgttggggaatttgctgataaactcaatgagcaaaaaaattgcccaactggaagaggtgaaacaggcgtccatcaaacaaatccaggatgctattgatatggagaagtcacagcaggcactggttcaaaagcgccattacctttttgatgttcaaaggaataacattgctatggccttggaggttacttaccgggaacggctgcatagagtatacagggaaggtaaagatcgcctggactatcacatctctgtgcaaaatatgatgcgtcagaaggaacangagcacatgat

SEQ ID NO: 2565 - DNA, 346 bp, Bos taurus
  Clone ID: 12-BOVMS1-006-Q1-E1-C11
aaaaaaaataaaatataaaaaaaattaaataaaaaaaaaaaaaaaaaaaaaaaaaaaaaaaaaaaaaaagaaaatacctgtgaaaaaaagggaggaaacacaaaaggaataaaaacattaattacgcttgaatgcgaaatcaaaaattcttctaaaaagacacaaaaatttggttgccgtgcccgtcgttttatccttactttccctgggattccccttcctttcccctctttaatgtcctttaaattcatttcatttttccgtccttttgtttaataccgattgggaaaaaactgttttcccttacctaaatttccttgccttaaatccccctttcttcacctcc

SEQ ID NO: 2566 - DNA, 109 bp, Bos taurus
  Clone ID: 12-BOVMS1-007-Q1-E1-C7
aaaagaaaaaaaaaaaaaaaaaaaaaaaaaaaaaaaaaaaaaaaaaaaaaaaaaaaaaaaaaaaaaaaaaaaaaaaaaaaaaaaaaaaaaaaaaaaaaaaaaaaaaggg

SEQ ID NO: 2567 - DNA, 417 bp, Bos taurus
  unsure (240): unsure at all n locations; Clone ID: 12-BOVMS1-008-Q1-E1-C11
acgcgtccacggacaacactttgttcgctcatttcacactgtctctgaccatagagagtgcctgggtagcttggaaaagtaacatcacctggccatcccctcagttaaccaagttattcatgcattcctatgccagagcagtgtcaactcttggaggttcaggggtgcagccaacgccttcgtgtggtagttctaaatttaaaccagaaactggggcaactaagcaatgagccacagcanaaaataaagaacaaaataaagctgtcgttaaatttaaaaacaacaaaatattactaactgcccaaaatatcaatttgatgtagttcttttcatgcaagtttaaattcaattgttagttaaaattgttggacctccttgagatagtaacaacaaaattaagcaagctatctgcacctc

SEQ ID NO: 2568 - DNA, 482 bp, Bos taurus
  Clone ID: 12-BOVMS1-008-Q1-E1-C7
ccgggccgaccacgcgtccgagtaattgcataaaacttaaacttttatatccagagattcaaatcctctccttaacaaaatgttcataattaacatcttaatactaattattcccatcctattggccgtagcattccttacgttagtggaacgaaaagttctaggctatatacaactccgaaaaggtccaaatgtcgtaggtccatatggcctacttcaacccatcgccgatgcaatcaaacttttcattaaagaaccactacgacccgctacatcttcagcctcaatatttatcctagcacctatcatagctttaggcctagccttaaccatgtgaattcccctaccaataccctatcctcttatcaacataaacctaggagtcctatttatactagccatatcaagcctagccgtatactccattctctgattaggctgaacttccaactcaaaatacgcaactaatcggagccctacga

SEQ ID NO: 2569 - DNA, 386 bp, Bos taurus
  unsure (307): unsure at all n locations; Clone ID: 12-BOVMS1-009-Q1-E1-C7
atgcgacgtcatagctcttctatagtgtcacctaaattcaattcactggccgtcgttttacaacgtcgtgactgggaaaaccctggcgttacccaacttaatcgccttgcagcacatccccctttcgccagctggcgtaatagcgaagaggcccgcaccgatcgcccttcccaacagttgcgcagcctgaatggcgaatgggacgcgccctgtagcggcgcattaagcgcggcgggtgtggtggttacgcgcagcgtgaccgctacacttgccagcgccctagcgcccgctcctttcgctttcttcncttcctttctcgccacgttcgccggctttccccgtcaagctctaaatcgggggctccctttaaggttccgatttagtgc

SEQ ID NO: 2570 - DNA, 435 bp, Bos taurus
  Clone ID: 12-BOVMS1-010-Q1-E1-C11
cgaagctgagcagctggccctgaagggcgggaagaagcagatccagaagctggaggccagggtacgtgaactggaaggagaagttgagagtgaacagaaacgcaatgttgaagctgtcaagggtctacgcaaacacgagagaagagtgaaggagctcacttaccagactgaggaggaccgcaagaacattctcaggctccaggatttggtggataaactgcaagcaaaggtgaaatcttacaagagacaagctgaggaagcggaggaacaatccaatgtcaacctctccaaattccgcaagctccagcacgagctggaagaggctgaggaacgggctgacattgccgagtcccaagtcaacaagctgcgggtgaagagccgggaggttcacacaaaaatcatcagtgaagagtaactcatccaaatgctaaaaag

SEQ ID NO: 2571 - DNA, 311 bp, Bos taurus
  Clone ID: 12-BOVMS1-010-Q1-E1-C7
ggaagagctgctaaacttcagataataacagactttgatatgacactgagtcgattttcctacaaaggaaaaagatgcccatcatgtcataatgtcattgacaactgtaagctaatcacagatgaatgtcgagaaaagttactgcaactaaaggaaaaatattatgctattgaagttgatcctcttcttactatagaagagaagtacccttatatagtagaatggtatactaaatcacatagtttgcttgttgaacaggctttaccaaaagccaaacttaaagaaattgtggaagaatctgacattatgct

SEQ ID NO: 2572 - DNA, 355 bp, Bos taurus
  Clone ID: 12-BOVMS1-012-Q1-E1-C11
caaaattgtgattgctggaggtgtcactgaagacggtctttcagcttcagttgaagcttttgacctcaacaccaataagtgggaagtaatgactgaatttccccaagaaagaagttccatcagtttggtcagcttggctggatccctgtatgctattggtggttttgccatgattcagctggaatctaaagaatttgcacccactgaagtcaatgacatatggaagtatgaagacgattataaagaatgggctgggatgctgaatgaaatacgttatgcttcacgagctacttgccgagcaacacggttaaatctcttcatactgtccaagctataaataagaatgtgaaaaaca

SEQ ID NO: 2573 - DNA, 446 bp, Bos taurus
  Clone ID: 12-BOVMS1-012-Q1-E1-C7
gggggagaggctgggagttcacccattaagctgccatgggtggatccttggggagcatggtgactctagtgtgcctgtatggagtggagtgaatgttgctggtgtctccctgaagaatttacaccctgaattaggcactgatgcagataaggaacagtggaaagcggttcacaaacaagtggttgacagtgcttatgaggtgatcaaactgaaaggctacacatcctgggccattggactgtcagtggccgatttggcagaaagtataatgaagaatcttaagcgggtgcatccgatttccaccatgattaagggtctctatggaataaaagaggatgtcttccttagtgttccttgcatcttgggacagaatggaatctcagacgttgtgaaagtgactctgactcatgaagaagaggcctgtttgaagaagagtgcagatacac

SEQ ID NO: 2574 - DNA, 126 bp, Bos taurus
  Clone ID: 12-BOVMS1-013-Q1-E1-C7
aaagataccctctcgacaagacaaccaagatgagaacagatcaggtacatttaatcccaaagtaaaatatacgcgatggaaatctaattacggcgctatatagaaagtaccgctcgggaacgatga

SEQ ID NO: 2575 - DNA, 398 bp, Bos taurus
  Clone ID: 12-BOVMS1-014-Q1-E1-C11
aaaaaaaaaaaaaaaaaaaaaaaaaaaaaaaaaaaaaaaaaaaaaaaaaaaaaaaaaacaaaaaaaaaaaaaaaaaaaaaaaaaaaaaaaaaaaaaaaaaaaaaaaaaaaaaaaaaaaagggggggccacccaaaaggttcaaacctaacttacccgtgaatgcaactacaaagcccttcaaaagtgtcaccaaaattcaatccacgggccgtcctttaaaaacttcttgacgggaaaaacctggggtttaccaacctaaacccccttgaacaaaatccccctttccaaaactgggtaaataccaataaggcccgaaccgttaccccttccaaaaatttgcccagcctaaagggaaaatggaaccccccttgtcgcggcccaataaccccgtcggttt

SEQ ID NO: 2576 - DNA, 423 bp, Bos taurus
  Clone ID: 12-BOVMS1-014-Q1-E1-C7
ttgaagatcagccgccatcatgaacgacacagtaactatccggactaggaagttcatgaccaaccgactgcttcagcggaaacaaatggtcatcgatgttcttcaccctggaaaggcaacagtacctaaaacagaaattcgggaaaaactggccaaaatgtacaagaccacaccagatgtcatctttgtatttgggttcagaacgcattttggtggtggcaagacaactggctttggcatgatttacgattccttggattacgcgaagaagaatgagcccaaacacatgcttgcgagacatggcctatatgagaagaaaaagacctcacgaaaacagcggaaggaacgcaagaacagaatgaagaaagtcagggggactgcaaaggccaacgttggtgctggcaaaaagaagaaatgaagtgt

SEQ ID NO: 2577 - DNA, 446 bp, Bos taurus
  unsure (379): unsure at all n locations; Clone ID: 12-BOVMS1-016-Q1-E1-C7
gctacaagcagctggaagaggagcagcaggccctccagaaaaagctaaaagggacggaggacgaggtggaaaagtattctgaattagtgaaggatgcccaggagaaactggagcaggctgagaagaaagccactgatgctgaggcagatgtggcctccctgaaccgccgcattcagctggtagaggaggagctggaccgggcacaggagcgtctggctacagccctgcagaagctggaggaggctgagaaggcagctgatgagagcgagagaggaatgaaggtcatcgaaaaccgagctatgaaggatgaggaaaagatggagctgcaggagatgcagctgaaggaggccaagcacatcgccgaggattcggaccgcanatatgaggaggtggccaggaaactggtgatcctggaaggagagctggagcgctcagaagagagagct

SEQ ID NO: 2578 - DNA, 321 bp, Bos taurus
  Clone ID: 12-BOVMS1-017-Q1-E1-C11
atgcgacgtcatagctcttctatagtgtcacctaaattcaattcactggccgtcgttttacaacgtcgtgactgggaaaaccctggcgttacccaacttaatcgccttgcagcacatccccctttcgccagctggcgtaatagcgaagaggcccgcaccgatcgcccttcccaacagttgcgcagcctgaatggggaatgggacgcgccctgtagccgcgcattaagcgcggcgggtgttgtggttacgcccaacgttaccgctaaacttgccaacgccctaacgcccgctcctttcgctttcttcccttcctttctcgcc

SEQ ID NO: 2579 - DNA, 269 bp, Bos taurus
  Clone ID: 12-BOVMS1-020-Q1-E1-C11
gcaagattcttgccaagagaattaatgtgcgtatcgagcatattaagcactctaagagccgagatagcttcctgaaacgtgtgaaggaaaatgatcagaaaaagaaggaagccaaagagaaagggacttgggttcagctgaagcgccagcctgctccacccagagaagcacactttgtgaggaccaatggaaaggaacccgaactgttggagcccattccctatgaattcatggcctgatgggtgtaaaaataaagacctggactgtgt

SEQ ID NO: 2580 - DNA, 415 bp, Bos taurus
  Clone ID: 12-BOVMS1-020-Q1-E1-C7
gagcggtcccggaagctggcggagcaggagctgatcgagaccagcgagcgggtgcagctgctgcactcccagaacaccagcctcatcaaccagaagaagaagatggaggcagacctgtcccagcttcagactgaagtggaggaggcggtgcaggagtgcaggaatgccgaggagaaggccaagaaggccatcacggatgccgccatgatggcggaggagctgaagaaggagcaggacaccagtgcgcacctggagcgcatgaagaagaacatggagcagaccatcaaggacctgcagcaccggctggacgaggcggagcagatcgccctcaagggcggcaagaagcagctgcagaagctggaggcccgggtgcgggagctggagaatgagctggaggctgagcagaagcgcaatg

SEQ ID NO: 2581 - DNA, 296 bp, Bos taurus
  Clone ID: 12-BOVMS1-022-Q1-E1-C11
cgcttggtgaaggcgttccagtttgtggaagcccatggagaagtctgcccagccaactggacacccgagtctcctacaatcaagccccatccaactgcttccagagaatattttgagaaggtaaatcagtagaccgtcccgtgcacacctgcagcttcccacaccagaaaagagccacagtgggaactcacttgtagcttttcaaagattagtatttatagcaggcaaaaaaaaccgaacccaatgatgcttatattcataaatagtactacgctaaatgttatgtttttgtaatg

SEQ ID NO: 2582 - DNA, 344 bp, Bos taurus
  unsure (291): unsure at all n locations; Clone ID: 12-BOVMS1-022-Q1-E1-C7
catgtaggttgtctaaaaataaaacgcatttaaactcattggaaagaatgcctcttagtttaatatgtcatatctaaatccatccttgtagccttcctggagcagctagagtctggttgtagcctaccactagaaagcaccttcagataacgtctacagtgaaaccacttccgggacttggactatacaagagtcagaagtaactgagtttggagtaaagggaaagaccatgctcatgacagtgccagccagcatttgaagtggattgctcacacgtttcatcacctacanatggaagtggttatctggaagagtttacagaagaataaagagagactagcaca

SEQ ID NO: 2583 - DNA, 332 bp, Bos taurus
  Clone ID: 12-LIB188-001-Q1-E1-C11
acataatttgttagatttagttacaacagaggtgatttcaatgggaatttcttatactgtcctacttattaaaaaaatttttatcatttgctcccaaatctgttatatcaaaatgtatttttgaattatacatttaattatgtcactttcagctaatttatttcataaatattagagatctcattttaaattattttatgaatatttccaaaacatgttttccaattattatttttatagtgaagacaaataattgacctatatttatatataaatattctctgcacagtaatatttttttaaagagaataatacagaaagtgcaaaagctc

SEQ ID NO: 2584 - DNA, 429 bp, Bos taurus
  Clone ID: 12-LIB188-001-Q1-E1-C7
actgtccctgtgggtcgtgtggagactggtgttctcaaacctggcatggtggtcacctttgctccagtcaatgtaacaactgaagtgaagtctgtagaaatgcaccatgaagcattgagtgaagcccttcctggggacaatgtgggctttaatgtcaaaaacgtgtctgtcaaagatgtccgtcgtggcaatgtggctggtgacagcaaaaatgatccacccatggaagctgctggcttcacagctcaagtgattattttgaaccatccaggccaaatcagtgctggatatgcacctgtgctggattgtcacacagctcacattgcttgcaagtttgctgagctgaaggagaagattgatcgtcgttctgggaaaaagctggaagatggccctaaattcttgaaatctggtgacgctgccatcgttgat

SEQ ID NO: 2585 - DNA, 447 bp, Bos taurus
  Clone ID: 12-LIB188-002-Q1-E1-C11
gcatgcaccctaccgccatgggcccgggataccataacaactttctgaaaaaaaattgaacttgacctatgatgttggttaaataataaattagaaatattcttccaaataattctagttgcaaggtttgatgagtgatcaaaggagcaggtgacccagtttttggtccttgtctccagatgtgcaccatctcctttcaccctgctgctgagggcaagtcatgactagttctcttcactcagtaaagtgcaggcattatatgcaatataacaagaaaatccagttttcttcttctactttatttccatccatccattgttttaattgaaattctattctttcttagaggaccccaaagaacagttcatatgttttcactttaattgaaagacaaaaggttaaacatggatgctgtgctgataaaaatgcttcttgaagctgataaat

SEQ ID NO: 2586 - DNA, 425 bp, Bos taurus
  unsure (325),(366): unsure at all n locations; Clone ID: 12-LIB188-002-Q1-E1-C7
acccatgaaggggataggctgcctgcaagagcccagttccccttatgaccagcgaggaacccccagctgccacacagctgcagtgcaggtggtatagaccaggagacaaaactaagcaaactagcgctttgtggccaagattctttgcccccacccaaaccagccctaataacattaaagtgcccgccctccctaaacccacacagaaaagcttaaataaaccccagcccggttctcgggctattccttcatttccggacggacacccctgagagggggttgggagaagtcccagctgagcccctccaccagtggttcagcctgngtggagggtagcaagaacaacggtgaaagtgggggaaccangacgtacatttctaatttgtaacatacaaccatagtctgcaaaactattctgtgtatca

SEQ ID NO: 2587 - DNA, 399 bp, Bos taurus
  Clone ID: 12-LIB188-003-Q1-E1-C7
acaaaagaattaacattgcacatgagaagcatcaataattccatccccagaaacaatcacttttaatatattggcatacgttaatcgatttcaacatttctgaaatcagtccatggttatctaatttttctcatatgacctgtgacgtatttctgtgttgctgcaatttcttaataagcgtaatttacactggctgtgtgaatgtataatagaagagtcttactgatgagcgtgctgaggcaaggaagaaatcagcggtcagttatctgaggctatatcacctgtgaatgtcagaacagagagcttcaggattcatatgaccgaactctgaaaaagtcattctccttcattacaactgcaatatcgtcatctacccaagacgagttcacgccagaatac

SEQ ID NO: 2588 - DNA, 438 bp, Bos taurus
  Clone ID: 12-LIB188-005-Q1-E1-C7
accaacaggtcccaggatcgggcctcagaaccatcatctaccgtagtagcagtcgaccctcgggggtccccgaccgattctccggctccaagtctggcaacacagccaccctcacaatcgcctcgctccagggtgaggacgaggcggattatttttgtgcggctggtgacagtattaagcaactactgttttcggcagtgggaccacagtgaccgtccggggtcagcccaagtccccaccctcggtcactctgttcccgccctccacggaggagctcaacggcaacaaggccaccctggtgtgtctcatcagcgacttctacccgggtagcgtgaccgtggtctggaaggcagacggcagcaccatcacccgcaacgtggagaccacccgggcctccaaacagagcaacagcaagtacttgagctggacagagtcact

SEQ ID NO: 2589 - DNA, 415 bp, Bos taurus
  Clone ID: 12-LIB188-006-Q1-E1-C7
atgcaccctaccgccatgggcccgggataccgggaaggtgatgggagctgcttcccagacgccatcgaccccttcctgtgcacccatgtcatctacagctttgccaacataagcaacaatgagatcgacacctgggagtggaatgacgtgacgctctatgacacactgaacacactcaagaacaggaaccccaacctgaagaccctcctatctgttggaggatggaacttcggttctcaaagattttccaagatagcttccaagacccagagtcgcaggactttcatcaagtcggtgccaccatttctgcggacccatggctttgatggactggacctagcatggctctaccccgggtggagagacaagcggcatctcaccactctggtcaaggaaatgaaggctgagtttgtaa

SEQ ID NO: 2590 - DNA, 367 bp, Bos taurus
  Clone ID: 12-LIB188-008-Q1-E1-C11
gcgacgggcgcgggatacggccagaacgccttggggatggaccccatgatggaacatgagatgggcggccaccaccctggtgctgactatccagttgacgggctgccagatctggggcatgcccaggacctcatggatgggctgcccccgggcgacagcaatcagctggcctggtttgatactgacctgtaaatcatcctttaggagttacaatacaaatggattttgggagtgactcaagaagtgaagaatgcacaagaatggatcacaagatggaatttatcaaactctagccttgcttgttaaattttttttttttaatatctgtaatggtactgcatattccattgtcgagagggaaagaaac

SEQ ID NO: 2591 - DNA, 425 bp, Bos taurus
  Clone ID: 12-LIB188-008-Q1-E1-C7
acctggtcatcggtgacctgctcttctcagctctctggaccttcctgtggttcgttggcttctgcttcctcaccaatcagtgggcggccaccaagaagaacgatgtgcatgtagaagccgactcagcccgggcggccatcaccttcagcttcttctccatcttctcctggtgcgtgctggccttcctggcctaccagcgctacaaggctggagtggacgaattcatccagaactacgtggaccccactccggacccgagcacggcctacgcctcctacccaggcgtgcctgcggacacctaccagcagccgcccttcacccagaacgccgagagcaccgagggctaccagccgccccctgtgtacgggatggagcacggctagctctttggaaagtgaacaggtcgggtggcttggagcctcatg

SEQ ID NO: 2592 - DNA, 398 bp, Bos taurus
  Clone ID: 12-LIB188-009-Q1-E1-C7
acttgtcctctgactcaggctgcccatttctctgccactccacggcgatgtagtctgggtagaagctggtgaccatgcaggtgaggctgaccgtgcttttgctgagctcttcctggggtggggccaggacatacacctgcggctcccgggccggccctttggtcctggagatggtcctcacgatgggggccgggaggccttcgttgtggaccttgcacttgaactcctttcctccagtccagtcctggtgctggatgcgcagggcgctgaccacgcggtaggtgctgttgaactgctcctctctcggcttcgtcgtggctgtgtttacctccacgtcgtccacgaaccaggagaacttcaccttggggtcatcgtggcccacgtccaccaccacacac

SEQ ID NO: 2593 - DNA, 421 bp, Bos taurus
  Clone ID: 12-LIB188-012-Q1-E1-C7
accagaagcaggggcccgggcccgcccgcgactacagccactacttcaagaccatagaggacctgcgggaccagattctcggtgccaccattgagaactccaagatagtcctgcagatcgacaatgcccgtctggctgcagatgacttccgcaccaagtttgagacggagcaagctttgcgcatgagtgtggaggctgacatcaatggcctgcgccgggtgctggatgagctgaccctggccaggactgacctggagatgcagattgaaggcctgaaggaggagctggcctacctgaagaagaaccacgaggaggaaatgagtgtgctgaagggccaggtgggtggccaggtcagtgtggaggtggattctgctccgggcatcgacctagccaagatcctgagtgacatgagaaccaatat

SEQ ID NO: 2594 - DNA, 395 bp, Bos taurus
  Clone ID: 12-LIB188-013-Q1-E1-C7
acactgctagtcttccaactcaacaagcagcatatctccagcgtgaactgtagctgccgagaatagcaggcgggcctcctccagcagggcagctactcctctgacaggaggtcgtgacccaggcaggctgggcaggtgcgctggctcttcagccactgcttgaagcaccccttgtgaagcctgtgcccacactgcagctcacgcacgtgtttggacttgaatacttctcggcacatttcacaggaatttgcgcatgacacagggacgtcctcggtcctcggccccctggtttcgggcgatgctccgactggcatggagggcgggtcctgggcggccctgcgcacagcagcatcatagctgggtgaagacagcctccagccctttcctggacttgg

SEQ ID NO: 2595 - DNA, 411 bp, Bos taurus
  Clone ID: 12-LIB188-015-Q1-E1-C7
acttcagaaggactctggaaacattctccagctgatcatctcagcttatgaagaactgcggtctgaggtggagctggaagtgttaggagacacggaaggactaaacctctcatttacagccatctgtaacaccgggatccccgttccgcaccaaaagaaatgctctcacatgaaggtgggagacacagcttcattcaatgtgactgtgagtttaccaaactgtgagagaaggagcaggcacattatcctaaagcccgtggggctgggggacgctttggaaatcctcgtcagcccggaatgcagctgtgactgccagaaagaagtggaggtgaacagctccaagtgcaacaacggcaatggttccttccagtgcggggtgtgtgcctgcaaccctggccacatggggtcaca

SEQ ID NO: 2596 - DNA, 337 bp, Bos taurus
  Clone ID: 12-LIB188-016-Q1-E1-C7
accataatgatagcctgaccacttcactcagtcccggttcacaggaccagggaccccatgagaggaacggtgttgcatcacaagatcctcctggacaacttcgtggcccataccgaggccccgatgacggggaagtcgacaaaagatgcccagcaggatctagacgctactggaaagagtccagatgactttgaaaatctgttgcctcacaaggtcgatgaaagaaatcatccgaccaatgctatagtgttcatcatgctcacgcgattcaatcttggagccttgattgctatgtatcaacacaagatcttcgttcagggcatcatctgggacatca

SEQ ID NO: 2597 - DNA, 405 bp, Bos taurus
  Clone ID: 12-LIB188-017-Q1-E1-C7
cggatacaagaataattaagtattttgcacaaaggaaatttgttgatgatccagtagaactgatgcccatagaacgcagtttcttaaggattttgttttgcttctttgagggaggcggccatcgtcattgtcagttcagctgggggttccttccttcatgctgaggacctgtgtctttgaagttgctgacgtcctcggaatcccaggcaggctggtgaatgctcaggggctcccatggaggcatctggtggcctcgggccccctttgcttgtaggaggcttagcaagttccttgtcgcttcttcccactgggcatactccctcagctgctccttcaggctctcctcctcatgaagttgtggggactctgccacactcttttttcccattaagtgtccgacagccc

SEQ ID NO: 2598 - DNA, 407 bp, Bos taurus
  Clone ID: 12-LIB188-018-Q1-E1-C11
acacagacaacaccaggcaccaatgtcacaaggaggcaagagtgacgggaaagagcagcctggagccccagatgaacccccccccctcttcttcaagagtgagtgtgggaggggacggggcctggagtgttgagggggcagccttagaacacgtcggcttagtaggcgtggttagagatgaagaggggctcgctggctgcagcccctgccttaccacttggggtgtacctgcccgggcggccgctcgaacagccggccagtgccatcctgtatgactactacaaccctgagcacaagtgttctgtgttttatggggcaccacgtaagagcaaactcttgtccacgttgtgctctgcggatgtctgccagtgtgctgaggggaagtgccctcgacagcgccgggccct

SEQ ID NO: 2599 - DNA, 281 bp, Bos taurus
  Clone ID: 12-LIB188-018-Q1-E1-C7
acttggagtcggtcccgcccagcgtcagctcgcccccgggctgggctttcgggtccctgttcaggaagaaggagaagacgttcttgtccaccaacttctgctgcatcaggttgtcgaagacaggcagcacgttgttgacggagatgcgggggtaggccatgcccagaatgccgtcgaacttggccgcgatgaagaccacaccgggctgcttgatggcctccccgaaggtctgcctctgcaccgtgacgccacccgggctggatgaggatgggttacagggt

SEQ ID NO: 2600 - DNA, 416 bp, Bos taurus
  Clone ID: 12-LIB188-019-Q1-E1-C7
actgaattagtgtttcctcagttttttggaaaatattcttgtctatagttaaccatgcagcctattcacggaggctaattatttactcacttcaaacaccactaattcctcagaaagacaatgcagcgtctgtaacatctgtttactcatcaaaagccaaggaaagccattcagaaccatctgccttgtgttttgaccattgatattggtcccaatgtcttcaactctgtaagcaagaattgtcaatgaaacattaacagtcttttttttttttttttttttttttaaatatttatttattttttggctgtgctgagtcttagttgctgcatgggcttttcactagttgcagtgtttgggcttctcattgtggtggcctcatccgttgtagatcacaggctctagggcatgagaac

SEQ ID NO: 2601 - DNA, 207 bp, Bos taurus
  Clone ID: 12-LIB188-020-Q1-E1-C11
acttctggaggcaaggatgggcaggctatgttgtgggacctcaatgaaggcaagcacctttacacactagatggtggggacatcatcaacgccctgtgcttcagtcctaaccgctactggctctgtgctgccacgggtcctagcatcaagatctgggacttggagggcaagatcattgtagatgaactgaagcaagaagttatcagt

SEQ ID NO: 2602 - DNA, 401 bp, Bos taurus
  Clone ID: 12-LIB188-020-Q1-E1-C7
gccatcggcccgggaacagcgccgaatctaccttcgaggggatcctcaaaaacccaagaacaaattcttgaacagcaagtccctctggccgggtggagagccaaagagctggaagctccgagacttgttttttccaaatttctcctgcgccttgctgagaagcttccagatcaagtcttccttgccatccacacttcgggccacgacagcatgagaagggacctgggccaggtggcactccttgaacgcatccactggcgcccgactgttgttcaagcagagaagctcatactggtccctgtgacacctttctcgggaattttctcaaacagtgtcctctctttaacaagccccatgtcacgagccctgtcgtgcagacatttgagggcaccagaataacc

SEQ ID NO: 2603 - DNA, 391 bp, Bos taurus
  Clone ID: 12-LIB188-021-Q1-E1-C7
actgctacaaccccagccaccaccccgaggagcagctctcctccaaggacctggtgtcctgcgcctaccaggtggcccgaggcatggagtatcttgcctccaagaagtgcatccaccgggacctggccgccaggaacgtcctggtgacggaggacaacgtgatgaagatcgcggacttcggtcttgctcgagacatccaccacatcgactactataaaaagacaaccaacggccgactgcccgtcaaatggatggcaccggaggccttgtttgaccggatctacacccaccagagcgacgtgtggtcttttggggtgctcctctgggaaatcttcactctgggcggctccccataccctggggtccccgtggaggagcttttcaagctgct

SEQ ID NO: 2604 - DNA, 402 bp, Bos taurus
  Clone ID: 12-LIB188-022-Q1-E1-C11
gcatgcaaccgagcgccatggcggcgggatacagtcagtacatataaaacagtgtgaatttcctgctcttagcctttgagcggcgtctcctttgtacctcacgtgactacagaaggcacttggtctcagtgaactgtgtgcatctgacctgtgggaaccggacggaatacgaattctcataccggtccccacccccactccgggatgatggaagggtccacagggcatgaaagttggggagtgggagcaggggcacccgtctccgtggtgactttctcctcgtttcatgtaaggttgccagtgatcagttaccgtggtcatatctttctaaaaattcagaataatctctgcacacgtcttggcagacaggttgggtgtgtctgtgtcgcctgttggattttt

SEQ ID NO: 2605 - DNA, 461 bp, Bos taurus
  unsure (278): unsure at all n locations; Clone ID: 12-LIB188-023-Q1-E1-C7
ccatggccgccggatacatattctgacggagagatgaaaaacaatggacggcacatcctgaattctagggtagactcttgctggtgaaggacaccttcggtttagtccattttttccaagcaacacctgaaggagaactctaacacctaattctttgtgggaaaatgaccaacgagccactttgcaggctacaaaaaaaaaaaaaacaaaacggagactgggcatctttccttctgtcccaggatcaggggtgcttctatttaacattgatcaggtanagaggggaggctgtgcctaggggtggagaagaggctggctctaagccatctgtagtgagtgaggctcaagattacaagggggtgttcttctcctgcgtctcagtcttcttcagcttggccttatcgaagctgttgatttcccccaagtcgggcttgtctgccattttcttaaaacaatccgag

SEQ ID NO: 2606 - DNA, 303 bp, Bos taurus
  Clone ID: 12-LIB188-024-Q1-E1-C7
gccatggtggcgggataatccactagaatgattcttcatatcatagattccacttccaaatccttggaatgttcatttctttggctataaagagggactagccgggaaagccaggtaatgcgtaggaaactaaactaacaaaagagcgggtggggcgggcagcgctaatgtcatcctcccggggacgggcacagggggctgttagccgcgggctgactgcggagaactgttagctggagcacggagcagccgtcctcgatgcttgggctgtcgcggggcttcagtcatccccaccacacaggt

SEQ ID NO: 2607 - DNA, 417 bp, Bos taurus
  Clone ID: 12-LIB188-025-Q1-E1-C7
ggatacaagctaatttttttttttttttttttttttttttctttgttttttttttttttttgttttttttttttttttcttttttttttttgtttttttttttttacaaacgaggcactttagtaccccagcaccatttgttcaaacgcttctagttggcaggtgccacctgtccagcgattcggcccagatccctcggtccccgaggcgccagttggcggcccccacctgggcccttttccaccattttcagcccctccagggccctgaccagcccgggcaaactcgggacccccgggtagggttggagcaaagtcaggtggtctgcaccaaccagggggcatttgtacccagaggtgtcatgccccccaggccccagccctggtcctggaaagggccgatctgcttcgaaaaccg

SEQ ID NO: 2608 - DNA, 418 bp, Bos taurus
  Clone ID: 12-LIB188-026-Q1-E1-C11
aaatgtaattattaggaaaattataagtgcatatacatcttttcattgatatgatttcaaagtagaaattgtttctcaaaaggagttgttacttgtttttttttttttttttaaaaagcacactgcatacaggaagctgccttctccgggaccattttcacattttgtgggagatgccatttaaacaatacaaaatacagtatttatcacatttaacactgaacccatcactgctcagaggctgagagtccagcgaggttgcaggattacaatctatgggatttttcaacttggcaatgtcagtggtctccttaggggacatgaaggtttttctaagggatatttccaagggatgggaaatttcccagcgaagatgcagagggatcaggaccccacagttctcatccagctacaaaag

SEQ ID NO: 2609 - DNA, 270 bp, Bos taurus
  Clone ID: 12-LIB188-026-Q1-E1-C7
acttcaccttagagttgggcacacacttgtccaggccctggtcatcgccagcacacaaggcacagagtctggatttcgggtcagccccaggggcacagctctgactaaagaattcatcaaatgcgcaggagcctgtctggttgacgatcaggcccatggggatgttccagcctgcagtcctgtccacggcggtgtggcacgacttcttgtctttcagagaattccatgtgagcccctcatttgctttcttgacaactgccacggcaaggt

SEQ ID NO: 2610 - DNA, 413 bp, Bos taurus
  Clone ID: 12-LIB188-027-Q1-E1-C7
acttgtccaccgactcagtctgccggtctctctgccactccacgtctacatcttctgggtagaagccgatgaccatgcaggtgacgctgaccgtgcttttgctgagctcttccttgggtgggtccaggacatacacctgcggctcccgggccggccctttgctcctggagatgatcctcacgatggaggccgagaggcctttgatgttgaccttgcacttgaactcctttcctccagtccagtcctggtgctggatgggcagggcgctgaccacgcggtaccattctcccattagaaccctggtgctaatataactttatagccttaacccttgtaaaggacaatctggacctcatctccagcccccacccctagcattcagtcataatgtgattcctagagagggtgggggg

SEQ ID NO: 2611 - DNA, 422 bp, Bos taurus
  Clone ID: 12-LIB188-028-Q1-E1-C7
actcataattgtgtaggaagttgctacaaggctgtgtgaagatactgaatcagaaggagctggaaggtgccctgtttctcaatccatccactgtttttcccatattgtagacaaatggaaccataggggacacaatctttttattctggctcctgttttaagaagctgcttggaacaggtcagtaggaattgaagggaaagcatgaccaactcaattgagggggataaacgtaagcttgggaaagcacagatcacatcatacttgtgtccccacagcagccagcccagtgccgtgcacctggctagatgaatgtgcctaggaaatcacagacaccctggtgtgcttgttcataaagcctcaaccttcaagggccctccctgcaaaggttacacaactgacataactgggggtcttttgcctt

SEQ ID NO: 2612 - DNA, 427 bp, Bos taurus
  Clone ID: 12-LIB2809-001-Q1-E1-C11
acatgtacttgtgtaggtgggggttgtctactgagtaaggaatactgtttttaaggttctaaagctaaattcaaatgatgcattaatgacccaaaaactcagatctgatggtgtctgaatttctaacagtccttgctttgtgggtatgctgacaacttatctggatgccttacatcttttctaaacagtgttgcctctgaacgtgctctgctccctccctgctccctctttggagcccctttgcaccccagagcctgcagaagtggctggtataaaagggggcctggctagagaatgatcagtgtagctgtttgcaggattcctttctgggcttcattttggaaactttgcttagggctatttttcttaattgcccacatttgatggaggctagaaggaattttgaatgtatttgatttattattat

SEQ ID NO: 2613 - DNA, 405 bp, Bos taurus
  Clone ID: 12-LIB2809-002-Q1-E1-C7
actagagtagaaagggcaattcattaagtatatttagaatccaagctactactactgagaaattacagtatttattcagttcagttcagtttagtagctcagtcgggtccgactctttgcgaccccatgaatcgcagcacaccaggcctccctgtctatcaccaactcccggagtttacccaaactcatgtccatcgaatcggtgatgccatccagccatctcatcctctgtcgtccccttctcctccagcccccagtccctcccagcagcagggtctttcccaatgagtcaagtcttcgcatgaggtggccaaaatattggagttacagtgtttattagagattcaataagttgaaaattcagagtcctcagtttcaaagaaataacatgtgactgaaaacatg

SEQ ID NO: 2614 - DNA, 463 bp, Bos taurus
  Clone ID: 12-LIB2809-004-Q1-E1-C11
ctcccggaggccatggccgggcgatacttgtacttgagtaggtgggggttgtctactgagtaaggaatactgtttttaaggttctaaagctaaattcaaatgatgcattaatgacccaaaaactcagatctgatggtgtctgaatttctaacagtccttgctttgtgggtatgctgacaacttatctggatgccttacatcttttctaaacagtgttgcctctgaacgtgctctgctccctccctgctccctctttggagcccctttgcaccccagagcctgcagaagtggctggtataaaagggggcctggctagagaatgatcagtgtagctgtttgcaggattcctttctgggcttcattttggaaactttgcttagggctatttttcttaattgcccacatttgatggagggtagaaggaattttgaatgtatttgatttattattattattttttttt

SEQ ID NO: 2615 - DNA, 145 bp, Bos taurus
  Clone ID: 12-LIB2809-004-Q1-E1-C7
actgttgcattaaaagcgccatcagggacatcgagcaagggtcaaaagtccacagcgccattcatgcacccctggagattagtccttacatgtccattgtcactacagggcccacggctcagagacgagttagcttcaagggggt

SEQ ID NO: 2616 - DNA, 441 bp, Bos taurus
  Clone ID: 12-LIB2809-005-Q1-E1-C7
acctctatgtatgccaatactgtcctgctggtaatattgttggcagacaacatgtcccttaccaaaagggaacaccttgtggcagctgccccaatcattgtgacaacggactatgcaccaatagttgtgagtatgaagatacctattctaactgtgcatctttaaaggaaacatggacctgtgcctctgattttgtgaagaccaattgcaaggctgcctgcaattgtcaaggcaaaatttattaaattccaagcactgaccgagcagggctacatgatggaaggctgcatcatctactcagatttgatatttactaacaaggaaatcacagacatgttagctacaaatttgatttcaagtagtaaagagtctttttctcctggatctgctttttattttacagaattttttttcatacaaaaaaaattaatgttacctaat

SEQ ID NO: 2617 - DNA, 310 bp, Bos taurus
  Clone ID: 12-LIB2809-008-Q1-E1-C7
gggtaccgagctagagttccgtgtagtctatagtgtcacctaaatcgtatgtgtatgatacataaggttatgtattaattgtagccgcgttctaacgacaatatgtacaagcctaattgtgtagcatctggcttactgaagcagaccctaggatcgctctcgtaaactgcggtcagagtcggtttggttggacgaaccttctgagtttctggtaacgccgtcccgcagccggaaatggtgagcgaaccaatcagcagggtcatcgctagccagatcgtcgacgccggacgcatcgtggccggccgggggg

SEQ ID NO: 2618 - DNA, 300 bp, Bos taurus
  Clone ID: 12-LIB2809-009-Q1-E1-C7
ggatacatattcaacttttgtcccgaataaaaagcgccatcagggacatcgagcaagggtcaaaagtccagagcgccattcatgcacccctggagattagtccttacatgtccattgtcactacagggcccagggctcagagatgagttagcttcaagggggtacaattaagcagtccgaggtaaccacggggcataggagttccaggaacagaaagaggacagaagcagcagagacagcaggtgttcacaacttcgcacagagccactgatccagcttctcagaacagagtgctttatg

SEQ ID NO: 2619 - DNA, 400 bp, Bos taurus
  Clone ID: 12-LIB2809-012-Q1-E1-C11
actatgctatctaatcctctttttcttgattgcatcatctttctttttatacaacagccttattcagaagagtggaacataaacgttcagccataaaataatgatattatcaaatgagctgtccatattaatctattaaatttcttcattttctgatttatgttgacaaataagaattttttttaaagctagacctgattttatttttatttttccaaaggaatctattacacgcatcaataagaaaattgagaagtttcagagtgaggaacagcagcaaacagaggatgaactccaggataaaatccacccctttgcccagacacagtctctagtctatcgcttccctgggcccatccctaacagcctcccacattacatctcccctcttactcaaact

SEQ ID NO: 2620 - DNA, 334 bp, Bos taurus
  unsure (224): unsure at all n locations; Clone ID: 12-LIB2809-012-Q1-E1-C7
acagcagaaaggcctgaatgggcatatctctctggggatagggcactgctttctggggaacaggcaggactttggactgagaaagggacagcacggactgacgaggacacatgacagttggaggaagaggctggtgaggctggtgcatccaggagtggagcacaggcagaggacggtgcagattttcaacatcagtgagagtcacgctctggctttcagtgganggctcacctggatatttagggaagggcatttctttgtgcttaggagccatagcctccttcactttggacacgcgcattacttcaggctgaacgaaaggcggcaccaccac

SEQ ID NO: 2621 - DNA, 436 bp, Bos taurus
  Clone ID: 12-LIB2809-014-Q1-E1-C7
actgtgggtcgaagtagtggatgcggacgtaaccatcttcgccgccactgctgtagctcttgccatcaggatggaaggcaacactgttgataggtccgaagtgacccttgactcttccaaactcttcttcaaaggccaagtggaagaacctggcctcgaacttcccaatcctggtggaggtggtggttacatccacggcttcctgaccaccgcccagcaccacatgatcgtagttgggagagagggcagctgagttgacaggtcgttctgtcctgaaagtcttctggtgttcaagggttgtggagtcgaagagcttggcagtgttgtccttggatgcagtgacgaacatggtcatatccctggataactggatgtcattgatctgccgggagtgctccttaacattcaccagaacctccccagacttggcactata

SEQ ID NO: 2622 - DNA, 339 bp, Bos taurus
  Clone ID: 12-LIB2809-017-Q1-E1-C7
gataaagtattatttaaaattttctttttaaattgaaagccaacaactctgcctttatgatgctaagctcatgttcttatttcttctcctatcttctttctcttctgttcccattatccttccctttgttttgtccctgtcaccttcctttctccttctcctcattgccccacatgcaagcaggtggtcagtcattggtgggtttccagcttccaaagcctagacaaccctgctgtagtctcaaactagtggtcttttgcccggctgaccctttccttgagctgtctgagctttaaagtggattgctcaagctagagatatgacataatcctctgggaa

SEQ ID NO: 2623 - DNA, 399 bp, Bos taurus
  Clone ID: 12-LIB2809-018-Q1-E1-C11
gccatggccgcaggatacctggagagattgtggaaagcctttcaagcagtgaggaatctattacactcatcaataagaaaattgagaagtttcagagtgaggaacagcagcaaacagcggatgaactccaggatacaatccacccctttgcccagacacagcctctagtctatcccttccctgggcccatctctaacagcctcccacacaacatccctcctcttactcaaacccctgtggtggtgccgcctttccttcagcctgaagtaatgggagtctccaaagtgaaggaggctatggctcctaagcacaaagaaatgcccttccctaaatatccagttgagccctttactgaaagccagagcctgactctcactgatgttgaaaatctgcaccttc

SEQ ID NO: 2624 - DNA, 427 bp, Bos taurus
  Clone ID: 12-LIB2809-018-Q1-E1-C7
acagcagaaaggcctgaatgggcatatctctctggggatagggcactgctttctggggaacaggcaggactttggactgagaaagggacagcacggactgaggaggaaacatgacagttggaggaagaggctggtgaggctggtgcatccaagactggagcagaggcagaggaaggtgcagattttcaacatcagtgagagtcaggctctggctttcagtaaagggctcaactggatatttagggaagggcatttctttgtgcttaggagccatagcctccttcactttggagactcccattacttcaggctgaaggaaaggcggcaccaccacaggggtttgagtaagacgagggatgttttgtgggaggctgttagggatgggcccagggaaagggatagactagagactgtgtctgggcaaagg

SEQ ID NO: 2625 - DNA, 408 bp, Bos taurus
  Clone ID: 12-LIB2809-019-Q1-E1-C11
acctttaagattctggaattaactgcttctacctggttatggttggactggaaaatctatcttctacagtttcatatctaccactttacttcatacaaccagcatgtttggagtggtgcatcaataagacaaatcgtagagtatttcctgaattatttatactctccctgttagtttatattgaatatactgggtttatatggtggtttcatacaaacttagctgatgattatttaaaatcctttccctactctttctgagttatagaaatatttttctttccctctgaaaataaaatttcaagtgcaaaaaaaaaaaaaaaaaataaaaaaaaaaaaaaaaacaaaaaaaaagctttgaaaaaattttttttttttatttttttttgggcaaaaaaggcttttattg

SEQ ID NO: 2626 - DNA, 407 bp, Bos taurus
  Clone ID: 12-LIB2809-020-Q1-E1-C7
acaaagaaggggacctgacccacttcaaccagaagcttgaggggttcagcgtgcccaggtgctgggatgagtgcctgaagagctctgagtattacgctcggaagagtgaggtcgacaagttcaacaaggagaattgttggaaaaagagaggattgtgcataattcctaccaaatttggaataagcttcacagttccttttctaaatcaggcaggagccctgatccacgtatacacagatggctccgtgctggtgagccacgggggcacagagatgggccaaggccttcacaccaagatggtgcaggtggccagcaaagctctgaagatccccatctctaagatctatatcagcgagacgagcactaacacggtgcccaactcgtctcccacggccgcctccgtcagt

SEQ ID NO: 2627 - DNA, 416 bp, Bos taurus
  Clone ID: 12-LIB2809-021-Q1-E1-C11
acaactagctttggagttgatattaatagaaattattccaaaattattcttaggtcacaaataactactatcccacataaaaagggaaaaatcccacccaattaaggaaaaggtatcctgtgtatgtttccatggcaatgagtttatgcattctcagattttgtccggctagttatccaccctttatctgatgcatttattccatctctcagagagaaccatatagattcctgacggcatccaggacacgtggctcgtggtggacacacttcatggtagatactgctactataaaaatactcagaacttaagagaattccaagatgctttataaaaagcattagtcatgcctcaaaactgccctttgaggtaagtcagtattaataacccaatttaaacagacggaaaactgaggc

SEQ ID NO: 2628 - DNA, 393 bp, Bos taurus
  Clone ID: 12-LIB2809-025-Q1-E1-C7
gccatgggcccgggatacagcagaaaggcctgaatgggcatatctctctggggatagggcactgctttctggggaacaggcaggactttggactgagaaagggacagcacggactgaggaggaaacatgacagttggaggaagaggctggtgaggctggtgcatccaagactggagcagaggcagaggaaggtgcagattttcaacatcagtgagagtcaggctctggctttcagtaaagggctcaactggatatttagggaagggcatttctttgtgcttaggagccatagcctccttcactttgggaactcccattactttaggctgaaggaaaggcggcaccaccacaggggtttgagtaacaggagggatgttttgtgggaggctgtta

SEQ ID NO: 2629 - DNA, 351 bp, Bos taurus
  Clone ID: 12-LIB2809-028-Q1-E1-C7
cctgaatgggcatctctctctggggatagggcactgctttctggggaccaggcaggactttggcctgcgcaagggacagcacggactgacgaggaaacatgaccgttggcggaagaggctggtaaggctggtgcatccagaactgaccagacgctaggaaggtgcagattttcaacatcagtgagagtcaggctctggctttcagtacagggctcaactggatatttagggaagggcatttctttgtgcttaggagccatagcctccttcactttggagactcccattacttcaagctgaaggaaaggccgcaccaccacacggggtttgagtacgacgagggatgttttg

SEQ ID NO: 2630 - DNA, 435 bp, Bos taurus
  Clone ID: 12-LIB2809-030-Q1-E1-C7
acagttcccaaactagtcaagattcaggaaactattcaaacgaagatgaaaacagtggaagcaaaataagcgaagagtttccgcaacaggacagtgtgtgaccaggaatgaccctgaaacattagggagtcttgcaagagtcagagtgggagcctgggctttttgctcttctcagtaactgtcaaaagaagattgtccgtgtcggggaagaaaaagcgtcttcagatcgcaggtccaaaaaatacaggcaagcacttcactatttaaaatgaatttcaagaagttttctgcgtcctttgccacgtgtcaagtcttgaaaggcctgtcattggacctgccttagatgagaggcgttaagtccagaagataccctctgtctccctcaagccactggtaaccagccctgtgctggcgtggggtttgggggtgcttgtg

SEQ ID NO: 2631 - DNA, 271 bp, Bos taurus
  Clone ID: 12-LIB2809-031-Q1-E1-C11
cgccatgtcgcgggatacagcaaaaaggcctgaatgggcatatctctctggggatacggcactgctttctggggaacaggcaggactttggactgagaaagggacagcacggactgaggaggaaacatgacagttggaggaagatgctggtgaggctggtgcatccaacactggagcagaggcacacgaaggtgcacattttcaacatcagtcagagtcaggctctggctttcagtacagggctcacctggatatttagggaccggcactt

SEQ ID NO: 2632 - DNA, 397 bp, Bos taurus
  Clone ID: 12-LIB2809-031-Q1-E1-C7
actctggagattcgcaagcccagcccctatgacgggggcacttactgctgcaaagcagtcaatgaccttgggacagtggagatcgaatgcaaactggaggtgaaaggactcttcatctaccagtcactggatgctattgatgggaaacaagccagaaggacaaattcttgttctcctttaggggaactttttgaccatggttgcgactctctttccacagtttttatggcagttggagcttcaattgctgttcgcttaggaactcaccccgactggttgtttttctgctcttttattgggatgttcatgttttattgtgctcactggcagacttatgtttcaggcgtgttgaggtttggaaaagtggatgtaactgaaattcagatagccttaatga

SEQ ID NO: 2633 - DNA, 344 bp, Bos taurus
  Clone ID: 12-LIB3057-003-Q1-K1-C11
gagtaactatgactctattaaggtagccaaatgcctcgtcatctaattagtgacgcgcatgaatggatgaacgcgattcccactgtccctacctactatccagcgaaaccacagccaacggaacgggcttggcggaatcagcgcggaaagaagaccatgttgagctcgactctagtctggcacggtgaagagacatgagaggtgtataataagtgggaggcccgaggcgcccccccgattaccgcgagggggcatatcgcagtccgccggacttgcagtccgaccgtgaaataccactactctgatcgcctactcactgacccggtgaggctagggggcgagcc

SEQ ID NO: 2634 - DNA, 392 bp, Bos taurus
  Clone ID: 12-LIB3057-005-Q1-K1-C11
cgcgagcggccgcccttttttttttttttttttttttatttttttttttttttttttggtttttttttttttttttttttttttttttttttttttttttttttttttttttttttttttttaaaaaaaccctttttataaaaggaaaacaaaaaaataaaaaattgttttttaactggtccccaaaccctttttaataaattattttttaaaagtgctgttaatcaaattttggggcttttccaggggaatttttaacccttttttttatgcaaaatttctgcaccaatggacctttgcctatttttaaaatttgcctaaaatttccttttttcaaaaaccttagggctacaaaggaaacctaaaaagtcctttgggttaaaaaaagggaa

SEQ ID NO: 2635 - DNA, 453 bp, Bos taurus
  unsure (365): unsure at all n locations; Clone ID: 12-LIB3057-005-Q1-K1-C7
gaagggtcagaaggatgtctgtgtggttctggccaaggagatgatcaggtcaaggaaggccgtgagcaagctctatgcatccaaagcgcacatgaactccgtgctcatggggatgaagaaccagctggcggttttgcgagtggctggttccctgcagaagagcacagaagtgatgaaggccatgcagagtcttgtgaagatcccggaaatccaggccaccatgcgggagctgtccaaagagatgatgaaggctgggatcatagaagagatgttagaggacacttttgaaagcatggacgatcaagaagaaatggaagaagcagcagaaatggaaattgacagaattctgtttgaaatcaccgcangggccttaggcaaagcacctagtaaggtgacggacgccctcccggagcctgaacctttaggagcgatggctgcatcagaagatgagga

SEQ ID NO: 2636 - DNA, 419 bp, Bos taurus
  Clone ID: 12-LIB3057-006-Q1-K1-C7
gccattcgcgccggagaggccgagagctctcccggtcgagccctggacgccgcagcgggcgcgcgatgagttcccttcgccgtctgctagtgcttctcctgctggtgttccccgtcaccctcctgctccgagtcggcccatgaggctcattggcagtggcgcacgatcttacagaagatgaagaaaccgtggaagattctataattgaagatgaagatgatgaagcagatgtggaagaagatgaaccgacagatttggctgaagataaagaggaagatgatgtatcgggtgaacctgaagcttcgccaagtgcagatacaaccatcctgtttgtgaaaggagaagattttccagcaaataacattgtgaagctcctggtacgctttacaaacaagggtacagaagattttatcgtcgag

SEQ ID NO: 2637 - DNA, 410 bp, Bos taurus
  Clone ID: 12-LIB3057-007-Q1-K1-C11
gtcgatcggtccgcctccggtgtgcaccggtcggctcgtcccttctgccggcgatgcgctcctgtccttaactggccgggtcgtgcctccggtgctgttactttgaagaaattagagtgctcaaagcaagcctacgctctgtatacattagcatgggataacaccacaggattctgatcctattgtgttggccttcgggatcggagtaatgattaacagggacagtcgggggcattcgtatttcatagtcagaggtgaaattcttggatttatgaaagacgaacaactgcgaaagcatttgccaaggatgttttcattaatcaagaacgaaagttgggggctcgaagacgatcagataccgtcctagtctcaaccataaacgatgccgaccagggatcagcggatgttgc

SEQ ID NO: 2638 - DNA, 418 bp, Bos taurus
  Clone ID: 12-LIB3057-008-Q1-K1-C11
ggaaaaatatgatcttataccttttttgatggggaaaattaagtttacatttttcatatttagtgttaaataattttatgtagattaaaaggaaagaacagtattagggggaaaaaaacaagtgcctaaatgtcttaatgctctctatgtgaggcagttagaaatagaagtgaccattagtaatacaactatttttgtcaaatttagtgggggtttttggttgttgtttgttttcttgggtttttttttatggcaaactttaaaaaatgtaccaatgtggaaaaaaacactttcctgaatgccattacttcttatgcccttgaagctctcatatctgtagcctactcctgttaagggtttctccttttcctagtttctagcttgcaacaatacgtaacacatctggctacctggtatt

SEQ ID NO: 2639 - DNA, 345 bp, Bos taurus
  Clone ID: 12-LIB3057-008-Q1-K1-C7
tcggaattctgctcatatctaaatttattcaaacaccaactacaacacaacaacagacagcaccattcaacatacgaaagaccatcacactgaaccagtaccactaaccaccaaactaccatcaaatacaaatccctatatactaaaatctcatgcaatcacacttcatacatctacatacatccacgaacatccacaacatgaatacatcaatacatattataaccaaacacctaacacactacaaccccatacaaataatccaacaccaataaaatagatcacattctccaaaccatatataacacaaacacatacccaataattacataccttacatacaca

SEQ ID NO: 2640 - DNA, 373 bp, Bos taurus
  Clone ID: 12-LIB3057-009-Q1-K1-C11
aagaaaacaaacgacttctggaaggcttggagatgatatttggccaggttattcctggagccaaagagactgagccctaccctgtgtggtcaggactcccgtccctgcaaactaaggatgaagatgcacgttattccgctttttataacctgctccactgcctgctcagggattcaagcaagattgacacttaccttaagctcctgaattgcagaatcatctacaacaacaactgctaagcccacattcatcctatccatttctgagatggttcttaatgatccattccctggcaaacttctctgagctttatagctttgtaatgcatgcttggctctaatgggtctcatcttaaataaaaacagactctgta

SEQ ID NO: 2641 - DNA, 439 bp, Bos taurus
  Clone ID: 12-LIB3057-009-Q1-K1-C7
cacgaacgtgcggtgcgtgacgggcgatggggcggccgcctttccggccgcgccccgtgtcccgggacgaagggctctccgcaccggaccccggtcccgacgcgcggcgggggcgcgccgcgccgcgccccggtggacgcgggcgacggcccgccggcggtgacggcggtggaccggctatccgaggccaaccgaggctcccgcggcgctgccgtatcggtccgactgggcgggattctgacttagaggcgttcagtcataatcccacagatggtagcttcgccccattggctcctcagccaagcacatacaccaaatgtctgaacctgcggttcctctcgtactgagcatgattaccatggcaacaacacatcatcagtagggtaaaactaacctgtctcacgacggtctaacctcagctcacgttccctattagtgg

SEQ ID NO: 2642 - DNA, 351 bp, Bos taurus
  Clone ID: 12-LIB3057-010-Q1-K1-C7
cgatgagatggttgaattacgcattctgcttcagatcaagaatgctgtggcagtgattggaaaaggaggcaagaatattaaggctctccgtacagactacaatgccagtgtttcagtcccagacagcaatggccccgagcgcatattgagtatcagtgctgatattgaaacgattggagaaattctgaagaaaatcatccctaccttggaagagggcctgcagttgccatcacccactgcaaccagccagctcccgctcgaatctgatgctgtggaatgcttaaattaccaacactataaaggaagcgactttgactgtgagttgagacttgtgattcatcagagtctggc

SEQ ID NO: 2643 - DNA, 193 bp, Bos taurus
  Clone ID: 12-LIB3057-011-Q1-K1-C7
acttaccttaagctcctgaattgcagaatcatctacaacaacaactgctaagcccacattcatcctatccatttctgagatggttcttaatgatccattccctggcaaacttctctgagctttatagctttgtaatgcatgcttggctctaatgggtttcatcttaaataaaaacagactctgtagcgatgtc

SEQ ID NO: 2644 - DNA, 418 bp, Bos taurus
  Clone ID: 12-LIB3057-012-Q1-K1-C7
ctggtgaagtgtgtttcttgaaatcatcaccaccatggacagcaaaggttcgtcgcagaaagggtcccgcctgctcctgctgctggtggtgtcaaatctactcttgtgccagggtgtggtcttcacccccgtctgtcccaatgggcctggcaactgccaagtatcccttcgagacctgtttgaccgggcagtcatggtgtcccactacatccatgacctctcctcggaaatgttcaaccgaattgataaacggtattcccagggcaaaggggttcattaccatggccctcaacagctgccataccttctcccttactacccctgaagataaagaacaagcccaacagacccaccatgaagtccttatgagcttgattcttgggttgctgcgctcctggaatgaccctctgtatcacct

SEQ ID NO: 2645 - DNA, 138 bp, Bos taurus
  Clone ID: 12-LIB3057-013-Q1-K1-C11
cccacgcgtccgcccacgcgtccggatggttcttaatgatccattccctggcaaactgctctgagctttatagctttgtaatgcatgcttggctctaatgggtttcatcttaaataaaaacagactctgtagcgatgt

SEQ ID NO: 2646 - DNA, 436 bp, Bos taurus
  Clone ID: 12-LIB3057-013-Q1-K1-C7
ctcccttcctacccctgaagataaagaacaagcccaacagacccaccatgaagtggtgatgagcttgattcttgggttgctgcgctcctggaatgaccctctctatcacctagtcaccgaggtgcggggtatgaaaggagccccagatgctatcctatcgagggccatagagattgaggaagaaaacaaacgacttctggaaggcatggagatgatatttggccaggttattcctggagccaaagagactgagccctaccctgtgtggtcaggactcccgtccctgcaaactaaggatgaagatgcacgttattctgctttttataacctgctccactgcctgcgcagggattcaagcaagattgacacttaccttaagctcctgaattgcagaatcatctacaacaacaactgctaagcccacattcatcctatc

SEQ ID NO: 2647 - DNA, 422 bp, Bos taurus
  Clone ID: 12-LIB3057-016-Q1-K1-C11
tttttctaagggccaccctttaactcggcggcctgatgactataatgggcccgattgggtgtgggctgcagagcgccgaggccccacatccaaggaggctggggcccgtctctgatgcaccggagaggcggatatggaataccgcagcagcgtgcagggtcaaagacagccggccccccatgtcagtggtctaggatggccagtgaagccaccaacatccccagtcctgtggtgcgccagattgacaagcagtttctgatttgcagtatatgcctggaaaggtacaagaatcccaaggttctcccctgtctgcacactttctgcgagaggtgcctgcagaactacattcccgcccacagcttaaccctctcctgcccggtgtgccgccagacctccatcctgcccgagaagggggtggccgc

SEQ ID NO: 2648 - DNA, 418 bp, Bos taurus
  Clone ID: 12-LIB3057-016-Q1-K1-C7
gccaaactggctgagaatatgtttccaaagagccaggaataagttcttgatttggtaggttagaagcaacacgatggtgtaaactcttccttttctccaccttgtctatatggtaaaggaatcctttcagctgccagttttgagcaatgaatatcatattgtatcatcaatgctgatatttatctgagttggtctgcaggcctaagctggatgaatgaatatcactacctgttctgaaaatgtttgttgctttttatctcactgcctagattgaaatatttttactatttcttctgcataagtgacagtgaaccaattcctcataaataagctccctcctatcatttgcattgactgcatttgtgtatcatcaatgaagttgtgtgataatgctggaaagaagaaaagaaagagagaa

SEQ ID NO: 2649 - DNA, 391 bp, Bos taurus
  Clone ID: 12-LIB3057-017-Q1-K1-C7
aaccaccatgaccagcaaaggtccgtcccaaaaagggtcccgcctgctcctgctgctggtggtgtcagagctactcttgtgccagggtgtggtctccacccccgtctgtcccaatgggcctggcaactgccaggtatcccttctagacctgtttgaccgggcagtcatggtgtcccactacatccatgacctctcctcggaaatgttcaacgaatttgataaacggtatgcccagggcaaagggttcattaccatggccctcaacagctgccataccttctatcttgctaccccttaagataaagaacaagcccaacatacccaccatgaagtcctgatgagcttgtatctggagtgctgcgctcctgtaatgaccctctgtatcacctag

SEQ ID NO: 2650 - DNA, 368 bp, Bos taurus
  Clone ID: 12-LIB3057-018-Q1-K1-C7
gtaccctgacctggcgtgcttgctttgcagacatggactcttcagtttgaagcgactgcgagcactgtcagcgcttcagagatgatgcgtgcgcttgagactcgctgagctctggagagtatgaagtcggaccatctctgggtagaagagaaattagaaagacacgttacaaagagcttgacttggcttgcgatacttttacctcatatactccagacagagttggtgcttgatctgctatatggatatatacatgcaactgtgtcaaccaaaacaaagatagagtgccctgaagattgggataaattttaaaattcagcaagatttgataatgcacacattttgagcagcttatattttaggaagct

SEQ ID NO: 2651 - DNA, 394 bp, Bos taurus
  unsure (301): unsure at all n locations; Clone ID: 12-LIB3057-019-Q1-K1-C11
gttttattagtcagtggttgttcttcagttgctaagtcatgcccgactctttgggaccccgatggactgcatcatgtcaggcttgccaccttcactgtctgtgggagtttcctcatattcatgtccattgaatcggttatgctatctaacaatctcatcctctgctgcccccttctccttttgccttcaatccttctcagcatcagggacttttccaatgaatcaactaggtatacctcaataaagctatgcccatggagtgggacaagtttccagatgcattcctacctcacatacaatntgtttttcatttatcagtggaaataggagtacaactgtcatatatatatagatatagatatagatatagatattgcaaggttttctagccaca

SEQ ID NO: 2652 - DNA, 119 bp, Bos taurus
  Clone ID: 12-LIB3057-019-Q1-K1-C7
ggaggagtcggaggagtcggacgaggatatgggattcggtctttttgactaatcactagaaagcagccaactaggccagcattatttgtgaaatgagaaaataaaggcttacttctctt

SEQ ID NO: 2653 - DNA, 415 bp, Bos taurus
  Clone ID: 12-LIB3057-020-Q1-K1-C11
gtgcctctgacatttattggtgcatactttggttttaagaagaatgccattgaacacgcaggtcgaaccaatcagattccacgtcagattcctgaacagtctttctacacaaagccattacctggtattatcatgggagggattttgccctttgggtgcatctttatacagcttttcttcatcctgaatagtatttggtcacaccagatgtattacatgtttggcttcctgttcctggtgtttatcattttggttattacctgttctgaagcaactatacttctttgctatttccacctgtgtgcagaggattatcattggcagtggcgctcattcctcaccagcggctttactgcggtgtatttcttaatctatgcaatacactacttcttctcaaaactgcaaatcacgggga

SEQ ID NO: 2654 - DNA, 431 bp, Bos taurus
  Clone ID: 12-LIB3057-020-Q1-K1-C7
gcttcctggtgaagtgtgtttcttgaaatcatcaccaccatggacagcaaaggttcggggcagaaagggtcccgcctgctcctgctgctggtggtgtcaaatctactcttgtgccagggtgtggtctccacccccgtctgtcccaatgggcctggcaactgccaggtatcccttcgagacctgtttgaccgggcagtcatggtgtcccactacatccatgacctctcctcggaaatgttcaacgaatttgataaacggtatgcccagggcaaagggttcattaccatggccctcaacagctgccatacctcctcccttcctacccctgaagataaagaacaagcccaacagacccaccatgaagtccttatgagcttgattcttgggttgctgcgctcctggaatgaccctctgtatcacctagtcaccga

SEQ ID NO: 2655 - DNA, 415 bp, Bos taurus
  Clone ID: 12-LIB3057-023-Q1-K1-C11
tgaggagcaggagtctgcgctgcagctccctccctcaactgctcccgaagctgaagttgctaccgaggtctccccagaaacagccactccggagcccccttcttctgctgcagtttctccgggaacagaggaacctgtcggtgacaccaagaaaaaaattgacattctgctaaaggctgtaggagacactcctataatgaaaacaaagaaatgggctgtagagcgaacccgaaccatccaaggactcattgacttcatcaaaaagttccttaaacttgtggcttcagaacagttgtttatttacgtgaatcagtcctttgccccctccccagaccaggaagttgggaccctctatgagtgttttggcagtgatggtaaactggtcctgcattactgcaaatctcaagcatgggga

SEQ ID NO: 2656 - DNA, 325 bp, Bos taurus
  Clone ID: 12-LIB3057-025-Q1-K1-C7
gttctagatcgcgagcggccgccctttttttttttttttttttttttttttttggttggttttttttttttttttttaaaatgtaatcccccttgaatgcaagaccctgggaaagagcccgggctcgctggtaactggacacagcctttgtggtccctgcttgtgagctgtccaggctggaggcggctagctggcggtcccgtgtccaggaatgcttctttggctggttctgattgtgtttggagtttggccttgggtgaggccccagtgaggggtctgtggctacggtgtggcacgtggcattcgggcagcgttcattccaggg

SEQ ID NO: 2657 - DNA, 423 bp, Bos taurus
  Clone ID: 12-LIB3058-003-Q1-K1-C11
tgctgaggaggcgcggcgggggaccggcttggaaaatgccagtggcggtgatggcggaaagttcctttagtttcaaaaagttgctggatcagtgcgagaaccaggagctcgaggctccaggaggaattgctacacccccagtgtatggtcagcttctagctttgtatctactccataatgacatgaacaatgcaagatatctttggaaaagaataccacctgctataaaatctgcaaactcggaacttggggggatctggtcagttggccagcggatctggcagagggacttccccggggtctacagcaccatcaacgcccatcagtggtctgaggccgtccagccaatcatggaagctctcagagatgcaacccggatacgagccttcgccctggtctcccaagcctatacctccatcatcg

SEQ ID NO: 2658 - DNA, 426 bp, Bos taurus
  Clone ID: 12-LIB3058-003-Q1-K1-C7
gaagacgtgggttccaacaaaggagccattattgggctcatggtgggcggcgttgtcatagcaacagtgatcgtcatcactctggtgatgctggataagaaacagtacacatacatacatcatggaatgctggaggatgacgctgctgtgaccccagacgagcgccacctctctaaaatgcaacacaacggctacgaaaacccagcttacaagttctttgagcatatgcacaactagaccaccttcgcagctgcctctgaaattggaagcaaaaccattgcttcaccacccatcggtgttcatttagagaataacgtggagaagcgcatacgcttctgttttattatttactcattatgggctctcaacagctgtgctgtaacacatgtacatgcctgaacttgaatcaatatacaaatcagtaat

SEQ ID NO: 2659 - DNA, 391 bp, Bos taurus
  Clone ID: 12-LIB3058-006-Q1-K1-C7
tcaagcccttcttgacaaagcaaaaatcaaccaagggtggcttgattcctcaagatctctcatggaacaagatgtgaaggaaaatgaggccttgctgctccgattcaagtattacagcttttttgatttgaatccaaagtatgatgcaatcagaatcaatcagctttatgagcaggccaagtgggctattctcttggaagaaattgaatgcaccgaagaagaaatgatgatgtttgcagccttgcagtatcatatcaataagctgtcgatcatgacgtcagagaatcatctgaacaacagcgacaaagaagttgatgaagttgatgctgccctttcagacctggagattactttggaaggggggaaaacatcaacaattttgggtgacatc

SEQ ID NO: 2660 - DNA, 408 bp, Bos taurus
  Clone ID: 12-LIB3058-007-Q1-K1-C7
cggacgcgtgggcggacgcgtgggtgacagggacgagtgggactgggttctcagtccctgccttactccctcgagtccctgggagccccttgggggtggggcatgtcaggtctgctgactggagtctgagggtctcagtggcccccggacctgtgctcccttatgagtctggctcaggcagggctcctgcccccagccctcccagctcactggaggccgcccacctttctcccccgaccccccacagagctgagctgctccaagaacgagaaggagctcgaagagctgctcctggaagccagtcaggaatctgggcaggagacactgtgacgctttagctccctgttacccgtcggtcttcgaagagctgaggccagagccatgagaatctgctcaccctcaccccca

SEQ ID NO: 2661 - DNA, 338 bp, Bos taurus
  Clone ID: 12-LIB3058-008-Q1-K1-C11
gggacagcttgcactgacgcgagactttctgaatgtgccgggaatggcacatatggctgggctcaaccaaagaaaccagactcctgctaagaaagaggagttagtgtccagatatgatacacagtctgccaggggccttgagaagtcgcacagccgggaaaggagcagccaggagagtggagaggagaccaagagccaggagaactggccccaagagctgcaacgccatccggagggccaggaagcacccggagaaagtgaagaggatgccagccccgaggtggacaaactgcgctcgaggccaagacaccaccacgggaggagcaggcccgacaggt

SEQ ID NO: 2662 - DNA, 351 bp, Bos taurus
  Clone ID: 12-LIB3058-009-Q1-K1-C7
tcgcggtacacactgacatccacgtgtttcctaaccacacctgctgattccctaccatgggggtcctactttgctaagaatcactattctgtcttcattcttcgcctgtggttaggtgagagtgcggccatcagaggttgtctgacaggcctgctactgggaagggtgtcctgagttgttagagggtctccaggctcttctgattgtccttccctcccttctccaccatgagatctatgccacacaggccagtgtctgcagaacccttctttctaggtatggtttctgagctcctgtctgcacttatgcctcctccaaggatatttcccctaataatactcattcttatgc

SEQ ID NO: 2663 - DNA, 279 bp, Bos taurus
  unsure (170): unsure at all n locations; Clone ID: 12-LIB3058-010-Q1-K1-C7
gacagttctcctgctgtggacgctgtggtggagtgcaactcaaaactggacccaacgaagaccactctcctcaagatggcagattgcggtggcctcccgcagatctctcagccggccaagctggccgaggccttcaagtacttcgtgcagggcatgggatacatgccctncgccagcatgacccgcttgatgaggtctcgcacagcgtcaggctccagcgtcacgtccctggagggtgcccgcaaccgctcgcataccagcgagggcactcgcaaacgc

SEQ ID NO: 2664 - DNA, 408 bp, Bos taurus
  Clone ID: 12-LIB3058-011-Q1-K1-C11
tcgatccctctcaccagtgacgacattgtggacaagttgcagtactcccgggactgcacgtgtgaagagttctgccccgagtgctcggtggagttcactctggacgtgcggtgcaacgaagaccagacgcgtcatgtcacgtctcgagacctcatctccaacagcccccgggtcattccggtgacatctaggaaccgagataatgaccccaacgactacgtggagcaggacgacattctcatcgtcaagctgagaaagggccaggagctgagactgcgagcctatgccaaaaaaggctttggcaaggaacatgccaagtggaacccaactgcatgagtggcttttgagtatgaccctgacaatgccctgatgcacacggtgtaccccaagccataggaatggccaaag

SEQ ID NO: 2665 - DNA, 433 bp, Bos taurus
  Clone ID: 12-LIB3058-011-Q1-K1-C7
gtgcgccacaactactgaagcccacatgccctagaacccgtgctccacaagagacaccatcccagtgagaagcctgggcaccaaagctagagagtggcccctgctctccacaactagagaaaagcccacacagcaatgaaggcccggtgctgccaaaacaaaaaacacctgtagtaattttgtttaggaaaaaaagtagagaaactagaataatgaggtctcgtgtacccaccacaccaattcatggctgattatgactcgtccctcgcctgcctctacagagcctctaccatgcctttgtagtactttgaagcaaatcccagcttttcatttcatctgtaatatttcagtatgtatttctaaaatgataagtaattttatttctcaaaaatactaagaataaccacatgacccagcaattctattccttttg

SEQ ID NO: 2666 - DNA, 386 bp, Bos taurus
  unsure (331): unsure at all n locations; Clone ID: 12-LIB3058-012-Q1-K1-C11
ggacttcacgccctccgcctcccctatggaagtgctggacaggctgatacagcagggagcggacgtgcacagcaaggagctcaacaggttgtctttacccagcaagtctgtcgactggacccacttcggaggctctcctccctcagatgagatctgcaccctccgtaaccagttgcttttactgcacaaccagttactctacgagcgtttcaagcggcagcagcacgcgctgcgcaacaagcggctcctgcgcaaggtgatccgggcctcggctctggaggagcacaacgccgtcatgaaagaccagttgaagttgcaagagaaagacttncagatatggaaagattaatctgcagaaaggacaagcccaggtacaatcaggttca

SEQ ID NO: 2667 - DNA, 419 bp, Bos taurus
  Clone ID: 12-LIB3058-012-Q1-K1-C7
gaatatccttgtgcagctttatgaacctaaccctgagcactctggatatctgaacgggaaacaaagaaataaagtcaagaaaatttacctggatgaaaagagactcttggctggagaccattccatcgaccttctcttaagagacttttaagaaaaactaccatatgtacgtgtatcctgtgcactggcagttcagcgagctggaccagcatcctcgggacagggtcctgacccactctgagctcgcacctttgcgagcatctctcgtgcccatggaacactgcataacgcgcttctttgaagagtgtgaccccaacaaggataagcacatcaccctgcaggagtggggccactgctttgaaattaaagaagaagacatagatgaaaatctcctgttttgaatgaactcaaaataccca

SEQ ID NO: 2668 - DNA, 436 bp, Bos taurus
  unsure (424): unsure at all n locations; Clone ID: 12-LIB3058-013-Q1-K1-C7
ggcatggccatttttgtcccaagatttacataattttatccaaaaaaaaatgaacatcagattcccaggtatagaactgtgttctttgggaggaaaggaaaactggtgtttgtttttgagattgatggaataattaattaggaaggcaatgaaaaataaattaaaggttaaagtcagaagaatattaggaataaatgccacttttgcattatttagaaatacacattgttgtacatttgtaaaccgtttgctgtctgagcaatagtgactcagtttaataaaagcttcctatagtgtattggtatgaattaaatatataaaatatcctatttagactcaatgctgtataaaatatgatgggaaaaaagaaaatatgttattcttgcctctaaactttgatttattgaagttttatttggcaganaaaaaattgaat

SEQ ID NO: 2669 - DNA, 243 bp, Bos taurus
  Clone ID: 12-LIB3058-014-Q1-K1-C11
acgatcacgaacagagaaagacggttgcagttactctgcgtactagacagcataggggacactgatgtatagaacagtcttatggactctgtgggagagggagagggtgggaagatttgggagaatggcaatgaatcatgtaaaatatcatgtacgaaacaagttgccagtccaggttcgatgcgcgatgttggatgcttggggctggtgcactgggacggaccagatggatggtatgatgag

SEQ ID NO: 2670 - DNA, 313 bp, Bos taurus
  Clone ID: 12-LIB3058-017-Q1-K1-C11
cggacgcgtgggctagttctagatcgcgagcggccgcccttttttttttttttttttggttttgtttttttttttttttttttttttttttttttttttttttttttttttttttttaaaaacccaccttttaagcccagaaaaaaaatttccttaggaggggcagtcccaattttggggactgaaaagaggtttgaggggctgggcccttgggcccagagggaattaccgtttagggggtgagggttccccttttcggccccggaagatgggggggaaccgtataggctgtgtaacccatttgggagggatt

SEQ ID NO: 2671 - DNA, 436 bp, Bos taurus
  Clone ID: 12-LIB3058-020-Q1-K1-C11
ggggtcctctatcccactcttttctaaccccagcttacatctcccgtgcttcccccatgacctactgattcccaccttttgatttcagcatctcttccaccagacccccacgaagtccccacactggcgtcacaaccccccttaggatgaaaatgaggaatagtcaacgtaacgcccaaacgtggctctttaatccccttctaattctgaatatttcgcgtgggtttactataatgtctattaatacatagcctcaatgatgagaggataagaaaaaaaaaagaaaatttcagaaacaaaatctccaaattgctcgacacacacactgcgtcattgagctggttgtgactgagtgacctccattcgtggccacacccaacagtgagagctgtgaccacgggtcttaaggaaagtatgcactgttcttgagtattga

SEQ ID NO: 2672 - DNA, 301 bp, Bos taurus
  unsure (245): unsure at all n locations; Clone ID: 12-LIB3058-020-Q1-K1-C7
acttccagtacgagagcaaggtcttctacctgaagatgaagggcgactactaccgctacctggccgaggtggcttctggcgagaagaagaacagtgtggtggaggcctcagaggcggcctacaaggaagccttcgagattagcaaggagcacatgcagcccacacaccccatccggctgggcctggccctcaacttctccgtgttctactacgagatccagaatgcgcctgagcaggcctgcctnctagccaaacaagccttcgacgacgccatagccgagctggacacactaaacgagga

SEQ ID NO: 2673 - DNA, 453 bp, Bos taurus
  Clone ID: 12-LIB3058-021-Q1-K1-C7
actccggagacctgggggcgcgagtggccctacatgagctctacaagtatatcaacaaatactatgaccagatcatcactgccctggaggaggatggcacggcccagaagatgcagctgggctatcggctccagcagatcgcagcagccgtggaaaacaaggtcacggatctgtaggctctgcaagagcgcgggccggccgtgccccaaccctgcctggacagccctgggactgcgtgggagagaccgccttcttagatcccgtagtgcctgagcagcagagttagtggaaggtgcctcccgggctcctggtggctctggcccgggccccgctggactcgcctcgcaggccaggggccttgaggctggcggcgtggtgcccggtctgccgcccgtgcctggcgaccctgtgggctggtgcctgtgtgatgtcagtctgcagggagccaggact

SEQ ID NO: 2674 - DNA, 418 bp, Bos taurus
  Clone ID: 12-LIB3058-023-Q1-K1-C7
taaaagagctatatgcttgacaccctacccccttatttaacttttagattgtataagggttttatatcacatcttcccatattgttttcagaggaatgaggtttttaggtaggtagacaaagcatttgtaggaggttagatttgaatatacacagggtggattgttcaggtggttattggatggcttccagaatgtgatttgaagaatgtctgagagttcatgtgggtcctgttcagtgccatatatagagtcctgtctctgtaggtcaccattacatactaatctcgattctgaattttacattaaatgatttgagtgtatacagatctaaattttaaaatctgtacatatattatactgacgttctctaaggaattttttaatatgaatattgctgatttaaattgtatctatgca

SEQ ID NO: 2675 - DNA, 381 bp, Bos taurus
  Clone ID: 12-LIB3058-024-Q1-K1-C11
cagaaccttgccatccagttgggcatgctggacccagcagataaagatgaaaaggtcatgcctgtgactgctcgtgtggcgtttattcccggaactgataagaaactgaaactgtccatcctgtacctatctaccactggcagtaactctaatgagatcctaagagtaattatctatctccagctgacggtatataaaactgtcgtcacggccgttgactggctgaatgtttacagcgcactggttcttgcgaccgttcatgtgtaggaagccaaccaactttttgctaaaggagtataatcagaaaggagcatctgtcaagaaatacctgcgctactcactgcaaccataggctatgcatgcagaatgatccagagcttg

SEQ ID NO: 2676 - DNA, 389 bp, Bos taurus
  Clone ID: 12-LIB3058-024-Q1-K1-C7
gtgaccagcggccgcgctcgccctccgcgcccggcgcccgcagcccgcagccctatggccccgtcccgcctgcagctcggccttcgcgccgcctactcgggtctcagctccgtggccggcttctccatcttcctcgtctggacggtggtctacagacagccgggcaccgcggccatgggggggctcgcaggtgtgctggcgctgtgggtgctggtgacgcacgtgatgtacatgcaggattactggaggacgtggctcaaggggctgcgcggcttcttcttcgtgggcgtgctgttctcggccgtctccgtcgccacgttctgcaccttcttggtgctggccatcactggacaccagagcctcacagaccccaacagctactacctctc

SEQ ID NO: 2677 - DNA, 428 bp, Bos taurus
  Clone ID: 12-LIB3058-025-Q1-K1-C7
gcgagctgagtggttgtgtgattgcgtcccggagaccggtagcgcttgcagcatggctgaccaactgactgaagagcagattgcagaattcaaagaagctttttcactatttgacaaggatggtgatggaactataacaacaaaggaattgggaactgtaatgagatctcttgggcagaatcccacagaagcagagttacaggacatgattaatgaagtggatgctgatggtaatggcacaattgacttcccggaatttctgacaatgatggcaagaaaaatgaaagatacagacagtgaagaagaaattagagaagcattccgtgtgtttgataaagatggtaatggctatattagtgcagcagagcttcgccatgtgatgacaaaccttggagagaagttaacagatgaagaggttgatgaaatga

SEQ ID NO: 2678 - DNA, 425 bp, Bos taurus
  Clone ID: 12-LIB3058-026-Q1-K1-C11
atgtgcaccaagaccaaggaggagtgtgagaagcactatatgaagcatttcatcaataaccctctgtttgcatctaccctgctgaacctgaagcaagcagaggaggcaaaaactgctgacacagccattccatttcactctgcagatgaccctccccgacctacctttgactccttgctttctcgggacatggcaggatacatgccagctcgagcagatttcattgaggagtttgacaattatgcggagtgggacttgagagatattgattttgtcgaagatgactcggacattttacacgctctgaagatggctgtagtggatatctatcattccaggttaaaggagcgacaaagacgaaaaaaaattataagagaccatggattaatcaaccttaggaagtttcaattaatggaacgacgata

SEQ ID NO: 2679 - DNA, 422 bp, Bos taurus
  Clone ID: 12-LIB3058-028-Q1-K1-C11
ctgactcttactcggagcgtgttctgactcttggtaaaaaaaaaaaaaaaatgggaacgagaaattttaaagatatggcttaaaaaatatataaaaaactttatatatatagatttgctcattcatgaattttattttttactacttcaatattttacattcttttatttatctttccactatcttatactatcatttcctctgaactcatttacatttccccaagttatttatttctcttcaatttcccttttttcttgttttcattataactatttttactattcatcacttttttttttgacattctcatatccatatttttcttttaatatttcttttttttatcttttcatttttttcttctcttttacattatttttttaatctatttctttttcattttttcttttacttttttt

SEQ ID NO: 2680 - DNA, 444 bp, Bos taurus
  Clone ID: 12-LIB3058-029-Q1-K1-C7
ccttcttcttacaacattctggataacagcaagatcatcagtgaggagtgccggaaagagctcaaagcgctttttcaccattattacccaattgagattgacccacaccggaccatcaaagagaagttacctcacatggtagaatggtggaccaaagcacatgacctcctgtgtcaacagaagattcagaagtttcagatagcccaggtggtaagagagtccaatgcaatgctcagggatggatacaagacattcttcaacaccctttcgcagaacaacattccccttttcatcttttctgcgggcattggggatgtcctggaagaaatgatccggcagaggaaggtgttccaccccaacatccacatcatgtctaactacatggagtttgatgaagatggcttcctaaacggattcaagggccagctcatccatacctacaac

SEQ ID NO: 2681 - DNA, 413 bp, Bos taurus
  Clone ID: 12-LIB3058-030-Q1-K1-C11
tctagatcgcgagctgccgcccttttttttttttttttttttttttggttttttttggttttatcctctcatcattgaggctatgtattaatagacattatagtaaacccacgcgaaatattcagaattagaaggggattaaagagccacgtttgggcgttacgttgactattcctcattttcatcctaaggggggttgtgacgccagtgtggggacttcgtgggggtctggtggaagagatgctgaaatcaaaaggtgggaatcagtaggttatgggggaagcacgggagatgtcagctggggttagaaaagagtgggatagaggacccctacccgtcctgactggggccggcacccagtccggcagcgattcgggaaaagcgagtgtactggtcagtgggtttttgggagg

SEQ ID NO: 2682 - DNA, 339 bp, Bos taurus
  Clone ID: 12-LIB3058-032-Q1-K1-C7
acgcgttcgcgtctgcctacaatgcggtagagactgtttttgatccctgggtcgggaaggtcccctggagaaggaaatggcaacccactccagtattcatgcctggaaaatcccatggaccgaggagcctggtgggctacagtccatgggatcacaaagagtcggacatgactgagcgacttcatttcattcattcaagccgacctttgttcccctttgaaatcccttcaagcttttggatgttcttggtggtaacagcattagattttgggatatctttctcggattcaaccttgcatttaatggtttttagacattaacataacggattctttaaaa

SEQ ID NO: 2683 - DNA, 341 bp, Bos taurus
  Clone ID: 12-LIB3058-034-Q1-K1-C7
tgactatcctttgtttttgtaatttttttttgaaaatgaaagggtgcggttcaggatggcactgtgaataattaatgtaaatcagtgggttttctttacttgtgtctttggttgggttttgttttcaaaagaagttattattttcaaagtgcctcccacctagagctaggccatgaccactttgggtacaagagcctaacttcataggattcacagtctgttgcaaagtgcagtcatttctggatattaacctcagtgcaggtcatcatgtgaaatgttaattttgacatctggcaactagggtttgacgactgattgctcctattcgcccacaggtcagt

SEQ ID NO: 2684 - DNA, 438 bp, Bos taurus
  Clone ID: 12-LIB3058-035-Q1-K1-C7
cagtaatcagatataaataaggtttaatattgactgcaaactgtgactcaatgaatacttgtatgccaaaaaaaaaaaaaaaaggttttaaagttgagatagttttacacatctttattaagtctaaaactatctcaactttaaaaagatgtgtaaataattttgattagtattctcattataatgaagttactgttaatttggtgcaatacgttcttccctttctcatccttttaaaattaaatatataagatgtatgttttgttttgttacattgaatgttttaaaatttttcagtgtgtgtatatgagctagtttgattgtttctgtatagcatgattgaagataattgaaaaatttgcacattttttagtcatttggaaatttgtagtctaacagtttttaagaatatgcatttattttgtaaataataaatta

SEQ ID NO: 2685 - DNA, 434 bp, Bos taurus
  unsure (405): unsure at all n locations; Clone ID: 12-LIB3058-036-Q1-K1-C7
cggacgcgtgggttaaaaattatacatctggatatcccataattcacaaaataatttagaaatgacttaaaatcctcaaaggcattcctaagttaacctttaacataagaagcgttagagactatttacaggcggctcttgggcccatgtgtgagattatttaaaaagactctatacattatgtgccaattataatctcccaagaataccccagtgaagagatgtcagttacacaaagcaaggtattcacagggccgaagtgaatgatacacatctgtatttttctcaggctaccatgttttcttcctgttacttccaattcctttgagttgtgctaaagaaatttctttatatttcatatgtatttttaaatagaggataattactttacaatattgggagggntctgccatacatcagcatgaatcagcata

SEQ ID NO: 2686 - DNA, 354 bp, Bos taurus
  Clone ID: 12-LIB3058-038-Q1-K1-C7
ctcagccctggattccaccaacgtggagtatagcatttaagaacatcctcacagagatctgatcgcatcgtgtcacagaagcaaattgcggaccgtgcagcgcacgacgagtcccccggaaacaacgttgtggacatcagcgtgccgcccaccaccgacggacagaaacccaacaagctgcagtgctgccagaacctgtgaccgccccgcacctgttccgagcgtgcgtgctcgtcccggccctccgcccctctcaattggcccgccccaaccttcccgccctctacgactggctccggcccttccctcaagctccgcacgaagaaccagaccaaggaaagctaggagcccctg

SEQ ID NO: 2687 - DNA, 422 bp, Bos taurus
  Clone ID: 12-LIB3058-041-Q1-K1-C7
cgcgagcgtccgcccttttttttttttttctttttccaggttttaaaagcgggatttagtgattgaaaataagtgtgtagataagctctcagtagcacggactccacattattttttaatgggtttgaagtacatgaagactccttaaatcttccaccatttatcttgcgtgtgcttttaaccaccaccacattcaaatggaggtgaattttcaacatcttacttgaaaattttttgaaaaaattcttcctttagcagctcttcatagtttgacagacttttggaaaaagataaaaacacactacagttgtgtacgttgaacatttattacaactaattggcaatgtggtaagatagtgctcacgtggcctcaatattggtcacaatcacaacaaagcttaatccagcccagcgatacaaat

SEQ ID NO: 2688 - DNA, 402 bp, Bos taurus
  Clone ID: 12-LIB3058-042-Q1-K1-C11
caagaagttggagaccgctgttaatctgtcctggaccgcaggaaacagcaacactcgcttcggaatagcagccaagtaccagattgaccctgatgcctgcttctcggctaaagtgaacaactccagcctgataggattaggatatactcagaccctaaagccaggtatcaaactgacactgtcggctctgctggatggcaagaacgtcaatgctggtggccacaagcttggtctaggactggagtttcaagcataaatgactattgtacaatcgtttaattttaaactattttgcagcatagctaccttcagaatttagtgtaccttttaatgttgtatgtctgggatgcaagtattgctaaatatcatgttagacttccaggttaaagatgattcagcttt

SEQ ID NO: 2689 - DNA, 425 bp, Bos taurus
  Clone ID: 12-LIB3058-042-Q1-K1-C7
cttcttactggagcaacagctgtatgatgaagacgacgatgaggaagattgcccaaagcccgaggaatgtaacctcgatgagccaaatgcagaaagcgattacacgtatagcagctcctatgaacaattcaatggtgaattgccaaatggacgacataaaattcccgagtcacagtttccagaattttccacatcattgttctctgggcctttagaacctgtggcttgtggctctgcactttctgagggatccccccttactgaacatgaggaaagcagtccatcccatgacagaagcaggacagtttcagcctccagcactggggatttgccaaaaacgaaaacccgggcagccgacctgctggtgaatcccctggacccccggaatgccgataagattagagttaaaattgcagaccttggaa

SEQ ID NO: 2690 - DNA, 433 bp, Bos taurus
  unsure (409),(411): unsure at all n locations; Clone ID: 12-LIB3058-043-Q1-K1-C7
gaaatgtttagctcacatttcacccggattgggtttgtcctccagaaccatctgggcccaactcttgagaagcaagggcttggtgacaggtccgggccaacacccaccccaagggacgctgaagcccgtgctgaatttggggctggtgatgtcccgaaagggttttgtctgtctggttatttagatttctcatgtgtgttggaagaattgcctgatgctgttaattctgtagaaacaaatttgtctggaaacgctgagactgcagtttgctttcctcttccctcagacgatcgcctacagcattttatgggacttgaagtttctgatgaggaacctggccctgggaggaggcttgctgctgctgctggctgagtcccgatccgaaggcaagagcatgttcgcgggcgtncncaccatgcgtgagagcttcccc

SEQ ID NO: 2691 - DNA, 441 bp, Bos taurus
  Clone ID: 12-LIB3058-044-Q1-K1-C11
ggcccgacccactcgttccggggcgtgggcgctggccagaccatttcctgacttacgcgcggacgcggggctggcggcgctggagcggacttgcggcgggaccagaggcgtgagagcagcagccatgtcagcggaactggagacctcacaggggttaggatgagccagagaaaaagacctccggggtcccagagaaggaaaaccacaccacgatggcagacctttccgagctcctgaaggaagggaccaaggaatcacatgaccgggcggaaaacacccagtttgtcaaggacttcttgaaaggcaacatcaagaacgagctattcaagctggccaccaccgcgctgtacttcacctactccgccttggaggaggagatcgaccggaacacggaccacccaggctttgcccccttgtacttgcccacggagctacaccgga

SEQ ID NO: 2692 - DNA, 268 bp, Bos taurus
  Clone ID: 12-LIB3058-044-Q1-K1-C7
agagctagagctgcgaaggccgcgagggaggcgaccccggctcatcatgactcgaggcttatcccgaaagagccacacgttcctgcccaaggacatcttccgcataatgtcaaactcagacgccaaggacaagccgaagctgcagtttacctacctgcaggatgatgagacggtggccacgctgcaggattgcaagacgctcttcatcctgcgaggcctgcctgcgagcggcaagtccacgctggccctgttcatcgtggacaagtac

SEQ ID NO: 2693 - DNA, 437 bp, Bos taurus
  unsure (365): unsure at all n locations; Clone ID: 12-LIB3058-045-Q1-K1-C7
aaggaagtcatgaaacagtatggactttgacctaatggtggcatagtgacctcactcgatctctttgctaccagatttgatcaggtgatgaaatttattgagaaggcccagaacatgtctaagtatgtcttgattgacacacctggacagattgaggtattcacatggtcagcttctgggacaattatcactgaggccctggcatcctcgtttccaacgattgtcatttatgtaatggacacatctcgaagtaccaacccagtgaccttcatgtccaatatgctctatgcctgcagcatcttatacaaaaccaagctgccttttattgtggtcatgaataaaactgacatcattgaccacagctntgcagtggaatggatgcaggattttgaggctttccaagatgctttgaatcaagagactacatacgtcagtaa

SEQ ID NO: 2694 - DNA, 392 bp, Bos taurus
  Clone ID: 12-LIB3058-046-Q1-K1-C11
cccacgcgtccgggtacatcagtgatactgaagctatgggtataccggttatgaggacttaagcttcgactcctacataattccaacatcagaattaaagccaggggagctacgactattagaagtcgataatcgagttgtactaccaatagaaataacaatccgaatgttagtctcctctgaagacgtattacactcatgagctgtgccctctctaggactaaaaacagacgcaatcccaggccgtctaaaccaaacaacccttatatcgtcccgtccaggcttatattacggtcaatgctcagaaatttgcgggtcaaaccacagtttcatacccattgtccttgagttagtcccactaaagtactttgaaaaatgatctgcgtcaatat

SEQ ID NO: 2695 - DNA, 416 bp, Bos taurus
  Clone ID: 12-LIB3058-047-Q1-K1-C11
gcgagcggccgccctttttttttttttttttttcatgcttagtgttttatttcataagggaagccccgcctcggccctcagaaccgcggccctgggtccctcccagctccacctcccaaccgtcgggcttttttccacgtcctgcagcttccagcctcgcaccagcaacgttgccttgacaagtccgtacactttaaacagtgaaccttccgtaggctttcataatgaataacgttaagtatcaatcactgtcacacaaggggactggaaggcagctcactcagtgcagagcacggccacgccgcgctcgtagaagctccgcgggtcctccttggtggcgatctcgaagtcgaccgtgaagatgaggtcggcgcgggtgaagttcaggtagacaggcagggtcaccacgctcgcct

SEQ ID NO: 2696 - DNA, 355 bp, Bos taurus
  Clone ID: 12-LIB3058-047-Q1-K1-C7
cggacgcgtgggcgcctggtgactcttttctcccagcaggccacgctgttggcgtccggcgaagcctttaaaaagcaggcagagagcgccagtgatgcaaccaaaaagtacatggaagaaaacgaactggtcaagaaggaagcttgcggtgtcaccaaattgggtggcaaggacagcgaaatgaaagtgcaagaagagaacaggagcctgaaggctgatctcaagaggctgaaggacgagctggctgtcaacaagcaaaagctggagaaggcggaaaatgaagctctggccatgccgaagcagtctaagggccttaccaaggagtacgaccggctgttggaggagcacacgaagc

SEQ ID NO: 2697 - DNA, 388 bp, Bos taurus
  Clone ID: 12-LIB3058-049-Q1-K1-C7
cggacgcgtgggtccgcccaccctttttgcccacccccactccagctattgactacatccagtttttgcacaaggagaagaaaaagcaggaggaggaggtatccacgctccgcaaggatgtcatggccctaaagatcatgaaagtgtaagggagggtgttgggttgggggaaccagggcatctggttttgaggggactctgaggcctcttcagttcacaccctgcccttcttcaaaggccgcatcagatgatattcttagtcccttgtgtggtaggcaccacttaatcccaactgtagcaaataatactctggaaacaccagtgggatttaatgaaggaaaggttggagggggtaggccagcactgctgacgtagaagctgatgttga

SEQ ID NO: 2698 - DNA, 391 bp, Bos taurus
  Clone ID: 12-LIB3058-050-Q1-K1-C11
aaaagagtgcatatggagatgatttttatttagcacagaattgacttcctttatattgtggcttttttatgttgcatgttgcttttggtatcagcctgactctttgcccagtatatgatagttctgctgatgttttattgtttattggtgaacatatcttcattaagagtttttggaaaactcatcaaactcaatgaataagttttcttcataacccatttggaattattcctaataaaatgataaaaacattaaaaaaaaaaaaaaaaaaaaaaaaaaaaaaatactataaaataaaaaaaaaaaaaaaataataaaaaaaataaaaaaaaagggcggcctttttaaaggatccaagttatcttacccttgcatgcaacttcaaaacttt

SEQ ID NO: 2699 - DNA, 317 bp, Bos taurus
  Clone ID: 12-LIB3058-051-Q1-K1-C7
cggacgcgtgggaaaaaaaaaaaaaaattaaaaaaaaaaaaaaaaaaaaaaaaaaaaaaaaaaaaaaaaaaaaaaaaaaaaaaaaaaaaaaaaaaaaaaaaaaaaaaaaaaaaaaaaaaaaaaaaaaaaaaaaaaaaaaaaaaaagggggggcctttttaaaggtttaaagtttatttatggtttattgcaaattaataatttttttttggtttcactaaatttaaattaatggggttgattttaaaaaattattaatgggaaaaatctgggtgtaaccaatttaaatttctttgaaaaaaaaccctttttttaaaa

SEQ ID NO: 2700 - DNA, 423 bp, Bos taurus
  unsure (403): unsure at all n locations; Clone ID: 12-LIB3058-053-Q1-K1-C7
actcgaacgtgctattcctcatgtacgaagacatgcaccgggacctggtgaccatggtggagcagctggccaggttcctgggggtgtcctgcgacaaggcacagctggagtcactgaccgagcactgccaccagctggtggaccagtgctgtaacgccgaggccctgcccgtgggccggggaagggtcgggctctggaaggacatcttcaccgtctccatgaacgagaagtttgacctggtgtacaagcagaagatggggaagtgcgacctcacgttcgactgttatttataatatcagcaaccgcacacttgcatgctcacagtacccagacactatagctcagagtcccatttgcactcatttgttccttgctggacagactctggaagtgagacctcggnggagggaggggacatggccg

SEQ ID NO: 2701 - DNA, 423 bp, Bos taurus
  Clone ID: 12-LIB3058-054-Q1-K1-C7
gcggcggctggagcgggccgtttgaggcgggcggcgtcggccgtgttgctccgggccccgcgcctgcccgcccgggagctctcagctcccgctcggctctatcacaaaaaggttgttgatcattatgaaaatccccgaaacgtggggtcccttgacaagacatctaaaaatgttgggactggattggtgggggctccagcgtgtggtgatgtcatgaaattacagattcaagtggatgaaaaggggaagatcgtggacgccaggtttaaaacatttggctgtggttctgccatcgcctctagctcgttagccaccgaatgggtaaaggggaagacggtggaagaagccttgaccatcaaaaacacagacatcgccaaggagctgtgccttccgcctgtgaaactgcactgctccatgctggct

SEQ ID NO: 2702 - DNA, 203 bp, Bos taurus
  Clone ID: 12-LIB3058-057-Q1-K1-C7
caaacttctgaagaagcctgatcagggccgagctgtgagcacctgtgcacatctgttgtggtctggcagaaacacagactaaaacggagaggagctgcatggaggcaaaagggtaatggaatgcctaaggaaagcattgaaagtagcagattaatacatggacttgactgaacaagtgcaacatttaatagaaatgatgaaca

SEQ ID NO: 2703 - DNA, 423 bp, Bos taurus
  Clone ID: 12-LIB3058-058-Q1-K1-C11
cgtgctcatggccctgctgctcctgcactcagcgtcttcccagtcacatcgagactttgtgacgccgggccagcagaagagggaggccccagttgatctcttgagccagatcggtagctctgtgcggggaaccttggatacctggattggggcagaaaccatgcacctggtttccgagaccttggcgcagataatgtgggccatctcgtcagccatttctgtggccttcttcgcactgtctgggatcgctgctcagttgctgaacgccttggggctagaaggagatcacctcacccagggcctgaagctcagccccggccaagtccagaccttcctgctgtggggagcaggtgccctggttgcctattggctgctgtcagtgctcctcggcttggtcttggccttgctggggcggatcctgtg

SEQ ID NO: 2704 - DNA, 439 bp, Bos taurus
  unsure (432): unsure at all n locations; Clone ID: 12-LIB3058-058-Q1-K1-C7
ctcttccgcaagggcaaggtgctggcccagcaaggcgagtatagtgaggccatccccatcttgagagcagccctgaagctggaaccttccaacaagacgatccacgcagagctctcgaagctggtgaagaagcatgcggcccagaggagcacggagaccgccctgtaccggaagatgctgggcaaccccagccggctgcctgccaagtgtcctggcaagggtgcctggtccatcccatggaagtggctgtttggggcaactgctgtcgccttggggggcgtggctctctctgtggtcattgctgccaggaactgaccgcccaggtggccaccatcccctccactcaccgtggacccccaccctgtgctccctaacacccccaggctccctgtccactgctctaactggcctagccccctcctctggggcggnggcagtg

SEQ ID NO: 2705 - DNA, 352 bp, Bos taurus
  Clone ID: 12-LIB34-001-Q1-E1-C7
ggtagatcaattattaactgactacgaaatcaaagatgggcatgttattctgcaactgaactcgattccttccaacgagttcctttgtgttcgattccggataattgaactttttgaagttgggtttctgagccctgccaccttcacagtgtatgagtaccacagaccagataaacagtgcaccatgttttacagcacgtcgaacaccaagcttcagaaagtctgtgaaggagtaacgtgcaaatgtatcgaagctgactgtgggcaaatgcaggcagaattggacctgacaatctctgcagctactagagaggaaacagcatgtagaccggagattgcatacgcttataaa

SEQ ID NO: 2706 - DNA, 412 bp, Bos taurus
  Clone ID: 12-LIB34-002-Q1-E1-C7
ggttcctaagagtgaagctctggaagtcaccaaatttgctatagaggttgggttccgccatattgactgtgctcatgtgtaccaaaatgaagagcacgttggccaggccattcgaagcaagattgcagatggcactgtgaagagagaagacatattctacacttcaaagctttggtgcactttccttcgaccagagttggtcagaccagccttggaaaagtcactgaaaaatcttcacctggactatgttgatctctatattattcattttccactggctatgaagccaggggaggaattattgccaaaagatgaaaatggaaaactgataggtgattcggtggatctctgtcacacgtgggaggccctggagaagtgtaaggatgcagggctggccaagtccatcggggta

SEQ ID NO: 2707 - DNA, 399 bp, Bos taurus
  Clone ID: 12-LIB34-003-Q1-E1-C7
gcggccgcccgcgatctagaactagattccttctaagatggattttgagctgtacttgggatatgaatatgtcactgctcttcagaatctaagagaaagtaaacccccggactcctcaaaggatgagtgcatggtgaagtggtgtgcaattggtcaccaggagaggacaaagtgtgatcggtggagtgggttcagcggcggggcaatagagtgtgaaacagcagagaacactgaagagtgcatcgccaagatcatgaaaggagaagctgatgccatgagcttggacggaggctacctctacatagcaggcaaatgtggcctggtgcctgtcctggcagagaactacaaaactgagggtgaaagttgcaagaacacaccagaagaagggtatcttgctgt

SEQ ID NO: 2708 - DNA, 387 bp, Bos taurus
  Clone ID: 12-LIB34-004-Q1-E1-C11
gtggaaaatgctattatacacaatcagaagtctagatatcagagtggtgagagagcacgttacgaatgcattgggaattatgacctttttggagagacagaagtcatatgtttgaatggaatttggacagaaccacctcagtgtaaagactctcaaggaaaatgtgggcctcctccaccaatagacaatggagacattacctcactcctgcaatcagtatatcctccaggatcgattgttgagtaccggtgtcaggcctactatgaacttcggggaaacagaaatgtagtatgtcagaatggagagtggtcacaactaccaaaatgcttagaggcatgtctaatttcagaagaaacaatgagaaaacatcacatacagtttagatgg

SEQ ID NO: 2709 - DNA, 413 bp, Bos taurus
  Clone ID: 12-LIB34-004-Q1-E1-C7
ccttggcagagcacattttcctattattgacgatacccagagaggatatggactcattttcagcaatggagacacgtggaagcaaatgcggcgcttctcccttatgaccctaaggaactttgggatggggaagaggagccttgaggagaggatccaagaggaggcccagtttctggtggaggagttcaggaaatcagaggctcagccctttaaccctgctgtcaccctgtcctgtgctacctgcaacatcatctgctccatcctcttcaacgaacgtttccactaccaagataagacccttcactccctgctggatttgttaaatgaaaattttaatcgaataagctctctctggaaccagatttacaatctatggccaaaactcataaagcctctccctggagagcacagag

SEQ ID NO: 2710 - DNA, 429 bp, Bos taurus
  Clone ID: 12-LIB34-005-Q1-E1-C11
ctgggacgcgcgggtcgacgcaagactctatagtgagtcgtattagccggtataaggccaccttgccagaccatgggaacctgtatgacttagagagaggcgaccatgtcctctcaaaagccagagcgagcacatagcctggtgggctgggactcccatctttctacaatcttcctattgctgctatttgtagactcagtccaagggctcattccaaatcctgatgcttgtcaggtgttctcctcggtcaatggcagctccatctcatgtcatccatctgctcaaatctcgcagagccgcacagctgacaccatcattctggctgtggagttcttcaatctgactcagctgcctgtcgagttcctccagggcgtccctaacctccaggaagtccatctttccagcaaacgactggaggacttctccccc

SEQ ID NO: 2711 - DNA, 382 bp, Bos taurus
  Clone ID: 12-LIB34-005-Q1-E1-C7
tgagaaaaaagggtggttcaatgatataataatcactcaagagttgagtataagagattcctcaggagacatgtagtctgctattcccatctcttcaagaatattccagtttgttgtgatccacagttaaaggctttcacacggtcgatgaagtataagtacatgtttttttaattctcttgctttttctatgatctagcataagttggcaatttgatttctggttcctctgccatttccgaatccagcctgtacatctggaagttctctgttcacgtactgctaaagcctagcttgaaggatttcagtaaaatcttgttatcatgtgaaatgactgcaattgtacagttatttgaacattctttggcattgcctttctttg

SEQ ID NO: 2712 - DNA, 404 bp, Bos taurus
  Clone ID: 12-LIB34-006-Q1-E1-C7
ggccaatggagctgggcacacaggtctgtaggcagagcatctgcacagagtaaaaggggaacaactgttagagcaactttgtgtgagtccttccaagacccattccagtgtctgggagaaatctcaccattacctgtgtcccctcatccccttcctgtttcctcgtagtgcctcagacagccccactgttcttctgaacactttctggtccaggaaaccaggctgtgtgtgtctgtcccataaaaggccatgtggctgtacctggtggtcctcgtgggcctgtactacctcctacgctggtaccgggagaggcaggtggtgagccacctccgggacaagttcgtcttcatcacaggctgtgactcgggcttcgggaacctgctggccaagcagctggacctgag

SEQ ID NO: 2713 - DNA, 289 bp, Bos taurus
  Clone ID: 12-LIB34-007-Q1-E1-C11
tcgcaatactctatagtgagtcgtattagaagtatctcttgtaggagtactagtataccgatcccacctaatatccgcgcttctatgcttagaatgaatattgctacccctattcgttggagcagctctaatacttctcaactcacattttacattatctagcacaatacctattatcctactagtcttcgcagtctgtgaagtagccctacgtctatctctactagtagtagtatcaaatacatatggtagtgattatgtacaagagctcaacttaatccaatgcttt

SEQ ID NO: 2714 - DNA, 374 bp, Bos taurus
  Clone ID: 12-LIB34-007-Q1-E1-C7
gcttcgtgtgctccgttcaattctggagaatttgagaagcatcatacaggaattagaatcggatgtctcaactcagatggaatactgccgcaccccgtgtactgttacttgcaatattcctgtggcgtctggcaaataatgtgaggaaatcatcatgaatggaggtgaaacatctgaaatgtacctcattcatcctgaggattctagcagaccatatagattatactgtgatatgaaaacggaaaaaggatgatggacagtaattcacaaccgtcaagatggtagtgttgactttggcaagaaatgggatccatatacacagcgattttggaatatctgcatccaatgcataagggaagaaatactgtggtgta

SEQ ID NO: 2715 - DNA, 419 bp, Bos taurus
  Clone ID: 12-LIB34-008-Q1-E1-C7
gaaaatacctatacgaaattgctagaagacatccctacttttatgcaccagaactcctttactatgctaataaatataatggagtttttcaagaatgctgccaagctgaagataaaggtgcctgcctgctaccaaagattgaaactatgagagaaaaagtactgacttcatctgccagacagagactcaggtgtgccagtattcaaaaatttggagaaagagctttaaaagcatggtcagtagctcgcctgagccagaaatttcccaaggctgagtttgtagaagttaccaagctagtgacagatctcacaaaagtccacaaggaatgctgccatggtgacctacttgaatgcgcagatgacagggcagatcttgccaagtacatatgtgataatcaagatacaatctccagtaaactg

SEQ ID NO: 2716 - DNA, 370 bp, Bos taurus
  Clone ID: 12-LIB34-009-Q1-E1-C7
agaggacaagctgatcaccagagagtaccagaccattgaggacaggtgcgtctacaactgcagcttcataaaaatcgatcgtcagaatgggaccttgtctaaagttgagtcggacagagaacactttgttgacctggtgctcatcaagcacttcaggagcttcaagcgtggtgactcctgaaatggcacaaagaacgtgggggtgtccttctatgctaactgaccagaagttacccaatatcagggaagtagagttcgttcactgtcaacaattgcatatgcatccatgaatcccaaatcatgtacactgacgagaagaaggatgcttgtaggccgcaggaaaagcagcatgaggacgacaggaatattg

SEQ ID NO: 2717 - DNA, 400 bp, Bos taurus
  Clone ID: 12-LIB34-010-Q1-E1-C11
atccagcgaaaccacagccaagggaacgggcttggcggaatcagcggggaaagaagaccctgttgagcttgactctagtctggcacggtgaagagacatgagaggtgtagaataagtgggaggcccccggcgcgcccccgtttcccgcgagggggcggggcggggtccgccggccttgcgggccgccggtgaaataccactactctgatcgttttttcactgacccggtgaggcgggggggcgagcccgcgaggggctctcgcttctggcgccaagcgcccggccgcgcgccagccgggcgcgacccgctccggggacagtgccaggtgtggagtttgactggggcggtacacctgtcacacggtaacgcacgtgtcctgatgcgagctcagggatgaca

SEQ ID NO: 2718 - DNA, 426 bp, Bos taurus
  Clone ID: 12-LIB34-011-Q1-E1-C7
atagatcgcgagcggccgccctttttttttttgcagtttagaaactcttaagaatgtaaggactttatcccttctgcttgatacagcagaggtgagctaccagccagtctagcctaagtgaaaagtggaaagattcttcaccaagcaggtgattaacctgatacacatgagatctagaaggaatgttgtttaaattacctcttctgcctgaatacgtgaattctttcagatcagcagaaaaagaagcctaaaaactcttaaaagtgtgaatctcaattgtaactgaaaatcagaagtggctgcagattataagttggcttatggaatgtgatggatatgctgtgataggaaacctgaaatgatggttgaatgggttaaaaaaaaactgcataaaatttgctgtaagatatatagacttattttccg

SEQ ID NO: 2719 - DNA, 380 bp, Bos taurus
  Clone ID: 12-LIB34-012-Q1-E1-C7
gcggcagcacatggcggctccaggacgtcctgctcgggagacagcggcagccccaggcccagggcgccctacgtgccgtgacgctgcctcgaggaccaagaagcaaaagaagaaaacccgggatggggcgtctgttgccaatggaagcgggaagaccccagaaaagcaggaccccgaggaagcccccctaagcgcagaggcccaggctgagcagctggctcgggaactggcctggtgcgtggaaaagctggagctgggactgaagatgcagagacccacccctaagcagaaagaacaagctcttggagccatccgaaccttgcgcagccagagaacccctctgccccggaagaggcagctgatgcgctctttggttgggg

SEQ ID NO: 2720 - DNA, 341 bp, Bos taurus
  Clone ID: 12-LIB34-013-Q1-E1-C7
atttggcacactgaaatgggtgacttttatttctcttcaccttctcttcagctctgcgtactccagaggtgggtttcgtccagatacacacaacaatgagattgctcatcggtttaaagatctgggagaagaacattttaaaggcctggtactgattgccttttctcagtatccccagcattgtcaaattgatgagcatcgtgtcatcaggtggcgaatgaattgagtttgacaaaaattgtgttgcgtctaagtcgcatgccagctgtgaaaagtcacttcacactcgctttggagatcagctgtgtatacttgcatcccttcatgacacctacggtgac

SEQ ID NO: 2721 - DNA, 381 bp, Bos taurus
  Clone ID: 12-LIB34-014-Q1-E1-C11
aaaagtcccacccactaataaaaattgtaaacaatgcattcatcgaccttccagccccatcaaacatttcatcatgatgaaatttcggttccctcctgggaatctgcctaatcctacaaatcctcacaggcctattcctaacaatacactacacatccgacagaataacagcattctcctctgttacccatatctgccgagacgtgaactacggctgaatcatccgagacatacacgcaaacggagcttcaatgttttttatctgcttatatatgcacgtaagacgaggcttatattacgggtcttacacttttctagaaacatgatatattggagtaatccttctgctcacagtaatagccactgtatttatcagatacg

SEQ ID NO: 2722 - DNA, 416 bp, Bos taurus
  Clone ID: 12-LIB34-014-Q1-E1-C7
actcagcgtgcggggcgaccatgtccggaggtagcagctgcagccagaccccgagccgggccatccccaccactcggagggtggtcctcgccgacggcgtgcagctgccccctggggactacagcaccacccccggcggcacgctcttcagcaccacccctggaggtaccaggatcatctatgaccggaagttcctgatggagtgtcggaactcacctgtgaccaagacgcccccgcgggacctgcccaccattcccggggtcactagccctataggcgatgagccccccacggaagccaggcagaatcacctgcgcagcagccccgaggacaagccggcaggcggtgaacagtcacagtttgagatggacatttaaagggccagccatcggagcgagccatgcctccaggcccca

SEQ ID NO: 2723 - DNA, 397 bp, Bos taurus
  Clone ID: 12-LIB34-016-Q1-E1-C11
tttggttatcatattggttcatattttatatatattcctgtgaaagggctaatatgatgatgcatgtactgaggtacagagattttgaccatctgtacttttcaactacagcggtcacatagatcagtgcaaccccatagattaggttgaagcatatgaaattaaggcatttgtagtttaaaaattgctcagtatcagtgatttcatatgcttcagcctaatagtttttaagacagttattttcttagatctcaatagactgagttgttttagctatttcagcttttgaaagcttttcaaaagatttccattgtctgaaaggcatatgacctgccccttttttcaatgttattcgttggtatatgtcaaaaaataaatcagtaaagttagtaagtgg

SEQ ID NO: 2724 - DNA, 386 bp, Bos taurus
  Clone ID: 12-LIB34-016-Q1-E1-C7
cagtcacgtgagcaaatttgcgcagaaagtgactactgcacatctggaataagttctgccacttgcagaagatattaaatcattcatcgcaaggtgccgtgacactgtcactaatgactgcatcatggatcatcatgactcagcaatctcactctgtgacgtcttatccactaagtattccatatttagtgactgtcgtcaataagagatatcatggaaagatttgtgtgcgcttaattgatactagcttcacttaactctgagatgcaaaatgtcaaattgcctatgaccaaagctgtatgtgactatagataaagtaacgtcctggatcactagagatttcatcgaagcacgaatactcggaatccagaagatatcctcactag

SEQ ID NO: 2725 - DNA, 390 bp, Bos taurus
  Clone ID: 12-LIB34-017-Q1-E1-C11
cccacaaaactttggcacaatgaagtgggtgacttttatttctcttctccttctcttcagctctgcttattccaggggtgtgtttcgtcgagatacacacaagagtgagattgctcatcggtttaaagatttgggagaagaacattttaaaggcctggtactgattgccttttctcagtatctccagcagtgtccatttgatgagcatgtaaaattagtgaacgaactaactgagtttgcaaaaacatgtgttgctgatgagtcccatgccggctgtgaaaagtcacttcacactctctttggagatgaattgtgtaaagttgcatcccttcgtgaaacctatggtgacatggctgactgctgtgagaaacaagagcctgaaagaaatga

SEQ ID NO: 2726 - DNA, 408 bp, Bos taurus
  Clone ID: 12-LIB34-017-Q1-E1-C7
atgttgctacccgagacaactgctgcatcttagatgaaagatttggtagttattgcccaactacctgtggaattgcagatttcctgaataattaccaaaccagtgtagacaaagatctacgaactttggaaggcatcttatatcaggttgagaacaaaacatcagaagccagagagctggtcaaagcaatccaaatcagctataaccctgatcaaccatcaaagccaaataacatagagagtgctaccaagaattccaagagtatgatggaagaaattatgaaatatgaaacactgatatcaacacatgaatcaacaattcgatttttgcaagaaatatataactcaaatagtcaaaaaatcgttaacctaagagataaagtggtccagcttgaagcaaactgtcaag

SEQ ID NO: 2727 - DNA, 213 bp, Bos taurus
  Clone ID: 12-LIB34-018-Q1-E1-C7
agagcacaagttcccggtcttcatgggtcgggtgtacgaccccaagggctgagcccgccccggggcctcagctcacctagctgcagtccgctctgcacttgcggctccgcacctcgcacctcaggcctgcctccacccgaagggctcctctggggtccttccctcctcccttaacgtcagccctccaaggcactttttgccaccttctctggt

SEQ ID NO: 2728 - DNA, 369 bp, Bos taurus
  unsure (352): unsure at all n locations; Clone ID: 12-LIB34-019-Q1-E1-C11
gtccaggcagcagttctcaaccctgagaaagaggtcgcaccatctgggcggggagactcagagcctgagatggggaccagtgacctagggacctctgagtcccgagcagaggacgagacgtgcagtgggaaaccctttgatgccttcactgacctcaagaatggttccctctttgccttccgaaggctgtactgctatgagctggatgaaaaggcagtgaggcctgtataccccagactcatccgagatgtctggggcattgaagggcccattgatgctgccttcacgcgtgtcaactgtcagggaaagacatacctcttcaacggtagtcagtactggcgctttcaagacngtgtcctggaacctgac

SEQ ID NO: 2729 - DNA, 398 bp, Bos taurus
  Clone ID: 12-LIB34-019-Q1-E1-C7
acaaaatcaggtagggaaataagagcaaaactgggggtggggagtttctttcctggattatggtgtttgtaaaaatttagggaagtatcagttttgtgagaataccagtgaggatcctgtccattttcccattgaatttcgttttgagaattttaaaccctcaatacttaggacacggaatttttctgggttctctcttgaatgtttacaactatgttgatccgatcttaacctgtaacttgggcatgtgatacagttactgtcatgaatttagagtattagtcatgcgtctgtggggaaatatgttcccgtaagctgttgtgaaactgaaacggtaaaaacaggtggaaatggttcatgtacatcgctcggtcagggaagcaacagtccatgttgca

SEQ ID NO: 2730 - DNA, 402 bp, Bos taurus
  Clone ID: 12-LIB34-020-Q1-E2-C7
cacagctgcaaggggagctgcagaccctacaggaagctttcagcaacttctcgtcgggcaccctgatggacatcctgaatctcagctcccacggaggcttcgccggtgacaaggtgagacttctggaagccaagctgggaaaacagcagcaagacctgaaagcagatcatgccactttgcggctccatctgaagcacttccccatggatctgcgcacactgacttgtcagatggcacacttccagagcaatggcacagaatgctgcccagtgaactgggtggaccatgatggcagctgctactggttctctcgctcagggaagccctggctcgaggctgagaagtactgccagctggagaatgcccacctcgtggtcatcatctccagagaggaacagaagt

SEQ ID NO: 2731 - DNA, 374 bp, Bos taurus
  Clone ID: 12-LIB34-021-Q1-E1-C7
caaaagaagtgggttttagttctttctgtgccctggtattttgtatattattgaattatccaagatttgatgggatttatcagtatgtagatagctctataatgcttgaattgtacactttgaagtgtgtgcaatgcaagagcttgtttatatttcatactttttatactttgaggaaaaaaagtcaaagaaaaactagtatttgagggtaaaaataaaaaagtgaccaagtaaaggataaatacaaaaaatagcctgtgagacttggcgtacacacacactcatgggattccagttattatgaagtgcttccaccctcctgtgccccccaatggttttctttgcaagtgcttttggaactaagaaactagtgt

SEQ ID NO: 2732 - DNA, 435 bp, Bos taurus
  Clone ID: 12-LIB34-022-Q1-E1-C11
ggcagcgccggcgtgacccacccgccatgctccccccagcgctcgtcttgctgttggggtttctctgccacgttgctatcgcaggacgaacctgccccaagccagatgagctaccgttttccacggtggttccactgaaacggacctatgagcccggggagcagatagtcttctcctgccagccgggctacgtgtcccggggagggatccggcggtttacatgcccgctcacaggactctggcccatcaacacgctgaaatgcatgcccagagtatgtccttttgctgggatcttagaaaacggaacggtacgctatacaacgtttgagtatcccaacaccatcagcttttcttgccacacggggttttatctgaaaggagctagttctgcaaaatgcactgaggaagggaagtggagcccagaccttcctgtct

SEQ ID NO: 2733 - DNA, 394 bp, Bos taurus
  Clone ID: 12-LIB34-022-Q1-E1-C7
agccgcggtgccgaagcgctgcactacatcgggtctcggcttggaagaactgtaacgggatgggtgcagcgaactttccagagcacccaggcagctacggcttcctcccggaattcctgtgcagctgatgacaaggccactgatcctctgcccaaggactgccctgtctcctctttcaacgaatgggaccccttagaggaagtgatcgtgggcagagcagaaaatgcctgtgttccaccgttcactgtggaggtgaaggccaacacatatgacaagcactggcctttttaccaaaagtatgggggcagttattttcgcacagatcatttgcaaaaggctgttgctgaaattgaagaaatgtgcaatattttaaaaatggaaggggtgacagtga

SEQ ID NO: 2734 - DNA, 320 bp, Bos taurus
  Clone ID: 12-LIB34-023-Q1-E1-C7
gaaagttttgtccaacaggatcaggattgcagatgctttgggatgtcctgttttttttttctttttttttttgaaagttgattatcttagattagtttagagttaagcggttaccctcacttagatgagaagacgaggacccagcacggagaagtgattttttttaagtcacgaggtgaatctttgagctgagtacggagtgctggtctcagatcgaagttcctactgagaaccccccagagagtaggagagtcttcctcacattcacagggcgctgtagtgttggagttatgacactggcccaggtcttcgaaagtggg

SEQ ID NO: 2735 - DNA, 328 bp, Bos taurus
  Clone ID: 12-LIB34-024-Q1-E1-C11
ggtcgacgcacgcatccgaacagctgcagcgcatctcgtcttgtaggctctcctagctatcgccttttcgcttccggaaacatggcctccggtgtggctgtctctgatggggtcatcaaagtgtggggccacatgaaagtgcgtaagtcgtcgacaccagatgaagtgaagaagcgcaagaatgcggtgctcttctgcctgagtgaggacaagaagaacatcatcctggaggatggcaaggacatcctggtgggtgacgtgggccatacggtagacgacccctactccacctttgtcaagatgctgccagacaaggactgccgctacg

SEQ ID NO: 2736 - DNA, 274 bp, Bos taurus
  Clone ID: 12-LIB34-025-Q1-E1-C7
cagaagggccccaccatggcaggcctgctgcatctcgttctgctcagcaccgccctgggcggcctcctgctgccggctgggaacgtgttcctgtcccgggactatgcgcggcgtgtcctgcagagagcccgcaaggtcaactcattcttggaggaggtcaaccaatgacatctggagcgttattgactgtgtgacgtctgctcactagaagaggacctctatgtcttcaatgacacatagcagacagatgaattctggcataaatacacagctg

SEQ ID NO: 2737 - DNA, 420 bp, Bos taurus
  Clone ID: 12-LIB34-026-Q1-E1-C7
cggacgcgtgggggacaaactaatatacttgtggcctacttcagttgcttttctgataatgaatgtgtaccctcaaatgtacaatgtcaattttcatacaaagattcctgacattttgaataaactgtaacatctggtccttatgtggcaataagggaagttaagagactgaatgtcgaacttcttaatggagggaaaaaaataataaaaacctccagaggtcaaagaggaacaagagagaaagacagattggccaaagggaggacagagaaaataaatgaattgactttctgtttccaaaatgggctagtaatctcaaacagttactcccatgtgacaaagctattctgataattctctttctgggtgagagtgtttcttgtaagtcagtaatttctgtttactcattaactgcgcttt

SEQ ID NO: 2738 - DNA, 401 bp, Bos taurus
  Clone ID: 12-LIB34-027-Q1-E1-C7
cggacgcgtggggaaccttaaacagtacaactggagtatttgtgtgaatgtaccactgggaaaatctaacatgttgatgttaatcaatgtccttctcaccttgtggttttacactgctcatggacaggggaaacattgtaattatccagtaataagacatggacggctatatcagtcatacagtggatactttccagcacgtgtaaatcaacagtttctctataactgtgatcagtattttgtgcctccttcactatattcctcggattacctgacttgcacagcagaaggatggtttccagaagaaccatgccttagagaatgtattttcaataatttggaaaatggatataccccaagtaatgaaagaaaagctgtacagggtgaaacagtaacggttc

SEQ ID NO: 2739 - DNA, 386 bp, Bos taurus
  Clone ID: 12-LIB34-028-Q1-E1-C11
gacttaactcttaaactttaggtacttttggcatattatgttagcctaatgataattgatggtgtgtgtgtgtatgtggattttttttttttttcccatgccacatggcttctggcatcttagttctctgaccagagattgaaatagtggcccatggcattgaaagcactgagtcctaaccgctggcctgccagggaattctcaatgatgtatatattgttaattatacttatccactggtcacatttagattagataagcagacctgtttttgttcatgatgaaagtcacagaagaaaattttgaaccaggatacagtgttgagaccacagcttcgtggccttttcctagaaacttactcatgttaatacagagctattgaccta

SEQ ID NO: 2740 - DNA, 403 bp, Bos taurus
  Clone ID: 12-LIB34-028-Q1-E1-C7
atcattatcaacatggggccaatataattattccctacgtcctaacccctttcctcttttgggtttgttttgtagcaaatcttacacatcctgttattttaactctaagaatttttaaaaatacttaaaatggcatatcacacttaaaataaacataattctttaatattatccaatatcaattattactcccctgctactgctgctgctgggtcacttcagtcgtgtccggctctgtgtgaccccgttgacggcggccaccaggctcccccatccctgggattctccaggctggagcgctggagtgggttgccatttccttctccagtgaatgaaagttgaaagtgaaagtgaagtcactcagtcgtgtccaactcttaaggtcctccatgcatgggaattt

SEQ ID NO: 2741 - DNA, 423 bp, Bos taurus
  Clone ID: 12-LIB34-029-Q1-E1-C7
ggacaatgtgacggtcacgctccgagacgcggccatccaggcctacctgtccagcagcaacttcagcagagaggagacgcgctgtgaacaggacctgcccactccgaccacgccaccccagcccgcgcccaccccagctcccgcgagccctgccgtgttcaggtacaacgtttctggcagcaacggcacctgcttgctggccagcatggggctgcagctgaacgtcacctacaggagagtcgacaacaagacggtgaccagagagttcaatgtcaaccccaacaagaccaccttcggggggaattgctccgccacactggcaactctggagctccacagcgagaacctcctgctcctggcgctccagttcgtgatgaacgagagctccagcagggtgttccttcaaggagtccagctgaacct

SEQ ID NO: 2742 - DNA, 416 bp, Bos taurus
  Clone ID: 12-LIB34-030-Q1-E1-C11
agctcgcctgagccagaaatttcccaaggctgagtttgtagaagttaccaagctagtgacagatctcacaaaagtccacaaggaatgctgccatggtgacctacttgaatgcgcagatgacagggcagatcttgccaagtacatatgtgataatcaagatacaatctccagtaaactgaaggaatgctgtgataagcctttgttggaaaaatcccactgcattgctgaggtagaaaaagatgccatacctgaaaacctgcccccattaactgctgactttgctgaagataaggatgtttgcaaaaactatcaggaagcaaaagatgccttcctgggctcgtttttgtatgaatattcaagaaggcatcctgaatatgctgtctcagtgctattgagacttgccaaggaatatgaag

SEQ ID NO: 2743 - DNA, 418 bp, Bos taurus
  Clone ID: 12-LIB34-030-Q1-E1-C7
aagaaccaggctcatggacagcttctgaaagagttgatgcagacacccaatttccgcatcacggtggtgcaggaggtggacacagtagagatctgtggggctttaaagaatatagtggccgttggggctggcttctgtgatggcctgagctttggcgacaacaccaaggcagctgtgatccgactgggactcatggagatgatcgccttcgccaagctcttctgcagtggctccgtgtcctctgccaccttcttggagagctgcggtgttgctgacctcatcactacctgctacggagggcggaaccggaaggtggccgaggccttcgcccgcacaggaaagtccattgagcagctggagaaagagatgctgaatggacagaagctgcaggggccccagacagcccgggaactgcaca

SEQ ID NO: 2744 - DNA, 416 bp, Bos taurus
  Clone ID: 12-LIB34-031-Q1-E1-C7
aagaatttgaccttgaccataaagaatgctgacccatctgacagtggcttgtattgctgccgtattgagaaaaaagggtggttcaatgatataataatcactcaagagttgagtataagagattcctcaggagacatgtagtctgctattcccatctcttcaagaatattccagtttgttgtgatccacagttaaaggctttcacacggtcgatgaagtataagtacatgtttttttaattctcttgctttttctatgatctagcataagttggcaatttgatttctggttcctctgccatttccgaatccagcctgtacatctggaagttctctgttcacgtactgctaaagcctagcttgaaggatttcagtaaaatcttgttatcatgtgaaatgactgcaattgtacagtta

SEQ ID NO: 2745 - DNA, 410 bp, Bos taurus
  Clone ID: 12-LIB34-032-Q1-E1-C7
caaagacctaatcatcgaagccgccaacacgtcttataccaacgcctgagcccttctaataacattaattgccacctctttcacagctatttacagcacccgtattatttttttcgcacttctaggacaaccccgattccctaccctagttaatattaacgaaaacaacccccttctgatcaactctatcaaacgcttactaattggaagcctcttcgcaggatacatcatttccaacaatattcctccaacaacaattccccaaataactatgccctactacctaaaaacaacagccctaattgttacaatcctatgcttcatcttagccctagaaatcagtaatataactaaaaatctaaaatatcactacccctcaaacgccttcaagttctcaaccttgctagggt

SEQ ID NO: 2746 - DNA, 386 bp, Bos taurus
  Clone ID: 12-LIB34-033-Q1-E1-C7
atcctggaaggtctcaagttcaacctcacagagacccccgagacagaaatccaccagggcttccagcacctcctgcagacgttcaatcagcccagcaaccagctgcagctgagcgtgggcaacgccatgtttgtgtcagaggagctgaagctgctggacaaattcaggaaagatgccgaggctttttacgcctctgaggttttatccactaacttcaaggattctgaagctgccgtaaagcttatcaatgaatatgtgaagaataaaactcatggaaaaattgagaagctcttcaatgatcttgacgtgctcacaaatttaatcttgttgaattatatcgtctttaaagcgcagtggaagacgccatttaatccgaaccatacgta

SEQ ID NO: 2747 - DNA, 327 bp, Bos taurus
  Clone ID: 12-LIB34-034-Q1-E1-C11
aaattccttgttttacaattagatgggttatagtatgccactcccctaaatgagggggctgacgagatacatgccctacatcacatcatcgccacttcggatgctcttcaccgggaagcttgtcgagactatagacactatctccacagaggcaatacctaaggcatgctgtatcaaccagcaacacattctttgtcacccatgccgcattcttctccatacacccctcactaaggtactctttcactacgacgtttgtcgcacagttgtgagtgatattgacgcaacaggtttcaaggactttattgttcgctgacaccatcttct

SEQ ID NO: 2748 - DNA, 361 bp, Bos taurus
  Clone ID: 12-LIB34-034-Q1-E1-C7
gtggaagtcaaagttcagtcccgagaacacaaggaaggaactgttctacaaagctgatggggagtcatgttcagtactcatgatgtaccaggaaagcaggttccgctatcggagagtagcacagagcacccaggtgcccgagttgcccttcaagggtgatgacatcatcatggtgcacatcctgcccaagctggagaagaccctggccaaggtggaagacgaactcaccccagacatgctgcaagagtggctggatgagctgacagacacgctgctggtggtccacatggcccgcttccgcatcgaggacagcttcagcgtgaaggagcagctgcaagacatgggcctcgaggacctgtgc

SEQ ID NO: 2749 - DNA, 433 bp, Bos taurus
  Clone ID: 12-LIB34-035-Q1-E1-C7
cagacgcgtgggctgcgccacgggggccggacggtggagaacatgaggatcatcagttggttcgtccggtccttcaagtacgcatatggcctccgctttgaggtcaaaggccgtgagacgctggacgaggaccggccctgcgtcatcatctccaaccaccagagcatcctggacatgatgggcctcatggaggtcctccccgaccgctgcgtgcagatcgccaagcgagagctgctcttcctggggcccgtgggcctgatcatgtacctggggggcgtcctcttcatcaaccggcagcactcccagacggccatgagcgtgatgaccgatgtgggcgagcgcatggtcagggagaagctcaaagtgtggatctacccggagggcacgcggaatgacaacggggacctcctgcctttcaagaaaggcgccttct

SEQ ID NO: 2750 - DNA, 412 bp, Bos taurus
  Clone ID: 12-LIB34-036-Q1-E1-C11
gttctagatcgcgagcggccgcccttttttttttttttttttttttttttttttttttttttttcaaatcaagagtttttattgtctctttaaaacatcacaactgagttgggaatttgatacaagatactaggaagatgattgcttaaaactatggcaatgctttggaaatatacctaacattaagacacaaggatgttttccagttgatccacaaacataatcttttcagttctatcaaggataaaattgttttattaatggattttgattctgagaaagctgttgacatgcttctggacaatgaagataaaatttcaattaaaaaagtagtggaagaattagaagacagaccagagttgcagcacgtgtatctgcataagcttttcaaaagagaccaccataagggaca

SEQ ID NO: 2751 - DNA, 396 bp, Bos taurus
  Clone ID: 12-LIB34-036-Q1-E1-C7
gcaactctccattcccagtgcaccctggaactcctgagtgctgcacccatgagggccttgaaaagaagctctgtatggctgccctgaagcaccagccacaagaatttccaacttacgtagagccaacaaatgacgagatctgtgaggcattcaggaaagatcccaaggactttgctgatcgatttatgtatgaatattccattaattatggacaagctcctctgacacttttagtcggttacaccaagagttatctctctatggtagggtcctgctgtacttcaccaaacccaacagtatgctttttgaaagagagacttcagcttaaacatttttcacttctcaccattatgacaaacagaatctgctcacaatacgctgcttatgggaaggaga

SEQ ID NO: 2752 - DNA, 283 bp, Bos taurus
  Clone ID: 12-LIB34-037-Q1-E1-C11
atgacgcgtgggctcagttccacggatgcgttctgggccaagtacacagcttgtgagtcagcgagaaatcctcgagaacagctcaatgaatgtcgggaaggaaactgcgcggggaagtgtggggatgaactagcgagggagcgtgagcatcagccggtcaggcagcgagtgccagctgtggagaagtcgctagccagataagccagaaatcaagtctaccacccagccgggggctgacctgcgggagaatttttgctgcaggcgggatggcagcattactggg

SEQ ID NO: 2753 - DNA, 417 bp, Bos taurus
  Clone ID: 12-LIB34-037-Q1-E1-C7
aaccgccatgctccccccagcgctcgtcttgctgttggggtttctctgccacgttgctatcgcaggacgaacctgccccaagccagatgagctaccgttttccacggtggttccactgaaacggacctatgagcccggggagcagatagtcttctcctgccagccgggctacgtgtcccggggagggatccggcggtttacatgcccgctcacaggactctggcccatcaacacgctgaaatgcatgcccagagtatgtccttttgctgggatcttataaaacggaacggtacgctatacaacgtttgagtatcccagcaccatcggcttttcttgccacacggggttttatctgaaaggagctagttctgcaaaatgcactgacgaatggaagtggatcccagaccttcctgtctg

SEQ ID NO: 2754 - DNA, 418 bp, Bos taurus
  unsure (324): unsure at all n locations; Clone ID: 12-LIB34-038-Q1-E1-C11
cagtagctcgcctgagccagaaatttcccaaggctgagtttgtagaagttaccaagctagtgacagatctcacaaaagtccacaaggaatgctgccatggtgacctacttgaatgcgcagatgacagggcagatcttgccaagtacatatgtgataatcaagatacaatctccagtaaactgaaggaatgctgtgataagcctttgttggaaaaatcccactgcattgctgaggtagaaaaagatgccatacctgaaaacctgcccccattaactgctgactttgctgaagataaggatgtttgcaaaaactatcaggaagcanaagatgccttcctgggctcgtttttgtatgaatattcaagaaggcatcctgaatatgctgtctcagtgctattgagacttgccaaggaatatga

SEQ ID NO: 2755 - DNA, 411 bp, Bos taurus
  unsure (404): unsure at all n locations; Clone ID: 12-LIB34-038-Q1-E1-C7
caaaactttggcacaatgaagtgggtgacttttatttctcttctccttctcttcagctctgcttattccaggggtgtgtttcgtcgagatacacacaagagtgagattgctcatcggtttaaagatttgggagaagaacattttaaaggcctggtactgattgccttttctcagtatctccagcagtgtccatttgatgagcatgtaaaattagtgaacgaactaactgagtttgcaaaaacatgtgttgctgatgagttccatgccggctgtgaaaagtcacttcacactctctttggagatgaattgtgtaaagttgcatcccttcgtgaaacctatggtgacatggctgactgctgtgagaaacaggagcctgaaagaaatgaatgcttcctgagccacanagatgat

SEQ ID NO: 2756 - DNA, 425 bp, Bos taurus
  Clone ID: 12-LIB34-039-Q1-E1-C7
cgggggttgccgctgtgtcgcgcttgtggcgcgcccggcgcctggcgctgacctgcacgaagtggccggcagcatggcagacaggaacccgcagttttcacttcaccgttgatggcaataagaggtcgtccgctaaagtttcagatgcgatttctgcgcagtatccagttgtggaccatgagtttgatgccgtggtggttggtgccgggggggcaggcctgcgggccgcgttcggcctctctgaagcaggtttcaacacggcctgcgtcacgaagctcttccccaccagatcccacactgtcgcggcccagggagggatcaatgccgccctggggaacatggaggaggacaactggcggtggcacttctacgacaccgtgaaaggctccgactggctgggggaacaggacgccatccactacatg

SEQ ID NO: 2757 - DNA, 406 bp, Bos taurus
  Clone ID: 12-LIB34-040-Q1-E1-C7
cactgactccagttctttggagtacatacccataggtagaactgcagtatcacatggtaattcggtgtctaatttctttgagtaccagccatagtaatttacataccgtctagacatacattcccaccagcagtgcacaaaggctcattatccacatcctatgcaacacttatcttctgtcactttgtcttttatattagtcatgttaatgaatgtgagatggtagagtgtgtggggataggtcattgatttcaagaccgtcgtctctttgcgtatatatacacctataaatattactctaagcactactttacgctgcattctacagatgttgatattgttgtatgttcactagtactcagttaaaaatactttccatggatctccatctcaagtccagtggtta

SEQ ID NO: 2758 - DNA, 361 bp, Bos taurus
  Clone ID: 12-LIB34-043-Q1-E1-C7
agcggggccttctgctgctggcagccctgtgctgcctggcccccatctccctggctggagttctccaaggacacgctgtccaagagacagatgatacatcccaccaggaagcagcgtgccacaagattgcccccaagctggccaactttgccttcagcatataccaccatttggctcatcagtccaacaccagcaacatcttcttctcccccgtgagcattgcttcagcctttgctatgctctccctgggagccaagggcaacactcagactgagatcctgaatggcctgggtttcaacctcactgagctcccagaggctgagatccacaaaagcgttcagcatcttctccacaccctgaa

SEQ ID NO: 2759 - DNA, 285 bp, Bos taurus
  Clone ID: 12-LIB34-044-Q1-E1-C7
ctcgccggccgacgcacgcgaacagtggctcactaaagccacagacccaggcatgtcagaacacgattggtcagctatccacaatttctgtgaccaagtgaacactgatcccaacggctcaacctatgcgccctggctgctggcccacaacatacagtctccacaagacaaagaaactctgtatgccataagagtcccggaaacctctgtgaagcactgttgggacaaattccacagccaggtggccaggttccgcttcccgaacgagctcatcaaagtgctctc

SEQ ID NO: 2760 - DNA, 378 bp, Bos taurus
  Clone ID: 12-LIB34-046-Q1-E1-C11
acgcacgcgtcaaagctgaagctagttaacatcagtgtcatggctcccaactggctcccaattcctggtgaaactcctaaagggagactgttaaatcatgagattaatcaccatccttttcctttgttccaggctgctaccaggtttagcccaagagtcttctcaagaaatcgactgcaacaactataatgtatttaaagctgtggacgctgctctgagaaaatagaacagtgataacaggagtggcaaccattttgtattgtaccgcagaaccgaggttgccatcatgtgataatcctgacacattttattccgtgaagtacgaaatcaaggagggcgactgtccttttcaaagtagacggacttggcaggactgtg

SEQ ID NO: 2761 - DNA, 340 bp, Bos taurus
  Clone ID: 12-LIB34-046-Q1-E1-C7
atctcaaccaaccataaagatattggtaccctttatctactatttggtgcttgggccggtatagtaggaacagctctaagccttctaattcgcgctgaattaggccaacccggaactctgctcggagacgaccaaatctacaacgtagttgtaaccgcacacgcatttgtaataatcttcttcatagtaataccaatcataattggaggattcggtaactgacttgttcccctaataattggtgctcccgatatagcatttccccgaatatataatataagcttctgactcctccctcccgcactcctactactcctcgcatcctctaaagtttaagctg

SEQ ID NO: 2762 - DNA, 401 bp, Bos taurus
  Clone ID: 12-LIB34-048-Q1-E1-C11
caagttctagatcgcgagcggccgccctttttttttttttttatcctgggtgatttttatttatttgaagggtctgggattgggtgattcaaatcaactttaatctagctctgaaagggaggatattcctgggtgacacttggtcacataagaacaatggtgatgaagtgatgacagtagaagctggatatgagcccattgctaaatgaatcagaggcaagcagatagaaatagcgttgtgtggataattcttctaaattgtgaaattatgcaaatggcctttagttggtgagcatcatacttaaagtaacaggacacagcggacacattttcccgttttcattaattcaactgcttcattgattttgtcaagattcatagaatgggtaattagtgcatct

SEQ ID NO: 2763 - DNA, 422 bp, Bos taurus
  Clone ID: 12-LIB34-048-Q1-E1-C7
cgaacgtttccactaccaagataagacccttcactccctgctggatttgttaaatgaaaattttaatcgaataagctctctctggaaccagatttacaatctatggccaaaactcataaagcctctccctggagagcacagagcattttcaaaaaggcttaaggatgttcactactttgttctggaaaaagtgaaggagcatcaaaagtccctgaatcataataaccctcgagactacattgactgtttcctcagcaggatggagcaggagaaacagaacccagagtctcaatttcacttggaaaacttagcaacctgtggatcaaatctgttttcagcaggagtagagacaaccactgccaccctgagttacgggttcctgctcctaatgaaataccctgaggttcaagccaaagttcatg

SEQ ID NO: 2764 - DNA, 424 bp, Bos taurus
  Clone ID: 12-LIB34-049-Q1-E1-C11
cgccgggttgagaggagcgtggccttctcctctccccgccatggcgtgtgctcgtccactgatatcagtgtactccgaaaagggggagtcctctggcaaaaatgtcactttgcctgctgtgttcaaggctcccattcgacccgatattgttaactttgttcacaccaacttgcgcaaaaacaacagacagccctatgctgtcagtgaattagcaggtcatcaaaccagtgctgagtcttggggtaccggcagagctgtggctcgaattcccagggttcgaggtggcgggactcaccgttccggtcagggcgcttttggaaacatgtgtcgtgggggccgcatgtttgcgccaactaagacctggcgacgttggcaccgcagagtgaatacgacgcagaagcgatacgccatctgctctgcactg

SEQ ID NO: 2765 - DNA, 398 bp, Bos taurus
  Clone ID: 12-LIB34-049-Q1-E1-C7
caccaatggagccactgctcggaaatattcccacctggtggatgttggacaggttggggtgaatgtgcccattccaatgcctttgccaatgttctcattcactggctctcgcgcttccttcatgggagacaccactttctagggcaaacagggcatccaattctatactcagctaaagactatcacttctcaatggaaagaagaagatgcgtctctttcctcacctgctgtagtcatgcctaccatgggccgttagaaacaagtctgttccagactcggtgcatactgagtaatcacagtttactcttgaccaactccaactgcctactttactcagatcagatccctgagattggtataccttgtaactaaagtccttctcatgaccattgaccccg

SEQ ID NO: 2766 - DNA, 450 bp, Bos taurus
  Clone ID: 12-LIB34-050-Q1-E1-C7
cgggtccacccaagcgtccggaaagatgagacacaaacttataatgaatctgggctcttctgtaatatgctttcttttataatattggtcagctttgctatctttgatcttatcatctggaatttagtcattacatagaatttcaagaatttcaaggtcctttcatctaagctatctcattctaataccatggcacccttgggatgctggtcctagtgttacagtatacaaaagctcaaagtgaagggatttactaagactgaaaagttagtagaaaagctaagacaaaagtctagtttaacaggctactcattcagtgctttccccacttcagcacaaggagttttgaaagttttaatacatggcttttgttattcctaaaagtcagctcttgggagaagcattaacaagttggaaatatatactcgcaacgtgagagctctatctgta

SEQ ID NO: 2767 - DNA, 234 bp, Bos taurus
  Clone ID: 12-LIB34-052-Q1-E1-C7
cggacgcgtgggggaaagcaataaaatgcatgctattaatggaagaatgtttgggaacctgcaaggcctcacgatgcatgtgggagatgaagtcaactggtatctgatgggaatgggcaatgaagtagacttgcactcggtacatttccatggccacagcttccaataccagcacaggggcgtttatacttctgatgtatttgacctcttccctgggacataccaaaccgtaga

SEQ ID NO: 2768 - DNA, 347 bp, Bos taurus
  Clone ID: 12-LIB34-055-Q1-E1-C7
atttatttttctgtgtgacttccttcacttagtatgatcatttttagttccagccagttttctgcagatggcatttcgttctttgttatggctgagtaatcttctattgtaggcatatgtcgcatcttcttcacccaccccctgtcagtgggcatttcggttgtcttcacgtcttggttgctgtaagtactatgaacattggggtgcacatgtctttttgaattatagttttgtctggatatatgcccaggaatgggattgcagaatcatataaaaccttggattttaacatctgctggaccttgggccaggcggtttggagacaagcagaggcccctgcataaaac

SEQ ID NO: 2769 - DNA, 342 bp, Bos taurus
  Clone ID: 12-LIB34-056-Q1-E1-C11
gtgtcgccatgggcagccgccccgcccggtgttaccggtattgtaagaacaagccgtacccaaagtctcgcttctgtcgaggtgtccctgatgctaagattcgcatctttgacttggggcgtaagaaggccaaagtggatgagttcccactctgtggccacatggtgtcagatgagtatgagcagctctcctctgaagccctggaggctgcccgtatttgtgccaacaagtacatggtgaaaagctgtggcaaagatggttttcacatccgagtgcggctccaccccttccatgtcatccgcatcaacaagatgttgtcttgtgctggagctgatagactcc

SEQ ID NO: 2770 - DNA, 186 bp, Bos taurus
  Clone ID: 12-LIB34-056-Q1-E1-C7
gggaacctggccccccaagagaacccgggctcaccggatgcgacgtcatgacctaagttccggaaaactgccggtgctgtgactgtgagaagcgctgtggcgccttggatgtggtgttcgtcatcgacagctctgagagcatcggctacaccaacttcaccctggagaagaacttcgtcatcaacg

SEQ ID NO: 2771 - DNA, 218 bp, Bos taurus
  Clone ID: 12-LIB34-057-Q1-E1-C7
gcgagcggccgccctttttttttttttttatattttaaatatacagtaggaacatttattttaacacttctaaaagatatttctccatgcctgatgatttgatataaaaatcaaacacatcatactttccatatcactctcactacatcaagggcaatcagaaatttgtagaagatgaataggtggttctgatacaagatttagagattacttgacat

SEQ ID NO: 2772 - DNA, 221 bp, Bos taurus
  Clone ID: 12-LIB34-058-Q1-E1-C11
ccttgtgactatatccctgatctgcagaagccctggtgaggatcatgtcgctgtttacatcacttccttttcttctcctgactgcggtgacagcatcttgtgcagacacagaaacagagaactgtgagaacatccggaagacctgccccgtgattgcctgtggtcctccgggcatcaatggcatcccaggcaaagatgggcgtgatggtgccaagggagaa

SEQ ID NO: 2773 - DNA, 226 bp, Bos taurus
  Clone ID: 12-LIB34-059-Q1-E1-C11
cgggtcgaaaaagcgtccgcttggccagcattcagagaatcgagctgcaggttattggctctgctgaacggtttttaaatattccatctagaatggattttgagctgtacgtgggatatggatatgtcactgctcttcagagggcgaaaaaagagtaaacccctggactcctcaaaggatgagtgcatggtgaactggtgtgcagctggtcaccaggagaggacaa

SEQ ID NO: 2774 - DNA, 208 bp, Bos taurus
  unsure (180)...(181): unsure at all n locations; Clone ID: 12-LIB34-059-Q1-E1-C7
cgcagatcacaagttgaaggcagggaccaacaccaagagggctctcctggaagtgtacaacatgatgagcagggaagtaaaccagttcaaagagacctggaaccgcacgcgccacgtcatcatcatcatgactgacggtttgcacaacatgggtggggatccagtcactgtcattcacgnnatatgtcggtacttgctagacattggt

SEQ ID NO: 2775 - DNA, 347 bp, Bos taurus
  Clone ID: 12-LIB34-061-Q1-E1-C7
acctgggctggctgctgttggctgagctttgggctgagctggagcccaagtggcccaaggccttttgggatgactggatgcgccggccatagcagcggcagggccgggcctgcgtgcgggccgaaatctccagaacaatgacctttggccgcaaaggtgtgagccacgggcagttctttgaccagcacctcaagtttatcaagctgaaccagcacttcgtgcccttcacccagctggacctgtcgtacctgcgacaggagacttatgacagggatttccttgcacgtgtctatggtgctcccctgctgcaggtagagaaagtgaggaccagtgagcggagcgagctg

SEQ ID NO: 2776 - DNA, 201 bp, Bos taurus
  unsure (187)...(188): unsure at all n locations; Clone ID: 12-LIB34-062-Q1-E1-C7
aaccgctgactattctcaaccaaccataaagatattggtaccctttatctactatttggtgcttgggccgcgtatagtaggaacaagctcctaagccttttctaattccgcgcatgaattaggggccaacccgggaactcctgggctcggagaacgtaccaaaatcctaaacaacgtatgtttgtannaccgcacaaacgc

SEQ ID NO: 2777 - DNA, 170 bp, Bos taurus
  Clone ID: 12-LIB34-063-Q1-E1-C7
cgcgtcaggattatcatatagtatacccaagcccttgacctcctacaggagctttgtctgctctcttaataacatccgggctaaccatgtgatttcactttaactcaatgaccctgctaataattggcctaacaacagatatactaacaatataccaatgatgaccagat

SEQ ID NO: 2778 - DNA, 365 bp, Bos taurus
  Clone ID: 12-LIB34-064-Q1-E1-C7
cccacgcgtccgaagagatttatgtcagtgagtctcccagcagggttcaaatcttggagatttcttgttctgccccttgcagctctcagtgcctcagacagccccactgttcttctgaacactttctggtccaggaaaccaggctgtgtgtgtctgtcccataaaaggccatgtggctgtacctggtggtcctcgtgggcctgtactacctcctacgctggtaccgggagacgcacgtggtgagccatctccgggacaagttcgtcgtcatcacacgctgtgactcgggcttcgggaacctgctggccaggcagctggacctgacaggcttgagggtcctggctgcatgtctgacagagaggggg

SEQ ID NO: 2779 - DNA, 191 bp, Bos taurus
  Clone ID: 12-LIB34-065-Q1-E1-C11
cttatttacagtagggggtttaactggaattgtcttagccaactcttccctcgatattgttcttcacgacacatactacgttgtcgcacatttccactatgttttatcaataggagctgtatttgctattatagggggatttgttcattgattcccactattctcaggttatactctcaacgatacatgag

SEQ ID NO: 2780 - DNA, 233 bp, Bos taurus
  Clone ID: 12-LIB34-067-Q1-E1-C7
ggggcagtcaaggtgtactcctattacaacctggatgaaacttgtatccgcttctatcacccggataaagaggacggaatgctgagcaaactctgccacaaagatacctgccgctgtgcagaggagaactgcttcatgcaccacacggagaaggaggtcactctggaggaccggctggacaaggcttgcgagccgggcgtggactatgtgtacaagaccagacttatccagaa

SEQ ID NO: 2781 - DNA, 209 bp, Bos taurus
  Clone ID: 12-LIB34-068-Q1-E1-C7
cacgtcctacgccctcttggctctgctggcacgcaaagactacgacactacgcctcctgtcgtgcgctggctcaacgagcagagatactatggaggtggttatggctccacgcaggccactttcatggtgttccaagccttggcccaataccagaaggatgttcctgatcacaaggagctgaacctggatgtgtccatccaactgccca

SEQ ID NO: 2782 - DNA, 239 bp, Bos taurus
  unsure (193),(231)...(232): unsure at all n locations; Clone ID: 12-LIB34-069-Q1-E1-C11
acgccgactgctgccgccgctggtcacccgtcacgatgtccggcaaaggctccgtggttctggcctacagtgggggcctggacacctcctgcatcctcgtgtggctgaaggagcaaggctatgacgtcattgcctacctggccaacatcggccagaaagaagactttgaggaagccaggaagaaggcgctganagcttggggccaaaaaggtgttcattgagggacatcanngcaagga

SEQ ID NO: 2783 - DNA, 207 bp, Bos taurus
  Clone ID: 12-LIB34-069-Q1-E1-C7
atgaaaagaagttttggggaaaatacctatacgaaattgctagaagacatccctacttttatgcaccagaactcctttactatgctaataaatataatggagtttttcaagaatgctgccaagctgaagataaaggtgcctgcctgctaccaaagattgaaactatgagagaaaaagtactgacttcatctgccaagacagagactc

SEQ ID NO: 2784 - DNA, 383 bp, Bos taurus
  Clone ID: 12-LIB34-071-Q1-E1-C7
cgcgggtcgatgcacgcgtccagtgtgattcgtcttatcagacatagatttacacatgaatactttgctatgagtacattttagaaattcaattatagttttctatatctaagtctcatatcttgatttttaggatcatatatgatggaagccgttatatcgggtgtttttgccaatcttgatacatatatgggaaaagattttggaatgttgtctaactcttgattgcttagaaagtatttccatagtcaatgatggttcaataggcataccaggtcctattatcctgaattttttttatggtcagtactgttaagcagaaatgtagaccaggattggcagaaatgtggatgtttatattcattacaagagtttaattctta

SEQ ID NO: 2785 - DNA, 403 bp, Bos taurus
  unsure (275),(348),(372): unsure at all n locations; Clone ID: 12-LIB34-072-Q1-E1-C7
actttgcctgaaatgccagctgaaggagcctcgggggacccttaatgatggtacctgcaggttcacctgcagggggaagcccatccaccacttcctcggcaccagcaccttcacccagtacacagtggtggatgagatgtcagtggccaagatccatgcagactcaccactggagaaagtctgtctcattggctgcggattttctactggttatgggtctgcagtcaaaattgccaaggtcacccagggctccacctgtgccgtgtttggcctgngaggagttggcctgtctgttatcatgggctgcaaagcagctggagcagccaggatcattgcagtggacatcancaaagacaaatttgcaagggccanacaggtgggtgccacggagtgcatcaaccct

SEQ ID NO: 2786 - DNA, 220 bp, Bos taurus
  Clone ID: 12-LIB34-073-Q1-E1-C7
aacggatgcttgggcacggagctgggggctcttctatcgccagaccagccactcctgtgagtgacacgccagccagaggaaccatcgccattcggattctcaggtgactgctgttgttactgactgcctgcctggcggtaaactccagctccgtacccacattgcgcgatgagattcaaatgcaggagaccttcaacctgctcaggatctatgggaagtg

SEQ ID NO: 2787 - DNA, 307 bp, Bos taurus
  Clone ID: 12-LIB34-074-Q1-E1-C7
agaatgatcctcgcatcgtcaagctgttggacgtgatggaagatgggctgaaggaagagatgaaaataatgcgccaggtggtggaacctgtgcaattgcccttgacaatccaagggttggcggcaaaggccttcccggaacagaaggccttaatgaccctggttgataacctgatcgctgaccagaaaatgacccgggacccgaccaagcaaccccgacacctgacggatgccttcctgaataaggtgaaggaggccaaggggaaccccgagagcagcttcattgatgaaaacctgcccctgttggt

SEQ ID NO: 2788 - DNA, 431 bp, Bos taurus
  Clone ID: 12-LIB34-075-Q1-E1-C7
gggtcgacccaaacgtccaaccagcgtcgcctgaattgaccgtggatttcaactgggtgctcttgatactcatagaagagatcctgatccaaattctgctgaatgtctgcatgtgcgttgtcgacgattagagaccagtttggctgaatgtactttcactaagggagtacacagttcggaggggttggctggtgtggtgtgttacacagagagtgcagctcctccaaaaaaggactcctttcaatgtgtgaatgggaaacgcattcctcagaagaaggcctgtgatggtgtcaatgactgtgtatacaagagtgatgagctgtgctgtaaagactgccgaagtgaacgttttctctgtaaatcgggtgtatgtattccaaagcagtataagtgcactggtgagctggactgtatcaccggagaagatgaag

SEQ ID NO: 2789 - DNA, 351 bp, Bos taurus
  Clone ID: 12-LIB34-077-Q1-E1-C7
attgctggccatgatcatgcagtcatctgtgccaacgcctgtcggcgtctcaatggtgtgctgtagttactaggtggttgtctgtgagtccacctcaggtctgtgtgcaggttgcctcattgtgttcaattgcatgtcacattcgacatgtccaggatctgtgtcaagtagctaagtcgtagagtaggctccatctgcccattgttgatcacgttcacagctaagatagtgatgatcacagtttcgttaattgagctgcagcagatcgctgtgatcagggtccaagcactcagaagcggaaacgtctctgtgtatcggtctctggtctttatgacacccaaagcactgatg

SEQ ID NO: 2790 - DNA, 449 bp, Bos taurus
  Clone ID: 12-LIB34-078-Q1-E1-C11
tcgtattaccggaagtgctggcacctggaaccccggccgccccgagcccggaagtgctggcacttggaatactggaagctctggatcttcaagttttacgccacatagctcaggtcatgggaacattatgccttccagtccagactggggcacctttagagaggaaggaagtgtaagttcagggacaaagcaagagttccacacaggtaaacttgtcactactaaaggagataaagagcttctgattgataatgagaaggtcacctctggtcacacaactaccactcgtcgttcatgctctaaagtcattacagagacagttacaaatgccgaccgtcgcacagaaacgaccaaagaagtggtaaagtctgaagatggttctgactgcagtgacgcggacttcgactggcaccatacttttccttcgaagggtaacctagatgatttct

SEQ ID NO: 2791 - DNA, 476 bp, Bos taurus
  unsure (36): unsure at all n locations; Clone ID: 12-LIB34-078-Q1-E1-C7
tatttgtcacaactccctatagagagtcgtattatncatcatcaccctgggccagttctggaccaccaaggccttcttgccgcggatgctggagctacagaacggccacatcgtgtgtctgaactccgtgttggcactctctgccatccctggcgccatcgactactgcacgtccaaagcctcagccttcgccttcatggagagcctgaccctggggctgctggactgtccgggcgtcagcgccaccaccgtgctgcccttccacacaagcaccgagatgttccagggcatgagggtcaggttccccaacctcttccccccactgaagccggagacggtggcccggagaacagtggaagctgtgcagcttaaccaggccctcctcctgttgccgtggacaatgcatgccctcattatcttgaaaagcatactcccacaggctgccctccaagagattcacaaattcccaggaacct

SEQ ID NO: 2792 - DNA, 403 bp, Bos taurus
  Clone ID: 12-LIB34-079-Q1-E1-C11
agaaaggtgcctgcctgctaccaaagattgaaactatgagagaaaaagtactgacttcatctgccagacagagactcaggtgtgccagtattcaaaaatttggagaaagagctttaaaagcatggtcagtagctcgcctgagccagaaatttcccaaggctgagtttgtagaagttaccaagctagtgacagatctcacaaaagtccacaaggaatgctgccatggtgacctacttgaatgcgcagatgacagggcagatcttgccaagtacatatgtgataatcaagatacaatctccagtaaactgaaggaatgctgtgataagcctttgttggaaaaatcccactgcattgctgacgtagaaaaagatgccatacctgagaacctgccgccattaactgc

SEQ ID NO: 2793 - DNA, 362 bp, Bos taurus
  Clone ID: 12-LIB34-079-Q1-E1-C7
agtagatgtcttttattccaactccctgagtagttttattactttctaggtaatacaggttggtagctcctggatgagatgtttgctgctgcttttttcctcttatttttgatgacttatcagcctggggtaaccatacaggagaaggtgaactggagagtcagtccaactgttcagagtttcacccccacagcggtctcctgccagctggacaactgggcagagtggacagactgctttccatgccaggacaaaaagtacagataccggagcctcttgcagccaaacaagtttgggggaaccatctgcagtgggaatgtctgggaccaagccagctgtcacagtcccacagcttgtctgag

SEQ ID NO: 2794 - DNA, 345 bp, Bos taurus
  Clone ID: 12-LIB34-080-Q1-E1-C7
agcagaacctaagataaagtaaacccccggactcctcaatggatgagtgcatggtccaactggtgcccatttggccacaagagaggacaaagtgtgatcggtggagtgggttcagcggctgggcaatcaaatgtgaaacagcagagaacactgaacagtgcatctgcaagatcctgataggacaagctgatgccatgagcgtggacagagggtatctctataaaacatgcaaatgttgcctcatgcctgtcctggcatcgaactacccaactgaaggttaaagttgcaagaacacaccagaaagagggtagcctgctgtacctgtgggtaaaacatcaaatgcta

SEQ ID NO: 2795 - DNA, 404 bp, Bos taurus
  Clone ID: 12-LIB34-081-Q1-E1-C7
agctgactattctcaaccaaccataaagatattggtaccctttatctactatttggtgcttgggccggtatagtaggaacagctctaagccttctaattcgcgctgaattaggccaacccggaactctgctcggagacgaccaaatctacaacgtagttgtaaccgcacacgcatttgtaataatcttcttcatagtaataccaatcataattggaggattcggtaactgacttgttcccctaataattggtgctcccgatatagcatttccccgaataaataatataagcttctgactcctccctccctcattcctactactcctcgcatcctctatagttgaagctggggcaggaacaggctgaaccgtgtaccctcccttagcaggcaacctagcccatgc

SEQ ID NO: 2796 - DNA, 453 bp, Bos taurus
  unsure (333),(386): unsure at all n locations; Clone ID: 12-LIB34-082-Q1-E1-C11
tcccgggctcgacaaacgcgtcagggattttgagctgtacttgggatatgaatatgtcactgctcttcagaatctaagagaaagtaaacccccggactcctcaaaggatgagtgcatggtgaagtggtgtgcaattggtcaccaggagaggacaaagtgtgatcggtggagtgggttcagcggcggggcaatagagtgtgaaacagcagagaacactgaagagtgcatcgccaagatcatgaaaggagaagctgatgccatgagcttggacggatgctacctctacatagcatgcaaatgtggcctggtgcctgtcctgacagagaactacantactgatggtgaaagttgcaagaacacaccagaaaaagggtatcttgctgtanctgtggttaaaacatcagatgctaatatcaactggaacaatctgaaagacaagaagtcctgccacac

SEQ ID NO: 2797 - DNA, 384 bp, Bos taurus
  Clone ID: 12-LIB34-083-Q1-E1-C11
aggaagtgctttacgaagactcctgagcacctttggctctgacgacctcagctgaataatcaaggttttgtgccagaaaaaagtcgaatatgtgtattttctctttgtcagagattagtggaaattgcacactaatgtgaatatgggctatattgtttgtaacgtaagatacacctaacatgaaaccagttttaaaaatcaatagccgtgtgtgtaatagaacattgattaaaatggaggctatcactgtatgcttttcaatttaactttctggccttaatgtcccaggttggtctgtctgctctgtggtggtggtggtttaattgctcagtcgagcctgactcttggcaaccccatggactatagcctgccaggctcctctgt

SEQ ID NO: 2798 - DNA, 387 bp, Bos taurus
  Clone ID: 12-LIB34-083-Q1-E1-C7
tgaagataacattccccagctcgaagaggtttctcagtttctgcagagttgcactggtttccgcctccgaccagtcgctggcctgctttcttctcgggatttcttgggtggcctggctttccgagtcttccactgcactcagtacatcagacatgggtctaagcccatgtatacaccagaaccggacatatgccatgagctcttgggacatgtacctttgttttcagatcgcagctttgcccagttttcgcaggagatcggccttgcctccctgggtgcacctgatgagtacattgaaaaacttgcaacaatttactggtttactgtggagtttgggctctgcaagcaaggagactccataaaggcatatggtgctgggctcctgtc

SEQ ID NO: 2799 - DNA, 302 bp, Bos taurus
  Clone ID: 12-LIB34-084-Q1-E1-C7
ttgtgtcgtcgactgatttctaagcatcagttcttactcgatgcgacactgatgtgtcttgaaatagatggactgtgtcatcacaacaggcttgatggaattcaggatttcaatatatcactggcttcaatagaccaaaaggtttggtcaactgtctcctatcgtgcaaacagaattttggctaggtaacgacacatattcatctaagtatcacagattctacaatcacttatgtattaataatacagttggtagactggcatgacattaccatcactgcatattaagcatcattcatagtg

SEQ ID NO: 2800 - DNA, 408 bp, Bos taurus
  Clone ID: 12-LIB34-085-Q1-E1-C11
aacgtcagctctgcttattccaggggtgtgtttcgtcgagatacacacaagagtgagattgctcatcggtttaaagatttgggagaagaacattttaaaggcctggtactgattgccttttctcagtatctccagcagtgtccatttgatgagcatgtaaaattagtgaacgaactaactgagtttgcaaaaacatgtgttgctgatgagtcccatgccggctgtgaaaagtcacttcacactctctttggagatgaattgtgtaaagttgcatcccttcgtgaaacctatggtgacatggctgactgctgtgagaaacaagagcctgaaagaaatgaatgcttcctgagccacaaagatgatagcccagacctccctaaattgaaaccagaccccaatactttgtgt

SEQ ID NO: 2801 - DNA, 453 bp, Bos taurus
  Clone ID: 12-LIB34-086-Q1-E1-C7
gacatttagccagtgttcccagctatctgggcacgtgtgaattcttcttgttaaaaacagttatgttaaggccaaagaagattcgacagatcctaaataccctgttttgctaaattcttagatttttcttgttcttaccagggctgactttatgaaaagttattcagaaaaaaacttaactgtatttttctcacttatttaagagtcctaggaggtgtagcctgacttggtaaaagaaattactgtatttttaatgaaacattcatcacactggtaaaaaatattgggagtggggtgatatgtttctcataatgttgcaaattatggtggctcagacagtaaagaatcttcctgccatgtgggagacctgggttcgacccctgggttggggggatcccctggaggagggcatggcaacccactccagtattctggcctggagaaccccgtgaa

SEQ ID NO: 2802 - DNA, 388 bp, Bos taurus
  Clone ID: 13-BOVMS1-002-Q1-E1-D1
atgcgacgtcatagctcttctatagtgtcacctaaattcaattcactggccgtcgttttacaacgtcgtgactgggaaaaccctggcgttacccaacttaatcgccttgcagcacatccccctttcgccagctggcgtaatagcgaagaggcccgcaccgatcgcccttcccaacagttgcgcagcctgaatggcgaatgggacgcgccctgtagcggcgcattaagcgcggcgggtgtggtggttacgcgcagcgtgaccgctacacttgccagcgccctatcgcccgctcctttcgctttcttcccttcctttctcgccacgttcgccggctttccccgtcaaactccaaatcgggggctcccttttagggtccgatttaaggcct

SEQ ID NO: 2803 - DNA, 240 bp, Bos taurus
  unsure (26): unsure at all n locations; Clone ID: 13-BOVMS1-003-Q1-E1-D1
gggtcgagcacgcgtccgcgctcacngcgcaagcgggtgacctccaaccaacgggcaacaactggtccccaaacaataaaggttgccgttgccgcaaactgacacactgtttataatgtgtacatacattgtttacctcattttgttatttttaaaacgaagccctgtggaaggaaatggaaaacttgaagcattaaactcagccgttctgttttgctgcgtaaaaaagggccctcattt

SEQ ID NO: 2804 - DNA, 412 bp, Bos taurus
  unsure (116): unsure at all n locations; Clone ID: 13-BOVMS1-003-Q1-E1-D9
agaaattacaccctgaattaggcactgatgcagataaggaacagtggaaagcggttcacaaacaagtggttgacagtgcttatgaggtgatcaaactgaaaggctacacatcctgngccattggactgtcagtggccgatttggcagaaagtataatgaagaatcttaggcgggtgcatccgatttccaccatgattaagggtctctatggaataaaagaggatgtcttccttagtgttccttgcatcttgggacagaatggaatctcagacgttgtgaaagtgactctgactcatgaagaagaggcctgtttgaagaagagtgcagatacactttgggggatccagaaagaactgcagttttaaagtcttctaatgttgtatcatttcactgtccaggctacacaggattt

SEQ ID NO: 2805 - DNA, 392 bp, Bos taurus
  unsure (58),(382): unsure at all n locations; Clone ID: 13-BOVMS1-004-Q1-E1-D1
ggtcgacgacgcgtccgcctcactataatactaatagctagccaacatcatctatcanaagagaacctaacccgaaaaaaactatttattactatgctgatctcactacaactattcctaattataacctttaccgccatggaactaatcttattttatattctatttgaagcaacactagtcccaacactcattattattacccgatgaggaaaccaaacagaacgcctaaacgccggactctatttcctattctatacactagctggctccctacccctattagtcgcactaatttatatccaaaacacagtaggattcctaaatttcctaatattacagtactgagtacaacctgttcataactcttgatctaatgtcntcatatgact

SEQ ID NO: 2806 - DNA, 124 bp, Bos taurus
  Clone ID: 13-BOVMS1-005-Q1-E1-D1
ggcaacatggaatcaagaccacagttgagaatgcatggacactggattttgtttcttatttcctcactttgggggaaaaaatctcttgtttttaaaaagtgataaatttggtgttaagtccttg

SEQ ID NO: 2807 - DNA, 120 bp, Bos taurus
  Clone ID: 13-BOVMS1-005-Q1-E1-D9
gtcggtatcagggtcgaccacccgtccggtgacttcaagatcaagtgtgtggcctttgagtgacatatgggccagccagcccatggcccccaataaaggcagctgcctgtgctccccctg

SEQ ID NO: 2808 - DNA, 341 bp, Bos taurus
  unsure (297): unsure at all n locations; Clone ID: 13-BOVMS1-006-Q1-E1-D1
gtcgaagaaaaacttctttatccagcagacacacctgttggaaatgatcagctgctagaaatacttaataaactgatcaaatacatccaaattaagtttgttcgtggcagtaccttcaaagaaatccccataactgtctacagacgcacaataccaaaggtcaaaattgaaggtgaacctgaattcagactgattaaggaaggtgaaacggtaactgaagtgatccatggagagccaattattaaaaaatacaccaagatcattgatggagtgcctgtggagataactgaaaaaganacaagggaagaacgaatcattacaggtcctgaaataaaatacac

SEQ ID NO: 2809 - DNA, 227 bp, Bos taurus
  Clone ID: 13-BOVMS1-007-Q1-E1-D1
ttagacctgcatgcgaggtcatagcccttccacattgtcacctaaattcaattcactggccgtcgttttacaacttcgtaactgggaaaaccctggcgttacccaacttaatcgccttgcagcatatccccctttcaccaactggcataataccaatgaggcccgcaccgttagccattcccaaaagttgttcagccttaatggcaaatggaacgcgccttataacg

SEQ ID NO: 2810 - DNA, 417 bp, Bos taurus
  Clone ID: 13-BOVMS1-007-Q1-E1-D9
gtaaccaaagcactgcaggcaaagtagtaattccacagtcacagtaagagagcttcagggcagtgtcaccatggttctctcatgggcaggttctgaaaatgtacaatatgtataatttgaaattttttttattattttgaaaataatgttataaccaatgccagggactgacaaaagacttgagacaggatggttatccttgtcatctaaggtcacaatgtgcctttttgaccttttctcctggactagtgaaatccagctcttactggattaagcagtatttctagagtgattgaaaggcagtagttaacgaggatgatataagattttctgttaagtgttaaactgatttctagctttgcagacatgtcatttttcagttatacagaatccaaagtaatgtccttctagctagtt

SEQ ID NO: 2811 - DNA, 453 bp, Bos taurus
  unsure (101),(107),(122),(406): unsure at all n locations; Clone ID: 13-BOVMS1-008-Q1-E1-D1
ggtcgaccgacccgtccgcctgatgcaatggaagggatcatccccggaggcatcccggtgacccacaacctccccacggtggcacatccctcccaagctcnctctcncaaccagcccacganacacggggacaatcgagagcaccccaacgagcaatagcagcgagtgatgaaaggtaatcattcagatacacctgggaccaagagacagtgaaaaatgaactaagagaaaaggaatttgacagtctttttaactgattctggacatatgcatcattgacgttgcagtgttacagctacagaagagctagaagccgagacgtgggaaaactgaagatgtcgtcgtctgcttgcggaagcgctgaaagagactatgacgtgatttattaacgaccaacttctgttantgtgtgttaaatttttcatctgtgcatcaaatcacaaagaataaata

SEQ ID NO: 2812 - DNA, 474 bp, Bos taurus
  Clone ID: 13-BOVMS1-009-Q1-E1-D9
gggtcgaaccacgcgtcggacagaaactctgtaaaaaaaccatcagatttgttaaggacatacttcataatctttaagtgtgcactgtaaaaccatccagccatttgacaccctttatgatgtcacacctttaacttaaggagacgggtaaaggatcttaaatttttttctaatagaaagatgtgctacactgtattgtaataagtatactctgttataatattcaacaaagttaaatccaaattcagaattacccattaaagttacatcttcacgtatcacagtttttaaagctgaaaagcatcccagttaaactagatgtgatagttaaaccagatgatagcatgatgatccatctgtgtaatgtggttttagtgttgcttggttgtttaattattttggacttgttttgtttttgtctgtttgtttttgctgatataatggcaaattctttaaattttttccccaaacatt

SEQ ID NO: 2813 - DNA, 196 bp, Bos taurus
  Clone ID: 13-BOVMS1-010-Q1-E1-D1
atacgacgtcatacctcttcaatactgtcaccaaaattcaattcagtggccgtcgttttagatcgtcatcacgggaaaaaccctgtcgttacccatattaaccgccttgcaaaaaatccacctttcaccagtggtcgtaatacctaagaggcccccaatgatcgcccttcccaatagttgaccatcattaatggca

SEQ ID NO: 2814 - DNA, 268 bp, Bos taurus; identical to SEQ ID NO: 4
  Clone ID: 13-BOVMS1-011-Q1-E1-D9

SEQ ID NO: 2815 - DNA, 321 bp, Bos taurus
  Clone ID: 13-BOVMS1-012-Q1-E1-D1
ctgacaacaatgggagaccggtttacagatgaggacgtggacgagctgtacagacaagcagctattgacactttagggaatttcaattacatcgagttcacacgcatccttaagcatggagcgaaagacatagaccactaataagaacttcaaactccagccaaacgttccttgttgccactctgggtaattctgagactttctcttagagcctgttgcatgcccttaactttacagcttctgcctttcatttgtatttattctcagccatttggggcacatgcatctctataatcaaactggacatgggacatcttgtca

SEQ ID NO: 2816 - DNA, 471 bp, Bos taurus
  Clone ID: 13-BOVMS1-014-Q1-E1-D1
gtggatcacaggggaaattggtggaagctctcaggcaaatgagaattaatcataggggaaactaccgacaacttctggaggagatgctgactagttacaggctagctaaagtagagggcgaagaaaatcctgctgaacaagctgctacagctgcttcttcgaacagtgatgctggaaacacagtggcaatgcaggaaagccatactgaatcaaaaagcgatcttgctgaattagacagctgtaccgaagatgcagggacaaagatgagtggtgaaaagttatgactttactttgtggtaatacttttgtgatctttgatttgatggtttttttcttaggaagtataatgtatgcatttatataaccattttgttatttgaaatcttggtaaactagttttattatattcatatattatagccttgttttttcagaaggcctttgcatacatctttatcagatagtttaaaa

SEQ ID NO: 2817 - DNA, 356 bp, Bos taurus
  Clone ID: 13-BOVMS1-015-Q1-E1-D9
gccgcctggaccgcaagatcgagttccccatgcccaacgaggaggcccgggccagaatcatgcagatccactcccggaagatgaacgtcagtcctgacgtgaactacgaggaactggcccgctgtacggatgacttcaacggggcccagtgcaaggcagtgtgtgtggaggcgggcatgatcgcactgcgcagaggcgccacggagctcacccacgaggactacatggagggcatcctggaggtacaggccaagaagaaggccaacctgcagtactacgcctaggggcctcctgctggcggacacgcgcaataaaggatgcttcccattaaaaaaaaaaaaaaaagggcggccgct

SEQ ID NO: 2818 - DNA, 419 bp, Bos taurus
  unsure (93),(119): unsure at all n locations; Clone ID: 13-BOVMS1-016-Q1-E1-D1
atgcgacgtcatagctcttctatagtgtcacctaaattcaattcactggccgtcgttttacaacgtcgtgactgggaaaaccctggcgttacncaacttaatcgccttgcagcacatcnccctttcgccagctggcgtaatagcgaagaggcccgcaccgatcgcccttcccaacagttgcgcagcctgaatggcgaatgggacgcgccctgtagcggcgcattaagcgcggcgggtgtggtggttacgcgcagcgtgaccgctacacttgccagcgccctagcgcccgctcctttcgctttcttcgcttcctttctcgccacgttcgccggctttccccgtcaggctctaaatcgggggctccctttagggttccgatttagtgctttacggcacctcgactccaaaaaacttgatta

SEQ ID NO: 2819 - DNA, 419 bp, Bos taurus
  Clone ID: 13-BOVMS1-016-Q1-E1-D9
gaagatacttggccttgccccttcacgagctgccacaaagcaggcaggtggatttcttggccctccacctccttctgggaagttctcttgaaatcaagaagaaccctatatttctgtcattcttttcagatattcaaaccagacccagcaactattttacagcaagagccataggcagccttagcacttgggctcatttctagatttgagttatttttaggctttttggggggtataatttgaataagaatggtacctaacaaacgggatagtgcttttggttacagattaatttttttttaacaagtgtgttgattaattaagcccaggtaatgtttatgtaatgagaaacaaattcgtattttgcttacatgaatatatctgtggagtcaactttcaagtatgtgctgtgtgccatg

SEQ ID NO: 2820 - DNA, 389 bp, Bos taurus
  unsure (164): unsure at all n locations; Clone ID: 13-BOVMS1-018-Q1-E1-D1
ctaatgtgcctgtatggagtggagtgaatgttgctggtgtctccctgaagaatttacaccctgaattaggcactgatgcagataaggaacagtggaaagcggttcacaaacaagtggttgacagtgcttatgaggtgatcaaactgaaaggctacacatcctgngccattggactgtcagtggccgatttggcagaaagtataatgaagaatcttaggcgggtgcatccgatttccaccatgattaagggtctctatggaataaaagaggatgtcttccttagtgttccttgcatcttgggacagaatggaatctcagacgttgtgaaagtgactctgactcatgaagaagaggcctgtttgaagaagagtgcagatacactttggggg

SEQ ID NO: 2821 - DNA, 414 bp, Bos taurus
  Clone ID: 13-BOVMS1-019-Q1-E1-D1
gtgactctagtgtgcctgtatggagtggagtgaatgttgctggtgtctccctgaagaatttacaccctgaattaggcactgatgcagataaggaacagtggaaagcggttcacaaacaagtggttgacagtgcttatgaggtgatcaaactgaaaggctacacatcctgggccattggactgtcagtggccgatttggcagaaagtataatgaagaatcttacgcgggtgcatccgatttccagcatgattaagggtctctatggaataaaagaggatgtcttccttaatgttccatgcatcttgggacagaatggaatctcagacgttgtgaaagtgactctgactcatgaagaataggcctgtttgaacaagagtgcagatacactttgggggatccagaaagaactgcagt

SEQ ID NO: 2822 - DNA, 369 bp, Bos taurus
  Clone ID: 13-BOVMS1-019-Q1-E1-D9
atgcgacgtcatagctcttctatagtgtcacctaaattcaattcactggccgtcgttttacaacgtcgcgactgggaaaaccctgtcgtctacccaacttaatcgccatgcaacacatccccctttcgccagctggagtactagctaataggcacgcatcgatcgcccatcccaacagttgcgcatgctgacaggcgaatgggacgcgccctgtagctgcgcactaagcgcggcgggtgtggtggttacgcgcagcgtgaccgctacacttgccagcgcccttacactggcccctttcactctcagcccttcagttccagcgacgtacactggcgttcaccgtcgagctctatatcgagggcacccttt

SEQ ID NO: 2823 - DNA, 350 bp, Bos taurus
  Clone ID: 13-BOVMS1-020-Q1-E1-D1
atgcgacgtcatagctcttctatagtgtcacctaaattcaattcactggccgtcgttttacaacgtcgtgactgggaaaaccctggcgttacccaacttaatcgccttgcagcacatccccctttcgccagctggcgtaatagcgaagaggcccgcaccgatcgcccttcccaacagttgcgcagcctgaatggcgaatgggacgcgccctgtagcggcgcattaagcgcggcgggtgtggtggttacgcgcagcgtgaccgctacacttgccagcgccctagcgcccgctcctttcgccttcttcccttcctttctcgccacgttcgccggctttccccgtcaagctct

SEQ ID NO: 2824 - DNA, 449 bp, Bos taurus
  unsure (320),(350),(399),(435): unsure at all n locations; Clone ID: 13-BOVMS1-021-Q1-E1-D1
ctagacacgtcaacatgactgacaatgatcttatcaatattcttgaccctttttatcatctttcaactaaaagtttcaaaacacaacttttatcacaatccagaactgacaccaacaaaaatattaaaacaaaacaccccttgagaaacaaaatgaacgaaaatttatttacctcttttattacccctgtaattttaggtctccctctcgtaacccttatcgtactattcccaagcctactattcccaacatcaaaccgactagtaagcaatcgctttgtaaccctccaacaatgaatacttcaacttgtatcaaaacanataatgagtatccacaattctaaaggacanacatgaacattaatattaatatctctgatcctatttattggatcaacanacctactaggcctattaccccattcattcacaccancaacacaactatca

SEQ ID NO: 2825 - DNA, 371 bp, Bos taurus
  unsure (320): unsure at all n locations; Clone ID: 13-BOVMS1-021-Q1-E1-D9
taagagcctgttgttaggaacctgcttggcctcggatctgaggggctttaggttggctgttgctgtgacttgaagcaggcgctggggagagtccactgcaaggaaggcgccatggacgatcagggctgcccccggtgtaagaccaccaagtaccggaacccttcgttgaagctgatggtgaatgtgtgcggacacactctctgtgaaagttgtgtggatttactctttgtgagaggagctggaaactgtcctgagtgtggcactccacttcgaaagagcaacttcagggtacagctctttgaagatcctactgttgacangggaatttagattccggaaaaagtgctaaagatataccataaaagggaaaa

SEQ ID NO: 2826 - DNA, 460 bp, Bos taurus
  Clone ID: 13-BOVMS1-022-Q1-E1-D1
gccaaccaagccttcggctaattcagatttgtttctttgaagtggtttcgattttgatgagtccttccaactctaaatacttccaacagtatttagaaggcaaaagcatctttttgagaaaaactgcctcttccagacccgtaaaacgaaaatagatttatggtgaaaactgaaagtgagcacacagcagaatagcaaaggcagtggtttggtcagatgggatttttgttgtagtaatttttgatttctggtgtgtttgatgttttatttctagtgtgttttataactacaaaatggttattacattttgtagtaatttaaaaccaaagttgctagcatcattttaccgttgtaccagttaatattcagattcctattaaatgtgctaagaatattaaatgtcgaagaaacagtctggtaaacagcattccagtaggtaaagaatgatactgtccacatc

SEQ ID NO: 2827 - DNA, 458 bp, Bos taurus
  unsure (398): unsure at all n locations; Clone ID: 13-BOVMS1-023-Q1-E1-D1
gtccggaaagctgaggtgggacagccacgtactcgtttccacaccaagactcagactttttgagccaaaaagccacattcttatactatccagcttgtaaaggttaatgtaaaacttaccagatgaaccttgtgtttcagcttttttctcttccccctccccttgcttcagaggcctgatggcgtcggactattccgaagaagtggccacctccgaagaattccccttctagaacatgtagacacttgagaaatgtttctgtttgaagaaaatagatggagaaacagaagtcttaagtctgtggcacactgtgtcttcagacagtttggaggaatgaaaaactagagattttaaaccaataattgaacatgtaaaattccagttaatgttaagatggnatatgcatcgctcttaaccttgagcatagtgacttagagacactgtatatcagtttttgc

SEQ ID NO: 2828 - DNA, 372 bp, Bos taurus
  Clone ID: 13-LIB188-001-Q1-E1-D1
accgtaaaacggcctgagggtctgacatcatggggactttcacggtcctctcctcatccaagtagaaatcctccagggaagtttttctggagtcaaactttgttacccactgccccttgaagtaagccacgcccaggaggaaaatgctgatctcactgggcatctccctcgtggacctagcgactttccctttcatctgggcctgcacccagttgttaatctcctgaaggtctactcgagagttgccggtcaggattctgggcctggtcccatatgacttctccaggggtgggatgaagctggcttttatccgcagcttcctctcaaagataatccgggaagcactcttaaggttcttctggggggcggtga

SEQ ID NO: 2829 - DNA, 439 bp, Bos taurus
  Clone ID: 13-LIB188-002-Q1-E1-D1
atggccgcgggataccttgaccattgtcctcagtctaaacagaaggtctagtccctaccatagggaagctgaggggtagcaggagacccactgagacccaatcccaacactgaaacctgccaggctcccctttactcctccccaggtccttccagcgggaggacctgcaagggcaagcccaccttggtttgattgcctggcaactgagaccctgctctggggaagggaagaggtcagaggaagccctgcagagggctggggaggtggggcccatctctgagcaatcagagtaggaggaaagaatgtatgtgcctgatggagaaagggatcggcatgctgggaggtgagggacttatctggggtgctccttcctcctccgtttgtggccacagacagtgaaccactgaaggatggcgccatcctgtgacttcctgtctgt

SEQ ID NO: 2830 - DNA, 425 bp, Bos taurus
  Clone ID: 13-LIB188-003-Q1-E1-D1
ccatggcggccggatactctcagcacctgtattctctggctactgaaatgcagctctaatgactctgtcactgagcggctgcgtgggtctaaaattgtctcccaaaatcccgtcacagccctccacgagctctgcccccttcacgtgtgtcctcagccttcgaaattcttcaatctgtagctgggatattgtcagagggtatcggaataatatccaggtcacaccttcgctgcagggcgggatggtgagagagccttcatagacccagtaatcacgcagcaagggatctggtaataaagtgttaggattaaagcagggtattgttttggatttccccttatactgaatatcctggaggatttcagtcacagccttcaggcccacgtgctcttttccgatctggacaaacaaagcgatgatagcga

SEQ ID NO: 2831 - DNA, 419 bp, Bos taurus
  Clone ID: 13-LIB188-003-Q1-E1-D9
gccaaggcggcgggatcacaaaatatagttttactcatacaaaaagatatacaattaaaaaacaaaaaatgaaaccaccttcagcccacatactttttcagaaaagggtagagcgagctcagagctctgacacaggacagtgaacaaagtgctaaggcggagagtgactgaccaagtgctagaggctgcagtgagacaagagctgtcaacaaccctgtctcctaacactgggcaagagtgagcccttggggcttctgtgaagatctgtcttccggtttctcatggcaacatccggatgctctcatcacagtgttggggcattttatctaaggttcctccttgggtttggagaagtcacagtgggcaaggctgatagcagcaacccttacgtaatcagtgtcagaactgcagaattccgt

SEQ ID NO: 2832 - DNA, 306 bp, Bos taurus
  Clone ID: 13-LIB188-005-Q1-E1-D9
tcccgaccgctatgggcgcgggacacctggaaatcggatacgtggacgacacgcagttcgtgcggttcgacagcgacgcccggaatccgaggatggagccgcggacgcggtgggtgaagcaggaggggccggagtattgggatcggaacacgcgaaacgccaagggcaacgcacagagtttccgagtgggcctgaacaccctgcgcggctaatacaaccagagcgaggccgggtctcacaccctccagtggatgtctggctgctacgtggggccggacgggcgtctcctccgcgggttcatgcagt

SEQ ID NO: 2833 - DNA, 170 bp, Bos taurus
  Clone ID: 13-LIB188-006-Q1-E1-D1
acctctttaacaagcacaccctgggacacagtgagagctaagcctcaggctggtttcccacagccacaggggtgacttccctggtcaccaaggcaatgcatgcatatttgggttaccttcatcttttctataagttgtaacaaaacatctacttaagttctttctttagt

SEQ ID NO: 2834 - DNA, 377 bp, Bos taurus
  Clone ID: 13-LIB188-007-Q1-E1-D9
gggatacttgtccactgactcaggctgcccatttctctgccactccacggcgatgtagtctgggtagaagctggtgaccatgcaggtgaggctgaccgtgcttttgctgagctcttcctggggtggggccaggacatacacctgcggctcccgggccggccctttggtcctggagatggtcctcacgatgggggccgggaggccttcgttgtggaccttgcacttgaactcctttcctccagtccagtcctggtgctggatgcgcagggcgctgaccacgcggtaggtgctgttgaactgctcctctctcggcttcgtcgtggctgtgtttacctccacgtcgtccacgaaccaggagaacttcacctcggggtcat

SEQ ID NO: 2835 - DNA, 436 bp, Bos taurus
  Clone ID: 13-LIB188-008-Q1-E1-D1
gatcaccaaatcaagtatgaggatctgcatacactggctgggaagcacggggatgaccttcgtcacacgaacacggatatttctgagatgaaccggaacatcaaccgtctccaggctgagatcgagggtctcaaaggccagagggcttccctgtatgctgccatcgctgacgctgagcagcatggtgagatggctgttaatgatgctcaagccaagctggccgatctggaggccgctctgaggaacgccaagcaagacatggcacggcagctgcgcgaattcgagcggtcgcccgggcaagtccacttcaatccatgtcactgcggcgacacccgcattctccgtcgccatgactgaacagatgacccttcgtggaaccctcaatggccacaatggctgggtgacccatatcgctaccactccccagttcccggac

SEQ ID NO: 2836 - DNA, 370 bp, Bos taurus
  Clone ID: 13-LIB188-009-Q1-E1-D1
acgtcttgggtccccactttcaccgttgttcttgctgccctccacccaggctgaaccactggtggaggggctcagctgggacttctcccaaccccctctcaggggtgtccgtccgggaatgaaggaatagcccgaggaccgggctggggtttatttaagcttttctgtgtgggtttagggagggcgggcactttaatgttattagggctggtttgggtgggggcaaagaatcttggccacaaagcgccagtttgcttagttttgtctcctggtctataccacctgcactgcagctgtgtggcagctgggggttcctcgctggtcataaggggaactgggctcttgcaggcagcctatccccttcatgggt

SEQ ID NO: 2837 - DNA, 165 bp, Bos taurus
  Clone ID: 13-LIB188-009-Q1-E1-D9
aatggccgcgggatactgggaacgccgcaggtgagaagccatttcataacatttcttgttgatcataccgccgtggacaccttctttgcccatcagcaggactagcgtcttggcagtcatggtgaccgtgatattgaaggttggggctccaccggtgctcttggt

SEQ ID NO: 2838 - DNA, 345 bp, Bos taurus
  Clone ID: 13-LIB188-011-Q1-E1-D9
atgctgccgtacgccatggaggccggatactgccgtcaaaccttcaacagcttccccttgtacatgatcatggtggtgtattatcgggtcttggattgagcgccagggtccctacgcatgtggtactagacgttgacactccctgtacgcttgagctccacgcagggcacagtcatgtgcatgtatgtattgatgttcccctgcgtgttatagggtattgcatgcatggtcacgctggactgtctacgctcctgtccagccgcacctgtataagctatacgccatctcacactcgccattatctccgcagtacacccccttctgtctcatgcaggtgatgttgtc

SEQ ID NO: 2839 - DNA, 320 bp, Bos taurus
  Clone ID: 13-LIB188-012-Q1-E1-D1
actcttgcaaggaaaatcgcatggcctgaagagcctgctaggctgcaatccatggggtcgctcatagtccggcatgaccgagcgagttcactttcacatttcagtttcatccattggaggaggacatagctacccactccaatgttcttgcctgaagaatcacagggactgctgggcctggtgggctgccgtccatggggtcacacagactcggacacaactgaaaggacttctcaaaggcagtattaccagcagcagcagcaacagcagtgcctagatgtcaaaacggtttagaccagtcacgtatgatcacacaagtc

SEQ ID NO: 2840 - DNA, 398 bp, Bos taurus
  Clone ID: 13-LIB188-013-Q1-E1-D1
acccggcacagcaggagtccaggcaccatctttcgcagctctggctcgtcctggggaagctgggagagcaccctcacacctggcagccctgtgtgccatactcctggaggaagctgttgagctgggcacagggtgtccgatggcgggtgctctggcacatgcgctcagagggcatctcctcaatccagctgttcgagtccagcaagtactatattgaagacaccaccgattataaaatacaccattctgtgtgccactaagggaaaaacactgccaattttaactgtaaggtgccacagctatacaactcattttattcagacatgttatgtagaaaagctgtgttctttacaatcagtggaatctgctattaccccatttggcaggtgagaaaactg

SEQ ID NO: 2841 - DNA, 424 bp, Bos taurus
  Clone ID: 13-LIB188-013-Q1-E1-D9
acacttacaggcaccacactcgcagacgccgcggccattgcagatctgtccattcacggccatgcaggaagtggtatccagagaacagtcacaggcgctgccggtgtagttagggttgcactcacacactcgacacttgcaaacaccatttcctccacatattaagccattggatctatcacagttgaaattatcacactcgcagaatttgccagaataaatttcatttgtattgtccctcttcctacacacacactgtccacagacacactctccattgttgctacagatttctgaactgttttctttcctgcagtaggcatccatgtcttcgctgttcacctcatctgtgctacattcacagtgtctcccgacacgtccctcgttgcacctgcaggccccacactcgaaggtcccgttgccg

SEQ ID NO: 2842 - DNA, 378 bp, Bos taurus
  Clone ID: 13-LIB188-014-Q1-E1-D1
actttagtcagtgacctctggaataagaagaaagaactctgacttttgattattaggttttaaaattatcagtctttgcaggaaggtctgttttgtttttcctttaggttttcagtgtatcagtccaggggttttgccttatgctgaggtcaaactagggccaagaaagttttgtcctccattttaactgagttatatagtatgttgacatgagataaaaatgtttcagagaaaagcaaaagcttagaagtgagaatcatttgtattttgagttggaaattatgaaacttactctcttaacgatcatatacattttgaagaacaaacgtttagcatgaccaaagctcacttcttctcatttttgttggcttttgccaa

SEQ ID NO: 2843 - DNA, 295 bp, Bos taurus
  Clone ID: 13-LIB188-015-Q1-E1-D1
atgctccgtacgccatagccgcgggatacaatcaagacctcggacacactgtagaactttgggaatgctcgatccaaccgactgctgtcaccttcaccgttccagtttttaaatcctgagtcaagcgccaaaaaaaaaaaaaatcaaaaaagacaaagaaaaaaacatataaagccatgcgaatctcatctcgttttctgcgcaagttaggttttgtcaagaaaaagggtgtaacgcagctaacagtccgcctagaagcatttgcggtggacgatggaggggccggactcatcgt

SEQ ID NO: 2844 - DNA, 465 bp, Bos taurus
  Clone ID: 13-LIB188-015-Q1-E1-D9
ccatggaggccggatacgtcgtatatcttactcaggttgagcccatactgaagagacgcctgtttggacactcacagttgatacagagcgatgatgatgttggggatcaccacccttttgcaaatgcccatgatgtgctggcccgctcccgcagtcgagccaacgtattaaataaggtcgaatatgcccagcagcgttggaagcttcaagttcaagagcagcgaaaatccgtctttgaccgtcatgttgtcctcagctaattgggaattgaattcacggtgactagaaagaaatgaggcagacaatgggaaaaagattgactgagttttcctgggttttgttttaataccctgttgattttgccaactcttgctagaaaattcaaaactggaaacaaaaacacgcttgttgttttcttttctcatttatgtattaatcaaggcatttttttttaagcacacaccc

SEQ ID NO: 2845 - DNA, 437 bp, Bos taurus
  unsure (383): unsure at all n locations; Clone ID: 13-LIB188-017-Q1-E1-D9
acaccgtcaataccgacaaggtgccttgtcctttcccttcagcttttactgtgaaacgctcattttccttagtctcttctgagcgcaggaggctggcagattcccagaggatacgatgcctgaccgcagagttgcggctgggcagttggatggacacatccaggttcagctccttgtgatcaggaacatccttctggtattgggccaaggcttggaacaccatgaaagtggcctgcgtggagccataaccacctccatagtatctctgctcgttgagccagcgcacgacaggaggcgtagtgtcgtagtctttgcgtgccagcagagccaagagggcgtaggacgtggcctccacattgtagagcttctggttgggttcctcncagcggttcttttctttggctgtgttcagaaatttggtgaggcggtcaccctcc

SEQ ID NO: 2846 - DNA, 443 bp, Bos taurus
  Clone ID: 13-LIB188-018-Q1-E1-D1
ggagacttatgataggccagcccgccgggcactttgacaagcttgttgttgttcaaatgaagttccctcaaatgaggagtgttggccaaagagccattgtcaaccgcagagatgctgttgaaactcagtcccaacttagccaaattattcagtcctttcaggctagctgcatcaactttggtgattttgttgccatcgagatgtaattcagtaagggaaggaggaagaccttgagggatggtagttatatttgtgtcagcaatgcggatgtaggagagcttcttcattccctgaaaggctccattttcaatgcctgagctcttcagcgggttggtgccaagttctacgacgatcatctggttcaatccattgaacacagactttcgcactttggtgatctcgttctcatggacacgcagctcctgaagagttttgggcatttt

SEQ ID NO: 2847 - DNA, 427 bp, Bos taurus
  Clone ID: 13-LIB188-019-Q1-E1-D1
gccaaggccgcgggatacttggagtccgaaaccctagtgacccgagaagcggttacagagatcctaggcattgagcctgatcgggagaagggatttcacttggatgtggaagattatctctcaggagttctcattctcgctagtgaactgtcgaggttgtctgtcaacagtgtgactgccggagactactcccggcccctgcacatctccaccttcatcaacgagctggactccggcttccgcctcctcaacctcaaaaacgattccctgaggaagcgctacgatggcctgaagtatgacgtgaagaaagtggaggaggtagtctacgacctctccatccggggtttcaacaaggagacggcagcagcctgcgtggagaagtagggggctcccccccagccctgccaactccagtggtgcccaacaa

SEQ ID NO: 2848 - DNA, 150 bp, Bos taurus
  Clone ID: 13-LIB188-020-Q1-E1-D1
acttcctgatgctctgtctggaggcccgggtggtctccacgttgcgggtgatggtgctgccgtctgccttccagaccacggtcacgctacccgggtagaagtcgctgatgagacacaccagggtggccttgttgccgttgagctcctccg

SEQ ID NO: 2849 - DNA, 396 bp, Bos taurus
  Clone ID: 13-LIB188-021-Q1-E1-D9
tggcggcgggatactatggctataccggggctttcaggtgcctggctgaggacgttggggacgttgcctttgtgaaaaacgacacagtctgggagaacacgaatggagagagcactgcagactgggctaagaacttgaatcgtgaggacttcaggttgctctgcctcgatggcaccaggaagcctgtgacggaggctcagagctgccacctggcggtggccccgaatcacgctgtggtgtctcggagcgatagggcagcacacgtgaaacaggtgctgctccaccagcaggctctgtttgggaaaaatggaaaaaactgcccggacaagttttgtttgttcaaatctgaaaccaaaaaccttctgttcaatgacaacactgagtgtctggccaaac

SEQ ID NO: 2850 - DNA, 279 bp, Bos taurus
  Clone ID: 13-LIB188-022-Q1-E1-D1
ccatgagggccggatacactcacaatccaatgtaactgtccttctgtgagtcaaatgatctgaccacacatatcgggatccagcattacgcactccccaaatcggaacggctctcacaccttatgatccgctagacatacatccatccctgtgacaatgacatgacttgcacctcgcgttgacgaccgtcatgttacatctggatgactccctggccagctcaaagctgcaaccaacataactcctactctgacatgcaggccaacaattttgcccatg

SEQ ID NO: 2851 - DNA, 443 bp, Bos taurus
  Clone ID: 13-LIB188-023-Q1-E1-D1
ataagtgtcctaattaactcagcacaattattttatgattcatccatgctactgctatttatcaacagttcatttttgctgctgagtagagtcagatacgactgagcgagttcactgtcacttttcactttcatgcgttggagaaggaaatggcaactcactccagtgttcttgcctggagaatcccagggatgggggagcctggtgggctgccgtctatggggtcgcacagagtcggagtattagcagtaacagcagtatcattgtatggccacatcattcacttgatggacatttggttgcttccagtttctggccattacaaacaaaactgttaagattatctgtgcttaagtctttgtgtggacatatgctttcatttcctgagtaaattcctggaagtggaatagctggattgaatggtttagaaactgccaaacttt

SEQ ID NO: 2852 - DNA, 430 bp, Bos taurus
  Clone ID: 13-LIB188-024-Q1-E1-D9
cgccggagaccacggagctcggcagagcagcaaagctggcaccagaatttgccaagagaaatgtcaagatgattgctctttccatagacagtgtggaagaccatcttgcatggagcaaggatatcaatgcttacaatggtgaagagcccacagaaaagttaccttttcccatcattgatgataagaatcgggaccttgccatccagttgggcatgctggacccagcagagaaagatgaaaagggcatgcctgtgactgctcgtgtggtgtttatttttggtcctgataagaaactgaaactgtccaccctctacccagctaccactggcaggaactttgatgagattctcagagtaattatctctctcaagctgacggcagaaaagaaggtggccaccccggttgactggaagaatggggacagcgtgat

SEQ ID NO: 2853 - DNA, 314 bp, Bos taurus
  Clone ID: 13-LIB188-025-Q1-E1-D1
gcaatgggcgcgggataccgtgagagtggacgctacaagtgagtcagaggcggaagtgctgtccccagtcgtgagtgtctttgtcccgcctcgcaacagcctctctggtgacggcaatagcaagtccagcctcatctgccaggccacggacttcagccccaaacagatctccttgtcctggtttcgtgatggaaagcggatagtgtctggcatttctgaaggccaggtggagactgtgcagtcctcacccataactttcagggcctacagcatgctgaccatcacagagaaagactggctcagccagaacgtgt

SEQ ID NO: 2854 - DNA, 393 bp, Bos taurus
  Clone ID: 13-LIB188-026-Q1-E1-D1
tggccgcggcatacatgaacacgaaccccggccgcctgctgctctgcctcacgcttggcctctggctcaccaccgcctgggtgctgtcggtagccgagaggcaggccgtgaatgccactgggcacctttcagacacactgtggctgatccccatcacattcctgaccattggctatggtgatgtggtgccaggcaccatgtggggcaagattgtctgcctctgcactggcgtcatgggggtctgctgcacagccctgctggtggccgtggtggcccggaagctggagtttaataaggcagagaagcatgtgcacaacttcatgatggatattcagtatgccaaagagatgagggagtcagctgcccgagtgctgcaggagtcctggatgttgt

SEQ ID NO: 2855 - DNA, 287 bp, Bos taurus
  Clone ID: 13-LIB188-028-Q1-E1-D1
cgccatgagcgcgggataccttgccgtggcagttgtcaagaaagcaaatgaggggctcacatggaattctctgaaagacaagaagtcgtgccacaccgccgtggacaggactgcaggctggaacatccccatgggcctgatcgtcaaccagacaggctcctgcgcatttgatgaattctttagtcagagctgtgcccctggggctgacccgaaatccagactctgtgccttgtgtgctggcgatgaccagggcctggacaagtgtgtgcccaactctaaggagaagt

SEQ ID NO: 2856 - DNA, 259 bp, Bos taurus
  Clone ID: 13-LIB188-028-Q1-E1-D9
cccttcctggggaaaatgtgggctttaatgtcaaaaacgtgtctgtcaaagatgtccgtcgtggcaatgtggctggtgacagcaaaaatgatccacccatggaagctgctggcttcacagctcaggtgattattttgaaccatccaggccaaatcagtgctggatatgcacctgtgctggattgtcacacagctcacattgcttgcaagtttgctgagctgaaggagaagattgatcgtcgttctgggaaaaagctgga

SEQ ID NO: 2857 - DNA, 374 bp, Bos taurus
  Clone ID: 13-LIB2809-002-Q1-E1-D1
acccatcatctgccaccggggctgcaccctccgctttgaactccttggctgtgagttgaatggatgcactgaacccctaggcctgaaggataataccatccccaacaagcagatcacagcctccagctactacaaaacctggggcctgagtgcctttagctggtttccctactacgcacgactggataatcagggcaagttcaacgcctggaccgcccagaccaacagtgcctctgagtggctgcagattgacctgggctcccagaagcgagtcacgggcatcatcacccagggtgcccgagactttggccacattcaatatgtggctgcctacagggtggcctatggtgatgatggtgtgacctggactgagt

SEQ ID NO: 2858 - DNA, 394 bp, Bos taurus
  Clone ID: 13-LIB2809-003-Q1-E1-D9
tgctcgccgaagccatggccacgcgcatacagcacaaaggcctgaatggacatatctctctggggatagggcactgctttctggggaacaggcaggactttggactgaaaaagggacagcacggactgaggaggaaacatgacatttggaggaagaggctggtaaggctggtgaacccaagactggaccagaggcagaggaaggtgcagattttcaacatcattgaaattcaggctctggctttcattaaggggctcaactggatatttaggaaagggcatttctttgtgcttaggacccatagcctccttcactttggagactcccattacttcaggctgaaggaaaggcggcaccaccacaggggtttgagtaagaggagggatgttttgtg

SEQ ID NO: 2859 - DNA, 417 bp, Bos taurus
  unsure (373): unsure at all n locations; Clone ID: 13-LIB2809-005-Q1-E1-D1
acagccagctttggagttgaaattaatagaaattattccaaaattattcttaggtcacaaataactactatcccacataaaaagggaaaaatcccacccaattaaggaaaaggtatcctgtgtatgtttccatggcaatgagtttatgcattctcagattttgtccggctagttatccaccctttatctgatgcatttattccatctctcagagagaaccatatagattcctgacggcatccaggacacgtggctcgtggtggacacacttcatggtggatactgctactataaaaatactcagaacttaagagaattccaagatgctttataaaaagcattagtcatgcctcaaaactgccctttgaggtangtcagtattattatcccattttaacagaaggaaaactgaagcac

SEQ ID NO: 2860 - DNA, 469 bp, Bos taurus
  Clone ID: 13-LIB2809-007-Q1-E1-D1
tggccgcgcgacacatcagaatggactgaatgggcatatctctctggggatagggcactgctttctggggaacaggcaggactttggactgagaaagggacagcacggactgaggaggaaacatgacagttggacgaagaggctggtgaggctggtgcatccaacactggagcagaggcacatgaaggtgcatattttcaacatcactgagagtcatgctctggctttcagtaaagggctcaactggatatttatggaagggcatttctttgtgcttaggagccatagcctccttcactttggagactcccattacttcagcgctaacgaaatgcgcatcaccacatgagtttgagtactatgatggatgttttgtggcaagctgtcacagatttgcccacggatgggatagactataaactgtgtctgggcaaaagggtggattttatcctgtagttcatcctctgtt

SEQ ID NO: 2861 - DNA, 410 bp, Bos taurus
  Clone ID: 13-LIB2809-007-Q1-E1-D9
gcccgggacactgaataaaacaatggtaaatagtgtccaattaagtcagactgaaggacttactttttctccttagttgatgttttattttttcaatcttttatgtataactttgctttcatgttgatatatagactgatgattatattatatacagaatttataattatcttgcttgaataacactgtaataaaacatttcatattctgttactgaaggacttatttttaaaaacatgcttcctgtaatatatgatgttttcatctcaagttataaccacaggaagcagtaacccaaatgttcaaagttcttcacccgccaggctcgattatgtggcacttcctggtggcatctggctaaaccacttctttacatattgatgcatttcttgtccacaccatatgttggt

SEQ ID NO: 2862 - DNA, 461 bp, Bos taurus
  unsure (395): unsure at all n locations; Clone ID: 13-LIB2809-008-Q1-E1-D1
tgggcgcgggatacaatgaggaaagctgtctgggaaagggagaaccatagccttggctcagagccttgaggcacagcctgaagacttcctacttaacatctaggaaggctgctttagtgtttttctaggccacgggtctgtctggaatggagagccaatggcctcctatagataccaatgtgtcatctagaaaggatatgctggattcagtttgccacatctcactaggccgactttgtaaccttgtttgtcacctgtctacactgcttaagcatttgatattgaatgaataatgtagagttgatgaaaactttaaaattaaacatgttttcagtcacatgtgagttctttgaaactgaggactctgaattttcaacttattgaatctctaatanacactgtaactccaatattttggccacctcatgcgaagacttgactcattgggaaagaccctgctg

SEQ ID NO: 2863 - DNA, 410 bp, Bos taurus
  Clone ID: 13-LIB2809-008-Q1-E1-D9
tgggcccggcatacagcagaaaggactgaatgggcatatctctctggggatagggcactgctttctggggaacaggcaggactttggactgagaaagggacagcacggactgaggaggaaacatgacagttggaggaagaggctggtgaggctggtgcatccaagactggagcagaggcagaggaaggtgcagattttcaacatcagtgagagtcaggctctggctttcagtaaagggctcaactggatatttagggaagggcatttctttgtgcttaggagccatagcctccttcactttggagactcccattacttcaggctgaaggaaaggcggcaccaccacaggggtttgagtaagaggacggatgttttgttggaggctgttagggatgggcccagggaaggga

SEQ ID NO: 2864 - DNA, 391 bp, Bos taurus
  Clone ID: 13-LIB2809-010-Q1-E1-D1
gggatacagcagaaaggcctgaatgggcatatctctctggggataggacagtgttttcgggaaaacgcacgacttttgactcagaaaaggagaacacggactgaggaggaaacatcacagttggaggaagaggctggtgaggctggtgcatccaccactggagcagacgcagaggaaggtgcagattttctacatcagtgagagtcaggctctggctttcattcaagggctcaactggatatttatggaagggcatttctttgtgcttaggatccataccctccctcactttggatactcccattacttcaagctgaaggaaacgcggcaccaccacaggggtttgagttagacgacggatgtttttttttacgccgttaccgatcggccc

SEQ ID NO: 2865 - DNA, 285 bp, Bos taurus
  unsure (78),(80),(143),(165),(182)...(183): unsure at all n locations; Clone ID: 13-LIB2809-011-Q1-E1-D9
catccaagaactgggagcacgaggcaccagggaaggtcgcacgattttcccaacatcagtgagaagtcagggctcctnangctttcagtaaaggggctccacactggatatttagtggaacgggcaatttcctttgtgccttnacggagccatagcctcccttcnaactttggagactcccnnattacttcaggggctgaagtgaaaggcggcaccaccaccagggggtttgacgtaacgaggaccggatgtttttgttgggaaggctgcttagggaatgggccc

SEQ ID NO: 2866 - DNA, 410 bp, Bos taurus
  Clone ID: 13-LIB2809-013-Q1-E1-D1
accgctggcacatcaactttaccacgttcttcattgattgcatggctgccatcggtctggcttatgaccggaagaaagtatccaaggctgccatcttggccaggataaaaagaactggagaggaaagctacaagagtggctgaatttgtggtcccttgggttccttttccaaaagccatctgggcagaggtttaatgttctgtttattaactactgaataatgctaccaggatgctaaagatgacgttaacccattaaagaatactgtacagtattctttaaaattttctttttaaattgaaagccaacaactctgcctttatgatgctaagctcatgttcttatttcttctcctatcttctttctcttctgttcccaataacccttccctttgttttgtccctgtcaac

SEQ ID NO: 2867 - DNA, 456 bp, Bos taurus
  Clone ID: 13-LIB2809-014-Q1-E1-D1
gccaaggcggcgggataccccagctagaaattgttcccaatagtgctgaggaacgacttcacagtatgaaagagggaatccatgcccaacagaaagaacctatgataggagtgaatcaggaactggcctacttctaccctgagcttttcagacaattctaccagctggatgcctatccatctggtgcctggtattacgttccactaggcacacaatacactgatgccccatcattctctgacatccctaatcccattggctctgagaacagtgaaaagactactatgccactgtggtgaagagtcaagtgaattctgagggactccacagttatggtctttgatggttctgaaaattccatgctctacatgtcttttcatctatcatgtcaaaccattctatccaaaggcttcaactgctgttttagaatagggcaatctcaaattgaaggcactc

SEQ ID NO: 2868 - DNA, 390 bp, Bos taurus
  Clone ID: 13-LIB2809-015-Q1-E1-D1
gacacctggtgagattgtggaaagcctttcaagcagtgaggaatctattacacgcatcaataagaaaattgagaagtttcagagtgaggaacagcagcaaacagaggatgaactccaggataaaatccacccctttgcccagacacagtctctagtctatcccttccctgggcccatccctaacagcctcccacaaaacatccctcctcttactcaaacccctgtggtggtgccgcctttccttcagtctgaagtaatgggagtctccaaagtgaaggaggctatggctcctaagcacaaagaaatgcccttccctaaatatccagttgagccctttactgaaagccagagcctgactcgtcactgaagttgaaaatctggcacttcctc

SEQ ID NO: 2869 - DNA, 444 bp, Bos taurus
  Clone ID: 13-LIB2809-021-Q1-E1-D1
gccatgagcgcgggatgcctggagagattgtggaaagcctttcaagcagtgaggaatctattacacgcatcaataagaaaattgagaagtttcagagtgaggaacagcagcaaacagaggatgaactccaggataaaatccacccctttgcccagacacagtctctagtctatcccttccctgggcccatccctaacagcctcccacaaaacatccctcctcttactcaaacccctgtggtggtgccgcctttccttcagcctgaagtaatgggagtctccaaagtgaaggaggctatggctcctaagcacaaagaaatgcccttccctaaatatccagttgagccctttactgaaagccagagcctgactctcactgatgttgaaaatctgcaccttcctctgcctctgctccagtcttggatgcaccagcctcaacagcctc

SEQ ID NO: 2870 - DNA, 402 bp, Bos taurus
  unsure (356): unsure at all n locations; Clone ID: 13-LIB2809-022-Q1-E1-D9
cccagcaggaaattgttcccaatagtgctgaggaacgacttcacagtatgaaagagggaatccatgcccaacagaaagaacctatgataggagtgaatcaggaactggccaacttctaccctgagcttttcagacaattctaccagctggatgcctatccatctggtgcctggtattacgttccactaggcacacaatacactgatgccccatcattctctgacatccctaatcccattggctctgagaacagtgaaaagactactatgccactgtggtgaagagtcaagtgaattctgagggactccacagttatggtctttgatggttctgaaaattccatgctctacatgtcntttcatctatcatgttcaaacattctatccaaaggcttcaactgct

SEQ ID NO: 2871 - DNA, 388 bp, Bos taurus
  Clone ID: 13-LIB2809-027-Q1-E1-D1
gcccgggacacaagctatttttttttttttttttttttttttttactgccttagaatgtaatttattgaaaagaagacagactcactctcagttcatgcacacaattatttgaaatgatggcacttacaagataagtgattcgcatgcttttaaaacattttccatacataaatttaatgaatactttaactcccattgactcagtggcctttataccagcatgatacgactggaatttaagtaacaatctgttaagacactttcactgaaggatgttacactatctaaaattcaatagagaactcaagaagaatgactgccttcaatttgagattgccccattctaaaacatcaattgaagccgttggatagaatggtttgacatga

SEQ ID NO: 2872 - DNA, 360 bp, Bos taurus
  Clone ID: 13-LIB2809-028-Q1-E1-D1
aatgggcatatctctctggggatagggcactgctttctggggaacacgcacgactttggactgagaaagggacagcaccgactgaggaggaaacatgacacttggaggaagaggctggtgacgctggtgcatccaagactggagcagaggcaccaggaggtgcagattttcaacatcagtgagagtcaggctctggctttcagtaaagggctcaactggatatttagggaagggcatttctttgtgcttaggagccatagcctccttcactttggagactcccattacttcaggctgaaggaaaggcggcaccaccacaggggtttgagtaagaggagggatgttttgtgggaggctgtt

SEQ ID NO: 2873 - DNA, 392 bp, Bos taurus
  Clone ID: 13-LIB2809-030-Q1-E1-D1
gcatgcctccagccgccaagggcgcgggatactccccatgtgccagtttaaatatgtgcttcttcctgtcgatgatcttcaaggtgccattgggtaaccacttgccaatgtcccctgtgtgcaaccagccgtctttatccagagcttctgctgttttcactgggtctttcaagtagccttgaaaaacatttgaccctttcacacatacctcgccctcgcccttggcagccaggtaattcatttcttccacatcaacaagcttgataatgctgcaaggcattgggggaccaacatggcctgcggtccagtctccagcaacagtcaggcagcagccagcggtgcactcggtctgtccgtagccttcgtagaactggcagcccagcgcagccctc

SEQ ID NO: 2874 - DNA, 416 bp, Bos taurus
  Clone ID: 13-LIB2809-030-Q1-E1-D9
cgcctaggccgcgggacacaagctttttttattttttttttttttttttttttagtaccgccataagatgtttattattgagaagaagaacgacatcaccgcagttgcagcccacaattagttgagatggtagcacctagaggagaagtgcatcagcggcttttacaacatctaccaaacagttttttaatgacgacattaccccccgttgcagcagtggtcattacaccatcatgatactactggtaatgaagtaacaagctgtgacgacaacatcacttgaggatgtaacaccaactaaacagcagtggacacctcaagaagaaataccgccatcatgttaagaccgcactattctaaaacagcagttgccgccgttgggaataatggcttgacatgaacgatgagaccacatg

SEQ ID NO: 2875 - DNA, 391 bp, Bos taurus
  Clone ID: 13-LIB2809-031-Q1-E1-D1
acaggacaattgagtatgcaaatgtgtgaccataccacatagttattaaatagcagaacttgcttaaaaacaaggatttgcggacaatgtaaaattctttcattatattactcttgtggtaacatatttatctaattatgatatttaagctttcgtgttttataattgaactttgattgtttggcacttaggccaaattctaaatcaaaatgaatttacaacttgatgcctttgaagactcaagattaccaccttctaccaagagaagtagtgctagaagttggccattgttaaggaactccttgaattaaaaaaacacatattaagacttagttttcattaaaacaaacaaaaataaacctcagagtaacttttaaagtctttttaaaat

SEQ ID NO: 2876 - DNA, 453 bp, Bos taurus
  Clone ID: 13-LIB2809-032-Q1-E1-D9
gccatgagcgcgggatacattgagtatcttccagctctcttgcaagggccagagccaccaggcaggcaaggatgaggaccttcatggctctcaattccttttttccaaagtagaggacaagaagtgaaggaggcctactgccaagcaagagctgacggtcacaaggaaaggtgcaatgatgaagagttttttcctagttgtgactatcctggcattaaccctgccatttttgggtgcccaggagcaaaaccaagaacaaccaatacgctgtgagaaagatgaaagattcttcagtgacaaaatagccaaatatatcccaattcagtatgtgctgagtaggtatcccagttatggactcaattactaacaacaagaaacagttgcactaattaataatcaatttctggcataccattatatgcaaagccagctgcagttaggtcacctgcccaa

SEQ ID NO: 2877 - DNA, 303 bp, Bos taurus
  Clone ID: 13-LIB3057-001-Q1-K1-D1
tcgggctgtgtgcgtgttgtattgctgtatatatatatgaattaatatattaattataagattaattcaagtatattgatttatatatattgtatgtcaataagtttatacttgttgccatatataaatacattttgcatttaggtatatctgtataccaaaatgagataaggaggttatacatttatttaaatttatagagagctaaactaaacattagacgtaaattaacatatctctaaatttatattggtaaaatgtaaattttaaaaaataaaattgacaactgcttgataattcctt

SEQ ID NO: 2878 - DNA, 433 bp, Bos taurus
  Clone ID: 13-LIB3057-002-Q1-K1-D1
atcatcagacccgggccgcggagcgccccttgccaaagtggttttccgggatccgtgccgtgttaagaagcggacagagctgttcatcgctgctgagggcatccacaccggccagtttgtgtactgcggcaagaaggcccagctcaacataggcaacgtgctcccggtgggcaccatgcctgagggcaccatcgtgtgttgtctggaggagaagcctggtgaccgaggcaagctggcaagagcctctggaaactatgccacagtcatcttccacaaccctgagacaaagaagacgcgagtgaagctgccttcgggctccaaaaaggtcatctcctctgccaacagagctgtggtcggtgtggtggctggaggtggccgcattgacaagcccattctgaaggccggccgtgcctaccacaagtataaggcaaag

SEQ ID NO: 2879 - DNA, 204 bp, Bos taurus
  Clone ID: 13-LIB3057-003-Q1-K1-D1
acgctttcaatagatcgcagcgagggagctgctctgctacgtacgaaaccccgacccaggagcggggtcgtctacgaatggtttagcaccaggcgccccacgaacgtgcggtgcgtgacgggcgagggggcggccgccttttcggccgcgccctgtgtcccgggacgaagggctcttcgcaccggaccccggtcccgacgcgcg

SEQ ID NO: 2880 - DNA, 408 bp, Bos taurus
  unsure (52),(313),(316),(379): unsure at all n locations; Clone ID: 13-LIB3057-004-Q1-K1-D1
gagcttcctggtgaagtgtgtttcttgaaatcatcaccaccatggacagcanaggttcgtcgcagaaagggtcccgcctgctcctgctgctggtggtgtcaaatctactcttgtgccagggtgtggtctccacccccgtctgtcccaatgggcctggcaactgccaggtatcccttcgagacctgtttgaccgggcagtcatggtgtcccactacatccatgacctctcctcggaaatgttcaacgaatttgataaacggtatgcccagggcaaagggttcattaccatggccctcaacagctgccatacctnctnccttcctacccctgaagataaagaacaagcccaacagacccaccatgaagtccttatgagctngattcttgggttgctgcgctcctggaatg

SEQ ID NO: 2881 - DNA, 368 bp, Bos taurus
  Clone ID: 13-LIB3057-006-Q1-K1-D1
atcgcgagcggccgccctttttttttttttttttttgcgatgcaatctcctcatgttagggggaaaggacagtgggagtggcaccttccagggtcaaggaaggcacgggggaggggcaaacaacagatggctggcaactagaaggcacagctggcctccccgaagcggcggcacttcatgaccctcaggtacgtctccgtcttatgcaggtccttccggaagcaggagagcagaccgtagttcttgagcagcgcgtcgtcactgcgcatgtttgtgtcaaatttgtcataggtctgcttgaggatctgcccagcccggggggtgccatctttcagctcccgcatcagggccaggatgccttcccctgc

SEQ ID NO: 2882 - DNA, 371 bp, Bos taurus
  Clone ID: 13-LIB3057-007-Q1-K1-D1
tcgacccaagccacgcgtcagtgcaaactagggatgaagatgcaggttcaagagaaatttataagctgctagaggggcaatgaagctgtgttggttatgtaaacttaatcctggaagatatcaaaagttatgcctatcagctgatgatacctgataaatgcttgatgagaaaccgttggcgcatacagatcaatggaccctgcatcatctattatgatgacaattgtgtcatgcagggatctagaaacatcccttgaatctctatgcttaatgtcagctagttgaacactttgaaacttgcatttgagtgtcacctgggacactcttgactttgcactgaaaatagcttttcaaagttagatgagctatat

SEQ ID NO: 2883 - DNA, 412 bp, Bos taurus
  unsure (311),(377): unsure at all n locations; Clone ID: 13-LIB3057-009-Q1-K1-D1
gcttcctggtgaagtgtgtttcttgaaatcatcaccaccatggacagcaaaggttcgtcgcagaaagggtcccgcctgctcctgctgctggtggtgtcaaatctactcttgtgccagggtgtggtctccacccccgtctgtcccaatgggcctggcaactgccaggtatcccttcgagacctgtttgaccgggcagtcatggtgtcccactacatccatgacctctcctcggaaatgttcaacgaatttgataaacggtatgcccagggcaaagggttcattaccatggccctcaacagctgccatacctnctcccttcctacccctgaagataaagaacaagcccaacagacccaccatgaagtccttatgagctngattcttgggttgctgcgctcctggaatgaccctc

SEQ ID NO: 2884 - DNA, 439 bp, Bos taurus
  Clone ID: 13-LIB3057-010-Q1-K1-D1
tgatgagatggttgaattacgcattctgcttcagagcaagaatgctggggcagtgattggaaaaggaggcaagaatattaaggctctccgtacagactacaatgccagtgtttcagtcccagacagcagtggccccgagcgcatattgagtatcagtgctgatattgaaacgattggagaaattctgaagaaaatcatccctaccttggaagagggcctgcagttgccatcacccactgcaaccagccagctcccgctcgaatctgatgctgtggaatgcttaaattaccaacactataaaggaagcgactttgactgtgagttgagactgttgattcatcagagtctggcaggaggaattattggagtcaaaggtgctaaaatcaaagaacttcgagagaacactcagacaacaatcaagctttttcaggaatgttgt

SEQ ID NO: 2885 - DNA, 413 bp, Bos taurus
  unsure (379): unsure at all n locations; Clone ID: 13-LIB3057-010-Q1-K1-D9
ctacagtactattacccctggtgattgtcttcgggctttgcctggcatccttcgcctctgtcgtcttagcatgtcgctaccagcggtggaagcccaagctctactccatcatttgcgggcagtcgactctggtaaaagagggggagccagaactcctggtcccggccccaggcttcaaccccaccaccaccatctgcttcagctccaccccaagttccagtcctgtctccattcccccttacatctcctgtgaccggtccaacttcggagccgtcgcatctcccttcagcgagacggccccgccccatctaaaggctggccccatccttccggggccttcggccttcacccacctctgtaccccggggccttcggcctncacccacctctgtaccccggggccttcgggcttc

SEQ ID NO: 2886 - DNA, 228 bp, Bos taurus
  Clone ID: 13-LIB3057-011-Q1-K1-D1
caacagtgacagtcccccgggtgaggcgccggccagtcatggcggaaccttggtctgggcagtccttgcaggctctaccggccacggtgctgggcgcgctgggcgccctgggcagcgagttccttcgggagtgggaggcgcaagacatgcgcgtgactctgttcaagctgctggtgcttaggatggtgttaagtctgctgagcattcaactggcgtggtagtgctacg

SEQ ID NO: 2887 - DNA, 216 bp, Bos taurus
  Clone ID: 13-LIB3057-012-Q1-K1-D1
tcggcgacgcaagatggcagccaccacgggctcggacaatttatgaaaaccgaatttacaggcttaaaatagaatgtggacctaaatacccagaagcaccccccctttgtaagatttgtaacaaaaattaatatgaatggagttaatagttctaatggagtggtggacccaaaagccatatcagtgctagcaaaatggccgaattcatatagcatc

SEQ ID NO: 2888 - DNA, 302 bp, Bos taurus
  Clone ID: 13-LIB3057-018-Q1-K1-D1
atcacaagcaaacccatcgtctttgtgggcactggccagacctactgtgacctacgcagtgtaaagtccaaggctgtggtggctgccctcatgaaggcttaatgtggctcttgcctgataccaaatcaccgctttccccaaagtttttatccctgtatcaagaatgtgctttagagtttttgagcagcttgtcttcagtgtagttttatggcagagtgaggttttctccagggcctgctgtcctttttattttcactctctgttattttagcctttatctgctttgagggcctaatcatgtt

SEQ ID NO: 2889 - DNA, 340 bp, Bos taurus
  unsure (294): unsure at all n locations; Clone ID: 13-LIB3057-019-Q1-K1-D1
gtttcttgaaatcatcaccaccatggacagcaaaggttcgtcgcagaaagggtcccgcctgctcctgctgctggtggtgtcaaatctactcttgtgccagggtgtggtctccacccccgtctgtcccaatgggcctggcaactgccaggtatcccttcgagacctgtttgaccgggcagtcatggtgtcccactacatccatgacctctcctcggaaatgttcaacgaatttgataaacggtatgcccagggcaaagggttcattaccatggccctcaacagctgccatacctnctcccttcctacccctgaagataaagaacaagcccaacagacccac

SEQ ID NO: 2890 - DNA, 443 bp, Bos taurus
  Clone ID: 13-LIB3057-021-Q1-K1-D1
ctcccactagcatctacaagtaaatgtacattacaggattgccttaggttattttccaaagaagaaaaactcacagataacaacaggttttattgcagtcattgcagagctcgtcgggattccctaaaaaagatagaaatctggaagctgccacctgtgcttttagtgcatctgaaacgtttttcctatgatggcaggtggaaacaaaaattacagacatctgtggactttccattagaaaatcttgacttgtcgcagtatgttattggcccaaagaacaatctgaagaaatacaacttgttttctgtttcaaatcactacggtgggctggacggtggccactacactgcctattgtaaaaatgcagcaagacagcggtggtttaaatttgacgatcatgaggtttctgatatttccatttcttcggtgaaatcttcagcagc

SEQ ID NO: 2891 - DNA, 400 bp, Bos taurus
  Clone ID: 13-LIB3057-021-Q1-K1-D9
cggacgcgtgggcggccgcccttttttttttttttttttttttatacaaaaggatttattaaaaaaccagtaagacactactacatcatgacactgtcacactgggcttttaacacaagacttgctctacaatactggggggaggggcataaaacacaaattgattctgaagcatagcaattaagaaataaaacaatgaaagcaaatttcttttaatgagaactcagaattaaacttcagagggacccaacgtcatacttccattcggggacttgatacaaaaaatttagtttgaactgatattagcaggtggcaggagccaccttcaaatgaatcttcaatttggaaaatactgcttcaccacctgttggggaagttgcaaatgaataatttagtatgg

SEQ ID NO: 2892 - DNA, 256 bp, Bos taurus
  Clone ID: 13-LIB3057-024-Q1-K1-D1
tccgttcagaaattatgatttctgcctttttaaaaagtaggtgggattatgtcaatctgcgtgaatgagctgcagttttacaagactgcaaggacaatggtagacattttataaagatgttttttcacagattaattaattactgggacaaaagtaatttggaaacccagttccttgggtgggataggaatgaaagcctaaacctctttctttatctttgatactattttttgcacattgtcatatttatgttctt

SEQ ID NO: 2893 - DNA, 376 bp, Bos taurus
  unsure (129)...(130),(169)...(170),(263): unsure at all n locations; Clone ID: 13-LIB3057-025-Q1-K1-D1
ggaattcccgggtgcgacgcctacgcgtggcggtgagcttacgtgtttattctgtcttcctctctttgaccaaaccactctagtagttcaattttggtcagagttttcttttttgttttccattcaagnnggaagaataaccttcactttgaattttaatttttttgtnngaaagaacctctttattaaaaccacaaacctaatcttaactatgcacattaattgtgtaccagatcatctttgaaaatatttcctcctagtanaggaattctttgtttaataactctaagtatggtcaagaatataatatttccataataacttaattcttttcagttatttgggctctgattataagttttttgggataaattta

SEQ ID NO: 2894 - DNA, 429 bp, Bos taurus
  Clone ID: 13-LIB3058-002-Q1-K1-D1
cggacgcgtgggcggacgcgtgggcggacgcgtgggtggaaatcagaatcaaacgagcttttacccttttgttccacacgagatttctgttctcgttgagctcatcttaggacacctgcgttatcttttaacagatgtgccgccccagccaaactccccacctgacaatgtcttccgcccggatcggcccggcgaggccgggccttggagccaaaaggaggggcggtgccccgcttccgacccacggaataagtaaaataacgttaaaagtagtggtatttcacttgcgcccggaggctcccacttatcctacacctctcaagtcatttcacaaagtcggactagagtcaagctcaacagggtcttctttccccgctgattccgccaagcccgttcccttggctgtggtttcggttgatagtagacagg

SEQ ID NO: 2895 - DNA, 433 bp, Bos taurus
  Clone ID: 13-LIB3058-005-Q1-K1-D1
ggctgccgcggcaggacgcgctggtgctgcagggggtgaggatcggccccgaggccgacccggcgcccccgctgggcggccgcttgctgctgatggacatcgtggatgctgagcaggacgcgcccgtagaaggctggattgcagtggcatacgtgggcaaagagcaggaggcccagattcaccaggagagtcagggcgccggcccacaggcctatcccaaggctctggttcagcagatgcggagggcgctctttctgggagcctcagccctgctgctcctcgtcctaaaccacaatgtggtccgagagctggacatttcccagcttctgctcaggccagtgatcgtcctggattattgctccaacgtcaccaagctgttggaggcgctgctgcagtgagttggggcgtggggctccaaggacggggcttgggc

SEQ ID NO: 2896 - DNA, 397 bp, Bos taurus
  unsure (305): unsure at all n locations; Clone ID: 13-LIB3058-006-Q1-K1-D9
ctcaaacaaaccatgtatgcaccaggacccagggatcccacagagactgagccagaactgtgtttgagtgtctcctatggaggcagtggcaggggctctgggtgaaatagacctgggtatggcataagccctctgagtgtctctggtgggtatggggtttgattctaaatgtgattttgcccttcctaccatcttgctggggtttctcctttgcccttcaatgtgggtatcttcttctggtgggatccaacattctcctggtgacagttgttcaacaacgagttgtaattttggatcacacattngaagaacccacctatgttaacctaaaataagaaaggaaggaatcgaaccccctactattgggttcaagccaacatcataacctctatgtctc

SEQ ID NO: 2897 - DNA, 314 bp, Bos taurus
  Clone ID: 13-LIB3058-007-Q1-K1-D9
gggaagcttgcactgacgcgagactgtctgaagggccgggaaaggcacatatggctggtctcaaccaaagaaaccagactccggctaagaaagaggagtcagtgtccagatatgatacacagtctgccatgggccttgagaagtcgcacagccgggaaaggagcagccaggagagtggagaggagaccaagagccaggaaaactggccccaagagctgcaacgccattccgagggccaggaaacacccggagaaagtgaagaggatgccagccccgaggtggacaaactgcgctcgagccaagacaccaccacg

SEQ ID NO: 2898 - DNA, 450 bp, Bos taurus
  unsure (365): unsure at all n locations; Clone ID: 13-LIB3058-009-Q1-K1-D1
caagccttccgttggggtcaaaccggaaacggtttggttcccaaacccaacctgctgattccttaccatccaggtcctagtttgggaaaaatcactattctgtcttcattcttcgcctgtgggtaggtgagagtgcggccatcagtggttggctgacaggcctggtagtgggaagggtgtcctgggttgttagagggtctccaggctcttctggttgtccttccctcccttttccaccatgagatctatgccacacaggccagtgtctgcagaaccttgctttctaggtttggtttctgagctcctgtctgtacttttgcctcctccaaggttttttcccctaaaaatccccattctcatgcctncccactgtgggtctccttgcctttctcttgcaagttggacagtcctctgcctcttggccagaccccatccatttggactgcctaa

SEQ ID NO: 2899 - DNA, 280 bp, Bos taurus
  Clone ID: 13-LIB3058-009-Q1-K1-D9
cggacgcgtggggtaaaaagccccatctcctccgggcagttcagttctcggggtgagtttgtctgagtctgagcatgcacccataaacagcttacgaagaaatagcttaagaaggagtgaaagatgactcttgtaagatattgcgaaatcttcaatttgagctaacatggacatatattaataatcttccaagatctatcatattgcactaatctattaaaataactgtattggatatgctaatttaaaactaactgatgcacaatggacttgcatagag

SEQ ID NO: 2900 - DNA, 363 bp, Bos taurus
  Clone ID: 13-LIB3058-010-Q1-K1-D9
gctgccggatgatggcggacgctgttgaatacttcagagcgctcttcggggccgtagtccatgccgtgctggaagcctggcccgtcttgcagatcaccagcgaagaacggtttctgaggtgtcgtatatccaagagaaggctgactggctcgctgcgtgcacgaaggagtatttcttacgcaatgctgacttcgagctagctgaggtggaagacttcctctgatagctaatgatgaacgagtttgatacagtttgcgaagatgggagcctgccccagatgagccaggagcttccgacgatgttcgaccactcccataagggtaatatgactagcactgatagaaatggcctctataatcaccc

SEQ ID NO: 2901 - DNA, 399 bp, Bos taurus
  Clone ID: 13-LIB3058-011-Q1-K1-D1
cggacgcgtgggcggacgcgtggggcggagggtgcgggaggctgcggctgccggggccggggtccgggccgggaggctgaggctggcacggcgggcactgggggccctgcccccaaggcgatgatgggcaaggaggaggagatagcgcggatcgcccggaggctggacaagatggtgaccaagaagagcgcggagggagccatggacctgctgcgggagctgaaggccatgcctgtcacactgcatctgctgcagtccacccgtgttggcatgtccgtcaatgccctgcggaagcagagctcggacgaggaggtcgtcacactagccaagtccctcatcaagtcctggaagaagctcctggatgcttcagacgccaaagccagggagcggatgaagggc

SEQ ID NO: 2902 - DNA, 378 bp, Bos taurus
  unsure (1),(351): unsure at all n locations; Clone ID: 13-LIB3058-012-Q1-K1-D1
ncttcgcgcaggcgggcggctccggagagctagtgctgcgaaggcggcgacggcggcgacccctcctcatcatgagtagaggcttctcccgaaagagccagacgttcctgcccaaggtcttcttccgcaaaatgtcatcctcaggggccaaggacaagccggagctgcagtttcccttcctgcaggatgaggagacgggggccacgctgcaggagtgcaagacgctcttcatcctgcgaggcctgcctgggagcggcaagtccacgctggcccggttcatcgtggacaagtaccgggatggcaccaagatggtgtctgccgacagctacaagatcacccctggcgcccggngatccttctctgaggagtacaagcagc

SEQ ID NO: 2903 - DNA, 439 bp, Bos taurus
  Clone ID: 13-LIB3058-013-Q1-K1-D1
attttgttaagaaagataatgtcagaagttggtaaaccgttttgtcaaccacctgtcagtgactgaagagggatttgattttctgaatgtccatttgttgcagtctacgtcctttaatgacactcttgtaacaagtataaagacttactctgcacgtgataaattctattgagtgcctcaagccaaaaagaaagtgaagtttactgtatatgaaggatgttaagatgtactgctgtatataactgtaccgtaggatttcagttttaactttgcatctcttaacagctttctcatctgtcaacagctttagttttcttagaatcttaaaattctggatcaactttctttatttttttattgtctacaaacctttaaatgacaatattgtttttagaatactaaagcctgtcagtggcttcttcatttaccttttgaggat

SEQ ID NO: 2904 - DNA, 351 bp, Bos taurus
  Clone ID: 13-LIB3058-015-Q1-K1-D9
cctgcgcgagcccagtgtccggccggcaggggccttcgggttccccgacaccggaggacattggcggcagccccgggcctagctgccgagcacagccatgtctggtaatggcaacgcggccgcaatagcggaagaagacaccccaaagatgagagtgattcgagtgggtacccgcaagagccagctggctcgcatacagacggacagtgtggtggcaacgctgaaagctttatacccaggcctgcagtttgaaataattgctatgtccaccacgggggacaagattcttgataccgcgctctctaagattggagagaagaagcctgttaccaaagagctggagcatgcttt

SEQ ID NO: 2905 - DNA, 266 bp, Bos taurus
  Clone ID: 13-LIB3058-017-Q1-K1-D1
ccgacgcatggcaaacaaacagaaattgcaaatctaggcatgaaaaacactgcaaaaacaatctgggaacaggataaacacgtacacagccagaaaaaacaaccagaacaaactacagactagctccaagcaaataaaatgggccccacgacacggggaatccaacgtaactgccccgtacttccaaattaacagggacacacagtttaaccgaaaacacactgaagtcccgacatttagagaaagccatgactggtaaaaccctg

SEQ ID NO: 2906 - DNA, 464 bp, Bos taurus
  Clone ID: 13-LIB3058-019-Q1-K1-D1
tctagatcgcgagcggccgccctttttttttttttttttgagacaagtgctaaatccagtatgaatgtagatgaggctttcagttccctggcacgggacatcttactcaagtcaggaggccggagattgaaaaacaacaacaagccccccagcactgacctgaaaacttgtgacaagaagaataccaacaagtgctccttggcctgacgactcctttctgcctctccaccctacgcctggagactggatctgaggaaggcagggctgaggggctggtaggggagaaatagcaaatggggcttggaggggtagagatgggtagatggtagaagaatggggagaatatggagaagaaaaaaaaggaaggagagagaaagaaagaggaaatgaaaggaagcaggatagagcgggaaggagaggcaagaaaaaggaaaagaattgggaaggtggaagaagtgaaaagg

SEQ ID NO: 2907 - DNA, 432 bp, Bos taurus
  unsure (423): unsure at all n locations; Clone ID: 13-LIB3058-019-Q1-K1-D9
ggggtcctctatcccactcttttctaaccccagctgacatctcccgtgcttcccccataacctactgattcccaccttttgatttcagcatctcttccaccagacccccacgaagtccccacactggcgtcacaaccccccttaggatgaaaatgaggaatagtcaacgtaacgcccaaacgtggctctttaatccccttctaattctgaatatttcgcgtgggtttactataatgtctattaatacatagcctcaatgatgagaggataagaaaaaaaaaagaaaatttcagaaacaaaatctccaaattgctcgacacacacactgcgtcattgagctggttgtgactgagtgacctccattcgtggccacacccaacagtgagagctgtgaccacgggtctcaaggaaagtatgcactgntcttgagta

SEQ ID NO: 2908 - DNA, 316 bp, Bos taurus
  Clone ID: 13-LIB3058-020-Q1-K1-D1
gatcgcgagcggccgccctttttttttttttttttttttttttttttttttttttttttttttttttttttttttttttttttttttttggctttctattcacagaacggtttattgacctaccttacctggctggccaaaaggcccttgggccaggggaagtttcaatctagttgcaattcggctgggccaaagcctttgccctgcaaaaagggccccaaaggccggaaaaaaccctggccagtgcagcccttagcacaagaaagccccagcagaggtccagacttaactccacttgatgttcttggcctcctgg

SEQ ID NO: 2909 - DNA, 158 bp, Bos taurus
  Clone ID: 13-LIB3058-021-Q1-K1-D1
tcgacccacgcgtcgaaattatggttttcacagtagtcatgtatggatgaatattggactataagatagctgagcacagagaatgatgctttcgaactgggtggtgagaaactcttgagagtcctgcatagttggagagtaaccagccatcctacgga

SEQ ID NO: 2910 - DNA, 290 bp, Bos taurus
  Clone ID: 13-LIB3058-021-Q1-K1-D9
cggacgcgtgggcgcgagcggccgccctttttttttttttttttttttttttttttttttggttgagtgtttgttagccatttgtatgtattttttggggaaatgtatgtttaggttttttgcccactttttgattgggctgtttggttttctgattttgagttgtatgaactgcttgtatattttggaaattaattctttgtcagttgtttaatttgctattattttctcccattctaagggttgtctttttaccttgtttgtagtgaattagaataaaaacaaaaatt

SEQ ID NO: 2911 - DNA, 337 bp, Bos taurus
  Clone ID: 13-LIB3058-022-Q1-K1-D1
cggacgcgtgggatcaagggcaaggcccggctggggcgcctggtgcacaggaagacgtgcaccagcgtagccttcacacaagtcaactcggaggacaagagtgccctggctaagctggtggaagccatcaggaccaattacaacgacagatacgatgagatccgtcgtcactggggaggcaacgtcctggggccgaagtcggtggcgcgcatcgccaagctggaaaaggcgaaagccaaagagctggccaccaagctgggctgagcgcactaaggaagtttctgtacataaaagtaataaagattctccttcaaaaaaaaatgatgtgatttgattt

SEQ ID NO: 2912 - DNA, 340 bp, Bos taurus
  Clone ID: 13-LIB3058-023-Q1-K1-D9
tggacgcgctgactcgagcgatcggcatctccttcgtggggacgcggtcctacatgtgggcggagcggctacgaggcacacactactcggtgcagtcagacatctggagcatgggcctgtccctggtggaactgtgcatcggcaggtaccccatccccccgtcggacgccaaggagctggaggccatattcggccggcccatggttgatggcgcagaaggagaacctcctagcatctctccacggccgaggccccctggacaccccatcaacggtcacgggatggacagccggcctgccatggcgatctttgagctgctggactacattgtgaacgagcc

SEQ ID NO: 2913 - DNA, 432 bp, Bos taurus
  Clone ID: 13-LIB3058-024-Q1-K1-D1
gtccaagacctgagagctgtgacgcgccgagggctttaatgtccgttgctccaaatctttgttgtgacgagacaaagaaccgtggaacatacactcgcgtgacacttatatgaccactggaaaaaccacagccttgactagacgaacctttgttggcaaagtaatggctctgcttttgaatatgctatctaggttggtcataactttccttccaaggagtaagcatcttttaatttcatggctgcaattaccatctgcagtgattttggagcccaaaaaaataaagtctgacattgtttccactgtttccccatctatttcccatgaagtgatgggaccagatgccatgatctttgttttctgaatgttgagttttaagccaacttttttactctcctctttcactttcatcaagaggcttttgagttcttc

SEQ ID NO: 2914 - DNA, 308 bp, Bos taurus
  Clone ID: 13-LIB3058-027-Q1-K1-D1
cgcggtttctggaggcgaagaacgcggttggccaatcgcaagccagaagatgaagttgtgggggttgccgtggtggtggcgcttctggcaggatgccaggcggatatggagggagagctggggcccgaggagcccctgactacgcagcagccccgggggaaggacagccagccttgggagcatgcgctgggccgcttctgggattacctgcgctgggtgcagaccctgtctgaccaggtgcaggaagagcttgttaacacccaggtcattcatgaactgactgcgctgattgaggagaccatgaatga

SEQ ID NO: 2915 - DNA, 423 bp, Bos taurus
  Clone ID: 13-LIB3058-027-Q1-K1-D9
gatgaagaaataagcaggtaaaaaatatgccgtccctacaaacaaaaccgaaccctctgcccgaagtgctcgcaggcccgaccgccttggtccctttgctgacccctcctccctctaccgactgccccagctctgcacgcccggccggcactgtcgccgctgcgttctcgtgtttggtgatgccctcttcttcttgtttgaaacaaaagaatgcattgttctttgattttcatttctttaagagtcccttctacgtgtatcctggaggagacgtttgggacgacggccatgctgccatcaggttcctggaaccgtttatggtgaatggacacctacttcccattagtcaggattttatgaccttgtacatagcccagcgtgacatgtgcacatttgctcgcatatgggaaggtagacgtttgg

SEQ ID NO: 2916 - DNA, 384 bp, Bos taurus
  Clone ID: 13-LIB3058-029-Q1-K1-D1
ccttcttcttacaacattctggataacagcaagatcatcagtgatgattggggcaaggagctcatagcgctgtttcacgattattacccaattgagattgacccacaccggaccatcaaagagaagttacctcacatggtagaatggtggaccaaagcacatgacctcctgtgtcaacagaagattcataagtttcatatagcccacgtggtaagagagtccaatgcaatgctcatggatggatacaagacattcttcaacaccctttcgcagaacaacattccccttttcatcttttctgcgggcattgtggatgtcctggaagaaatgatccggcatatgaaggtgtttcaaccccaacatccacatcatgtctaacttaca

SEQ ID NO: 2917 - DNA, 377 bp, Bos taurus
  unsure (60),(315): unsure at all n locations; Clone ID: 13-LIB3058-029-Q1-K1-D9
gagcatacgtcccccagctccattagcagaagagggcttgagagcctgctcgtgggtctncgatggcaccctctccgtaggatacacagctattcaggtcacgcagggcccaggataaccacccctacacatgatggcaatgtatggcgctcttcttaattgctgctaattcaatgatcccttccccttttccccaaagcctcagcgaggccagagtgatgcgttacagatgagtgagaggggtccccgcctcccacagaagtaaaaggagccgcgctgcaatggtgcattgggcttctcaggctctaagacctnctgccactttcagaatccacacgtaactgcatgttcccctttccgggagaaaacccactgtc

SEQ ID NO: 2918 - DNA, 251 bp, Bos taurus
  Clone ID: 13-LIB3058-030-Q1-K1-D1
atcgcgagcggccgccctttattttttttttttttttttttttttaaaaaccttattgtctgttgaattcgttttgccaaacaaacacagtgaaaactttagtctgactaattgtacataaaatagaatttgtaaccagtagcaaacatagcaggatagacctaagtccctggcaggctggatttccatcaacaggtcacctagatccctttgtagatggcctcctgtgagggaagtcctaggaagctgag

SEQ ID NO: 2919 - DNA, 413 bp, Bos taurus
  Clone ID: 13-LIB3058-032-Q1-K1-D1
cgacccacgcgtccggtgggttcagtggcggtgcaatatttttttaaacagcagagaacactgaatagtgcagcgcctatatcatgaaaggagaagctgatgccatgatcttttacttattttctttttctatttttattaatattttttttttttcttgttttattattattttattatttattttttttattttttattttattattattttttttattttttttttttattattttttatttttttttttttatttattttttttttttttttttttatttttttttttatttttttttttttatttttttatttttttatttatttttttttttatttattttttattttttttttatttttatttttattttttttttatttatattttttttttttattattttttt

SEQ ID NO: 2920 - DNA, 430 bp, Bos taurus
  Clone ID: 13-LIB3058-034-Q1-K1-D9
tctagatcgcgagcggccgccctttattctattttttctttttttttttttttttattttggttggttttttttattttttgttttttttatttttttttttttttttttttttttttttttttttaaaaacaaaaacaatttttttattgaaaatcgaaaaaaaaacccctgttgctggtaaaagggccaacaaacaaaatttagaataaaaaaaaaaggggacccaagggttgggtaagaaaaaaaacccttggggcccaaatttgaaaaacccccaaaaaaaaaggggaaaaaatttccttaaccaaaaggcatttttgaaaaaaccatgaaaaaaaggcaatttgggggccttaaaaaaaccccttttaataaaaaaaaaaaactctccaagcatttttttacgtggaatcaaatcaaaagaaaaa

SEQ ID NO: 2921 - DNA, 425 bp, Bos taurus
  Clone ID: 13-LIB3058-035-Q1-K1-D9
aaatttttgtgggggggaattctgatttttctctctacttgctgtgctgttacagaaagggaacatcgatcagttaagaaggctggcattgaggttcaggaaatcaaagaatccgaggcagttgttgaaaccaaaatggagaacaagcccgcctcctcagaattgcagaagatacaagagaaacagaagctggtcaaagagccgggctccggagtgccggctgttctcattacaacccttctggttattcctgtggttgtcctgctggccattgccttatttattcggtggaaaaaatcaagggcctttggagattctgaacgtaaacttgaggccagttcgggaagagttctgggaagacttagaggaaagggaggcggaggcctaaacctgggcaacttcttcgccagccggaagggctacag

SEQ ID NO: 2922 - DNA, 435 bp, Bos taurus
  Clone ID: 13-LIB3058-036-Q1-K1-D9
gacccacgcgtccggtggctgtagcgcttcggagagactcctaccgcctttccccggcctggagccggagtgcgagggggcggtggggggctcagaacccgaagccggggacagcgacaccgagggggaggatattttcaccggcgccgcggctgtcagtaagccccagtctccaaagagaattgcttcccttcttcccatcaacagtggctccaaagaaaatgggattcatgaggaacaagatcaagagccacaggatctctttgcagatgccacagtggagctatccctggacagcacacaaaataatcagaagaaggtgccagccaaaacactcatttctcttcctccacaggaggccacaaattcttctaagccccagccaagctatgaggagctagaggaagaagaacaggaagaccaatttgatttgac

SEQ ID NO: 2923 - DNA, 307 bp, Bos taurus
  Clone ID: 13-LIB3058-037-Q1-K1-D1
gaggaaataggcaaactacctgaaaatgaattataataatgatagtaaagataatcgaaaaacttgaaaacaaaatggagtaaatgcaagaatcaattaacaaagacctagaagaattatgaaacaagtcgccagtccaggttcgatgcatgatattggatgcttggggctggtgcactgggatgacccagagggatggtacggggagggaggagggaaggagggttcaggatggggaacacgtgtatacctgtggcagattcatgttgatatatggcaaaaccaataaaatattgtaaaggtgaaa

SEQ ID NO: 2924 - DNA, 351 bp, Bos taurus
  Clone ID: 13-LIB3058-037-Q1-K1-D9
gctttcccatccacaggatagcatggaattggttcataaacagtcaaaggcagtcgctgtgacatctatgtccttccctgttggagatgtcaacaacttcgttgttggaagtgaggaaggttctgtgtacacagcatgtcgccatggcagcaaggctggaatcagtgagatgttcgaaggacatcaagggccaattactggcattcattggcattcaactggtggaacaatggacttcttacatctttttgtcaccttattatttgaccggacaagtaaactttggaccacttagaataaccaggctttggactcatttgaagattattcaaactatgtttatgaaggtat

SEQ ID NO: 2925 - DNA, 403 bp, Bos taurus
  unsure (51): unsure at all n locations; Clone ID: 13-LIB3058-038-Q1-K1-D1
cggattccggtcgacccacgcttcgtctagatcgcgagcggtcgacctttntttttttttttaggattaacatgaattatttcggtatgaatcttacaagttgctgaggttggggcaaagccaggagagtaacttcaggcgtttctatcaagtgacagcctgattagcagggccgttactgagcggagggcagtggagggcaccccaggaaccccagctcctacagcagtgttaaaacccctccttcagaggcactggatagggcgtggcccgtgacagccaggggccactccactggcttttggtgcccactgacccctttcagcagagacacaaaggccttcagaggcaccaaggaagcaagatgggctgggcaagtggaaagactggtactttctcaccg

SEQ ID NO: 2926 - DNA, 366 bp, Bos taurus
  Clone ID: 13-LIB3058-039-Q1-K1-D1
cggacgcgtgggtggactttgtccagttgatcgttttcaacggttacgggtatgcttcaaacgggtctgtgtacttcgacacagtcaagtttgccaacactgaggggcacagctacggaaagctggtgcccgaggccgtcggggaccagaaagccctgcacgagggggaaggcgacctgagcgtctctgcagagcgcctgagtgagaagcggtcccccaatgactttgcgctctggaaggcctccaagcccggggagccgtcctggccctgcccctggggcaaggggcgccccggatggcacatcgagtgctcggccatggcgggcaccctcctgggagcctcgatggacatccacggagggggct

SEQ ID NO: 2927 - DNA, 431 bp, Bos taurus
  unsure (47): unsure at all n locations; Clone ID: 13-LIB3058-040-Q1-K1-D9
tcggcgaagcatagcatcacccgctccgtgactccatggatgtccgntctgtcggaagagagactctcggagcaggagaccgaggccgcagagaaatccgcttagcgagatgggcaagttccttaatggtgtcgcttgaaggtaacaaggggactttgagggacatttcatcaaatataattactgataatttatagaggttactcatgtatggtgcaaccgcttctgtttgctaattgctgctttgcaaatacaacttgctgcggaccattcacgggcgtaaagtcaagtgcgtatcagcactgcttagggagctctgccaccactttccatgttagggaatcttaatttagtgactttcctgggatttattggatgctgtcaaaaaaaaaaaatttacactggatatgcaaggggtttgaacttcagat

SEQ ID NO: 2928 - DNA, 426 bp, Bos taurus
  Clone ID: 13-LIB3058-043-Q1-K1-D1
cttgacagtgcagagcagttctgagcagtcacttagcccactctctgttcttgtccctgtcatcccccaacccccagaatctgactcacaatctcaccatcagctgggttcacatcactggtttctatccaatactccatggaatgtaaatactgtatcatacgtagacaaaaataatttttgttttctaaaaatgcattttgagatagtttaatgtaaatctgacaggagcattctgaagccccattaggaaaaattttaaatggttcctctccatcgccttaatgtctaaagatcagaaactgctgagcaacccgcttttgtttccttcccagaaacaatgcaaagcaacaggtggagaaagtgtggtctttgccctgctgtgtgtgcctctgaagctactcctgacataagtctgggaaaaca

SEQ ID NO: 2929 - DNA, 384 bp, Bos taurus
  unsure (77): unsure at all n locations; Clone ID: 13-LIB3058-043-Q1-K1-D9
tcgcggacgcgtgggcaaaaaacttttccctttatgtagtcttcaccaaagagctcccatctggcaagaaatacctncgctacacaccccagccataagctcgccatggagatggttctggaagctgccacttagcaccatgagccagaggatgccagctgtccatcatgtttccccacagcagtccattaaaaacattctggtgtgatcacagccaaggtctttaggttgctctactactggcttattaaatgaaaacagcactaaaaatttcttgggatcctttgtgccttcagcagctttcttctctggtcgtatatcttcacactctcttgtgactttcttcgaaatatgggacttacttggatctcttgcaggtttatg

SEQ ID NO: 2930 - DNA, 306 bp, Bos taurus
  Clone ID: 13-LIB3058-044-Q1-K1-D1
tctagatcgcgagcggccgcccttcattttttctttttctgatagctattgcttttatggtctttagggtttttacccctgctaatagtgattagagcttcttcctaaagagccaaacattactgtccatgaaaagttttcgcaaactgtcaaactcatggacccagtgcttaacaaagctgcagttgccctttctgcgggatgaggagacggaggccacgctgcataaatacaaaacgctcttgatactgcgaggcctgccttggagcggcaagtccacgctgacccggttcaatcggggacatg

SEQ ID NO: 2931 - DNA, 410 bp, Bos taurus
  Clone ID: 13-LIB3058-045-Q1-K1-D1
cgacccacgcgtccggtgggctcagaccctcccacggcctgctgcttctcttacactctgcggaagattcctggcaactttgtgaatgactacttcgagaccagcagcctctgctcccagccagctgtggtgtgagtatcaaacctgggcttttcagggaggcaagggtgagggcaggattaaagaaggggatctatttggggttgggggggcgattaagcagtaaaataaaaaagatgataggagatactggctgtttccttaaagcatgcttagaaaacatgtggaaaagtcattgatggtgacagcatgaaatgaatgggaagattacatccgcattgattgcaaaactcatgggtctcctaatctgtgcaacccgatatgccagagctagaccgcagggtggaagt

SEQ ID NO: 2932 - DNA, 381 bp, Bos taurus
  Clone ID: 13-LIB3058-045-Q1-K1-D9
atgtgattaacgcctggacccaacacattcctaaacaattttacaacagaagcaatggggacactaaacggaacaagaagaaaaccctagcagcagaaagcgaaagcacaaccggacaagacacgaaccactaacaagcgacacagagagtacaacacaaaacaatctaacgaacatactagaaacccaacacacgaatgcatctaacgaaagactaatatacgagaaaggaactcggccaacacaaacctctatccgttaaccaaaagcatgacctgcagcattcccaggataaaacgcattgcctgccaagagacaactagctaacgggcgcaatatccggaccgatcaaaggttacatacgcaaacgatcactaatta

SEQ ID NO: 2933 - DNA, 376 bp, Bos taurus
  unsure (315),(318),(338): unsure at all n locations; Clone ID: 13-LIB3058-048-Q1-K1-D1
agagcttcctggtgaagtgtgtttctggtatatcatcaccaccatggacagcaaaggttcgtcgcagaaagggtcccgcctgctcctgctgctggtggtgtcaaatctactcttgtgccagggtgtggtctccacccccgtctgtcccaatgggcctggcaactgccaggtatcccttcgagacctgtttgaccgggcagtcatggtgtcccactacatccatgacctctcctcggaaatgttcaacgaatttgataaacggtatgcccagggcaaagggttcattaccatggccctcaacagctgccatacctnctnccttcctacccctgaagatnaagaacaagcccaacagacccaccatgaagtccttatg

SEQ ID NO: 2934 - DNA, 319 bp, Bos taurus
  unsure (261): unsure at all n locations; Clone ID: 13-LIB3058-049-Q1-K1-D1
tatgaccgagaggagtgatcattaactgggtcgtccggttccaacgtcagaagaataagcaatcaggctcccccatcactgtgtcagtctagaactgggagacttgatttaggaatggttatgggtgtgggatgtaaatacaggtgaaatgctgaacacattgattcaccattgtgaagcagttctgcacttgcgtttcaataatggcatgatggtgacctgctccaaagaccgttccattgcagtatgggatatggcctncccaactgacatcacccttcgcagggtgcttgtcggacaccgagctgcagtcaatgtt

SEQ ID NO: 2935 - DNA, 264 bp, Bos taurus
  unsure (9),(19),(51),(80),(98): unsure at all n locations; Clone ID: 13-LIB3058-050-Q1-K1-D1
cccacgcgnccgaccagancaggagccaccacgcagaacaaagccaggagnaccagaactcgcggagggaacatagatanagggtggccatacgcagncctgtcagtccgagctgaattggtgtggcagcaaatgactgaaggctacaggttttaccatggacaccagatcaggtgccaccacgcagaacaaagccagttcccgtgagctgcctatgataagcattgctgaagtaacgttatacccagggtgtgccatcacagt

SEQ ID NO: 2936 - DNA, 378 bp, Bos taurus
  Clone ID: 13-LIB3058-051-Q1-K1-D1
acgctcccccccaacctcagtgaggagagccccgagccggccccggggcaaagaggggtgtggacagggttcccccagatcagtacccccctgggctagtagtatgatcaggaaagggttaatgagagccaagagggatacctggtgccatggctggagacctggtgggggcagacggaccaggggctgccccccccagttcttaccttcacttcccacaagtcccactgggatctagcaccccagggaattggagccttcatcccctagggggttgcatgagaagggagagggtgctgatcgggatgaaagagtccagctttgaaccagggggactgacctgggggtgggggttggcatggctgacacttgaaaatg

SEQ ID NO: 2937 - DNA, 381 bp, Bos taurus
  Clone ID: 13-LIB3058-053-Q1-K1-D1
ttggtctttatgagaagctttcagagaaacactcccagaatggctttattgccctctccacctgaaagagcctaataggaatgacaaactaaaagttggaaaggaagattcttcttctgcagaatttcttgaaaaacggagggctgctctagaaaggtaccttcagaggattgtgaatcatcctaccatgttacaggaccctgatgtcagagagttcttggaaaaagaagagctgccacgtgctgtgggtacccagacattgagtggcgctggtcttctcaagatgttcaacaaagctacagatgcggtcagcaaaatgaccatcaagatgaatgaatctgacatttggtttgaggagaagctccaggaggtagagtgtga

SEQ ID NO: 2938 - DNA, 423 bp, Bos taurus
  Clone ID: 13-LIB3058-056-Q1-K1-D1
ctgaaatgatttctagaatattttatctggctccaaggtaaagcacgtggcaatttgtttttttcccagaacacagaacacagaagtcgctcagttgtgtctgactctttgcgaccccatggattgtagcctaccaggctcctcagtccatgggattttccaggcatgaatactggagtgggttgccatttccttctccagaaagtttctgccaaaactgtggcctagccagcttttggtttggtttctgccaattgcattatgtccctaaacctcatttggctccttggggtcttgagtttgaccttcctcctctggtgactgactgtactgtggtagacacaagttgtttctgccctgtttaagtagagttgaaacattcaagggaaaaagattcctagcatggtgattagggggaaagaa

SEQ ID NO: 2939 - DNA, 350 bp, Bos taurus
  Clone ID: 13-LIB3058-057-Q1-K1-D9
cggacgcgtgggtagatcgcgagcgttctttctttttatttttttatttatatttattaatttggggatttttttttaatgtgtataatgttattaatatatttttgttatataattatttttatgtatattatatttttttatttatttttatttttataattatatattttattattttttttttttttattattattttttatttagctcatttgttaagacttagtttatgtcacaaattctatgtatttccataataaactattacatctataaaattacaattttttgataatttattgtttttttttatttatttttttattcttttttattattatatttat

SEQ ID NO: 2940 - DNA, 354 bp, Bos taurus
  Clone ID: 13-LIB34-001-Q1-E1-D1
gtgaaaaaaccaaatggcggatgacgccggtgctgcgggagggcccggaggccccgggggccccggaatgggaggccgcggtggcttccgcggaggcttcggtagtggcgtccggggccggggtcgcggccggggtcggggccggggcagaggccgcggagctcgcggaggcaaggccgaggacaaggagtggctccccgttaccaagctgggccgcctggtcaaggacatgaagatcaagtctcttgaggagatctaccttttctctctgcctatcaaggagtctgagattattgactttttcctgggagcatccctgaaagatgaggttttgaagaatatgcccgtgcaaaa

SEQ ID NO: 2941 - DNA, 413 bp, Bos taurus
  Clone ID: 13-LIB34-002-Q1-E1-D1
agcgagcgccatggccgccttacgtgccctgctgccccgcgtccgcgccccgctgcggccctggctcttctgcccggtgcagcgctccttcgcctcgagcgcagcctttgagtacatcatcacagcaaagaagggaaggaacagcaacgtggggttgatccagctgaaccgccccaaggccctcaatgcgctctgcaacggcctgatcgtggagctcaaccaggcactgcaggccttcgaggaagacccagccgtgggggccattgtcctcacaggcggggagaaggtatttgcagctggagccgacatcaaggaaatgcagagcctcacgttccagaactgttactctggcgggtttttgagccactgggaccagctcacacgtgtcaagaaaccagtcatagctgctgtca

SEQ ID NO: 2942 - DNA, 423 bp, Bos taurus
  Clone ID: 13-LIB34-002-Q1-E1-D9
cgggccgacccacgcgtcaaaacagagccttcctgccaagactcctttatgtacgacactcctgcagaggtggccgaagctttcctgtcttccctgacagagaccatagaaggagttgatgccgaggatggacatagcccaggggaacaacagaagagaaagattgtcctggacccctcaggctccatgaacatctacctggtattggatggatcagacagcgtgggggcccacaacttcacaggggccaagaattgtctcagagatttcatcgagaaggtggcaagctatggggtgaagccaaaatatggtctagtgacatatgccacagaacccaaagttttgatcagagtgtccgacccaaagagcagcgatgcagactgggtcacagaccagctcaaccaaatcaactacgcagatcac

SEQ ID NO: 2943 - DNA, 389 bp, Bos taurus
  unsure (364): unsure at all n locations; Clone ID: 13-LIB34-003-Q1-E1-D1
ctactactcaggaaaaaaagaactattcccatatatccgaatggtttgggctataatgtcaatcggatttctaggtttcatcgtatgagcccaccatatattcactgtcggaatagacgtcgacacacgagcctacttcacatcagccactataattattgctattccaaccggggtaaaagtcttcagctgattggcaacacttcatggaggtaatatcaaatggtctcctgctataatgtgagccctaggctttattttcttatttacagtagggggtttaactggaattgtcttagccaactcttccctcgatattgttcttcacgacacatactacgttgtcgcacatttccactatgtnttatcaataggagctgtatttgcta

SEQ ID NO: 2944 - DNA, 176 bp, Bos taurus
  Clone ID: 13-LIB34-003-Q1-E1-D9
ctttatctgaaaagaaaaagataatatttttcctatgggacaatggacttgcaaagcctcacttcactttaaaagtaaaaagaacccatgttgagaactccactaacagttttatgccggtgataatttatctacataccatttcaataaatattttgtttcctaagactaagaag

SEQ ID NO: 2945 - DNA, 355 bp, Bos taurus
  Clone ID: 13-LIB34-004-Q1-E1-D1
cgcgagcggccgccctttttttttttttttttttttttttttttttttttttttttttttaacaccaagaaaacgttttaattaaactgcagaaacaaatggctgtccagtttattaaaatgcctgacaactgcacttccagtcacccgggccttgcatataaataatggagcatacagtgagcacatctaacgatgataaatacacctttttttttttcttcctcttcccccccaaaatggtaaatctgatcatcttcatgtacgaacttaaaatatggaaaatgttaaggaagcaaacaaatggtttgtaattttgtaagtacttataacatggtgtatccttttgcccatga

SEQ ID NO: 2946 - DNA, 412 bp, Bos taurus
  Clone ID: 13-LIB34-005-Q1-E1-D1
ctttggtcgcttcacagtctccgctccggaatcgggtgtttgtggtgggggttgggatgaccaagttcacaaagcctggagtcgagaacagagactaccctgacttggcaaaggaagcaggtcaaggtggaaaactggttgaaagaggagataatacttatggaggaaagtgggtcataaatcctagtggcggattaatttcaaaggggcacccacttggagctacaggtctggctcagtgcgttgaactctgctggcatctgagaggggaagccggaaaaaggcaagttcctggtgcaaaggttgctctgcagcataatataggcgtcggaggagctgtcgttgttacgctgtacaagatgggctttcctgaagctgccagaactcatcaaatttaggctgctccaaccaa

SEQ ID NO: 2947 - DNA, 418 bp, Bos taurus
  Clone ID: 13-LIB34-006-Q1-E1-D1
cgaaggatgatttcttgcaacttcgaaaaatttaaaaccatgaaacatctattactgctacttttctgtgcttttatagttcaggcccaatttcctactgactatgacgagggacaagatgacagacctaaggtaggtttgggtgcccgcggtcatcggccctatgacaagaagaaggaagaggcccccagcctgagacctgtgccccctcccatcagcggaggtggctatcgggctcgtcccgccacagcaactgtgggccagaagaaagtggagagaaagccccctgacgctgatggctgcctgcacgcggacccggatctgggtgtgttgtgtcctacaggatgtaagttgcaagatactttggtaagacaggagagaccaatccgaaagagtatagaagatttacgtaatactg

SEQ ID NO: 2948 - DNA, 414 bp, Bos taurus
  Clone ID: 13-LIB34-006-Q1-E1-D9
aagaagaccaacctcaggatcaggcggctgctggacagcctgcctgaggacacccgcctcatcctcctcaacgctgtcgccctgagcgccaagtggaagatagcctttgataaaggcagaacaagcacaaagccctttcacctcaaatcctctgccatcaaagtgcccatgatgaacagcaagaagtaccctgtggcctctttcacagaccggactctgaacgcccgggtgggccgcctgcagctgtctcacaacctcagctttgtgatcctggtgccccagaccgtgaaacaccatctccaagacctggagcaggctctcagcaccgccgtcttcaaagctgtcataaagaagctggagatgaccaagttccatcccactcacctgacgatgcctcgcatcaaagtgcagagc

SEQ ID NO: 2949 - DNA, 384 bp, Bos taurus
  Clone ID: 13-LIB34-007-Q1-E1-D1
gacccctacttacgatgctcatgatggaagccccttgtcaccaacttctgcttggtttggtgacagtgctttgtcagaaggcaaccctggtatacttgctgtcagtcagccgataacatcaccagaaatcttggcgaaaatgttcaaacctcaagcccttcttgacaaagcaaaaatcaaccaagggtggcttgattcctcaagatctctcatggaacaagatgtgaaggaaaatgaggccttgctgctccgattcaagtattacagcttttttgatttgaatccaaagtatgatgcaatcagaatcaatcagctttatgagcaggccaagtgggctattctcttggaagaaattgaatgcaccgaagaagaaatgatgatgtt

SEQ ID NO: 2950 - DNA, 400 bp, Bos taurus
  Clone ID: 13-LIB34-008-Q1-E1-D1
agctgatgcggaagtgtcaaatagcagctcttgtggcaaagagaatgcttctgactccagtctcgtgatcacttttggaagaggccacacgctgaccctcattttcaccagaaatgcaacacgttacgaggtccagctgatgcgctttgcttataacttgtcagacacagacactttccccaattcgagctccacaggagtcaagactgtggagtcggcaaccgacatcaaggccgacatcaataagacgtaccggtgtgtgagcgagactcacgtcaacatggacaatgtgacggtcacgctccgagacgcggccatcgaggcctacctgtccatcagcagcttcagcagagaggagacgcgctgtgaataggacgtgcccagctccggaccaggccag

SEQ ID NO: 2951 - DNA, 336 bp, Bos taurus
  Clone ID: 13-LIB34-008-Q1-E1-D9
cttcaacatgcctggcaaatgttgcgacacgatacaattgccgcatccaacattagagacttggtgtttattgcccaactacctgtgaaactgcataattcccgaatacttaggagtccaatgtacagcacgatctactaactttggtatgcatcctaaatcaggttaatagcaggccatccaaaggcagatagctggtcagagcaatccaaatcagctagaacccagatcaagacacaaagccaaatatcatagacagtgctaccaagaattccaacagtaggatggaagacatctacatagatgaaacactgatagcagaacatgacatcagca

SEQ ID NO: 2952 - DNA, 405 bp, Bos taurus
  Clone ID: 13-LIB34-009-Q1-E1-D9
gtaagataatgactgattttattaagatagtctctaggtccatctatgatgctgcaaatggtgttacttttttttatggtgagtaatattctctccatacatttttggtaactcatagccaggctgttttcatactgcatcaagccagatgttacttttaacaactaaatgtcaaaagctgtaatagacaaccccaaattggatgttccaagttcgaataagatatacctatgttttatggtgacttataaaagaagtctctaagtcagaaaaacttgccggaatttatttttaagatacactataacaagagttcatcagttctgtgtcccagcctggacactgaccatggtgaaatagatgcctttctgtgccaacagctgctggtgtgtgccgtgctccctg

SEQ ID NO: 2953 - DNA, 365 bp, Bos taurus
  Clone ID: 13-LIB34-010-Q1-E2-D1
ctgagtttgcaaaaacatgtgttgctgatgagtcccatgccggctgtgaaaagtcacttcacactctctttggagatgaattgtgtaaagttgcatcccttcgtgaaacctatggtgacatggctgactgctgtgagaaacaagagcctgaaagaaatgaatgcttcctgagccacaaagatgatagcccagacctccctaaattgaaaccagaccccaatactttgtgtgatgagtttaaggcagatgaaaagaagttttggggaaaatacctatacgaaattgctagaagacatcgctacttttatggcacagaactcctttactatgctaataaatataatggagtttttcaagaatgctgc

SEQ ID NO: 2954 - DNA, 367 bp, Bos taurus
  Clone ID: 13-LIB34-011-Q1-E1-D1
accattcccactggatgcagctgtggaatgtcaccgcggagaatgctctcatgagggtgtcttcttcttccaaggcaaccacacgtggttctgggacttctctacaaaaaccataaagaaacgttcctggccagccgttgggaactgctcctcggccatacgatggctcaaccgctactactgcttccggggtaacaaattcctgcgcttcgaccccgtcacgggagaagtgaattccacttatcctcgggatgtccgagattactttatgtcctgccctaacagaggccatgcacataggaatgcaacccagcatatggataagcgctgtagcccacatctagtcctgtctgcattgctttctgac

SEQ ID NO: 2955 - DNA, 402 bp, Bos taurus
  Clone ID: 13-LIB34-011-Q1-E1-D9
gggtccacgcacgcgtccgattttttgacaacatccgtaaaaaagataaaagaaagtcgcctcaaagatactcaaaagccgcgtgtggactttcttcagctgatgattaactcccagaattccaaagaaacagacaatcataaagctctctctgaccaagaactcatggcccagagtattatctttatttttggtggctatgagaccactagcacttctctttccttcattatatatgaattggccactcaccctgatgtccagcagaagctgcaggaggagattgatgcgactttccccaataaggcgcctccgacctatgatgtcctggcacagatggagtatcttgacatggtggtgaatgagactctcagaatgtttcctattgctgttagacttgag

SEQ ID NO: 2956 - DNA, 405 bp, Bos taurus
  Clone ID: 13-LIB34-012-Q1-E1-D1
atccagctcaccatggctcgggcattgagagtgccagttgcactgtggctgttgggcttgtgctggtctttggctaaagcccaccctctggctagagctcctgagcttgggcacggagttgaaggtgggaatgtggccaagccggatccagaagtgacggaacgctgctcggatggctggggctttgatgctaccaccctggatgagcatgggaacatgctgtttttaaaaggggagtttgtgtggaagggtcatgcctgggcccggcagttgatctcagagaggtggaaggatgcccccagtcccgtggatgctgcattccgctatgatcgtaacagtgtccttctgatcaagggggacaaattctgggtatatcctcctgagaagggggaagaatatccaaag

SEQ ID NO: 2957 - DNA, 246 bp, Bos taurus
  Clone ID: 13-LIB34-013-Q1-E1-D1
atgcaggtcgcctacgaacttaccatggccactgatggcacatgggaggtgctcatcggctcctcgcacatcctcaccccgacacgcctcctgtatgatctgaagactctggaccagaagctagagggtgtctccctgccctgaccctcgcctgacctgctgcatccctttccatagaaatagactcccatctgccagctggcataaacatgggaacatgctgtttttaaaaaagagaggctgtct

SEQ ID NO: 2958 - DNA, 395 bp, Bos taurus
  Clone ID: 13-LIB34-013-Q1-E1-D9
gtcgacggacgcgtccgaccagaaaagccaagcctgtgagtgacaccccagacagaggaaccaaagccatgctgagtctcagcggactgctgttgttactgactgcctgcctggcagtaaacgccagctccgtgcccacattgcccgatgacattcagatgcacgagaacttcgacctgtctatgatctatgggaagtggttcaatgtggacgtgggctccaactgcccatagctgaagatgttcaaggacatcatgaccatgagcacagtggtgttgaaaacggggccgacgatcaatgaaatcagcgtcaccaacactcagacgcggaaatgtgtctgtgaatcgatctctggtacttatgaaaagacaagcactgatgggaagtttctctat

SEQ ID NO: 2959 - DNA, 439 bp, Bos taurus
  Clone ID: 13-LIB34-014-Q1-E1-D1
ggtccacgcacgcgtccgaaaaacattggcacaatgaagtgggtgacttttatttctcttctccttctcttcagctctgcttattccaggggtgtgtttcgtcgagatacacacaagagtgagattgctcatcggtttaaagatttgggagaagaacattttaaaggcctggtactgattgccttttctcagtatctccagcagtgtccatttgatgagcatgtaaaattagtgaacgaactaactgagtttgcaaaaacatgtgttgctgatgagtcccatgccggctgtgaaaagtcacttcacactctctttggagatgaattgtgtaaagttgcatcccttcgtgaaacctatggtgacatggctgactgctgtgagaaacaagagcctgaaagaaatgaatgcttcctgagccacaaagatgatagcccagacc

SEQ ID NO: 2960 - DNA, 403 bp, Bos taurus
  Clone ID: 13-LIB34-015-Q1-E1-D1
ctcagacctgtggaagattagcgaccatgatttccaatgggataggaaccgtcaccgctggaaaaaggagtatatgtcttctccctttgctgcttattggcctctggggctgtgtgacctgtcatcggagccctgtggaagacgtctgcacagccaaacctcgggacattcctgtgaatcccatgtgtatttaccgttcctcagagaagaaggcaactgagggccaaggctccgagcagaagatccctggggccaccaaccggcgggtctgggaactgtccaaggccaattcccactttgccactgccttctatcagcatttggcagactccaagaataacaatgacaacattttcctgtcacccctgagtatctccacagcttttgctatgaccaagctggg

SEQ ID NO: 2961 - DNA, 397 bp, Bos taurus
  Clone ID: 13-LIB34-015-Q1-E1-D9
gccacgcgtccgctaggctcggcgccgctggcccgccgataccatgagttggtcctcgcaccctccgagtgtaatcttctacatgctttcattgctttcttcagcatgcctgtcatatgttgctacccgagacaactgctggatcttagatgaaagatttggcagttattgcccagcgacctgtggaatttcagatttcctgaataattaccaaaccagtgtaggaatatatctacgaactttggaaggcatcttatatcatgttgacaacagtacatcagaagccatagaactggtcaaagcaatctatgtcagctataatcctgattaaccatcgaagccacattacatatagagtgctaccaagaattccaagagtatgatggaagaaattatg

SEQ ID NO: 2962 - DNA, 422 bp, Bos taurus
  Clone ID: 13-LIB34-016-Q1-E1-D1
ggctccgtggttctggcctacagtgggggcctggacacctcctgcatcctcgtgtggctgaaggagcaaggctatgacgtcattgcctacctggccaacatcggccagaaagaagactttgaggaagccaggaagaaggcgctgaagcttggggccaaaaaggtgttcattgaggacatcagcaaggagtttgtggaggagttcatctggccggccatccagtccagcgcactgtacgaggaccgatacctcctgggcacctctctcgccaggccctgcatcgcccgcaagcaggtggagatcgcccagcgagaaggagccaagtatgtgtctcacggcgccacaggaaaggggaacgaccagatccggtttgagctcacctgctactcgctggccccacagatcaaggtcatcgctccctg

SEQ ID NO: 2963 - DNA, 416 bp, Bos taurus
  unsure (404): unsure at all n locations; Clone ID: 13-LIB34-017-Q1-E1-D1
caaaactttggcacaatgaagtgggtgacttttatttctcttctccttctcttcagctctgcttattccaggggtgtgtttcgtcgagatacacacaagagtgagattgctcatcggtttaaagatttgggagaagaacattttaaaggcctggtactgattgccttttctcagtatctccagcagtgtccatttgatgagcatgtaaaattagtgaacgaactaactgagtttgcaaaaacatgtgttgctgatgagtcccatgccggctgtgaaaagtcacttcacactctctttggagatgaattgtgtaaagttgcatcccttcgtgaaacctatggtgacatggctgactgctgtgagaaacaagagcctgaaagaaatgaatgcttcctgagccacanagatgatagccc

SEQ ID NO: 2964 - DNA, 400 bp, Bos taurus
  Clone ID: 13-LIB34-018-Q1-E1-D1
acggacgcgtgggccgaggccaggtcagcttcatcacgtctatgtctgagcatttctgtgggacctgcaaccggctgcgaatcacagctgatgggaacctcaaggtctgcctctttgggaactcagaggtgtctctacgggatcacctgcgggcaggggcctccgaggaggagctgctgagggtcatcggggctgcggtgggcaggaagaagcggcagcacgcaggcatgttcaatatctcccagatgaagaaccggcccatgatcctcatcggtgggtgacccatcaagttatttttgatgcgccaagattccccaccagcccttccaagcactttcaggaactctctccgtgttcaggttctgagacacagagtgagtttctccagccagatggtgac

SEQ ID NO: 2965 - DNA, 302 bp, Bos taurus
  Clone ID: 13-LIB34-018-Q1-E1-D9
ccaagcaagtaactaacatgctgaatgtggacaggtgcacgtgttcagaaattccagtccagtggattgcgctcaaagtttcacaattaagaatgagcagttgatgtgaactccaatcgagtgtataaaagccaccttgaatcacactatatgtacgtttaatggaacagacaccattcaaaggcagttactcactagactggtttacgttataataatgcagaggaccatcgtcatccgccgagaacaacttcactaaatccgaaagtacaaccgctttgagaagcgccacaagaagatgt

SEQ ID NO: 2966 - DNA, 378 bp, Bos taurus
  Clone ID: 13-LIB34-019-Q1-E1-D1
ccgggtcaaaacacgcgtcccatctcaaccaaccataaagatattggtaccctttatctactatttggtgcttgggccggtatagtaggaacagctctaagccttctaattcgcgctgaattaggccaacccggaactctgcgcggagacgaccaaatctacaacgtagttgtaaccgcacacgcatttgtaataatcttcttcatagtaataccaatcataattggaggattcggtaactgacttgttcccctaataattggtgctcccgatatagcatttccccgaataaataatataagcttctgactcctcgctccctcattcctactactcctcgcatcctcgatagttgaagcctggggcaggaacaagctg

SEQ ID NO: 2967 - DNA, 318 bp, Bos taurus
  Clone ID: 13-LIB34-020-Q1-E1-D9
cacactactcctttgggggagccttccctgaccccctagactaagttcattactcctgcaacgtgtctcccatagcaccttttacttcttccttagtcctctatcctgcttaagtgaaattacatggttttgtttgtgtgtatgtgtgtgtatatatgtgtgtgcgcacgcgtgctagactgtaagttccatgggggcagggactttgtctatcatgttcatttctgtattcccaaacgcctagcagtgtggagtcagcattcaatagatacatgttatatgaatgaatgaatcataagaatggtcaggacactttgc

SEQ ID NO: 2968 - DNA, 240 bp, Bos taurus
  Clone ID: 13-LIB34-020-Q1-E2-D1
gtcgacccacccgtccgcaccaagatgtatatgaatgtgataaagggtacatcctggttggagcaaaagaactctcctgcacatcttcaggctggtcatctgcggtccctcagtgtaaagcattgtgtctgaaagcatagatagaatatggaaggttatctgtggagaaggttagatatgttgaacctgaaataattactatccactctgagtctggctatagtgtggttggttctgaaa

SEQ ID NO: 2969 - DNA, 320 bp, Bos taurus
  Clone ID: 13-LIB34-020-Q1-E2-D9
aagacttctcctttgggggagccttccctgaccccctagactaagttcattactcctgcaacgtgtctcccatagcaccttttacttcttccttagtcctctatcctgcttaattgaaattacatggttttgtttgtgtgtatgtgtgtgtatatatgtgtgtgcgcacgcgtgctagactgtaagttccatgggggcagggactttgtctatcatgttcatttctgtattcccaaacgcctagcagtgtggagtcagcattcaatagatacatgttatatgaatgaatgagactgaagagtggtgaagacagcggtcac

SEQ ID NO: 2970 - DNA, 448 bp, Bos taurus
  Clone ID: 13-LIB34-025-Q1-E1-D1
cggtcgaaaatcccggggtccgaccacgcgtccggtcccacccactaataaaaattgtaaacaatgcattcatcgaccttccagccccatcaaacatttcatcatgatgaaatttcggttccctcctgggaatctgcctaatcctacaaatcctcacaggcctattcctagcaatacactacacatccgacacaacaacagcattctcctctgttacccatatctgccgagacgtgaactacggctgaatcatccgatacatacacgcaaacggagcttcaatgttttttatctgcttatatatgcacgtacgacgaggcttatattacgggtcttacacttttctagaaacatgaaatattggagtaatccttctgctcacagtaatagccacagcatttataggatacgtcctaccatgaggacaaatatcattctgaggagcaac

SEQ ID NO: 2971 - DNA, 413 bp, Bos taurus
  Clone ID: 13-LIB34-026-Q1-E1-D1
cacaaaactttggcacaatgaagtgggtgacttttatttctcttctccttctcttcagctctgcttattccaggggtgtgtttcgtcgagatacacacaagagtgagattgctcatcggtttaaagatttgggagaagaacattttaaaggcctggtactgattgccttttctcagtatctccagcagtgtccatttgatgagcatgtaaaattagtgaacgaactaactgagtttgcaaaaacatgtgttgctgatgagtcgcatgccggctgtgaaaagtcacttcacactctctttggagatgaattgtgtaaagttgcatcgcttcgtgaaacctatggtgacatggctgactgctgtgagaaacaagagcctgaaagaaatgaatgcttcctgagccacagagatgat

SEQ ID NO: 2972 - DNA, 411 bp, Bos taurus
  Clone ID: 13-LIB34-026-Q1-E1-D9
atcaggaaaaaaagaaccattcggatatatgggaatagtttgggctataatgtcaatcggatttctaggtttcatcgtatgagcccaccatatattcactgtcggaatagacgtcgacacacgagcctacttcacatcagccactataattattgctattccaaccggggtaaaagtcttcagctgattggcaacacttcatggaggtaatatcaaatggtctcctgctataatgtgagccctaggctttattttcttatttacagtagggggtttaactggaattgtcttagccaactcttccctcgatattgttcttcacgacacatactacgttgtcgcacatttccactatgttttatcaataggagctgtatttgctattatagggggatttgttcattgattccc

SEQ ID NO: 2973 - DNA, 391 bp, Bos taurus
  Clone ID: 13-LIB34-027-Q1-E1-D9
attagacaatcacatgtactaaaactattaaattaattgcctatcaatgttaaacttgatgttaatcaaacagtccagtatactttattatatttaatgtgaacaacagggctgagagaaaagtaagtgaagtgaagtcgctcagtcatgtccgactctttgcaacccggtggactatagcccaccaggctcctccgtccatgtgattctccaggcaagaatactggggtgggttaccattttaccaccttctgagacagtcttgagtgggaaactaagaaatgtgtttctgtgtattctccaggcagttgtgacgcacaactaggttggggtcattgactatagtggaaagagccctggccttgagatcagacccatttgtgtgaacttg

SEQ ID NO: 2974 - DNA, 280 bp, Bos taurus
  Clone ID: 13-LIB34-029-Q1-E1-D1
ctgtttaccaacaagaagaaaaccaaccagatgtctggactctcttaaatggaaacaaagatgacttcctcatatatgacagatgtggccgccttgtatatcatcttggtttgccttattccttcctaactttcacatatgtagaagattccattaagactgtttactgtgaagataaatgtggaaactgctctctcaaggcactggaagatgaagacgtctgtaaaaatgtatttctggctaccaaggagaaaacagctgaggcttcacagcgacatca

SEQ ID NO: 2975 - DNA, 423 bp, Bos taurus
  Clone ID: 13-LIB34-029-Q1-E1-D9
ggctcaagagaggtagaaagagctcatcgtcatgacaggaaagtttctgtggtttgaagggatacccttcccaagtgtggattactcacctgaactcctgagagaggtacaggagagttttcttattaaagatgaagatgtcttactgctgactttccccaaatcaggaacgaactggttgattgaaactgtctgcctgatttactccaagggggatcccaagtgggtccaatctgagcccatttgggaccgctccccctgggtagagactaagcatgggtatgaattactaaaggagaaggaaggcccacgtctcatcagttctcacctccccatccaactcttccccaagtctttcttcaaatccaaggccaaggtgatctaccttgtccgaaatcccaaagatgtgtttgtgtcggggta

SEQ ID NO: 2976 - DNA, 419 bp, Bos taurus
  Clone ID: 13-LIB34-031-Q1-E1-D1
cccacccactaataaaaattgtaaacaatgcattcatcgaccttccagccccatcaaacatttcatcatgatgaaatttcggttccctcctgggaatctgcctaatcctacaaatcctcacaggcctattcctagcaatacactacacatccgacacaacaacagcattctcctctgttacccatatctgccgagacgtgaactacggctgaatcatccgatacatacacgcaaacggagcttcaatgttttttatctgcttatatatgcacgtatgacgaggcttatattacgggtcttacacttttctagaaacatgaaatattggagtaatccttctgctcacagtaatagccacagcatttataggatacgtcctaccatgaggacaaatatcattctgaggagcaacagtcatc

SEQ ID NO: 2977 - DNA, 417 bp, Bos taurus
  Clone ID: 13-LIB34-031-Q1-E1-D9
ggcagctctggttgcccttcgctaccagatacaacgtggggttgtggttctggccaagggtaacaacaaggagtggatcaaagagaacatgcacgtgatgatgagtggggctgtgggcagagggctcctagggagcatccttcacgagggtcattctttgtccagctctcagactatctttgggccaaaacgagttacctgatctttccctgtgtgtgaatgcctggtagttttctcctcctgctgtggcaacaggagaggcattatggctggagagggttaccgttggacagaaaatggagattttagcttgagcactacatttgcaatgtattctgtcactttgtgcaaaatgacatcttattttcttcattctcaattatgcaattgcattaggtgattttttcaatactgttt

SEQ ID NO: 2978 - DNA, 210 bp, Bos taurus
  Clone ID: 13-LIB34-034-Q1-E1-D1
ccagctgaatccaaatcaatttctcgatcacctcagggaactcggtgtctgcccaacattcggtcagcagggcccctgacctcccacggtcctgcctcaccccaacccatctggttgtgtgaagagaatggaaaatagcacaacccaggggaactgaagcaactgactgtgttcggttttactgatgacgtttttaaagtttttaatttc

SEQ ID NO: 2979 - DNA, 439 bp, Bos taurus
  Clone ID: 13-LIB34-035-Q1-E1-D1
ccgactccctatccactccactactaattttaaccatatggctcctccctctaatactaatagctagccaacatcatctatcaaaagaaaacctaacccgaaaaaaactatttattactatgctgatctcactacaactattcctaattataacctttaccgccatggaactaatcttattttatattctatttgaagcaacactagtcccaacactcattattattacccgatgaggaaaccaaacagaacgcctaaacgccggactctatttcctattctatacactagctggctccctacccctattagtcgcactaatttatatccaaaacacagtaggatccctaaatttcctaatattacagtactgagtacaacctgttcataactcttgatctaatgtcttcatatgactagcatgtataatagctttcaa

SEQ ID NO: 2980 - DNA, 418 bp, Bos taurus
  Clone ID: 13-LIB34-035-Q1-E1-D9
cagaacaactgctgagaccaccttgagaacaggatgatcctgaacagagccctgatttggggggcccttgccctgaccaccatgatgggtccctctgggagtgaagacattgtggctgaccacattggcgcctatggcataaacgtctaccacacatatggtccctctggctactatacccatgaatttgatggagatgaagagttctacgtggacctggaaaagagggagactgtctggcgtctgcctgtgtttagtaaatttacaatttttgaccctcagggtgcgctgagaaacatagctacagcgaagcacaatttggaggtcttgattcaaaggtccaactctactgctgctaccaacaaggttcctgagatgactgtgtttcccaagtctcctgtaatgctgggccaaccca

SEQ ID NO: 2981 - DNA, 333 bp, Bos taurus
  Clone ID: 13-LIB34-036-Q1-E1-D1
acaagcgtctatatcgattctaattaagaaatctgattgtccaaaatggtacatatatctgtttaatatgtaacatattaataagtaacctgctatgtaaaattgtttataatccatattttagaggtttaaaaactacttaatgtgttccatttgtgatataacctttaacatttctgacctgttgtgggatttacttgtaacaggtgacgagagggaaaggttgttagaatatcaaaaatgtttttatgaatgagttccttttaatggcaactacatgtgaataaaagtaaaccattatcttttaaaaaaaaaagtaaaccaataacaaaa

SEQ ID NO: 2982 - DNA, 414 bp, Bos taurus
  Clone ID: 13-LIB34-037-Q1-E1-D1
cgggtctagacacgcgtgcccacaactcagatggaatactgccgcaccccgtgtactgttacttgcaatattcctgtggtgtctggcaaagaatgtgaggaaatcatcaggaatggaggtgaaacatctgaaatgtacctcattcagcctgaggattctagcaaaccatatagagtatactgtgatatgaaaacggaaaaaggaggatggacagtaattcagaaccgtcaagatggtagtgttgactttggcaggaaatgggatccatataaacaaggatttggaaatattgcaaccaatgcagaagggaagaaatactgtggtgtagcaggtgagtattggctcggaaatgacagaattaaccagcttagcaatatgggacccagagagcttttgatttaaatggaggactgg

SEQ ID NO: 2983 - DNA, 264 bp, Bos taurus
  Clone ID: 13-LIB34-038-Q1-E1-D1
actttggcacagtgaagtgggtgacttttatttctcttctccttctcttcagctctgcttattccatgggtgtgtttcatcgagatacacacaagagtgagattgcggggcggtttacagatttgggagaagaacattttaaaggcctggtactgattgccttttctcagtatctccagcagtgtccatttgatgagcatgtaaaattagtgaaccaactagctgagtttgcagaagcatgtgttgctgatgagtctcatgccg

SEQ ID NO: 2984 - DNA, 164 bp, Bos taurus
  Clone ID: 13-LIB34-040-Q1-E1-D1
cagacgcgtgggcttatggctctggtttggcagcaagtttcttttctttccgggtgtcccaggatgcttctccaggctccccactggagaagctggtatcgagtacatcaggacctgcagaaacgtcttgcctcccggaagcgtggtgtctcctgaggagttca

SEQ ID NO: 2985 - DNA, 393 bp, Bos taurus
  Clone ID: 13-LIB34-040-Q1-E1-D9
cataaagccccccgcaatgtcacaataccaaacccctctgttcgtatgatccgtaataattaccgccgtactactactactctcgctccctgtattatcagccggcatcacaatgctattaacagaccggaacctaaatacaaccttcttcgacccggcaggaggaggagaccctattctatatcaacacttattctgattctttggacaccccgaagtctacattttaatcttacctgggtttggaataatctctcatatcgtgacctactactcaggaaaaatagaaccattcggctatatgggaatagtttgggctataatgtcaatcggatttctaagtttcatcgtatgagcccaccatatattcactgtccggataaacgtcgacac

SEQ ID NO: 2986 - DNA, 416 bp, Bos taurus
  Clone ID: 13-LIB34-041-Q1-E1-D1
gtgatgtacaaagccggaatcagaaagaatgccctgtactgaagactatctgagcttgatcctgaaccggttgtgcgtgctgcatgagaagacaccagtgagtgaaaaagtcaccaagtgctgcacagagtcattggtgaacagacgggcatgtttctctgctctgacacctgatgaaacatatgtacccaaagcctttgatgagaaattgttcaccttccatgcagatatatgcacacttcccgatactgagaaacaaatcaagaaacaaactgcacttgtttagctgttgaaacacaagcccaaggcaacagaggaacaactgaaaaccgtcatggggaattttgtggcttttgtaaacaagtgctgtgcagctgatgacaaagaagcctgctttgctgtggaaggtccaaaac

SEQ ID NO: 2987 - DNA, 338 bp, Bos taurus
  Clone ID: 13-LIB34-041-Q1-E1-D9
acgcgtccgatagaagttaccaagctagtgacagatctcacaaaagtccacaaggaatgctgccatggtgacctacttgaatgcgcagatgacagggcagatcttgccaagtacatatgtgataatcaagatacaatctccagtaaactgaaggaatgctgtgataagcctttgttggaaaaatcccactgcattgctgaggtagaaaaagatgccatacctgaaaacctgcccccattaactgctgactttgctgaagataaagatgtttgcaaaaactatcacgaagcaaaagatgccttcctgggctcgtttttgtatgaatattcaagaaggca

SEQ ID NO: 2988 - DNA, 359 bp, Bos taurus
  Clone ID: 13-LIB34-042-Q1-E1-D1
gcgtagaccacccgccatgctccccccagcgctcgtcttgctgttggggtttctctgccacgttgctatcgcaggacgaacctgccccaagccagatgagctaccgttttccacggtggttccactgaaacggacctatgagcccggggagcagatagtcttctcctgccagccgggctacgtgtcccggggagggatccggcggtttacatgcccgctcacaggactctggcccatcaacacgctgaaatgcatgcccacagtatgtccttttgctgggatcttagaaaacggaacggtacgctatacaacgtttgagtatcccaacaccatcagcttttcttgccacacggggtttt

SEQ ID NO: 2989 - DNA, 117 bp, Bos taurus
  Clone ID: 13-LIB34-043-Q1-E1-D9
agtcttgttcgaatgaactcttttaacacggatgaagataccaggctcatactacagaagtataatcactgtcgtgtgaaaatctaaaggtttaaccaaggcaggtacccacggatt

SEQ ID NO: 2990 - DNA, 404 bp, Bos taurus
  Clone ID: 13-LIB34-044-Q1-E1-D1
acgcaaccgcctgggacccaactatctccagatacctgtgaactgtccctaccgtgctcgagtggccaactaccagcgtgacggccccatgtgcatgatggacaatcagggtggggctccaaattactaccccaatagctttagtgctcccgagcatcagccttctgccctggaacacaggacccacttctctggggatgtacagcgcttcaacagtgccaacgatgacaatgtcactcaggtgcggactttctatttgaaagtgctgaatgaggagcagaggaaacgcctgtgtgagaacattgcgggccatctgaaagacgcacagctttttatccagaagaaagcggttaagaacttcagcgatgtccatcctgaatatggctctcgcatccaagctcttt

SEQ ID NO: 2991 - DNA, 370 bp, Bos taurus
  Clone ID: 13-LIB34-045-Q1-E1-D1
gggtcgagctcacgcgtccgcaccgatggcccgtgagccgccgccatggggaatcgcgtttcacgggaagacttcaattgggtcaaaacggttaagcggaacgcaaaccggcgccagaaaatcttgccaaattaccaagagataaaacccttaatgaacccggatccaacttgatatggaatgtaattatgaagggtctcactcagtttgttgcaatttacgtagggaaggacttacactggaaatgggtcctgttttgggaaaaagcctttggcagctgcgttaatcaatcaatgactctggctagtcataaagtttcccggaacatcgcccttgggcattatcaaactatgtggaaacgttgggttgg

SEQ ID NO: 2992 - DNA, 312 bp, Bos taurus
  Clone ID: 13-LIB34-046-Q1-E1-D1
ggtcgaggcacgcgtccgcaacgaacttgtaaccgcacacgcatttgtaataatcttcttcataataatacgaatcataattgagagattcggtaactgacttgttcgcctaacaattggtgctcccgatatagcatttccccgaataaataatataagcttctgactcctctctccctcattcgtactagtcatcgcatcctccatagttgaaccaggcgcaagtacaggattcagcatgtgacctgccctagcaagcattggagcccatgcaagagcttcaatagatctaaccattttctctttagactt

SEQ ID NO: 2993 - DNA, 411 bp, Bos taurus
  Clone ID: 13-LIB34-047-Q1-E1-D1
cgatattcttgaccctttttatcatctttcaactaaaagtttcaaaacacaacttttatcacaatccagaactgacaccaacaaaaatattaaaacaaaacaccccttgagaaacaaaatgaacgaaaatttatttacctcttttattacccctgtaattttaggtctccctctcgtaacccttatcgtactattcccaagcctactattcccaacatcaaaccgactagtaagcaatcgctttgtaaccctccaacaatgaatacttcaacttgtatcaaaacaaataatgagtatccacaattctaaaggacaaacatgaacattaatattaatatctctgatcctatttattggatcaacaaacctactaggcctattaccccattcattcacaccaacaacacaact

SEQ ID NO: 2994 - DNA, 311 bp, Bos taurus
  Clone ID: 13-LIB34-047-Q1-E1-D9
ggggattttcacaagagaggctgcaagatattgcaagcaccaggctgcagacggctgccacaacgctgatattcggctgttggtactcacaactcaagcagcttgaccgccatcaagtgcaagacacctaggattccggagatgtttggacgaattcacacttaccttcttcctagaagtcgagatggccaatttcatatttctaagacatccagagtaaacagcttcttcggtacgtacagtccgtgatgatcttcttgcagcgcccaatgtatgtcagcatgtagatgtcataattcgcaaccaacgat

SEQ ID NO: 2995 - DNA, 426 bp, Bos taurus
  unsure (418): unsure at all n locations; Clone ID: 13-LIB34-050-Q1-E1-D1
gatgcgagtcatggggccgcaaaccctcttcgtgctgctcttgggggctctggccctgaccgagacccgggctggctcccactctctgaagtatttctacaccgccgtatcccggcccggcgacggggagccccgcttcatcaccgtcggcgacgtggacgacacgcagttcgtgcggttcgacagcgacgccccggatccgaggaaagaaccacgggcgccgtggatagagaaagatgggccggagtattgggatgacgagacgcgaatctccaaggaaaacacactgctgtatcgaaagaacctgaacatcctgcgcggctactacaaccagagcgaggccgggtctcacaatatccaggcgatgttcggctgcgacgtggggccggacgggcgtttcctccgcgggtacaggcangacgccta

SEQ ID NO: 2996 - DNA, 246 bp, Bos taurus
  Clone ID: 13-LIB34-051-Q1-E1-D9
atcacaactagattagggactactgagggacagagacggctcctctggtaaagtggcttctgtttaaattggcccctcaggaaaagcacatctcttgaaaagaaataggggcctgggattagagccattttggaggtcagagcaaattaaggtttttatttgaagaataaaaaggtactttgataatgaaacttaaatgtcttgccccctcgctggaatcaggagtactgcccgtgtcactcacgt

SEQ ID NO: 2997 - DNA, 241 bp, Bos taurus
  Clone ID: 13-LIB34-052-Q1-E1-E8
ggacggccaagcccaggagccagggaaccgacgaccgagtcatgtggctggaaatactccttgcctcagtgctgggctttgtcatctactggttcgtctccaaggacaaggaggagactttgccccttgaagatggatggtgggggcctggggtgaggcccacagctggggaggataagagcatccgcccattcaaggtggaaacatcagatgaggagatcaatgacttacatcagaggat

SEQ ID NO: 2998 - DNA, 242 bp, Bos taurus
  Clone ID: 13-LIB34-054-Q1-E1-D1
ccgctgactattctcaaccaaccataaagatattggtaccctttatctactatttggtgcttgggccggtatagtaggaacagctctaagccttctaattcgcgctgaattaggccaacccggaactctgctcggagacgaccaaatctacaacgtagttgtaaccgcacacgcatttgtaataatcttcttcatagtaataccaatcataattggaggattcggtaactgacttgttcccc

SEQ ID NO: 2999 - DNA, 347 bp, Bos taurus
  unsure (342): unsure at all n locations; Clone ID: 13-LIB34-055-Q1-E1-D9
gtcaacatgactgacaatgatcttatcgatattcttgaccctttttatcatctttcaactaaaagtttcaaaacacaacttttatcacaatccagaactgacaccaacaaaaatattaaaacaaaacaccccttgagaaacaaaatgaacgaaaatttatttacctcttttattacccctgtaattttaggtctccctctcgtaacccttatcgtactattcccaagcctactattcccaacatcaaaccgactagtaagcaatcgctttgtaaccctccaacaatgaatacttcaacttgtatcaaaacaaataatgagtatccacaattctaaaggacanacatg

SEQ ID NO: 3000 - DNA, 255 bp, Bos taurus
  unsure (210): unsure at all n locations; Clone ID: 13-LIB34-056-Q1-E1-D1
ggacacttgagctgtatatatgtgtgtgtgcacatgcgtgtgtgtctgtgtactgtcgtctaaaacgtatttaatgactttggaaaaatcttgggcaagattacctcctagttgttgctagaatgcaatgttgctttcttattaatatgtgtgtttaaattatttttatataccatggttccttacctttacataatttcaacattttcncctaacacttcttgggaaaaaaaatcacaaattaaacttttatag

SEQ ID NO: 3001 - DNA, 229 bp, Bos taurus
  Clone ID: 13-LIB34-057-Q1-E1-D9
ccttcaagagctcccacagctgcaccgccaccaccgcctccatccaggccaggtgtaggagcccctccaccaccgccaaacaggatgtaccctcctccacttccagctcttccctcctcagcaccttcagggcctccaccaccacctccacctctgtcagtgagcgggtcagtggcaccaccacctccgccgccacctccacctccaccagggccaccacctccccctg

SEQ ID NO: 3002 - DNA, 205 bp, Bos taurus
  Clone ID: 13-LIB34-059-Q1-E1-D1
ggggtttaactggaattgtcttagccaactcttccctcgatattgttcttcacgacacatactacgttgtcgcacatttccactatgttttatcaataggagctgtatttgctattatagggggatttgttcattgattcccactattctcaggttatactctcaacgatacatgagccaaaatccacttcgcgaattatatttg

SEQ ID NO: 3003 - DNA, 313 bp, Bos taurus
  Clone ID: 13-LIB34-060-Q1-E1-D9
cccaaactctgtcaactgtgtgcggggaaagggacagacaagtgtgcctgctccaaccacgaaccatacttcggctactcaggggcctttaaatgtctgatggagggcgctggggatgtggcctttgtcaagcactcaacggtattcgacaacctgcctaacccagaagacaggaaaaactatgagctgctctgcggggacaacacccggaagtctgtagatgattaccaagaatgctacttggcaatggttccttcccatgcggttgtggctcgaactgtgggcggcaaggaggatgtgatctgggaacttc

SEQ ID NO: 3004 - DNA, 416 bp, Bos taurus
  Clone ID: 13-LIB34-061-Q1-E1-D9
tcccggatgcgccccacgcgtccggaagctcttaaaatttgatatccttgatccatttctactttcagtagtactctttccattccttatcccaatctttgaagtattaaatatcagcatatttccaaaaagtgctgtgaattttttgacaacatccgtaaaaaagataaaagaaagtcgcctcaaagatactcaaaagccgcgtgtggactttcttcagctgatgattaactcccagaattccaaagaaacagacaatcataaagctctctctgaccaagaactcaagggcccagagtattatctttatttttggtggctatgagaccactagcacttctctttccttcattatatatgaattggccactcaccctgatgtccagcagaagctgcaggaggagattgatgcgact

SEQ ID NO: 3005 - DNA, 189 bp, Bos taurus
  Clone ID: 13-LIB34-062-Q1-E1-D1
aaaagggcatttgaggggaggatgattcctatgagtgaaaaaaatgttttagcttagtctaagctacctgccttcaaaatagtgtagggaccaccatcatattatattttattttattttgttttttatctttaagcatttttctaatgatttgaagagataactatttacaaaaattatacatatcag

SEQ ID NO: 3006 - DNA, 211 bp, Bos taurus
  Clone ID: 13-LIB34-062-Q1-E1-D9
ggggaaccagacagcacagccatgctggaggcactgggctccctggtggctgccctctggaccacgctccgtcctggcattgtcctactgggggcctttgtctttctcctctttgctgatttcctcaaaaggcagcacccaaagaactacccaccagggcccctgcgcctgcccttcataggcaatttcttccacctggacttggggaaag

SEQ ID NO: 3007 - DNA, 373 bp, Bos taurus
  Clone ID: 13-LIB34-063-Q1-E1-D1
cctacttttatgcaccagaactcctttactatgctaataaatataatggagtttttcaagaatgctgccaagctgaagataaaggtgcctgcctgctaccaaagattgaaactatgagagaaaaagtactgacttcatctgccagacagagactcaagtgtgccagtattcaaaaatttggagaaagagctttaaaagcatggtcagtaactcgcctgagccagaaatttcccaaggctgagtttgtagaagttaccaagctagtgacagatctcacaaaagtccacaaggaatgctgccatggtgacctacttgaatgcgcagatgacaaggcagatcttgccaagtacatatgtgataatcaagatacaat

SEQ ID NO: 3008 - DNA, 247 bp, Bos taurus
  Clone ID: 13-LIB34-064-Q1-E1-D9
ggtggccctgaaaaatttcaaggcaatgctgggcaattatttccgtggccggcccttagtccagaacttcctggactccatgaacgagtggctcaagaagcagcagagaaagaaaattccatacggtttccttaaaaatgcgctggacaacaggaaggagggcactgtgatcgcggaaaaggtgaactgggtgggctgccacgggagtgagccgcatttccggggctttccctgctccctgtggaat

SEQ ID NO: 3009 - DNA, 224 bp, Bos taurus
  Clone ID: 13-LIB34-065-Q1-E1-D1
atccgcggacgcgtgggggcccggaggacattcggcctctgtgagctgcagcctttctgagagaccggttgtgtgttcgccatcttagggagaagatgtactcgtccgtggtgcacctagcgcgggcgaaccccttcaacgcgcctcacctgcagttggtgcacgatggtctcgcggggccccgcagcgaccccgccgggcccccgggcccaccccgccgctct

SEQ ID NO: 3010 - DNA, 254 bp, Bos taurus
  Clone ID: 13-LIB34-066-Q1-E1-D1
ggactttctcctttggcctcggagctttcagtggtcctagggtctttgacgttcgattccagggagaacggctggcttatgagatcagcctgcaagaggctggtgctgtctacggtgggaatactccagcagcaatgctcactcgctatatggatagtggctttggcatgggttacttcgccacacccctgattcgtggcgtagactgcccttacctggccacctacatggactggcacttcgttgtggagtcc

SEQ ID NO: 3011 - DNA, 203 bp, Bos taurus
  unsure (196): unsure at all n locations; Clone ID: 13-LIB34-066-Q1-E1-D9
agtggagtgacctcacagctggaactgggccctgggtcgtcatcttggttactggtccatctgcagctaatatacctaatccagaagtgcagtccattggaagggacactgaaatggacctcctgtgccaccagggttccagaagcgcgaagtctgtttaccttgtagtgggatatccttggcggcttgcttctcncacttgc

SEQ ID NO: 3012 - DNA, 246 bp, Bos taurus
  Clone ID: 13-LIB34-067-Q1-E1-D1
acgtccaaaaaattgattgcaccatttgcagaagaagagacaaggatcccaaacaataagatcactgtagtgggtgttggacaagttggtatggcatgtgccatcagcattctgggaaagtctctgactgacgagcttgctcttgtggatgttttggaagataaactcaaaggagaaatgatggacctgcagcacgggagcttattccttcagacaccaaaaattgtggcagacaaagattactcc

SEQ ID NO: 3013 - DNA, 196 bp, Bos taurus
  Clone ID: 13-LIB34-068-Q1-E1-D9
gagacgatggggaaagccgaaatgtggctcattcgaacctactgggatttttcatttcctcgtccacgactaccaaatgttgaatttgttggacggctccactgcaaacctgccaagcccctgcctaaggaaatggaagaatttgtgcagagctctggagaaaatggtattgtggtgttttctttggggtcaatgg

SEQ ID NO: 3014 - DNA, 245 bp, Bos taurus
  unsure (189): unsure at all n locations; Clone ID: 13-LIB34-070-Q1-E1-D9
gataaacagagaagctctcgacacacatgggccgttttgctgtgcgtgacatgagacagacagtcgctgtgggtgtcatcaaagcagtggacaagaaggcagctggagctggcaaggtcaccaagtctgcccagaaagctcagaaggctaaatgaatattatccccaatacctgccaccccagtcttanatcagtggtggaagaacggtctcagaactggtttgtcctcaaattggccaatttaa

SEQ ID NO: 3015 - DNA, 407 bp, Bos taurus
  Clone ID: 13-LIB34-071-Q1-E1-D1
agtcccgcggcgccgcgcccgccagccatgagctccacgcagttcaacaaggggccctcgtacgggctctcggccgaggtcaagaaccggctgcagtccaaatatgaccctcagaaggaggcggagctccgaagctggattgagggactcactggtctctccgttggcccagacttccagaagggtctgaaggatgggatcatattgtgcacactcatgaataagctgcagccaggctcagtccctaagatcaaccgctccatgcagaactggcaccagctagaaaacctctccaacttcatcaaggccatggtgagctacggcatgaatcctgttgacctgtttgaggccaacgacctgtttgaaagtgggaacttgactcaagtgcaggtgtctcttcttgccct

SEQ ID NO: 3016 - DNA, 410 bp, Bos taurus
  unsure (309),(351),(375),(391): unsure at all n locations; Clone ID: 13-LIB34-072-Q1-E1-D1
atcggcctcagtcaccagccctgacctaggacagtgaatcgataatggcactctccatcacgcggggccttctgctgctggcagccctgtgctgcctggcccccatctccctggctggagttctccaaggacacgctgtccaagagacagatgatacatcccaccaggaagcagcgtgccacaagattgcccccaacctggccaactttgccttcagcatataccaccatttggctcatcagtccaacaccagcaacatcttcttctcccccgtgagcattgcttcagcctttgctatgctctccctgngagccaagggcaacactcacactgagattctgaagggcctgngtttcaacctcactgagctcgcanaggctgagattcacanaggctttcagcatcttctc

SEQ ID NO: 3017 - DNA, 412 bp, Bos taurus
  unsure (321): unsure at all n locations; Clone ID: 13-LIB34-073-Q1-E1-D1
ttccaggccgacccacgcgtccacaaatggcggatgacgccggtgctgcgggagggcccggaggccccgggggccccggaatgggaggccgcggtggcttccgcggaggcttcggtagtggcgtccggggccggggtcgcggccggggtcggggccggggcagaggccgcggagctcgcggaggcaaggccgaggacaaggagtggctccccgttaccaagctgggccgcctggtcaaggacatgaagatcaagtctcttgaggagatctaccttttctctctgcctatcaaggagtctgagattattgactttttcctgngagcatccctgaaggatgaggttttgaagattatgcccgtgcaaaagcagacccgtgctggccagcggaccaggtttcaagcgtttgttgc

SEQ ID NO: 3018 - DNA, 438 bp, Bos taurus
  unsure (265): unsure at all n locations; Clone ID: 13-LIB34-074-Q1-E1-D1
gggccgagccacgcgtccagcgtgacaggtcggggcaggggtgccccgcaggagctgagcctcagcctcatcccctcctttgcctcccagtcaagcctgctggggggtctgagcaccacagccagagcacccccgccttggcagcgactgctactattggcccagccagcggatcatccacctggcagtcgagagcctggggcaccagcgacgtccaggtcctctttacccaccgcccaggggagcttcagagacaacacagcanatagagcacaagggacgaagagtcactgttgaccttgaggacgaggaggtggccttcagctcccagccccagggccccacacccaggccaggtcagccctttgcccaggctgccccccggccagaacccgcagcagggccagaaacccagcccggaggtcagctgctgtgacc

SEQ ID NO: 3019 - DNA, 377 bp, Bos taurus
  Clone ID: 13-LIB34-075-Q1-E1-D1
cctaacatgaaaacttgggaattaatggcacaggaaccggtggaattgcagatttcctgaataattaccaaaccgttgtggacaaggatctacgaactttggaacgcatcttatatcaggttgagaacacaacatcaaaagccatagagctggtcaaagcattccaaatcagctataaccctgatcaaccatcaaagccagataccatagagagtgctaccaagaattccaggagtatgatggaagaaattatgaaatatgcaacactgataacatcacatgaatcaacagttccatttttgcacgaactatataactcaaatagtcaaaacatcgttaacctaagagataaagtggtccagcttgaagcacactgt

SEQ ID NO: 3020 - DNA, 196 bp, Bos taurus
  Clone ID: 13-LIB34-075-Q1-E1-D9
cacgcctcaaggcagagtcggattaactgcccacaccccgctctcgctggcagacatgaggacagagagaatgtcacccctcctggctctggggatcctggtggctgggctctgctccagggtccactgcgtcccagagaatgtgaccccagaagaagagcatatagtgacatctgtggatggcattcattaccct

SEQ ID NO: 3021 - DNA, 259 bp, Bos taurus
  Clone ID: 13-LIB34-076-Q1-E1-D1
ccgggatgaccacgcggccggcgaggcgctgcaactcgagctccgagaggcccacgggcggcgtccaccatgttgtcgcgagcggcgtgcagcacgagcatgagactggtgccggccctgagcgtgctgggctcccggcagaagcacagcctccccgacctgccgtacgactacggcgccctggagccgcacatcaacgcgcagatcatgcagctgcaccacagcaagcaccacgcggcctacgtgtacaacctcaacg

SEQ ID NO: 3022 - DNA, 389 bp, Bos taurus
  unsure (13)...(15): unsure at all n locations; Clone ID: 13-LIB34-077-Q1-E1-D1
gtcgtataatgtnnnctgtgcattcatcgaccttccagccccatcacacatttcatcatgatgaaatttcggttccctcctgggaatctgcctaatcctacaaatcctcacagggctattccgagcaatacactacacatccgacgggacaacagcattctcctctgttacccatatctgccgagacgtgaactacggctgaatcatccgatacatacacgcaaacggagcttcaatgttttttatctgcttatatatgcacgtaggaagaggcttatattaagggtcttacacttttccagaaacatggaatattggagttatccttctgctcacagtaataaccacagcatttttaggatacgtcctaccatgaggacaaatatcat

SEQ ID NO: 3023 - DNA, 434 bp, Bos taurus
  Clone ID: 13-LIB34-077-Q1-E1-D9
ttaaaatcataatagagcaagtactgacttcatctgccagacagagactcaggtgtgccagtattcaaaaatttggagaaagagctttaaaagcatggtcagtagctcgcctgagccagaaatttcccaaggctgagtttgtagaagttaccaagctagtgacagatctcacaaaagtccacaaggaatgctgccatggtgacctacttgaatgcgcagatgacagggcagatcttgccaagtacatatgtgataatcaagatacaatctccagtaaactgaaggaatgctgtgataagcctttgttggaaaaatcccactgcattgctgaggtagaaaaagatgccatacctgaaaacctgcccccattaactgctgactttgctgaagataaggatgtttgcaaaaactatcaggaagcaaaagatgccttc

SEQ ID NO: 3024 - DNA, 463 bp, Bos taurus
  Clone ID: 13-LIB34-078-Q1-E1-D1
tatagaaagtcgtattagctatggctatcagcagatctgaaattcaggataaaacagaaaggagagtatttgcctttactgcaagggaagtccttaagcatgatttttgaaaaaagaagtactcgaacaagattgtccacagaaacaggctttgcacttctgggaggacacccttgttttcttactacggacgatattcatttgggtgtgaatgaaagtctcacagatacagcccgtgtgttgtctagcatgacagatgccgtgctggcgcgagtgtacaaacaatcagatctggacctcctggctaaagaagcttccatcccaattgtcaatgggctgtcggatttgtaccaccctatccagatcctggctgattacctcacgctccaagaacaatacggctctctgaaaagccttaccctcagctggattggggaatggaataacatcctgcactccatca

SEQ ID NO: 3025 - DNA, 353 bp, Bos taurus
  Clone ID: 13-LIB34-080-Q1-E1-D1
ggccaataagtgtgccagttttcgtgaaaatgtgcttcgtatcttggagagtggtccttttgtctcctgtgtgaagaaaacctcacacatggattgcatcaaggctatctcgaataacgaagcagatgctgtgacgttggatggaggtttggtgtatgaggcaagcctgaagcccaacaacctgaagcctgtggtggcagagttccatgggacaaaagacaacccacaaactcactattatgctgtggcggtggttaagaaggacactgactttaagctgaatgagctcagaagcaagaaatcctggcaaacaagcctcggcaagtccgctgggtggaacatccccatgggca

SEQ ID NO: 3026 - DNA, 168 bp, Bos taurus
  Clone ID: 13-LIB34-080-Q1-E1-D9
aggacattccaggctcggagccccgggcccgccgacaccatgagttggtcttcgcaccctcggagtgtaaccttcaacattctttcatggctttctataacaggccgggcatatgtggcaacccgaaaaaggggcggcatctaagataaaatttggggtatttattcc

SEQ ID NO: 3027 - DNA, 442 bp, Bos taurus
  unsure (314): unsure at all n locations; Clone ID: 13-LIB34-082-Q1-E1-D1
ccacgcgtccgaaaggctaactgtcaagtccgatgtctggagcctcggcatcaccatgatcgagatggccattctgcgatttccttaagaatcctggggggaccccttccagcagctgaagcaagtggtagaggagccgtcaccccagctcccagctgaccgtttctcccctgagtttgtggactttactgcacagtgcctgagaaagaatctcgcggaacgcatgatctacctggagctgatggagcaccctttcttcacctcgcacaaaaccaagaagactgacatcgctgccttcgtgaaggagatcctgngacaggactcgtatgggcagggcttggaccttctccaactgtctgttggggcagtgcttgcccacacgcataagctactgccgccctggcctgggcacccaagatgaatccaaggggctgctcccggc

SEQ ID NO: 3028 - DNA, 369 bp, Bos taurus
  Clone ID: 13-LIB34-084-Q1-E1-D1
tcgaacggccgcccttttttttttttttttttttttttttttttttttttttttttttttttttttttttttttttttttttttttttttttttttttggttttttttccaggttggcccaaacgtgaccattttaatgcaggaaatgatgatcatttacaaatgaagcattttatcacccaaacccaggaggaccccaaaggcattgaaggaggagggaaaggccactgggagctggggaatcagctcccaagcaccttcaaagccaatcccacccaagcccctgcaaaccgggcgagccctggccatccgtgggccccgccctccgaatcccaaaaaggcacccccagggggaaaacccttggtcaa

SEQ ID NO: 3029 - DNA, 438 bp, Bos taurus
  Clone ID: 13-LIB34-085-Q1-E1-D1
attccaaggccgacccgcgcgtccacggacgcatgggcgcagatgacagggcagattttgccaagtacatatgtgataatcaagatacaatctccagtaaactgaaggaatgctgtgataagcctttgttggaaaaatcccactgcattgctgaggtagaaaaagatgccatacctgaaaacctgcccccattaactgctgactttgctgaagataaggatgtttgcaaaaactatcaggaagcaaaagatgccttcctgggctcgtttttgtatgaatattcaagaaggcatcctgaatatgctgtctcagtgctattgagacttgccaaggaatatgaagccacactggaggaatgctgtgccaaagatgatccacatgcatgctattccacagtgtttgacaaacttaagcatcttgtggatgagcctcagaatt

SEQ ID NO: 3030 - DNA, 443 bp, Bos taurus
  Clone ID: 13-LIB34-086-Q1-E1-D1
ccgggtagaccacgcggcccgtgaatgaaaaatacaccaagtgctgcacagagtcattggtgaacagacggccatgtttctctgctctgacacctgatgaaacatatgtacccaaagcctttgatgagaaattgttcaccttccatgcagatatatgcacacttcccgatactgagaaacaaatcaagaaacaaactgcacttgttgagctgttgaaacacaagcccaaggcaacagaggaacaactgaaaaccgtcatggagaattttgtggcttttgtagacaagtgctgtgcagctgatgacaaagaagcctgctttgctgtggagggtccaaaacttgttgtttcaactcaaacagccttagcctaaacacgacacaaccacaggcatctcagcctaccctgagagtaagaggaaaaaagagaaatgaaaactcagagc

SEQ ID NO: 3031 - DNA, 390 bp, Bos taurus
  unsure (378): unsure at all n locations; Clone ID: 13-LIB34-086-Q1-E1-D9
gagcacgcgtccacaaatagttcattttgtttgaccctccttttaaggacctgttgtgctttggctgcagactttcctgaaggttctctcacgtacagagcagatgcctggcggctacacttcaggggggtctgagtggttggttgcaggtcggccgactctctccggctcagagcaagtgagcacagcaccctttgatccccacccggctggccgggagccacagcaaggcacctgccttgggatgatacctgggtgaaattcaccttccccaccccatctggacccgcatcctatagtcctagattcctcaggccgggtgggtgtcaggccctccccggggttggtttggtctatgtcagaatgatgggaggatangatttgttgggt

SEQ ID NO: 3032 - DNA, 386 bp, Bos taurus
  Clone ID: 14-BOVMS1-002-Q1-E1-D5
atgcgacgtcatagctcttctatagtgtcacctaaattcaattcactggccgtcgttttacaacgtcgtgactgggaaaaccctggcgttacccaacttaatcgccttgcagcacatccccctttcgccagctggcgtaatagcgaagaggcccgcaccgatcgcccttcccaacagttgcgcagcctgaatggcgaatgggacgcgccctgtagcggcgcattaagcgcggcgggtgtggtggttacgcgcagcgtgaccgctacacttgccagcgccctagcgcccgctcctttcgctttcgtcccttcctttctcgccacgttcgccggctttccccgtcaagctctaaatccgggggctcctttagggttccgatttagtgc

SEQ ID NO: 3033 - DNA, 377 bp, Bos taurus
  unsure (317),(334): unsure at all n locations; Clone ID: 14-BOVMS1-006-Q1-E1-D5
cgcgtccgctaaaaaccaggttgtctcctgcgacttcaacagcgacactcactcttctaccttcgatgctggggctggcattgccctcaacgaccactttgtcaagctcatttcctggtacgacaatgaagttggctacagcaacagggtggtggacctcatggtccacatggcctccaaggagtaaggtccctggacccccagccccagcaggagcacgagaggaatagttcctcagctgctggggagtcctgccccatctctgccacactgagaatctcctgacttccacatgtttccatctctaaggccctgangaatgggatgggcttanggagccctgccttgtggtacatcaataagagtaccctataccc

SEQ ID NO: 3034 - DNA, 444 bp, Bos taurus
  unsure (417),(428): unsure at all n locations; Clone ID: 14-BOVMS1-006-Q1-E1-D9
gaacacctaaacgccggactctatttcctattctatacactagctggctccctacccctattagtcgcactaatttatatccaaaacacagtaggatccctaaatttcctaatattacagtactgagtacaacctgttcataactcttgatctaatgtcttcatatgactagcatgtataatagctttcatagtaaaaataccactatatggcctccacctttgactacctaaagctcacgtagaagcccccatcgcaggctccatagtccttgcagcagttctactaaaactaggggggtacggtatgctacgaatcacactaattctaaaccctatgaccgactttatagcatacccattcattatactctccctatgaggcataattataaccagctcaatctgcctccgtcanacggacctaanatcactcatcgcatac

SEQ ID NO: 3035 - DNA, 414 bp, Bos taurus
  Clone ID: 14-BOVMS1-007-Q1-E1-D5
acgacctgtacagtgcctatgattacacagtaccaccgatggagaaagtgcttgtgaaaactgacattcagatagcccttccttctgggtgctatggaagagtggctcctcgttctggcttggcagcaaaacacttcatagatgtaggagctggtgtcatagatgaagattatagaggaaatgttggtgttgtcctgtttaattttggcaaagagaagtttgaagtcaaaaagggtgatcgaattgcacagctcatttgtgaacggatattttatccagaaatagaggaagttcaagttttagatgacactgaaaggggttcaggaggctttggttccactggaagtaattaaaacttatgccaagaacaggaaatgagaatgtacttttttcttgaaaataaagactttgctt

SEQ ID NO: 3036 - DNA, 383 bp, Bos taurus
  Clone ID: 14-BOVMS1-008-Q1-E1-D5
attcactaatattataacggatttaagctgtgaagcctcaaaacatcacaactagattagcatcggtgttctcagatttgggaaaactgcctaattaacattaccctatagtggaattactcaaatttgaattcacctatgaaacatacaaatcaaagtaacagtataaatgtgaaatgcaaatgacaagcctggaaaggtaaactgtgaatcttcatttctaacattgatccaagtttctatattgggtcaatatattgtatttaggtggtgtttaaaaagggtaacctacttaaactatgaggtttacatcaaaaccaccatttcacaaatgcactttttaaggcacaataaaggtcactattctagacagtgagaataat

SEQ ID NO: 3037 - DNA, 342 bp, Bos taurus
  Clone ID: 14-BOVMS1-008-Q1-E1-D9
atgcgacgtcatagctcttctatagtgtcacctaaattcaattcactggccgtcgttttacaacgtcgtgactgggaaaaccctggcgttacccaacttaatcgccttgcagcacatccccctttcgccagctggcgtaatagcgaagaggcccgcaccgatcgcccttcccaacagttgcgcagcctgaatggcgaatgggacgcgccctgtagcggcgcattaagcgcggcgggtgtggtggttacgcgcagcgtgaccgctacacttgccagcgccctagcgcccgctcctttcgctttcttcccttcctttctcgccacgttcgccggctttccccgt

SEQ ID NO: 3038 - DNA, 471 bp, Bos taurus
  unsure (295),(398),(415),(442),(447): unsure at all n locations; Clone ID: 14-BOVMS1-009-Q1-E1-D5
aaaaatcaatttcctaatgttagaaataggaatggttcataaaaccctgctggatggcaaggaatggttcatgaaaccttgcagctgtaccctgatgctggatggcacttaccttgtgtggtcctaaattggtttgtcaaataattcaacttcctcaagaggtaccactgcccatgttgcagatgctacagttgcccttcaaaccagatgtgtatttactgtgtaatataacctctggttcctttagccaaggtgcctagtccaacttttttccctccagttgatcacttcctgngatccaatgtacaaatccagtattgcatgccatgtgcataactgttctaaagaatcttatgtactgtatgtatcagaatagtgtacattgcctttgtatgtanaaagggaaaattcatanataatgcaaccaactaagttatacaanctaanacaataaataaagcttgaacattg

SEQ ID NO: 3039 - DNA, 376 bp, Bos taurus
  unsure (292),(319): unsure at all n locations; Clone ID: 14-BOVMS1-010-Q1-E1-D5
gttaatgtctaagtatgcctcagtgggtcgaggaattccccattgaagatgtcctatccaccgaaaaatgctgtgcacatcacctgatatgcaccgatacttatggaatcagaaatgtaaggcattggtgatgtttgcatttaccctcctgtaagcaacactttaacgtcttacattttctgatgatgtcacactcaaaattatcatgacttaaatattaccagaacaaagtgtaacggccaacactttgttcgctcatttcacactgtctctgaccatagagagtgcctgngtagcttggaaaagtaacatcacctgnccatcccctcagttaaccaagttattcatgcattcctatgccagagcagtgtcaact

SEQ ID NO: 3040 - DNA, 333 bp, Bos taurus
  Clone ID: 14-BOVMS1-010-Q1-E1-D9
gcatggtacatgtctcttgcttgcttgctgtacccctcactagacctgcattttagagtctcccagaggctgccagagtgattgtaattctgctttcagataaagacagcctgtaatagcactgctgagtgattcataagcgtatcaacaaatggtgttaacccatttcctagtcttagcgtctgaaggtgttcaccagttttctgtgtacagtaaggcggcatgctaaaatgctttgttccgttctgtatatctgaaaacagcagtgtgatggttccctgcaatggcaccctgtatgaaaaataaacacttactgccatataaaacagtgta

SEQ ID NO: 3041 - DNA, 353 bp, Bos taurus
  Clone ID: 14-BOVMS1-014-Q1-E1-D5
acggtccggatttccggtcgacgacgcgtccgaaaaaaaacaaaaataataaaaaaacaaaagaaaaataaaaaataatcaaaaaaaaaaaataaaaaaagcatcaaaaaagaaataataaaaaaattacagaataactaaaataaaagagcaattaaaatcatgcaaaaaaaggggggtgcccctccatcgtttaaaatttattttggccttacagtgacatttacatctttcccatacttcctcaaaatttcattttgcggccttccttttaaataccttttatggggaaacccctgtgttttcccaaatattatccctttacattaaacccctttttttcaaatgggtta

SEQ ID NO: 3042 - DNA, 367 bp, Bos taurus
  Clone ID: 14-BOVMS1-016-Q1-E1-D5
atgcgacgtcatagctcttctatagtgtcacctaaattcaattcactggccgtcgttttacaacgtcgtgactgggaaaaccctggcgttacccaacttaatcgccttgcagcacatccccctttcgccagctggcgtaatagcgaagaggcccgcaccgatcgcccttcccaacagttgcgcagcctgaatggcgaatgggacgcgccctgtagcggcgcattaagcgcggcgggtgtggtggttacgcgcagcgtgaccgctacacttgccagcgccctagcgcccgctcctttcgctttcttcccttcctttctcgccacgttcgccggctttccccgtcaagctctaaatcgggggctccctt

SEQ ID NO: 3043 - DNA, 423 bp, Bos taurus
  Clone ID: 14-BOVMS1-017-Q1-E1-D5
cacttgttccccaacgtgaagaagaggatacaggttgttagccagtcaagcacagaactgaatcccattgaagtggcgattgacgagatgtccaagaaagtttccgagcttaatcagctttgcacgatggaagaagtggacatgatcagactgcagctcaaactccaaggcagtgtcagtgtaaaggttaatgccggaccaatggcctatgcacgggcttttcttgaagaaaccaatgcaaagaaataccctgacaaccaagtaaagcttttgaaggaaatcttcaggcaatttgcagatgcgtgtggccaggccctggatgtgaatgagcgcctcatcaaggaggatcagctggagtaccaggaggaactgaggtcccattacaaggacatgctcagcgagctctcgggaatcatgaatgag

SEQ ID NO: 3044 - DNA, 346 bp, Bos taurus
  Clone ID: 14-BOVMS1-017-Q1-E1-D9
ctcatttatatggctattgaacactctccaaataagtgtttgccagtcaaagaaatttatagctggattctgaaccgcttcccatattttgcaactgcaccaactggctggaagaattctgttcgacataatctgtccctgaataaatgttttcagaaagtggaaagaagccacggcaaggttaatggaaaaggttccttatggtgtgttgatccagaatataaacccaaccttatgcaggcactgaagaagcaacctttctcctcaaaatccacattttacagccctcctgcatcaccacaaagtggttctttatcacctcattacttaagctctgtactcaagc

SEQ ID NO: 3045 - DNA, 352 bp, Bos taurus
  Clone ID: 14-BOVMS1-018-Q1-E1-D5
aagaaactgatggaaaaaagaaagggaacagaggaaaccacagagctaaaaataaatcaaaggaaacatttttgggttctgttaaggaaacatttgatgcaatgaagaattctactaaggagtttgtgaggcatcataaagaaaaaattaaacaggctaaagaagctgtaaaagaaaatctgaaaaaattctcagattcagttaaatccactttcaggcatttcaaagataccaccaagaatatctttgatgaaaaaggcaataaaagatttggcgctacaaaagaaaccgcagctaaaaaaccgacaacatttagtgaatatttccatccacagtataaggcacgtacaca

SEQ ID NO: 3046 - DNA, 304 bp, Bos taurus
  Clone ID: 14-BOVMS1-018-Q1-E1-D9
ccgaaagcagtctaaaatttatttttaagagaaagaaatctgccccattatttttgttttgtttttatttttttggcttttggtcattgtcaaatgtggaatgctatgggtttctagtatataatttaattctagtttttataatctgttagcccagttaaaatgtatgctacagataaaggaatgttatagataaatttgaaagagttaggtctgtttagctgtagattttttaaaagattgatgcactaaattgtttactgttgtgatgttaaggggggtagagtttgcaaggggactgttt

SEQ ID NO: 3047 - DNA, 349 bp, Bos taurus
  Clone ID: 14-BOVMS1-019-Q1-E1-D5
atgcgacgtcatagctcttctatagtgtcacctaaattcaattcactggccgtcgttttacaacgtcgtgactgggaaaaccctggcgttacccaacttaatcgccttgcagcacatccccctttcgccagctggcgtaatagcgaagaggcccgcaccgatcgcccttcccaacagttgcgcagcctgaatggcgaatgggacgcgccctgtagcggcgcattaagcgcggcgggtgtggtggttacgcgcagcgtgaccgctacacttgccagcgccctagcgcccgctcctttcgctttcttcccttcctttctcgccacgttcgccggctttccccgtcaagctc

SEQ ID NO: 3048 - DNA, 296 bp, Bos taurus
  Clone ID: 14-BOVMS1-020-Q1-E1-D5
gttctagatcgcgagcggccgcccttttttttttttttttttttttttttttttttttttttttttttttttttttcgcagcaaaacagaacggatgagtttaatgcttcaagttttccatttccttccaaagggcttcgttttaaaaataacaaactgaggtaaacttctagatcgccaacggccgccctttttattttttttctgttttaaaaatgaatttattagaatgctcataattaccacgtgaatattcacttgcacaggaatttgcaaaatattacaaccttgacatc

SEQ ID NO: 3049 - DNA, 373 bp, Bos taurus
  Clone ID: 14-BOVMS1-020-Q1-E1-D9
gatttctttagttttgattattttaacagagaaagtaatggtgctgggtaatacacataagaccaatcttttgttattaaatcagtactgttcttagcaactttcttctgaatgttcttgaaagtgctccctttatattgtccctactttaggaataaaacttgaatcttcaacagtgcaagctgttctctaacactctttaaaacataacatatgctgattttgctttcataattatttttatattggttatgttttcccctgtatattcaagattgaacgtacaactgttctatcatataaaattagttaaaataagtaaactgctcaaaaatagtcccagttttttagcaacactgtaatagagtgatgt

SEQ ID NO: 3050 - DNA, 423 bp, Bos taurus
  unsure (374)...(375),(381): unsure at all n locations; Clone ID: 14-BOVMS1-021-Q1-E1-D5
ccgatacttatggaatcagaaatgtaaggcattggtgatgtttgcatttaccctcctgtaagcaacactttaacgtcttacattttctgatgatgtcacactcaaaattatcatgacttaaatattaccagaacaaagtgtaacggccaacactttgttcgctcatttcacactgtctctgaccatagagagtgcctgggtagcttggaaaagtaacatcacctggccatcccctcagttaaccaagttattcatgcattcctatgccagagcagtgtcaactcttggaggttcaagggtgcagccaacgccttcgtgtggtagttctaaatttaaaccagaaactggggcaactaagcaatgagccacagcannaaatanagaacaaaataaagctgtcgttaaattaaaaacaacaaaata

SEQ ID NO: 3051 - DNA, 134 bp, Bos taurus
  Clone ID: 14-BOVMS1-022-Q1-E1-D5
aatatttccctccacaaacaacataaaaataaaatgacaatttccccttatgaaaaaaataacttttctaccaacaatagtcgtattatctaccataatactaccactcacgccaatactatcagtgttagaat

SEQ ID NO: 3052 - DNA, 264 bp, Bos taurus
  Clone ID: 14-BOVMS1-022-Q1-E1-D9
cctacgcacatctcagagtctatatcataccagaacgctaaacgcacatttttaccatttgatcccgagccggtcatgtctatccttccgataggtctgggcatcttacgctcgatttcgctacgcacgtccaatacacttaatatgaaaagattttctacctctgactggaaccctgtgcatgtggtcaggatcactacacaggctgacaccacgaatcccattatgtccatcacatcatgtctaactggctgccgctctcaa

SEQ ID NO: 3053 - DNA, 268 bp, Bos taurus
  Clone ID: 14-BOVMS1-023-Q1-E1-D5
acgcatccgccgaggacgagatgatttttgatcctactatgagcaagaagaaaaagaagaagaagaagccttttatgttagatgaggaaggggatgcccagacagaagaaacccagccctcagaaacaaaagaagtggagccagagccaactgaggacaaagatgtagaagctgatgaagaagacagtaggaaaaaagatgcttctgatgatctagatgatttgaatttctttaatcagaagaaaaagaagaaaaaatcaaaaaagat

SEQ ID NO: 3054 - DNA, 455 bp, Bos taurus
  Clone ID: 14-BOVMS1-023-Q1-E1-D9
tccggggccacccacgcgtccggatggccatggtggagcgcagagccaacctgctgcaggctgagatcgaggagctgagggccaccctggagcagacagagaggagcaggaagatcgcagagcaggagctcctggatgccagtgagcgtgtccagctcctgcacacccagaacaccagcctgatcaacaccaagaagaagctagagacagacatcactcaaatccagggagagatggaggacattatccaggaagctcgcaacgcagaagagaaagccaagaaggccatcactgatgcagccatgatggctgaggagctaaagaaggagcaggacaccagtgcccacctggagcggatgaagaagaacctggagcagacggtgaaggacctgcagcaccgcctggacgaagctgagcagctggccctgaagggcgggaagaagcagatccagaag

SEQ ID NO: 3055 - DNA, 438 bp, Bos taurus
  Clone ID: 14-LIB188-001-Q1-E1-D5
actccctaccctcaccttcctttgctaacaccctttcagcgagtgttttcttcctctgcaaaggaaaaacaaattggatttgaaaaatattctcaagtttcatagctgaaatttggggcaaatgtgtccagaccagctagcattctctataaatatcaacaaaagcaggcttggggattctgtgctttgggtccaaggatcctggcaagaaacacatgttgagattcctctagttcagaatttccagggggtggaggtagagccacctcaactgtcttcagcctcagctggctcaattgccaggcttagtggcaactgcccctgccatctcgaagcccatttttcacatttgccctctgctgtgccctcttgccagcttctgtctttggctacagcactttaggcactattctaagtcctggaatatatcactccttt

SEQ ID NO: 3056 - DNA, 409 bp, Bos taurus
  unsure (354): unsure at all n locations; Clone ID: 14-LIB188-001-Q1-E1-D9
acttcgatgctctggattgccttccagaagatggggacccctttcccaaccctgaggactgtgcaccgagacgctgccgctatgatgggcaaaccgcagtgttcgggaccaattttcaggagaagctgagccaccagcactacctcctggtgggtgctggcgctgttggctgcgagctgctcaaaagctttgccctgatgggcctgggggccggggacggtggaggcgtgactgttgccgacatggaccatgtggagctctccaacctcagccggcaattcctcttcaggtcccaggacattcataggaaaaaggcagatgtggctgcagaggccactcgccgcctgaatgcanacttgcaagatacccaactcaacctccagctggatcccactacagaggacatctt

SEQ ID NO: 3057 - DNA, 424 bp, Bos taurus
  Clone ID: 14-LIB188-002-Q1-E1-D5
accgggagggtgatgggagctgcttcccagacgccatcgaccccttcctgtgcacccatgtcatctacagctttgccaacataagcaacaatgagatcgacacctgggagtggaatgacgtgacgctctatgacacactgaacacactcaagaacaggaaccccaacctgaagaccctcctatctgttggaggatggaacttcggttctcaaagattttccaagatagcttccaagacccggagtcgcaggactttcatcaagtcggtgccaccatttctgcggacccatggctttgatggactggacctagcatggctctaccccgggtggagagacaagcggcatctcaccactctggtcaaggaaatgaaggctgagtttgtaagggaagcccaagcaggcacagagcagcttctgctcag

SEQ ID NO: 3058 - DNA, 433 bp, Bos taurus
  unsure (8): unsure at all n locations; Clone ID: 14-LIB188-003-Q1-E1-D5
catgcacncgagcgccatggcggccggatactgtcaggatgcgcggggccagtgcacatctcaggcgaatgcagaactgcgtctgggtttagaaaggcagcaatcgttacattttggcttttattctagatgcttaacttagttaaggcgacagttcaagcgtattaagtgaaggtagataaaatgtaatgacaatcgataagtctcttgcagctacacacactgtctaataatgcttacatggaatgaaaccagtgttacttagctggtgttacacacacatagaactgaagaaaagtaattctaaatgcactatggtgacagtaaaaatgcaaatacagcacagaactaagcactgcttgatatcaaggtgatggttctaacagagctgagcctggagcagtcattctactcacaaggctgtgaaagcatc

SEQ ID NO: 3059 - DNA, 465 bp, Bos taurus
  Clone ID: 14-LIB188-005-Q1-E1-D5
catgcaaccgagcgccatgggcgcgggatacaacataaatgtcctgaaacttaaaataatttcaacttaatttcaaaacaaacaccccaagaatcaactttccctttaaataaaaaaaataatcaatttaacactcttcttgaaagaactccgacaatgtaaaataagttccaattccatatatatatatcatatatatatatacatttataacttaggttgctctgcttctctatatacttttactcatgcaacgcagtgggggcggacgtgagggctacagcggcctctcggagaatgcggtgtagctcctcaccctggcgaacagcagtggcgtgtacatggttttgtttttttttaatagtcattccaaatatcgcgaaatgcattgttacaggaagtcctttgccttcccaaaagccaccccgcttctctctaaggagaaggggccaatcctcgcccgag

SEQ ID NO: 3060 - DNA, 440 bp, Bos taurus
  Clone ID: 14-LIB188-006-Q1-E1-D9
gcatgcaccctaccgccatgggcccgggataccgtgccatgtttttgacactctcctggtcgtcatacgccacccactggttgcccttggtggcataggggacctgctggtcacggaatctgtgggtggtggctccgtgggggaagtcacagatctcataataggcaaggatccctttctccttggtgaactggcctggaattcctggccctgagatgggggctcccacatctgtcttggaagaggccagagtgtagctcctcccaaaagtggggatacccatcaccagcttattggctggagcccccagcctcagcatgtagctcacagcatagtcagcgttactgaatctgtcacaacttgtatcttcctgacctcgagacaaggggctgtgttgtccgacggtctggcgcaaagctccgtgaaagtcataggtcaaa

SEQ ID NO: 3061 - DNA, 395 bp, Bos taurus
  Clone ID: 14-LIB188-007-Q1-E1-D5
gccatgggccgggatacccccaatgtccttgagcaggtaggacacactgtagaacctgctgcccacgtgtttcaccaggatctcttcacagggcgtccggggcccatgcacgcccaccagcaccatgttgttgcctgctttgctgcagtccaccgtgaagctgctcttctggcccatgtaggccttgctcagccccacgcctttggccagcaccttgctggcatcagtgggacccgggcctggggcactgtgctgggggatggtggcagtcttggtcagggagtccacatacacagatgatgtctcatggatgctgtggttgctgacgatgcggtgacctgtgactctggccttgaaggggctgcccgcaatgtggtaagggccgccgtatcact

SEQ ID NO: 3062 - DNA, 439 bp, Bos taurus
  Clone ID: 14-LIB188-008-Q1-E1-D5
accaccgaaaacagcgacacagagacctgcacactcttcaccacggggacatttaatggcatctcccaacactccgttgtcttgggaagacagctccaccgaaaaacgtaaaaagtgcagcacagcaagaaggcaattagcctcaaagaagcaacaagtgtaagtttatcagatggcacgagcaagggagacaggtcgcgggtcctctctctccatgacagaggcgttagctcgctgtcaaccgcaagagaggccgtctgccacgtcaggctgacgagacaagtcttcttcctgagcccctacgttcgtggagtgagattaactaatatttcctgcagaaacgtcatgcaacttaaagcgaaaaacaaatcaagcctgtgaatactgctgtgtgagtaaggggtctgtcagtttatcctcagcattcgaagtccttaaa

SEQ ID NO: 3063 - DNA, 243 bp, Bos taurus
  Clone ID: 14-LIB188-008-Q1-E1-D9
acctgcgcacgggcacaccgtctgggcccaccaggaacttctcgaagttccaggagacgtcgttgcggcacaccggggaccaggtgatgaacttagggtcggtcatgagagcagtggcgtcgtcacttggcgtgggcagaacctcccgaaggaaggcgaagagcggatgcgccttctcgccattcacctcgcacttttcgaagagcataaagttgggctcgaacccgccgcctggtcggacgt

SEQ ID NO: 3064 - DNA, 131 bp, Bos taurus
  Clone ID: 14-LIB188-009-Q1-E1-D5
ggatacaatcactccggcccctctatcgtctaccgcaaatgcttctaggcggactgttagctgcgttacaccctttttcatgtactaacctaacttgccacagatcacgagatgagattggcatggcttta

SEQ ID NO: 3065 - DNA, 306 bp, Bos taurus
  Clone ID: 14-LIB188-010-Q1-E1-D5
acgtgattacagagctagggtttccagcagggctccagatggtcaggcatggcttctatagcaggtctaaggaagcagcggggacgtcacaggacgaggagagggcaggtaactaccagaggcccctgtgggcatcagcaggggcctcacactgctcggtgacatcagatgcaggtctaaggagccaacgagtgactgcaggggctcgcccacccacagcttacttggcgagcgggtttctgaagctcctgccggcaaacttggccttgctgcccagttcctcttcaattctgaggatctggttgt

SEQ ID NO: 3066 - DNA, 426 bp, Bos taurus
  Clone ID: 14-LIB188-011-Q1-E1-D5
acttcattgtggaagagttagcactaagcaggaaacctttccatgctgtgaagaagctgggacagaaggttcttccttgagtgtgaccatcttcacttcagctcaggagccctgttggctgaagtgtagggcgtcctttctgattcctgaagtagatgaagagccccaccgcaaggaagagcagacccagaacgaagcccccgactccactcatcatcttgctctgagcagagtcagaccgtgccctccattctactgtgatagggcttgtctggctggggtgctccacttggcaggtgtagacctctcgatcctgaggaactgtttaaagcatcacaatggtctggaaggtcaagtctccattctggataaggctggtggaaataacccaagcctcttcttcatggccattccggaaccacctga

SEQ ID NO: 3067 - DNA, 404 bp, Bos taurus
  Clone ID: 14-LIB188-012-Q1-E1-D5
acttgctgatgctctgtttggaggcccgggtggtctccacgttgcgggtgatggtgctgccgtctgccttccaaaccacggtcacgctacccgggtacaagtcgctgatgatacacaccagggtggccttgttgccgttgagctcctccttggagggcgggaacatggtgaccgaaggtgaggacttgggctgacccatgactgtcactgtggtccctctgccgaaagcagcaaatttatctcgtccgctgtcaccaactgcacatacataatccgcctcatcctcagcctggatctatctgatcgtcagggtcgctgtgttgccatatttggacgcggacaatcggccggggactaccgacggccgactgttaccgccatagatgacagttctgaggcccgat

SEQ ID NO: 3068 - DNA, 384 bp, Bos taurus
  Clone ID: 14-LIB188-012-Q1-E1-D9
accggctggggcatggcaggcggctctggcttcccacccttctgttcagagatgggggtggtgggcagtatttcatctttgggttccacaatgctcacgtgatcaggcagaggcttcttagggccaatcttaccagtcgggtcccaaggcagcatgatctttaccttgatgcccagcacaccctgtctgagcagcacatggcgcacggcggacctgcccgggcggccgctcgaaccagactcggcagccagtagctgtccttcccaggccacatagtgatggctgtaaggctccggcccagccagtcaaagacattgaaagtcaagaaacaggacacgggaatgaagtaggccttccaggcgctggtgcccgcgatggtggact

SEQ ID NO: 3069 - DNA, 392 bp, Bos taurus
  Clone ID: 14-LIB188-013-Q1-E1-D5
accaggacccgtagcacacttccccggccatgaacttctccaggaagctgtcccaggtgccagggtcagggtgcaccttggccatgcgatagaagtggtaataggagacggccacatccttggcgttgcgggcgatgtagatcaccttgactttctgatccagcagggtcttcggaagcagggccagaggcaagtgtgtcttgaggagccgtggggctggtgtatctttcagaagctcaacacctgtgggaaccccaggggcgctgaactcaaggaagggcacccgcaagaagacaggggctctctgacacttctccaggtcaccctcctggtagatcaggtccaggatctcgcttacccaggtggtgcccgacttggggtacgtgctgatg

SEQ ID NO: 3070 - DNA, 279 bp, Bos taurus
  Clone ID: 14-LIB188-014-Q1-E1-D5
acttgtcctccgactcagtctgccggtttctctgccactccacggctacatcttctgggtagaagccggtgaccatgcaggtgacgctgagcgtgcttttgctgagctcttccttgggtgggtccaggacatacacctgcggctcccgggccggcccattgctcctggagatgatcctcacgatgggggccgagaggcctttgttgttgaccttgcacttgaactcctttcctccagtccagtcctggtgctggatgggcagggcgctgaccacgcggt

SEQ ID NO: 3071 - DNA, 435 bp, Bos taurus
  Clone ID: 14-LIB188-014-Q1-E1-D9
acttgtcctccgactcaggctgcccatttctctgccactccacgtctatctcttctgggtagaaaccggtgatcaggcaggtgaggctgagcgtgcttttgctgagctcttcccggggtggggccaggacatacacctgcggctcccgggcctgccctttggtcctggagatggtcctcacaatgggggccgggaggcctttgttgttgaccttgcacttgaactcctttccctgcagccagtcctggtgctggatgcgcagggcgctgaccacgcggtaggtgctgttgaactgctcctctctcggcttcgtcctggccgtgtgcacctccacgtcgtccacgaaccaggagaactgcacctcggggtcatcctggcccacgtccaccaccacacacgtgacctcgggcgttcccgagattgtgagggtgtcct

SEQ ID NO: 3072 - DNA, 418 bp, Bos taurus
  Clone ID: 14-LIB188-015-Q1-E1-D5
ggacgcgggataccgggaggatgatgggagctgcgtcccagacgccatcgagcccttcctgtgcacccatgtcatcgacagctttgccaacataagcaacaatgagatcgacacctgggagtggaatgacgtgacgctctatgacacactgaacacactcaagaacaggaaccccaacctgaagaccctcctatctgttggaggatggaacttcggttctcaaagattttccaagatagcttccaagactcagagtcgcaggactttcatcaagtcggtgccaccatttctgcggacccatggctttgatggactggacctagcatggctctaccccgggtggagagacaagcggcatctcaccactctggtcaaggaaatgaaggctgagtttgtaacggaagccaagcaagcacag

SEQ ID NO: 3073 - DNA, 279 bp, Bos taurus
  Clone ID: 14-LIB188-016-Q1-E1-D5
accgcgtggacagcgccctgcccatccagcaccaggactggactggaggaaaggagttcaagtgcaaggtcaacaacaaaggcctctcggcccccatcgtgaggatcatctccaggagcaaagggccggcccgggagccgcaggtgtatgtcctggacccacccaaggaagagctcagcaaaagcacgctcagcgtcacctgcatggtcaccggcttctacccagaagatgtagccgtggagtggcagagaaaccggcagactgagtcggaggacaagt

SEQ ID NO: 3074 - DNA, 431 bp, Bos taurus
  Clone ID: 14-LIB188-016-Q1-E1-D9
acaggcaggacgcctacgacggcagagattacatcgccctgaacgaggacctacgctcctggaccgcggcggacacggcggctcagatcaccaagcgcaagtgggaggcggcagattatgctgagtctttgaggaactacctggagggcacgtgcgtggagtggctccgcagatacctggagaacgggaaggacacgctgctgcgcgcagaccctccaaaggcacatgtgacccatcaccccagctctgagcgtgaggtcaccctgaggtgctgggccctgggcttctaccctgaggagatctcactgacctggcagcgcagtggagaggaccagacccaggacatggagcttgtggagaccaggccttcaggagacggaaacttccagaagtgggcggccctggtggtgccttctggagaagagcagaga

SEQ ID NO: 3075 - DNA, 439 bp, Bos taurus
  Clone ID: 14-LIB188-018-Q1-E1-D5
acttatgatcggccagcccaccgggcactttgacaagcttgttgttgttcaaatgaagttccctcaaatgaggagtgttggccaaagagccattgtcaaccgcagagatgctgttgaaactcagtcccaacttagccaaattattcagtcctttcaggctagctgcatcaactttggtgattttgttgccatcgagatgtaattcagtaagggaaggaggaagaccttgagggatggtagttatatttgtgtcagcaatgcggatgtaggagagcttcttcattccctgaaaggctccattttcaatgcctgagctcttcagcgggttggtgccaagttctacgacgatcatctggttcaatccattgaacacagactttcgcactttggtgatctcgttctcatggacacgcagctcctgaagagttttgggcatttt

SEQ ID NO: 3076 - DNA, 367 bp, Bos taurus
  Clone ID: 14-LIB188-018-Q1-E1-D9
acagcgccgaatctaccttcgaggggatcctcaaaaacccaagagcagagtctttgaacagcaggtccctctggccgggtggagagccaaagagctggaagctccgagacttgttttttccaaatttctcctgcgccttgctgagaagcttccagatcaagtcttccttgccatccacacttcgggccacgacagcatgagaagggacctgggccaggtggcactccttgaacgcatccactggcgcccgactgttgttcaggcagagaagctcatactggtccctgtcagccttctctggcaagttctcaaacactgtcgtctctttaacaaaagccacgtctccagccccgtcctgcagacactt

SEQ ID NO: 3077 - DNA, 404 bp, Bos taurus
  unsure (354): unsure at all n locations; Clone ID: 14-LIB188-019-Q1-E1-D5
actcgagaggcaaagtgtttcacatcatagattccacttccaaatccttggaatgttcatttctttggctataaagagggactagccgggaaagccaggtaatgcgtaggaaactaaactaacaaaagagcgggtggggcgggcagcgctaatgtcatcctcccggggacgggcacaggggctgttagccgcgggctgactgcggagaactgttagctggagcacggagcagccgtcctcgatgcttgggctgtcgcggggcttcagtcatccccaccacacaggtacagcgccgaatctaccttcgaggggatcctcaaaaacccaagagcagagtctttgaacagcaggtcnctctggccgggtggagagccaaagagctggaagctccgagacctgttttt

SEQ ID NO: 3078 - DNA, 403 bp, Bos taurus
  Clone ID: 14-LIB188-020-Q1-E1-D5
gccatgggcgcgggatacacagacaagttttatgactggtaatccaacagggacttaccagaacggttatgatagcactcagcaatatggaagtaacgttccaaatatgcacaatggtatgaaccaacacgcatatgcatatcctgctactgcagctgcgcctatgattggttatccgatgccaacaggatattctcaataagactttagaagtatatgtaaatgtctgtttttcataattgccctttaaaatgtgtggtaacaaaccagaatattaattaagaaacatgggaaatgcaaaaattactgcagtgcaacagtaattatggtgcactttttcgctatttaagttggatatttctctacattcctgaaacaatttttaggttttttttgtatcact

SEQ ID NO: 3079 - DNA, 411 bp, Bos taurus
  unsure (302),(373): unsure at all n locations; Clone ID: 14-LIB188-020-Q1-E1-D9
acccaattataattccataatcacagtcaatccatcaattacagtccgtccactctccccgtggggtgttctgagctttgttttgattgtgggatgctatcagtgcaatgagggcaattctttcagcagggagggggttaggccccaccccggtgagttataaagtgcaaactccccccaagtgaggcgctgggaccaggtctgggatgcacagggcagtggaggggggtgggagccgttctggaagcagggatctgccctacaggggtattctgcataaagggggccctctcttctggcangagaggctgggaaggactagatcaggcagtgggggctggtcctgtggttctcagtatggctgcctattcangaagcgggagaacatggtgagggcagcctggggcttgt

SEQ ID NO: 3080 - DNA, 428 bp, Bos taurus
  Clone ID: 14-LIB188-021-Q1-E1-D5
gatacggacgaaggattcccatagggatgatccacccagcggacctgccaaggcccgtatggcaggacttccggccttgcagctggtccagctgaaagttgctgcccttcttcacgacggccacagcataatagtgggtttggggagactctttcgtcccatagatctctgctgctactggccgcagtttgtaggggtcccggcccgcctcaaacaccatgccaccatccagggtcacagcatccgcctttttctccgcgatggcccggatacattccaaggcaaaggccctcctcacacaggtgatagagggagcacccagcttcttcatcctccactgccatcggcggcatttgaaccactcaggttgggagatggtacaagctttttttttttttcttttttttttttttccttttttctttttg

SEQ ID NO: 3081 - DNA, 412 bp, Bos taurus
  Clone ID: 14-LIB188-022-Q1-E1-D5
actatggctataccggggctttcaggtgcctggctgaggacgttggggacgttgcctttgtgaaaaacgacacagtctgggagaacacgaatggagagagcactgcagactgggctaagaacttgaatcgtgaggacttcaggttgctctgcctcgatgacaccaggaagcctgtgacggaggctcagagctgccacctggcggtggccccgaatcacgctgtggtgtctcggagcgatagggcagcacacgtgaaacaggtgctgctccaccagcaggctctgtttgggaaaaatggaaaaaactgcccggacaagttttgtttgttcaaatctgaaaccaaaaaccttctgttcaatgacaacactgagtgtctggccaaacttggaggcagaccaacgtatgaagaata

SEQ ID NO: 3082 - DNA, 414 bp, Bos taurus
  Clone ID: 14-LIB188-023-Q1-E1-D5
ggccggcggatacagccactgaaactggaagggcacgaccgcccgcagcaagatggcaatgatccgtgtgaagtaaatgtagcagatgaccatgacatagtaatgccggaacagcttcagcttggccaggttcactgccaccttcccatcagtgccagacgcgtcctggagatgccggatggaccagaccacggggaacaggatggtgccacagcagatgagatccaccaggaagaggatctccttccagataccgtagtcgctggcaccctcctcgcgggactccatgacaatgtaggccacgttggccaggacctgcagtgggatcactatcccaaagatcttcttctccttgtctgacagcacatacttgacgaaggcccagccggagccgatcaaggcaatggtgatgaa

SEQ ID NO: 3083 - DNA, 337 bp, Bos taurus
  Clone ID: 14-LIB188-023-Q1-E1-D9
ccatggcggccggatacccctttcagatgagctccagggactcctgccgcttctccaagccgaacttctcccactggtcggtgctgtccaggtagtgcacggcgatgaccgtgggcgtcataccaatcatgttctgctccccacagccggagggggtttggataaggtgcttcagccgctctccgtcgatggcgtcctccgtcatttgggccaccggagtcccctgcaggaggatcttggtctctgactcggtgtctgggacttgatcactaagatctgcagctgggacttcctctcgctgcactcccccttgacccagatgttctggattcagtgt

SEQ ID NO: 3084 - DNA, 246 bp, Bos taurus
  Clone ID: 14-LIB188-024-Q1-E1-D5
ccatggcggcgggataccattgtcagtggcttaaaaaaaaaacaaaaaaaccaccagaaaggcagaagaaacccaatcctatgaaaaccctccgactctgttgccaggagtgcagggcgccagcctctcagtcggacttctccttctccttcatgtgcaagaagacgacgctgaagatgaagagcccgagcatcatggagaaggcgctggcgtagtaggggtaggccgaggggatgaagcgctcgt

SEQ ID NO: 3085 - DNA, 450 bp, Bos taurus
  Clone ID: 14-LIB188-025-Q1-E1-D5
cgggcccgggatacaaacctatacctggcaccaatgtgcatatatgaagtcatgtatagctgctggcatgagaaacctaaaggccgcccgacgtttgctgagctgctacaggttcttacagagattgcagaaacctggtgacctaaagggactgccaacccagaggatcatcctgcaggactgtcatgaaaggaaaccctgggtgaagtcactgatggtgaatatcaccctttagagccactgactctaagaaacagtgcaaagattacaggcttttccaatttgttaaagcttgagagtattctgacaataacttttctacatatatgtttgagagtgacttctaaacttggactattctataatattctttatgtctcatgcatgaagaatgaaaaaattgctccatagtcgtctttatagtggctgctcttcacgagaagcgccctg

SEQ ID NO: 3086 - DNA, 406 bp, Bos taurus
  Clone ID: 14-LIB188-026-Q1-E1-D5
acccgaaacagcacggcatcatcaccaactgggacgacatggaaaagatctggcacaactcattctacaatgagcttcgtgttgcccctgagcagcatctaaaccttctcaacatggagcccctgaaccccaaagccaaccgggagaacatgaccaacattatgtttgagactttcagtgtcccagccatgtatgtggcaattcacgcagtgctgtccctctacgcctctggacgcacaactggcattgtgctggactctggagatggtgtcacccacaacgtgcccatctatgacggctacgccctgcaccacgcaaatatgcgtctggacctgactggccgagatctcaccgactacctcatgaagatcctgaccgagcgatgctagtccttcgtgaccaccgc

SEQ ID NO: 3087 - DNA, 424 bp, Bos taurus
  Clone ID: 14-LIB188-027-Q1-E1-D5
acatggatatagctatttatttctatctactagaaaataaagtcatattttttcttaatttaatattggtcattgctaatcagaacacactattgccaggaacacagtagttattgttaaaatcagctgcactagatacaatttgaaaatatccagcaccaggttaattccaataacgaacccaatagattagttaatgctatgagaagactaaagagaaagagaaaagagacgcagacccaggcctggctccacatgctactaactaccagctctcagatgtgtcactgggaacaatacacactccatgcgttttgctacatctccagaagaggtaaggacttgagtccacacggggatgctcgcttgcaagtccttgaggcccacagcctggtgtgtttcacgcacagataaggtcctccct

SEQ ID NO: 3088 - DNA, 393 bp, Bos taurus
  Clone ID: 14-LIB188-027-Q1-E1-D9
actgttcagtgatgactgggaaatgcagacttcagaaagctggctcttccagtttgaaaagtgaagcggacctaagacatcaccaggacaggagcggctcagtgttggcgttggacgctgtcgcccagccgtgccctccaccgggaccaccagtgcacatctggccagtgatcttccaggcgcatccaacctgcgttcaccatttctccaccccagttaggtgacctccaagaggcagcagtgtccttgaggccctgccttcggcatgttacaaagcctcagagcggaactctctgctgaggctctctgtggatgacctccttccatggtgaaaagggggtcctgcacaccaagctttcaacctcatgccttgcatagtaaaaagcgttaggg

SEQ ID NO: 3089 - DNA, 420 bp, Bos taurus
  unsure (266),(335),(377),(405): unsure at all n locations; Clone ID: 14-LIB2809-001-Q1-E1-D5
acagcagaaaggcctgaatgggcatatctctctggggatagggcactgctttctggggaacaggcaggactttggactgagaaagggacagcacggactgaggaggaaacatgacagttggaggaagaggctggtgaggctggtgcatccaagactggagcagaggcagaggaaggtgcagattttcaacatcagtgagagtcaggctctggctttcagtaaaggctcaactggatatttagggaagggcatttctttgtgcttangagccatagcctccttcactttggagactcccattacttcaggctgaaggaaaggcggcaccaccacangggtttgagtaagaagatggatgttttgtgggaagctgttanggatgggcccagggaagggatagactanagactgtgtctgggc

SEQ ID NO: 3090 - DNA, 145 bp, Bos taurus
  Clone ID: 14-LIB2809-001-Q1-E1-D9
acccccttgaagctaactcatctctgagccctgggccctgtagtgacaatggacatgtaaggactaatctccaggggtgcatgaatggcgctctggacttttgacccttgctcgatgtccctgatggcgcttttaatgcaacagt

SEQ ID NO: 3091 - DNA, 381 bp, Bos taurus
  Clone ID: 14-LIB2809-002-Q1-E1-D5
acagcagaaaggcctgaatgggcatatctctctggggatagggcactgctttctggggaacaggcaggactttggactgagaaagggacagcacggactgaggaggaaacatgacagttggaggaagaggctggtgaggctggtgcatccaagactggagcagaggcagaggaaggtgcagattttcaacatcagtgagagtcaggctctggctttcagtaaagggctcaactggatatttagggaagggcatttctttgtgcttaggagccatagcctccttcactttggagactcccattacttcaggctgaaggaaaggcggcaccaccacaggggtttgagtaagaggagggatgttttgtgggaagctgttaagga

SEQ ID NO: 3092 - DNA, 447 bp, Bos taurus
  Clone ID: 14-LIB2809-003-Q1-E1-D5
ccgatacccaggcatcacatggtctcggcaacgctgtaagttgatagcagccaggtcaaagccgtggatcttgtgagtgggctggaaaagcttgttgcgcagtcactcgtcaccattttatcctgattcatcagtttggacttcttggccagcagaccccgcaccagagggtcaattccaccgtctttgattatcctccaggtgttgaagaagagggtgtgtagggggagctctgcttccggactccatggctggtaattctcatccaggcgggacacagtggagggaacctccatgtggccaaagcggaaggcaaaggtgaagacattggaaattcggggatccacaaattaataatagcccttggtaggccggaatcaacttcgcatcctaataactaacaaaatgggttaggtagtccctaaaggtgatgatcggtatgaaggc

SEQ ID NO: 3093 - DNA, 380 bp, Bos taurus
  Clone ID: 14-LIB2809-004-Q1-E1-D5
actacagtagaaagggcaattcattaagtagatttagaatccaagctactactactgagaaattacagtatttattcagttcagttcagtttagtagctcagtcgggtccgactctttgcgaccccatgagtcgcagcacaccaggcctccctgtcgagcactaactcccggagtttacccaaactcatgtccatcgaatcggtgatgccatccagccatctcatcctctgtcgtccccttctcctccagcccccagtccctcgcagcagcagggtctttcccagtgagtcaagtcttcgcatgaggtggccgaagtaggtgggtgacagtgtttattagagattcagtaagttggaagttcagagtcctcagtttcaaa

SEQ ID NO: 3094 - DNA, 408 bp, Bos taurus
  Clone ID: 14-LIB2809-005-Q1-E1-D5
ctgaatgggcatatctctctggggatagggcactgctttctggggaacaggcaggactttggactgagaaagggacagcacggactgaggaggaaacatgacagttggaggaagaggctggtgaggctggtgcatccacgactggcgcataggcagacgaaggtgcagattttcaacatcagtgagagtcaggctctggctttcagtaaagggctcaactggatatttacggaacggcatttctttgtgcttaggagccatatcctccttcactttggacactcccattacttcaggctgaatgaaaggcggcaccaccacaggggtttgaataagaggagggatgttttgtgggaggctgttagggatgggcccatggaagggatacactacagactgtgtctgggc

SEQ ID NO: 3095 - DNA, 346 bp, Bos taurus
  Clone ID: 14-LIB2809-009-Q1-E1-D5
gccatcggcccgggatacacatatatcagtcttacatataactatgttacactggaaaaccaaatctgaagtggaaactattgtgaaagcctattttggtaagcacaataaactttggttgaaaacatttccttgaggttttaagaaatacatactacagccacccccatgcttctgagaaactgttagattcttaaagagcatgtgataaaaagggtgcggcaaaacttcacctctggatttgtctcagaattcctgaatttattctgctcaaactcatcttccacgtgccttacccaagattacaaagggaaggaccacttacagagggccttacaaacatgtc

SEQ ID NO: 3096 - DNA, 409 bp, Bos taurus
  Clone ID: 14-LIB2809-009-Q1-E1-D9
acaggaagggtgaagcccagctgctcatgaacgagttcgagtcagccaagggcgactttgagaaagtgttggaagtaaacccccagaataaggctgcaagactgcagatctccatgtgccagaaaaaggctaaggagcacaacgagcgggaccgcagaatctatgccaacatgttcaagaagtttgcagagcaggacgcaaaggaagaggccagtaaaacaatgagcaagaagactttagaaggggtcaccaacgagaaagaaataggaagtccatcgatggacgagcataaagccgaagggcacgtatgacaccacgccacggagggaagagtcctaacacactcggcccctcctccatgggctttcacccaactcaggactaaacagtgtttaatgtaaagtttgtt

SEQ ID NO: 3097 - DNA, 415 bp, Bos taurus
  unsure (391): unsure at all n locations; Clone ID: 14-LIB2809-010-Q1-E1-D5
gggatacctcacatagggaataacctttgtcttaggttgaatccatggcttcatagctttctgatgctgataaacagtcttgagatactggggcaaggcgaatttctggtaacgctggctgatttttttcagaaaatttaggcgattcttttcttcttcagtcagtttagttttcttagtgaatacttctgttgattccatgtcaacggtcttctttgaattttcctcactggtggagagctgctctctgttcagagtgggagtaatgggaacagcatttctcttaacctgatcccatgggttcaaaacaattggaccttgatacagatactggagatactgggggaacttctgataaaactgattgatttcattcagtgctttctggtantgcttatcgtccacagtaatctta

SEQ ID NO: 3098 - DNA, 394 bp, Bos taurus
  Clone ID: 14-LIB2809-010-Q1-E1-D9
cgtggtcacggccgaggtacagcagaaaggcctgaatgggcatatctctctggggatagggcactgctttctggggaacaggcaggactttggactgagaaagggacagcacggactgaggaggaaacatgacagttggaggaagaggctggtgaggctggtgcatccaagactggagcagaggcagaggaaggtgcagattttcaacatcagtgagagtcaggctctggctttcagtaaagggctcaactggatatttagggaagggcatttctttgtgcttaggagccatagcctccttcactttggagactcccattacttcaggctgaaggaaaggcggcaccaccacaggggtttgagtaagaggagggatgttttgtgggaagctgtt

SEQ ID NO: 3099 - DNA, 420 bp, Bos taurus
  Clone ID: 14-LIB2809-011-Q1-E1-D5
acccaggcatcccatggtctcggcaacgctgtaagttgatagcagccaggtcaaagccgtggatcttgtgagtgggctggaaaagcttgttgcgcagctcactcgtcaccattttatcctgattcatcagtttggacttcttggccagcagaccccgcaccagagggtcaattccaccgtctttgattatcctccaggtgttgaagaagagggtgtgtagggggagctctgcttccggaccccatggctggtaattctcatccaggcgggacacagtggagggaacctccatgtggccaaagcggaaggcaaaggtgaagacattggaaattcggggatccacagagttattatagccttggtagggcgggatccacttctgcatctcactacctagcacaatgggtaggtagtcccgaa

SEQ ID NO: 3100 - DNA, 428 bp, Bos taurus
  Clone ID: 14-LIB2809-012-Q1-E1-D9
acaccctggatccctccagggggctggggccaccttctgagtgaggcactttggaacctgcctttgcttcttgtgcttcccagtgaaggctaggcaccccctgcttctgcaagcctcgcactgtccgctgggagcactgactcagggtaggcagcttatccagtaagccgggggcatccagcatgctctctggttctgacccagacagaggagactaaaaacaaatcctcttttgctccatggctggctctggcacaacatgagcattcggcttggccgtgcctcatgagtgcgaatgcctgtgcccaggatgtttctagcaggctttgccagccctgtctggagtcaacaattttggaaaggaccacaaggttttaaatgaaaactctgaaggccaattaaaagtggcaccttgctcaactttgtaa

SEQ ID NO: 3101 - DNA, 434 bp, Bos taurus
  unsure (354),(378),(390),(406),(425): unsure at all n locations; Clone ID: 14-LIB2809-014-Q1-E1-D9
acagcagaaaggcctgaatgggcatatctctctggggatagggcactgctttctggggaacaggcaggactttggactgagaaagggacagcacggactgaggaggaaacatgacagttggaggaagaggctggtgaggctggtgcatccaagactggagcagaggcagaggaaggtgcagattttcaacatcagtgagagtcaggctctggctttcagtaaagggctcaactggatatttagggaagggcatttctttgtgcttaggagccatagcctccttcactttggagactcccattacttcaggctgaaggaaaggcggcaccaccacaggggtttgggtaagagganggatgttttgtgggaagctgttanggatgggcccanggaagggatagactanagactgtgtctgggcaaangggtggatt

SEQ ID NO: 3102 - DNA, 133 bp, Bos taurus
  unsure (31): unsure at all n locations; Clone ID: 14-LIB2809-015-Q1-E1-D5
ctaactcgtctctgagccctgggccctgtantgacaatggacatgtaaggactaatctccaggggtgcatgaatggcgctctggacttttgacccttgctcgatgtccctgatggcgcttttaatgcaacagt

SEQ ID NO: 3103 - DNA, 435 bp, Bos taurus
  Clone ID: 14-LIB2809-017-Q1-E1-D5
gccatgggcgcgggataatgaacatactgccaagcaagagctgacggtcacaaggaaaggtgcaatgatgaagagttttttcctagttgtgactatcctggcattaaccctgccatttttgggtgcccaggagcaaaaccaagaacaaccaatacgctgtgagaaagatgaaagattcttcagtgacaaaatagccaaatatatcccaattcagtatgtgctgagtaggtatcctagttatggactcaattactaccaacagaaaccagttgcactaattaataatcaatttctgccatacccatattatgcaaagccagctgcagttaggtcacctgcccaaattcttcaatggcaagttttgtcaaatactgtgcctgccaagtcctgccaagcccagccaactaccatggcacgttcaccacacccacattt

SEQ ID NO: 3104 - DNA, 246 bp, Bos taurus
  Clone ID: 14-LIB2809-018-Q1-E1-D9
acttttagtagtcggtgtccagcacaaggactttgttctcgttcaaggcatcgatcttgaacaccgcagggatcttggttttttctgcaatgatcttcttctgagcacactcaccgttctcccatttctgcagcaggatctccaggtcgccctcaggggtgggcttcagctcctccacatacactctcaggggggcactctgggcgtccagcagggagatgtcgctggccgccatggccaaggagt

SEQ ID NO: 3105 - DNA, 379 bp, Bos taurus
  Clone ID: 14-LIB2809-019-Q1-E1-D5
gcgggataaattgagttcttccagctctcttgcaagggccagagccaccaggcaggcaaggatgaggaccttcatggctctcaattccttttgtacaagcttttttttttttttttttttttttttttttctttttttttttttttttttttttttttgccttaaaatgtaatttattgaaaagaagaaagacaaaatctcagttaatgcacacaattttttgatatgatggcacttacaggagaagtgattcaaaggcttttaaaacattttccatacagaaatttaatgaagactttaattccctttgactcagtggcctttataccagcatgatactactggaatttaggtaacaggctgttaggacaatttcact

SEQ ID NO: 3106 - DNA, 421 bp, Bos taurus
  Clone ID: 14-LIB2809-021-Q1-E1-D5
acctggagagattgtggaaagcctttcaagcagtgaggaatctattacacgcatcaataagaaaattgagaagtttcagagtgaggaacagcagcaaacagaggatgaactccaggataaaatccacccctttgcccagacacagtctctagtctatcccttccctgggcccatccctaacagcctcccacaaaacatccctcctcttactcaaacccctgtggtggtgccgcctttccttcagcctgaagtaatgggagtctccaaagtgaaggaggctatggctcctaagcacaaagaaatgcccttccctaaatatccagttgagccctttactgaaagccagagcctgactctcactgatgttgacaatctgcaccttcctctgcctctgctccagtcttggatgcaccagcctcac

SEQ ID NO: 3107 - DNA, 382 bp, Bos taurus
  Clone ID: 14-LIB2809-021-Q1-E1-D9
accccaatgaagctaattcgtctctaaccctggggccgtgttgtaaaagggcatatgtagagtaatctccacaggtgcatgaatggcgctctggacttttgacccttgctcgatgtccctgatggcgcttttaatgcaacagtacctgcccgggcggccgctcgaacagaaagaggtgggggtgggcagtatctggatccagagtcacatccactgcatgcaatgtagcccttttccatttgagctcttccaggagtttctctggaaaacaaacagaaataccttaatgaccttctagcctttagagctgaattcattcctcctctgtctggatctttccttgtatagtctccaggtaaaaaatatggacccaattgtgaaa

SEQ ID NO: 3108 - DNA, 444 bp, Bos taurus
  unsure (17): unsure at all n locations; Clone ID: 14-LIB2809-022-Q1-E1-D5
tccctaccgccatgggngcgggatacaactaaatttggagttgatattaatagaaattattccaaaattattcttaggtcacaaataactactatcccacataaaaagggaaaaatcccacccaattaaggaaaaggtatcctgtgtatgtttccatggcaatgagtttatgcattctcagattttgtccggctagttatccaccctttatctgatgcatttattccatctctcagagagaaccatatagattcctgacggcatccaggacacgtggctcgtggtggacacacttcatggtggatactgctactataaaaatactcagaacttaagagaattccaagatgctttataaaaagcattagtcatgcctcaaaactgccctttgaggtaggtcagtattattatcccattttaacagaaggaaaactgacgcacatt

SEQ ID NO: 3109 - DNA, 367 bp, Bos taurus
  Clone ID: 14-LIB2809-023-Q1-E1-D5
gcccgggatacccatcatctgccaccggggctgcaccctccgctttgaactccttggctgtgagttgaatggatgcactgaacccctaggcctgaaggataataccatccccaacaagcagatcacagcctccagctactacaaaacctggggcctgagtgcctttagctggtttccctactacgcacgactggataatcagggcaagttcaacgcctggaccgcccagaccaacagtgcctctgagtggctgcagattgacctgggctcccagaagcgagtcacgggcatcatcacccagggtgcccgagactttggccacattcaatatgtggctgcctacagggtggcctatggtgatgatggt

SEQ ID NO: 3110 - DNA, 182 bp, Bos taurus
  Clone ID: 14-LIB2809-025-Q1-E1-D5
ttgagttcttcaagctctcttgcaagggccagagccaccaggcaggcaaggatgaggaccttcatggctctcaattccttttttcttttttttttttttttttttttttttttaccttaaaatgtaatttattgaaaagaagaaagacaaaatctcagttaatgcacacaattatttgatat

SEQ ID NO: 3111 - DNA, 435 bp, Bos taurus
  Clone ID: 14-LIB2809-028-Q1-E1-D9
gggcccgggatacagcagaaaggcctgaatgggcatatctctctggggatagggcactgctttctggggaacaggcaggactttggactgagaaagggacagcacggactgaggaggaaacatgacagttggaggaagaggctggtgaggctggtgcatccaagactggagcagaggcagaggaaggtgcagattttcaacatcagtgagagtcaggctctggctttcagtaaagggctcaactggatatttagggaagggcatttctttgtgtttaggagccatagcctccttcactttggagactcccattacttcaggctgaaggaaaggcggcaccaccacaggggtttgagtaagaggagggatgttttgtgggaggctgttagggatgggcccagggaacggatagactagagactgtgtctgggcaaa

SEQ ID NO: 3112 - DNA, 383 bp, Bos taurus
  unsure (373): unsure at all n locations; Clone ID: 14-LIB2809-031-Q1-E1-D5
acttttcatatcttttaccaattgttatctggagcaggagaacatctgaagtctgatttgctccttgaaggatttaataactacagatttctctccaatggctatattcctattccgggacaacaagacaaagataacttccaggagacaatggaggcaatgcatataatgggcttctcccatgaagagattctgtcaatgcttaaagtggtatcttcagtgcttcagtttggaaatatttctttcaaaaaggagcgaaacactgatcaagcctccatgccggaaaatacagttgcacagaagctctgccatcttcttggcatgaatgtgatggagttcactcgggccattctcaccccccggatcaaggtcngccgagacta

SEQ ID NO: 3113 - DNA, 360 bp, Bos taurus
  Clone ID: 14-LIB2809-031-Q1-E1-D9
cgtatgtgtatgatacataaggttatgtattaattgtagccgcgttctaacgacaatatgtacaagcctaattgtgtagcatctggcttactgaagcagaccctatcatctctctcgtaaactgccgtcagagtcggtttggttggacgaaccttctgagtttctggtaacgccgtcccgcacccggaaatggtcagcgaaccaatcagcagggtcatcgctagccagatcctctacgccggacgcatcgtggccggcatcaccggcgccacaggtgcggttgctggcgcctatatcgccgacatcaccgatggggaagatcgggctcgccacttcgggctcatgagcgcttgtttcggg

SEQ ID NO: 3114 - DNA, 431 bp, Bos taurus
  Clone ID: 14-LIB2809-032-Q1-E1-D5
acaatgaagaaagctgtctgggaaagggagaaccatagccttggctcagagccttgaggcacagcctgaagacttcctacttaacatctaggaaggctgctttagtgtttttctaggccacgggtctgtctggaatggagagccaatggcctcctatagataccaatgtgtcatctagaaaggatatgctggattcagtttgccacatctcactaggccgactttgtaaccttgtttgtcacctgtctacactgcttaagcatttgatattgaatgaataatgtagagttgatgaaaactttaaaattaaacatgttttcagtcacatgttatttctttgaaactgaggactctgaattttcaacttattgaatctctaataaacactgtaactccaatattttggccacctcatgcgaagacttgactca

SEQ ID NO: 3115 - DNA, 312 bp, Bos taurus
  Clone ID: 14-LIB3057-001-Q1-K1-D9
tcggcagcggaccgggctggcagttcctttctcggaaggagagggtcttctgccatggagtcctacgatgtaatcgccaaccagcctgtcgtgatcgacaacggatcccgtgtgattaaagctggttttgctggtgatcagatccctaaatactggttcccaaactatgtgggcagacccaagcacgttcgtgtcatggcaggcgccctcgaaggtgacatcttcattggccccaaagccgaggagcaccgagggctgctctccatccgctaccccatggagcacggcatcgtcaaggactgggatgacatg

SEQ ID NO: 3116 - DNA, 201 bp, Bos taurus
  Clone ID: 14-LIB3057-002-Q1-K1-D5
ctctcaaccacccacccaccagtctcggataccatggcggcagtggcggcagcgtgggcggaatttctcatcatcggctggtacattttccgcgtgctgctgcaggtgttcaggtactccctgcagaagctggcatacacggtttcgagaaccggactgcacgtgctgggagagctccgtcagcggacccccaactgatgc

SEQ ID NO: 3117 - DNA, 174 bp, Bos taurus
  Clone ID: 14-LIB3057-003-Q1-K1-D5
cgcggacgctacgcattgacgagtttgatgaccgctgcgctgtgacatgaagcctaggtcgcgatctcctgtggatccaccatatgtacatatctaaatggtagtcacaaatatccaaactagaactttccaagcttaacttgcaaatggtacaatgcatacagcaattgaaca

SEQ ID NO: 3118 - DNA, 358 bp, Bos taurus
  Clone ID: 14-LIB3057-003-Q1-K1-D9
gggattcttacttagaggcattcagtcataatcccacagatggtagcttcggaccgttggcttctcagccaagcacatacaccaaatgtctgaacctgcggttcctctcgtactgagcaggattaccatggcaacaacacatcatcagtagggtaaaactaacctgtctcacgacggtctaacccatctcacgttccctattagtgcgtgaacaatccaacgctagctgaattctgcttcacaatgataggaagagccgacatccaaggatcaacaagcgacatcactatgaacgcttggccgccacaagccagttatccctgtggtaacttatgtgacacctgctgcttaaaacccc

SEQ ID NO: 3119 - DNA, 457 bp, Bos taurus
  Clone ID: 14-LIB3057-005-Q1-K1-D5
gccgggacacaggtgtcgtgaaaaccaccgttaaacctaagccaaaatgggaaaggagaagacccacatcaacatcgttgtcattgggcacgtagattcagggaagtctaccacgactggccatctgatctataaatgtggcgggatcgacaagagaacaattgaaaagttcgagaaggaggctgccgagatgggaaagggctccttcaaatatgcctgggtcttggacaaacttaaagctgaacgtgagcgtggtatcaccattgatatctccctgtggaaatttgagaccagcaagtactatgttaccatcattgatgccccaggacacagagacttcatcaaaaacatgattacaggcacatcccaggctgactgtgctgtcctgatcgttgctgctggtgttggtgaatttgaagccggtatctccaagaacgggcagacccgtgagcatgcc

SEQ ID NO: 3120 - DNA, 420 bp, Bos taurus
  Clone ID: 14-LIB3057-005-Q1-K1-D9
cggacgcgtggggagcttcctggtgaagtgtgtttcttgaaatcatcaccaccatggacagcaaaggttcgtcgcagaaagggtcccgcctgctcctgctgctggtggtgtcaaatctactcttgtgccagggtgtggtctccacccccgtctgtcccaatgggcctggcaactgccaggtatcccttcgagacctgtttgaccgggcagtcatggtgtcccactacatccatgacctctcctcggaaatgttcaacgaatttgataaacggtatgcccagggcaaagggttcattaccatggccctcaacagctgccatacctcctcccttcctacccctgaagataaagaacaagcccaacagacccaccatgaagtccttatgagcttgattcttgggttgctgcgctcctggaatg

SEQ ID NO: 3121 - DNA, 423 bp, Bos taurus
  Clone ID: 14-LIB3057-006-Q1-K1-D5
ctgccttaacactacatcactcaaattaacatactgactaccagggcaacttctcagtgctaaagtgttaggaatcaaaaaagaatactattttaaatgagatacactgagcatgcttgccttttactcacgtgggagaaaaatccaaaattaaagttttcaaaagcttaatgtaacaagatagcctacttactagctgactgaataccaccccaaaaagagtgctgaatttttactacacatgctcaaaaatgcagagagtaatgctgaacttaagggcttagatgtagattctctggtcattgagcacatccaagtgaacaaagcccccaagatgcggcgcaggacttacagagctcacggtcggatcaacccctacatgagctctccatgccacattgagatgatccttactgaaaaaga

SEQ ID NO: 3122 - DNA, 276 bp, Bos taurus
  Clone ID: 14-LIB3057-007-Q1-K1-D5
tgcaaactaaggatgaagatgcacggacttccgttctgtataacctgctccactgggtgcgcatggatttacgcaagattgacacttaccttaagctcctgaatcgcacaatcatctacaacaacaactgttaatcccacattcattctttccatttctgagatggttcttaatgatccattccctgtcaaacttctctgagctctatagctttgtaatgcatgcttggctctaatgggtttcatcttaaataaaaacagactctgtagcgatgtc

SEQ ID NO: 3123 - DNA, 430 bp, Bos taurus
  Clone ID: 14-LIB3057-009-Q1-K1-D5
gagaaagcatcttttaatttcatggctgcattcaccatctgtagtgattttggagccccaaaattgaagtctgtcactgtttccattgtttccccatctatttgccatgaagtgattggactggacgtcatgatcttagttttctgaatgttgagttttaagccaactttttcacttgtcaaaaattggtggactataaatataagacaaaaatcatatgatatcacttatatgtggcatctaaaaaatgatgcaaatgaacatataaacaaaaccaaagcagacttacagacatagaaaagaaacatggttaccaaaggggagcaagggggaaaaggataaattagaagtttaggattagcagatactactatagtactattagatactactatatataaaatagattaataagatcctactgtatagc

SEQ ID NO: 3124 - DNA, 394 bp, Bos taurus
  Clone ID: 14-LIB3057-009-Q1-K1-D9
gccccgtgtcccgggacgaagggctctccgcaccggaccccggtcccgacgcgcggcgggggcgcgccgcgccgcgccccgggggacgcgggcgacggcccgccggcggggacggcgggggaccggctatccgaggccaaccgaggctcccgcggcgctgccgtatcgttccgcctgggcgggattctgacttagaggcgttcagtcataatcccacagatggtagcttcgccccattggctcctcagccaagcacatacaccaaatgtctgaacctgcggttcctctcgtactgagcaggattaccatggcaacaacacatcatcagtagggtaaaactaacctgtctcacgacggtctaaccccaactcacgttgcctattagtgggtgaac

SEQ ID NO: 3125 - DNA, 408 bp, Bos taurus
  Clone ID: 14-LIB3057-010-Q1-K1-D5
ggcgagcgctcgccgcagtcttgacaggaacgggacgggcccaacatggcgggggccgggggcgacgactcgctctaccccatcgcggtgctcatagacgagctccgcaacgaggatgttcagcttcgcctcaacagcatcaagaagctctccaccattgccttggccctcggggtcgaaaggacccgcagtgagcttctgcccttccttacagacaccatctacgatgaggacgaggtcctcctggccctggcggagcagctgggcaccttcaccactctggtcggaggccccgagtacgtgcactgcctgctgccgcccctggagtcgctggccacggtggaggagacggtggtgcgggataaggcagtggagtccctgcgggccatctcgcacgagcactccccc

SEQ ID NO: 3126 - DNA, 435 bp, Bos taurus
  Clone ID: 14-LIB3057-011-Q1-K1-D5
actcttggtttccttttaatggttctcttatgaacaccttcctttcttggttcactccctttccttttttcaaaaaacagttgggaaatagggacacccaagatgactggtttatacctcaaccaccttttcagacctgtgtcagtcttaaacaagctaagtgaaagaaactgagtattttctgaaatacggatattattatcaatacagttttatgcaacagactctgcttactgtaaatctttcttgacaagatatacagacttaggaagatggagaaagaaaagaacagaggagactcttggaagcagcactgtgttcgtcaaagtgaaagtgaagtcactcggtcgtgtctggctctttgcgaccccatggactggggcctaccgggctcctccgtccatgggattttccgggcaggagtactggagtggg

SEQ ID NO: 3127 - DNA, 360 bp, Bos taurus
  Clone ID: 14-LIB3057-011-Q1-K1-D9
gctgggaccctgtacacatatcctgaaaactggagagccttcaaggccctcagtgccgcgcagtacagcggggctcaggtccgcgtgctctccgcaccaccccacttccattttggccaaaccaaccgcacccccgaatttctccgtaaatttcctgctggcaaggttccagcctttgagggtgacgatggattctgtgtgttcgagagcaatgccattgcctactatgtgagcaacgaggagttgcggggaagtactcccgaggcagcagcacaggtggtgcagtgggtgagctttgctgatagcgacatagtgccaccggtcagcacctgggtgttccctaccttaggcatcatgcac

SEQ ID NO: 3128 - DNA, 434 bp, Bos taurus
  Clone ID: 14-LIB3057-012-Q1-K1-D5
gcaggaacaggctgaaccgtgtaccctcccttagcaggcaacctagcccatgcatgagcttcagtagatctaaccattttctctttacacttagcaggagtttcctcaattttaggagccatcaacttcattacaacaattatcaacataaagccccccgcaatgtcacaataccaaacccctctgttcgtatgatccgtaataattaccgccgtactactactactctcgctccctgtattagcagccggcatcacaatgctattaacagaccggaacctaaatacaaccttcttcgacccggcaggaggaggagaccctattctatatcaacacttattctgattctttggacaccccgaagtctatattttaatcttacctgggtttggaataatctctcatatcgtgacctactactcaggaaaaaaaga

SEQ ID NO: 3129 - DNA, 275 bp, Bos taurus
  Clone ID: 14-LIB3057-012-Q1-K1-D9
cggacgcgtgggtgaagatgcacgttattccgctttatataacctgctccactgggggcgcagggattcaagcaagattgacacttaccttaagctcctgaattgcagaatcatctacaacaacaactgctaagcccacattcatcctttccatttctgagatggttcttaatgatccattccctggcaaacttctctgagctttataactttgtaatgcatgcttggctctaatgggtttcatcttaaataaacacagactctgtagcgatgtc

SEQ ID NO: 3130 - DNA, 425 bp, Bos taurus
  Clone ID: 14-LIB3057-013-Q1-K1-D5
gcatggtggctgtaatggatagtgacacgactggcaaactgggcttcgaagaatgcaggtacttgtggaacaacatcaaaaagtggcaggccgtatacaaacagtttgatgttgaccgttcagggaccattggcagcagtgaactcccaggggcctttgaggcagcaggattccgcctgaatgaacatctctacaacatgatcatccgacgctactcagatgagggagggaacatggattttgacaatttcatcagctgcctggtcagactggatgccatgttccgtgccttcaaatctctcgacaaagatggcactggacaaatccaggtgaacatccaggagtggctgcagctgaccatgtactcctgaacgggagccccaggcctgccccctcatcaccttgctgtaggagtcaccttggac

SEQ ID NO: 3131 - DNA, 437 bp, Bos taurus
  unsure (423): unsure at all n locations; Clone ID: 14-LIB3057-013-Q1-K1-D9
tgtttcttgaaatcatcaccaccatggacagcaaaggttcgtcgcagaaagggtcccgcctgctcctgctgctggtggtgtcaaatctactcttgtgccagggtgtggtctccacccccgtctgtcccaatgggcctggcaactgccaggtatcccttcgagacctgtttgaccgggcagtcatggtgtcccactacatccatgacctctcctcggaaatgttcaacgaatttgataaacggtatgcccagggcaaagggttcattaccatggccctcaacagctgccatacctcctcccttcctacccctgaagataaagaacaagcccaacagacccaccatgaagtccttatgagcttgattcttgggttgctgcgctcctggaatgcccctctctatcacctagtcaccgaggtccggngtatgaaaggagcc

SEQ ID NO: 3132 - DNA, 406 bp, Bos taurus
  Clone ID: 14-LIB3057-015-Q1-K1-D5
cagcactatatatgagcgctcaaccagctgcggctacgtgcccgagcgcgagcggtaggtgcgctggctggaagtggccgccttcatgccagctatgcagttctccgttccgccctggcggtacgacgctgaagtggtggccattgcgcacaagttcacggcgctgagggcctcgctcgtggcgccactgttgttggaactggcgggtgaggtcactgacacgggcgaccccatcgtgcgccccctctggtggatcgcgcccggcgatgagacggcgcaccgcatcgactcacagtttcttatcggagacacgctgctcgtggcacccgtactggagccgggcaagcatgatcgggacgtctacctgcctgcatgcaagtggctcatctataaaggttgagctttt

SEQ ID NO: 3133 - DNA, 426 bp, Bos taurus
  Clone ID: 14-LIB3057-016-Q1-K1-D5
cctgttctcccctccagcactcctggagatagacgctcaagcctgacgcctctgaaagggcagcagcagtcgcctgatccacagacctcaggaaattcgctttgaccgttgcatgcctcaagctctggctcgagctaagggggaataaccgggcagatttctgggtccttataaaaagacaaaataaaaccaaaatgcatcaccaacacacgaccaattgatacactggcatgttagcttggccttgcagagacggagaggagagaagaggagctggtgtgttttccacctctaacagcttctggctatttcacagcttcagtggttgaaccctattgttggggagggaaaaagagaagtaaagccctgaggccatgtgcaaggaattctgctttggctacagagatactggaagtctatgataat

SEQ ID NO: 3134 - DNA, 423 bp, Bos taurus
  Clone ID: 14-LIB3057-016-Q1-K1-D9
ctcaggatgaattaaaagaagtgtttgaagatgctgtggagatcagattagtcagcaaggatggaaagagtaaagggattgcttatattgaatttaagacagaagctgatgcagaaaaaaccttggaagaaaagcagggaacagagatagatgggcgatccatttctctgtactacaccggagagaaaggtcaaagtcaagaccatagaggtggaaagaacagcacttggagtggtgaatcaaaaaccctggttttaagcaatctctcctatagtgcaacggaagaaactcttcaggaagtatttgagaaggcaactcatatcaaggtgccccagaaccaaaatggcaaatctaaagggtatgcatttatagaatttgcttcatttgaagatgctaaagaagctttaaattcatgtaataaaa

SEQ ID NO: 3135 - DNA, 340 bp, Bos taurus
  Clone ID: 14-LIB3057-019-Q1-K1-D5
ggctgaccgccgcgatccacagtctggaactgcgtgggctccggaggaaccaagtcggcagctggtcagcgggaggccgattctttctagggctaagatggatcttgtactcagtattgcagattattatttttttacaccgtacatatatccagccacatggccagaggacaacatcttccgacaagctatcactctcctgattgtaacaaatctcggtgcttttatactggatttcttctttgcaacactgagttattattttgtctatgatcatttattaatgaaacacccacaatttttaaagaatcaagtctctcgagagattacgcatttctgt

SEQ ID NO: 3136 - DNA, 452 bp, Bos taurus
  Clone ID: 14-LIB3057-019-Q1-K1-D9
cggacgcgtgggcgaggctgcggccgcgacttggcgcggttgtccctaacgtcgccgctcggcatccttaggataggccgcccctgacgttgcgcggggatcccactcgcccgcgccccccatgcgttcactcttcggagcccagccgggcgggcgcctagcagacgcggagccgcgcgggtgacggcagaggcggctgcgcgcctagcccagcccgcggagagggcgcgcctcgcccccgccccccgcccgctctccggaggccgtgggtgcggatgcgccgctgacgactcgcagcaaccagcagtgccgcccgtccgccggctggatcccgcagcatggcagccgccgcctatgtggaccacttcgccgccgagtgcctcgtgtccatgtcgaaccgcgcggtcgtgcacgggccgcgggaggggccggagcccggacccgagggcgcg

SEQ ID NO: 3137 - DNA, 245 bp, Bos taurus
  Clone ID: 14-LIB3057-020-Q1-K1-D5
cggacgcgtgggtttcaatagatcgcatcgagggagctgctctgctacgtacgaaaccgcgaccgagaaacaggtggtctacgaatggtttagcaccaggcgccccacgaacgtgcggtgcgtgacgggcgaggctgctgctgtctttctcgccgcgctccgtgttccttgacgattggctctgtgtacaggtacattgttccctctacttgcagtcgcactccatgctggagtgacacctacta

SEQ ID NO: 3138 - DNA, 425 bp, Bos taurus
  Clone ID: 14-LIB3057-020-Q1-K1-D9
cgacgtagcggggtcactggtacttccggactcgtgaggctgcgttgcgggcggagcactgtgggacttttagttctcttgatggagcgagcggcgcagcaagcggtgcctctgggtcagatggaagtgtttcaggccctgcagcggctgcacatgaccatattctcccagagcgtctcaccctgtgggaagttcctggcagctggcaacaattatggacagatagctatctttagcttgtctgctgctttgagctccgaggccaaagaggaaagtaagaagcccatggtgaccttccaagcccatgacgggcccgtctacagcatggtctccaccgatcgacatctgctgagtgctggggatggggaggtgaaggcctggctttgggcggagatccttaagaagggctgtaaggagctgtggcg

SEQ ID NO: 3139 - DNA, 414 bp, Bos taurus
  Clone ID: 14-LIB3057-021-Q1-K1-D5
gcgccgagcgatgggcatctctcgggacaactggcacaagcgccgtaagaccgggggcaagagaaagccctaccacaagaagcgaaagtatgagctgggacgccccgctgccaacacaaagattggcccccgccgcatacacacagtccgtgtgcggggaggcaacaagaagtaccgggccttgaggctggacgtggggaacttctcctggggctcggagtgttgtacacgcaagacaagaataatcgatgttgtctataatgcattcaacaacgaactggtccgtaccaagaccctggtgaagaactgtattgtgcttatcgacagcacaccgtaccgacagtggtacgagtcccactatgcactgcccctgggccgcaagaaggggcccagctgactcctgaggaggaagag

SEQ ID NO: 3140 - DNA, 375 bp, Bos taurus
  Clone ID: 14-LIB3057-022-Q1-K1-D5
ctggaaaacaaggcagaggtgacagttcaagtaagaaggacgtgattgagcgtgacagaggacaactttgacaagaatgtccttgacagtgaagatgtttggatggttgagttttatgctccctggtgtggacactgcaaaaacctagagccagaatgggccacggccgctacagaggtgaaagagcaaaccaaaggcaaagtgaaactcgcagctgtggatgccactgtgaaccaggttctcgccagccgatacgggattaggggattccctacaatcaagatatttcagaaaggtgagtctcctgtggattacgacgggggacgcacgagatccgacattgtttcccgggccctttgatctgtttctgataac

SEQ ID NO: 3141 - DNA, 114 bp, Bos taurus
  Clone ID: 14-LIB3057-023-Q1-K1-D5
cagaccctcttcgtcacctgcacggtctttggattctcattgagcagttaggctataagctgtgtccgccaggttctcagtgaaggcgctggaatgtcttggtggtatagacag

SEQ ID NO: 3142 - DNA, 371 bp, Bos taurus
  unsure (180): unsure at all n locations; Clone ID: 14-LIB3057-023-Q1-K1-D9
ttgagaatctgagcccggatgatctgatactactgaagacatttttgacgcaatacttgatgtaagagtcctggcaaggccagtgttgtgacctgactatacttcgtggaggatggacagctaaagacttttagacaggagggcctgactttggagcatgtggccggagaccgatgcatnctataggacgtgctgttgctgaccttacgtatcttctttgacgccttatttcaggtgaacactgttgcagacgaggtgctctacacgcatcttcatgactgttcccagatagactcatgcagaacagtgactgatgtgcgctagagcacggtcacacatcggtctggctatggtccggaaggtgaagagag

SEQ ID NO: 3143 - DNA, 462 bp, Bos taurus
  Clone ID: 14-LIB3057-024-Q1-K1-D5
cgcactcatggactcgatcggactcactttttctatatccagaagagatacgaagaatggttaggtaagtcagcacctatattaagaaaattgtctacaaccccgacacattagcatttgttccaatttctggctggaatggttacaacatgctagaaccaagtgctaatattccatggttcaatgtatgtaaagtcacccataatgacatcaatgcctattaaaccaccctgccgtagctttggattgcattcttccaccaactctcccaacttacaaaccctttcgttctccttttcatgatgtgtattaatttttttttattttattctttttcttttatttttttttttaatctttttttattattttttctctttatcttattttatattattctttatttttttattcttctttttttttttctttaatatatactattattttttatttattttt

SEQ ID NO: 3144 - DNA, 429 bp, Bos taurus
  Clone ID: 14-LIB3057-025-Q1-K1-D5
gtagcttactgtttttcttcttccctcttgacaaaccaccagtagttcatttttgtcgagttttctttttttttccatcaagggaagaataacttcactgaattttatttttttgtgaaagaacctttattaaaacacaaacaatcttaactatgcacataatgtgaccagatcatcttgaaaatattcctcctagtaggaattctttgtttataactctaggtatggtcagaatataatatttccataataacttaattcttttcagttatttgggctctgattataggttttttggataaaatttatgttactatcctgctcagagtaccattatggtttctaaatggcaattacattgaagaagtctatagtaagattctctttttttttttaagcttgtggttgaaggttaacctagtttatgct

SEQ ID NO: 3145 - DNA, 417 bp, Bos taurus
  Clone ID: 14-LIB3057-025-Q1-K1-D9
ggcccattgggacagacgggggtggagacctgtttgaccgggcagtcatggtgtgccagtacatccatgacctctcctcggaaatgttcaacgaatttgataaacggtatgcccagggcaaagggttcattaccatggccctcaacagctgccatacctgctcccttcctacccctgaagataaagaacaagcccaacagacccaccatgaagtccttatgagcttgattcttgggttgctgcgctcctggaatgaccctctctatcacctagtcaccgaggtgcggggtatgaaaggagccccagatgctatcctatcgagggccatagagattgaggaagaaaacaaacgacttctggaaggcatggagatgatatttggccaggttattcctggagccaaagagactgagccct

SEQ ID NO: 3146 - DNA, 391 bp, Bos taurus
  Clone ID: 14-LIB3058-001-Q1-K1-D9
gtaaagaattcgcccgcaatgtgggagacctgggttcgatccctgggttgggaagatcccttggataaggggacgactacccactccagtattgtggcctggagaatcccatggacaggagcttggcagtccagggggtcgcaaagagtcggatacgactgagcgactttcactttctgtgaagaccctgtggtttagagtcagcttatcaagtggcatctgagaaacccagagaggctgagggactcgcctgggcctgggataaatggcagaggtgggactggggctgccactcgggcgctgagccaggctcctccccgcagcgcctgagcgtgcagaacgtcatctacgtgctgggctgcagcaacgccatgctcatgtggttcacaga

SEQ ID NO: 3147 - DNA, 458 bp, Bos taurus
  Clone ID: 14-LIB3058-005-Q1-K1-D9
tcccatcataaaggggtatttttgagatttctttttccttcagaatatcttaagagtgctaaattttaactgcctttttgttgaactgaactgtgggactctgatttttattaaaattgtaagctctcactggtatactatcttctggaagggtgttgtacatctgaggaagtgtgtgtgtgtgtgtgaatgtgtgagagagaggttgcccttgtagcatatgacgaatgtctgtacctttattcttgatgtaattattacataatcattttagcatatttggtttctaaatcattgtgcttattttttcaatctataaagatacttatatttggctagttaattgtattttagacattataattttaggtgatattaatttcattaatgttttacatagaaatctttccagtttaaaagatgttgaatattcacatgttctaacattttctttactg

SEQ ID NO: 3148 - DNA, 409 bp, Bos taurus
  Clone ID: 14-LIB3058-008-Q1-K1-D5
ggagaatattcctaaaatttataacacataattcaatgaaataatagagaaccaggaatgcaaattcttaagagaacatgatcaaagtgtgaagggtttctcaggtaataccttttttgtttgatttaattgaaaaatataggcattgtcttatatattttcactatcatcattaaaaattgtgttattgttcctgtttttgttgtttagtcactcagtcatgtccaactcttttgcgaacctatggactgcagtccaccgggctgctctgttcatgggattttttaggcaagagtactggagtggttgacacttccttcaccagttattagttttaaaatgcttttaacatctgactaccaatgatctaaccaattaaatcacacaattaagttgggcatcatagggt

SEQ ID NO: 3149 - DNA, 426 bp, Bos taurus
  Clone ID: 14-LIB3058-011-Q1-K1-D5
ggcaaagctgaggggcacggagaccagctcaagggcttctgggggggacgggctgcgggagaggtggacgaggtgacggtccgacgccgcccggaccaggacaaaagcttgagcagaggagaccagaggcaggggactggacctagaggggtggggagcaggcgcattccgtttggacaggaaggtgggttcacgggagcagctggacctgcaggaaaaaccagatgagagatagcgaaaacccactgttactgccgtttattgagcacctactgggtgcccacaatcgtcctaagatcggttggccaatcgcaagccagaagatgaaggttctgtgggttgccgtggtggtcgcgcttctggcaggatgccaggcggatatggagggagagctggggcccgaggagcccctgactacccagcagc

SEQ ID NO: 3150 - DNA, 436 bp, Bos taurus
  Clone ID: 14-LIB3058-016-Q1-K1-D9
tatggtttcccgctctgaaattgacatgaatgacatcaaagcatgctatcagaagttgtatggcatctctctctgtcaagccatcctggatgaaaccaaaggagattatgaaaaaatcctggtggctctctgtggaagagactaaacattcctttgatgatctcaggctttttgatcagaagactttttaatcatcttttcattccatatcatagatttaaatagcaaagtttcttcaatagaaatatagtctagtaacttcttcctgaaaaatagcctataaatcattttttgtattacaactctttatagatacaaaaattttttttaaatatggttattccaaactataaaaccctacaaagaggttgttctagtaacaatgcctaagaaaaatatttaccttgcagaaaataaaatgattttacaggaaaaa

SEQ ID NO: 3151 - DNA, 436 bp, Bos taurus
  unsure (3): unsure at all n locations; Clone ID: 14-LIB3058-017-Q1-K1-D5
cgncgcgtgggcagagatggaagagctggactttgtcagcgctacggagcagtccaggaagcgcataaacacctgggtagccgaaaagacagaaggtaaaattagagacttgctccctgcaaattcagttaaccccatgacacgtctcgttctcgtgaatgccatctacttcaaaggaaactgggacacacagtttaacaaagagcacactgaagaaaggcctttcagagtcagcaagaacgtggagaaacctgtgcaaatgatgttcaagaagtccacctgtaaaataacctacattggagaaataagcacccagattctggttcttccctacgtaggtcaagagctgaacatggggattctgctgcccattgaaagcacggacttgaacacggtggaaaaggccctgacctatgagaaattcatcgcgtggacg

SEQ ID NO: 3152 - DNA, 175 bp, Bos taurus
  Clone ID: 14-LIB3058-018-Q1-K1-D5
ggggactgagcgctgagcccttactctactaggccgagcggctccaaccggattgctcgtatgacagttccatgagctgcatggcgcataacgtgtcatgcgcccagcatagtcgatcaccatacgtacgctttggaaaatactcggttaaaatggcttatgactttggcttatt

SEQ ID NO: 3153 - DNA, 407 bp, Bos taurus
  Clone ID: 14-LIB3058-020-Q1-K1-D9
gaaaaagacagaggattgtctttatgtccctgctaaaaacattccattgttaaaatttgcactttgaaggtaagctttgtaggcctgaccctccaggtgtcaatgaacttcgctactagatttttctattcgtggtatcagttaagagttcagacaaggcccacacaagaagactttccatgcatttgcaaatctcagccagttatctttacattcttttactacattcacttgcatatagtattaccatcactttgcatcattcctcaactactattcatattcgtttcatgatttctataaacattttaaagacagctgggatatcacttaacatttactgagttagagtcatggaagcaagccatgctcaatatttaacagtcacttgtctgtgaatgtgtgtt

SEQ ID NO: 3154 - DNA, 460 bp, Bos taurus
  unsure (430),(439): unsure at all n locations; Clone ID: 14-LIB3058-021-Q1-K1-D5
aggatacccaggctccagacttgcagcgtgttcacaaacgcatccaggatatagtgggtgtgctgcgtgacttcgggactcagcgggaggagggtcggtctcgctcggaatacctgcagcggcttcgaaaggacctggccacttactactcgtacggcgacttcctgctgggcaagctcatggacctcttccctctgtccgagctggtggagttcctggaagccaacgaggtgcctcggcccatcaccctcagaaccaacaccttgaagacccggcgccgggaccttgctcaggcactcatcaatcgtggagttaatctggaccccctgggcaagtggtccaagacaggacttgtggtgtatgactcttcggtgcccattggggccacgcctgagtaccctgcccggcactatatgctgcaaggggcctncagcatgtngcctgtcatggccttggcacc

SEQ ID NO: 3155 - DNA, 427 bp, Bos taurus
  Clone ID: 14-LIB3058-022-Q1-K1-D5
tcggtccaactctgtgtgaccccatagatggcagcccaccactctcccgcatgcttgggattgtataggcaagaacactggactggttgccatttaattattcagctagtcatacttgtgcacaatcaatatcatgatgactgtcagagctcactattctgctcggcacacaaccctgtccccaacatatgcagccctaaaactgtactttaaaaactcatctgaaaagaccctaaatctggaaaggatcaggggcaagaatagaaaggagcatcagtggacaagatggtcggatggcattaccaactcaatggacgttaatctaagcaaactatcggagatagtgaaagacagggaagcctggcatgcttcagtccacacggtcacaatgagacagtcggacatgaattagcgactgaacaactac

SEQ ID NO: 3156 - DNA, 320 bp, Bos taurus
  Clone ID: 14-LIB3058-022-Q1-K1-D9
gtcttagtcagctagaggacaacatagtgacatttttatatccatatcattggcaacttcagtgggggcgatttatttactgcaaaatgtaccactcagcacaggttggagacatatacaccttctctgaatacgacaggacccagccacctactcatgcttacagagtccactggtatgccacactcataggcctgtaccctgctccacgctaactttgaccaacttacactactgcctagctcacaccagcaagagaacaaagtagaccccatcagcatcaacagccatcaccatagtccagatgactacaacacaca

SEQ ID NO: 3157 - DNA, 373 bp, Bos taurus
  Clone ID: 14-LIB3058-024-Q1-K1-D5
gtaactcctgagtctcgcctaggagcgttttgacagaggtctaccagacagtttccagctgtttcaatcttctcatgtgaaggacctgctgtttaatgactctgctgatgggtttctaaagattccttctaagatggattttgagctgtacttgggatatgaatatgtcactgctcttcagaacctaatagagcgtaaaccctttgactcctcataggatgagtgcatggtgaagtggagtgcaattggtcaccagtataggacaaagtgtgatcggtggagtgggttcagtggcggatcaatagatcgtgagacagcacctaacacttaatagtgcatagcctagatcatgataggagaatctgttgccatg

SEQ ID NO: 3158 - DNA, 421 bp, Bos taurus
  Clone ID: 14-LIB3058-025-Q1-K1-D5
ccgagccgccgtctccacagccgctccggagccctagctagtccgtcgtcgccgtcgccgccgccgccgccatggctcagtacaagggtgccgccagcgaggcgggccgcgccatgcacctcatgaagaagcgggagaagcagcgcgagcagatggagcagatgaagcagaggattgctgaggagaacataatgaagtccaacattgacaagaagttctctgcacactacgacgctgtggaggctgagctcaagtccagcactgtgggtcttgtgaccctgaacgacatgaaggctaagcaagaggcactggtgaaggagcgggagaagcaactcgccaagaaagagcagtcgaaagagctgcagctgaagctggagaagctgcgagaaaaggagcgcaagaaggaggccaagcggaagat

SEQ ID NO: 3159 - DNA, 420 bp, Bos taurus
  Clone ID: 14-LIB3058-026-Q1-K1-D9
atccggaccatgctgtacaccccgcaggagatgaaacagatcattaagatccgagcccagacagaggggatcaacatcagtgaggaagcgctgaaccacctgggggagattggaaccaagaccaccttgaggtacgccgtgcagctgctgaccccggccaacctgctggccaagatcaacgggaaggacggcatcgagaaggagcacgtggaggagatcagcgagctcttctacgacgccaagtcctcggccaagattctggccgaccagcaggacaagtacatgaagtgaggcgaccgagggcgtctgcgcggggactgcggtcagccaggccccggcccagccacgctgggtgctgtccccacccgggtggacagcagcagtgtgcggtcggcacggaaatgcttcctttaaattatc

SEQ ID NO: 3160 - DNA, 214 bp, Bos taurus
  unsure (10)...(11): unsure at all n locations; Clone ID: 14-LIB3058-028-Q1-K1-D5
gcgagccacnnccagggaaccccaaggggcacagaccggagaagcccacggggaacggcgaaaacgcgagagaggcgggagagggagcacacggaaggggcgaccaagcaaggacgccaggccaacagaccaacgaaccaaccacaacggaggccgcgaagacgcacaaagaaaaagccccaccagagaggcaagcagacgcgcagagggaggc

SEQ ID NO: 3161 - DNA, 410 bp, Bos taurus
  Clone ID: 14-LIB3058-028-Q1-K1-D9
ctgaaccacagtttgaaatcgactttctctgcggctggagcctggctgagcgctttggggtcttagggggctgcaaggtcctggctaagaaggagctggcctacgtccccatcatcggctggatgtggtacttcaccgagatggtcttctgcacgcgcaagtgggagcaggaccgcaagactgtctccgagagcctcctgcacctgcgggactaccccgagaagtacttttttctgattcactgcgagggcacacggttcacagagaagaaacaccagatcagcatgcacgtggcccaggccaaggggctgcccagcctcaagcaccacctgctgcctcgcaccaagggcttagcggtgaccgtgaggagtacgagaaatgtagtttcagctgtatatgactgtacactc

SEQ ID NO: 3162 - DNA, 429 bp, Bos taurus
  Clone ID: 14-LIB3058-029-Q1-K1-D5
cggtcgcgtgggggcgacggccgcgggcggcgctgtgaaggcagcgctcaggccggggctcctctggcgtccttgggaggttctaggttcccacgaggccccccggaggagcttctcacaacaaacaattcccccgtcggcgaagtatggtgggcggcacacggtgaccatgatcccgggagatggcattgggccagagctcatgctgcacgtcaagtcagtgttcaggcatgcatgtgtgcctgtggactttgaagaggtgcacgtgagctccaccgcggacgaggaggacatccgcaatgccatcatggccatccgtcggaaccgcgtagccctgaagggcaacattgaaacaaaccacaacctgcccccatcccacaaatcgcgaaacaacatccttcgcaccagcctggacctctatgccaacgt

SEQ ID NO: 3163 - DNA, 413 bp, Bos taurus
  Clone ID: 14-LIB3058-031-Q1-K1-D5
ctgctaattccagttacctcctaacttttctacctttaatctaccttctttctcttcggtctggttatatgttactggcgtggtgacctttccaaagtgcagctacaattgtgtgttgtctcataaccctacaatggctcaccattgtctccatggttgttgtcggactccttgagcgagcatttcaccactaccaggtttttgccccttttttttcatatttgacagttatttttttttttttaatttttattttatttttacttttttattatttttttattttttttttcttaatgtttttttctttttttgctttttttattttttatcttttttattttttttgtcttatatatttattatttttctttatttttttttttttttttatcttttttctatattttttt

SEQ ID NO: 3164 - DNA, 139 bp, Bos taurus
  Clone ID: 14-LIB3058-034-Q1-K1-D5
caaatgtgtgatatggtggagggcatcttgttaatcatttgaagaacccacctatgttgacctaaaataagaaaggaaggaatcgaaccccctactattggtttcaagccaacatcataacctctatgtctctctcaat

SEQ ID NO: 3165 - DNA, 423 bp, Bos taurus
  Clone ID: 14-LIB3058-035-Q1-K1-D5
ctttcctgttggtatgtaatttctttttatttaattttattatctgctggttttgggggcaatagatttgtgaatattctctggatgtgtccatgtataggtgtatatatatagataaatatatatatatataaatatattttccagctaatacctcaaatgtgtgattgtttaatatataccacactatatttgcacagtgcagggcttccattagcagtggattttcttatttctaaatttgaaaatcagtccatagaatttcattggtgcgagttctttttattgatcttttccatattttaacagagattcctaccataaggcccatacttcaaatataattgtattttctatagcagtctggaaatatgtaaggggtaagaagtgttttttgcaatgttttagtaagttttcattaaa

SEQ ID NO: 3166 - DNA, 426 bp, Bos taurus
  Clone ID: 14-LIB3058-038-Q1-K1-D9
tttgttttttggccttgagcaaactacttatacctttgtctcagttttctcatcccatgtggcatgtgggatcttagttcctcgaccagggatcacactagtgcctcctgcagtgcaagtgtgaagtcttaaccactggacctccagggatgtccctcaggatgagttctgctttttgttgtaaatatacatgatcattattcatgttcagttcagttcagttgcttagtcctgtctgactctttgcgaccccatggactgcagtacgccaggcctctctgtccatcaccaactcctggagtttactcaaactcatgtccgttgaatcggtgatgccatccaacaatctcatcctctgtcgtccccttctccccccaccttcaatctttcccagcatcagggtcttttcaaataagtcagttcttc

SEQ ID NO: 3167 - DNA, 370 bp, Bos taurus
  Clone ID: 14-LIB3058-039-Q1-K1-D5
gatgctatccgagaaagcaccttccaattgcaccataccccagctggccaaaaaggccgacgatatggaataaatcgtgctatcatctgcgaagtactattctttaccggatttttctgagctttctaccactcaagcctagcccccacccctgaactaggcggctgctgacccccaacaggcattcacccactaaaccccctagaagtgccactgctcaacacctatgtcctataggcttacggagtatctattacctgagcccatcatagttgaatagaaggggaccgaaggcatatataacaagccctattaatcaccatcacataaggagtctacttgacactactactaacctcataatactatg

SEQ ID NO: 3168 - DNA, 445 bp, Bos taurus
  Clone ID: 14-LIB3058-040-Q1-K1-D5
gcgggtttcctcgcgtcaccgccggttagttgccgatcttgctgcagggccatgagcggggcattactcagattaagtacaaccgcgagggagacctcctcttcacggtggccaaggaccctattgtcaatgtatggtactctgtgaatggtgagagactgggcacctacatgggccataccggagctgtgtggtgtgtggacgcggactgggacaccaagcatgtcctcactggctcagctgacaacagctgtcgtctctgggactgtgaaacagggaagcagctggccctgctcaagaccaattcagcagtccggacctgtggctttgactttgggggcaacatcatcatgttctccacagacaagcagatgggctaccagtgcttcgtgagcttctttgacctgcgggatccaagccagatcgacagcaatgagccctacat

SEQ ID NO: 3169 - DNA, 403 bp, Bos taurus
  Clone ID: 14-LIB3058-041-Q1-K1-D5
gtgggctcctgctcctctagtttggcatgcactgcagctcctacacaagtcactgggggaactcatacagttcaagaaaccacctttcatgtagcccctcaacagaatgcattgcatcaccaccacggaaacagttcccatcaccaccaccaccaccaccaccaccaccaccaccatggacagcaagccttgggcaaccggaccaggccaagggtctacaattctccaacaaatagctcctctacccaggattctatggaggttggccatagtcaccactccatgacatccctgtctttctcaactacttcttcctctacatcttcctcctctactggtaatcaaggcaatcaggcctaccagaatcgcccaatggctgctaataccttggactttggacaga

SEQ ID NO: 3170 - DNA, 407 bp, Bos taurus
  Clone ID: 14-LIB3058-042-Q1-K1-D9
tttgttgatactaatattcaaacatgtttaaagaagaagaaaaatgccaagcctttaaggtttaaggttgggataggcaaagttatccgagggtgggatgaagcactcttgactatgagtaaaggagaaaaggctcgactggagattgaaccagaatgggcttatggaaagaaaggacagcctgatgccaaaattccaccaaacgcaaaacttatttttgaagtggaattagtcgatattgactgaaatagttaagaaaccatcaacaataaaacatggccatgaagaaacttatgtatctaattagaactggttactattgttaagcgaagagtcaactggaaaattcaagttagaacatgtttacttgatccttcaacttttaagaaatgtaatccattataaac

SEQ ID NO: 3171 - DNA, 262 bp, Bos taurus
  Clone ID: 14-LIB3058-043-Q1-K1-D5
acaggaaaccatggctgtgtttggaagcttcagcccttcacacttgagtgggtgtttctcccagacttgggtcagctctttctgagtacaagacttgttggtgaaggagcagaagctttttattaataggacaaaaactgaaggaggcatccctcctagctaggaaatttttattcctcagaaatttggcatcatggattattaatgtgtgtgttttttcttccactttctttaaaacgataaaagaatttcattgttagtc

SEQ ID NO: 3172 - DNA, 428 bp, Bos taurus
  Clone ID: 14-LIB3058-044-Q1-K1-D5
gtgtttagactaatgacacgttggcttttccagtgagaatccaggtctagtcggatagaggaaggactgacagaagagctgagactgttcccttgccgagaaaagctgaggttctagaacccatccctgaaacaggaacccacctggcccagaggaatagcagctaaagagtcagagggaagggtgaaaaggagctaatccctttcttccctgtgccgggtttagggaaaagaaatgggatccgggtgctctcgccacaactacaccgagagcctagaagccctttcccctcttgagttaaaactactcacttgcaggtgtctgagctggcaaaaactcggagagtgttgcctttaaaatcttgcagcctagtcgttccctccattgaggaggtgaaaaactggttggtattgagagggttaaacttc

SEQ ID NO: 3173 - DNA, 438 bp, Bos taurus
  Clone ID: 14-LIB3058-045-Q1-K1-D5
tgaaagtagaactaacttgaattcaagtggttgccattagttttattatgctattccgggcttttaattataatcatgattttcaaagactgtaacattggtttttgttattataataaacaggcttggttatattacagcagaatgatgagaactgacattttaagttatatgaaacataggttagaagccagcattgaagtattattcatatgtctcttctcataattctgctccactggatagaaggacaaacactttttctcttcatttttgataaatattgtatttaaaaagtagccatgtaagtagccatcagtaagtcacgaattttcaggtcttgctcaaatgtcatttccagtttctgagtgatttaagtgtgtttttaaatttcactgtatttcccaagggcagtaatagtaaatattgagtatcttt

SEQ ID NO: 3174 - DNA, 267 bp, Bos taurus
  Clone ID: 14-LIB3058-047-Q1-K1-D5
cgagcggccgcccttttttttttttttttttttcaaatttagaaaatttattctggttgaaagagagagttaaccatgatacaagacaatcaatattttgtggaacatttataaacttggacagggcaacaacaaaagtatagtacttacaataaaaaaaagtcaatgcgttcctatactatatagtatcatatacattcacccacatccccaaaaagtcacttataaaatgaattcactgaactgtatcacaagacgcccattatt

SEQ ID NO: 3175 - DNA, 429 bp, Bos taurus
  Clone ID: 14-LIB3058-049-Q1-K1-D5
cggacgcgtgggctggcacagtgactttacacggcgctatggcatcaccacgaagatctccaggggcacaattgaaatcctgagtgatgtgcagctgattaagacaggagacaaagtgggcgccagcgaagccacgctgctgaacatgctgaacatctcccccttctccttcgggctggtcatccagcaggtgtttgacaatggcagcatctacaaccctgaagtgcttgacatcacagaggaaactctgcattcccgcttcctggagggcgtccgcaatgttgccagcgtgtgcctgcagattggttacccaaccgtcgcatctgtaccccattctatcatcaatgggtacaagcgcgtcctggctttgtctgtggagactgattacaccttcccacttgctgaaaaggtcaaggccttcttggctga

SEQ ID NO: 3176 - DNA, 430 bp, Bos taurus
  Clone ID: 14-LIB3058-049-Q1-K1-D9
cggacgcgtggggagaaacataagtaatcctgtgtgcatggtgggaagacatactgccatggggaggtgtggcacccggccttccgctccttcggacccctgccctgcatcctgtgcacctgtcaggatggccgccaggactgccagcgggtgatctgccccactgcgtacccctgccatcaccctgagaaagtagccgggaagtgctgcaagatttgtccagaggacaaggcagactcgggccacagtgagatcagtgccaccaagtgtccgaaggcgccaggtcgagttctcgttcacacgtcagtatccccaagcccggacaacctgcgtcgctttgccctcgagcgtgaggcctctgagcaggtggagatctacctctggaagctggtgaaaggaatcttccacttaattcagatcaagaaagtca

SEQ ID NO: 3177 - DNA, 446 bp, Bos taurus
  Clone ID: 14-LIB3058-050-Q1-K1-D9
cggacgcgtgggcggaggcagggacaccgttgaggagcaccggcagtttgggggcaactgtgacgtggacgtgtccttcatgtacctgaccttcttcctggaggatgatgacaagctggagcagatcaggagggactacacgagcggggccatgctcaccggcgagctcaagaaggagctcatcgaagtcctgcagcccttgattgccgagcaccaggcccggcgcaaggaggtcaccgacgagatcgtgaaagaattcatgaccccccggaagctgtcctacgactttcagtaacgctcacttcctctatgcttactcagagatgtaatttacccataatcccaactcagtcaaatcagcacccccctgctgctgccctaggctctatcaaatggtaattattggcccaggtctgtaagttctgtgtttctctcagcgctgtttc

SEQ ID NO: 3178 - DNA, 324 bp, Bos taurus
  Clone ID: 14-LIB3058-053-Q1-K1-D5
atgaacctttttgacctggggtgccagtacttgcgggtgggcaaggctgtcacacccgctatgcccctgcttacaccggccacacctggaggcctcccgccagctgctgccgtggccgcagctgcagccacagccaagattacagctcatgaagcagtggctggagcagcagtactgggtaccctagccactcctggactggtgtcccctgcactgactctggcccagcccctgagggctctacctcaggccgtcatggctgcccaggccccaggagtcatgacaggtgtgacacctgctcggccttccatttcggtcaccatt

SEQ ID NO: 3179 - DNA, 323 bp, Bos taurus
  Clone ID: 14-LIB3058-056-Q1-K1-D5
ctagacgaggccgcccttttttttttttttttttaaccggaacctttaattgtattatggggaatgcttaatgcagagttaataggggctggagtacctagcagaggggaggggggcagagggagctactgagataaataagaggggggcagtgatgagttacatgtggacttgggggcggagggctgcagaataggaaaatgggggcagaagagagctacatactttattcaaataccactgggaggcaaagggcaaaaggccagggcagcatgtgcatgtcaggagtttagtgtcttgagcctgctgccagcaaccagggt

SEQ ID NO: 3180 - DNA, 230 bp, Bos taurus
  unsure (208): unsure at all n locations; Clone ID: 14-LIB3058-057-Q1-K1-D5
gtttgtgtagacaaagggggcgcttggccttatacctcgttagagaagagaaacagggtgtagtcagcatcttcttactcccttctccctgataacagctaccatgacaaccctgtggtttccaaggagctgaggatagagagaaactagttcatatgaaaaatagactggcctaaggagcagcagtcgctagtggctaacagtgtanactgggccagccctctggtaga

SEQ ID NO: 3181 - DNA, 328 bp, Bos taurus
  Clone ID: 14-LIB3058-058-Q1-K1-D5
gttagtgtagactaagggggcgcttttccttatacctcgttagagaagagaaacagggtgtagtcagcatcttcttactgccttctccctgataacagctaccatgacaaccctgtggtttccaaggagctgatgatagatagaaactagttcatatgaaaaatagactggcctaaggagcatcattcgctagtggctaacagtgtaaactggtccagccctctggtagacacagtgtagataactttttggatagcatgtttatttctgttaattattagtgtactttggcctttgtcatatcttcactattggtgctcttttttat

SEQ ID NO: 3182 - DNA, 448 bp, Bos taurus
  unsure (344),(358): unsure at all n locations; Clone ID: 14-LIB34-001-Q1-E1-D5
cctagaccgagggcctccccctggacgtgcgcttcatcgagtacatgccctttgacggcaacaagtggaactttaagaagatggtcagctataaggagatgctggacaccctccggcagcagtggccggagctggagaagctgcccgaggaggaatccagcacagccaaggcctttaaaatccccggtttccgaggccaggtcagcttcatcacgtctatgtctgagcatttctgtgggacctgcaaccggctgcgaatcacagctgatgggaacctcaaggtctgcctctttgggaactcagaggtgtctctacgggatcacctgcgggcaggggcctccgangaggagctgctganggtcatcggggctgcggtgggcaggaagaagcggcagcacgcaggcatgttcaatatctcccagatgaaaaaccggcccatgattctcat

SEQ ID NO: 3183 - DNA, 397 bp, Bos taurus
  unsure (320): unsure at all n locations; Clone ID: 14-LIB34-003-Q1-E1-D5
ttgcttcctgaccagtctgccttggatttatcaattttattgatacatgttttatggcttagaatgtggcacttgttcaatattccatgtattcttgtaaagactgtgtgttttgctgctgagtggtactccctataaatgtcaattaggtaaagttggttgctaatatggttccagtcttctctactctggctgattttcagtctatttgttctatcaatgattggaagaaggggtatcaaaattctctttgtaggtttgtctattatttcctgtagcttttagtttttgcttcctatactttaaagtactattattangggcataaatgtttagaatttgtatcttcttgataactgacccttttttattatgtaataaacttctttatctttca

SEQ ID NO: 3184 - DNA, 377 bp, Bos taurus
  unsure (264): unsure at all n locations; Clone ID: 14-LIB34-004-Q1-E1-D5
cagagaccaaggggaatggagcggggctggtggccgggtctgctgagtccgcagcaggtgcaggcccagttgtcacccctccagaacatctccccatggactctgatggcattgactcttcagactctgagtctgacatcctgttgggcattctgttcaacttggacccagtcatgttcctcagatgtccttccccagagtctgccagccctggagcagctcccagaagtggacccagaaggacccagttccttaccgggctcnccttctccatccctggggacgtcatcagccaagctggaagccattaatgaactgattcgttttgatcacgtatatacaaagcccctagtcttagagatgccctctgagacaga

SEQ ID NO: 3185 - DNA, 397 bp, Bos taurus
  Clone ID: 14-LIB34-005-Q1-E1-D5
agcggccgctcgcgatctagaaccccacgcgtccgctaacctgaccgtcgtgccagccactgtcaccaagcccttcagccagcctgccactgaaccggtccaatcaactatccagcccactgctgagcccttctgcctggcgcccgtcacctcctgctctgactcggagatccgctcagcagaggcggtgctgggggaggctttgacagacttctccctgaggctctaccaggacttctcagtgttgaagaagagggagaccaacttcatcttttcccccttcagcattgccagcctcctcacccaaatcctgcttggggctggaggagaaaccagggtcagcctggagcgcctcctctcttacccccagaacttcagctgtgtccaccacgccctg

SEQ ID NO: 3186 - DNA, 183 bp, Bos taurus
  Clone ID: 14-LIB34-005-Q1-E1-D9
ggaaccgccagaagtaggacgctgcagggcagcttacgagcggaaatccaccgtatactacacagtgttgatctggtggactggcaatgtgaggctgtcatgcatggccattgcagacatcaacctcctgattagattccatgctctgccagcagacttgccaagactaacatcactctctaa

SEQ ID NO: 3187 - DNA, 251 bp, Bos taurus
  Clone ID: 14-LIB34-007-Q1-E1-D5
aggacgcgtggggttctagatcgcgagcggccgcccttttttttttttttttttttagagtcgtttcattttttactaattgtagcacaaacaaaagaagcaaaatatttaaagaaacaaaaaatcatgacaaacaggtgcaaaggacaagcacaacaatgaaaaagcaataattaaaaaaagcaagcaatggaatccacaaaagggcggaaggccacaaaggtgtcacacggaaatgacgccggcctgca

SEQ ID NO: 3188 - DNA, 406 bp, Bos taurus
  Clone ID: 14-LIB34-007-Q1-E1-D9
actcaatcaaggtcagcctgggaggacagaggaaggagtgggaggtaaaagaaatcctatttcatccgaagtacgacctcaatgcaaaaaaagcaaaaggcattcctgagttttatgactatgacgtggcccttgtcaggctcaaggaaaagctcaagtatgagaccaccatcaggcccatttgtctcccctgcactgagggatcgattcaagccttgaggcttccaaggtcaaccacatgccagcaacagatgcaagagctactccctgcaaaggacattgaagctctgtttgtgtctgagtctaagaagaccctgactcggaaggcagtctacatcaagaatggggacaagaaagccagctgtgagagagatgctctacgcgccccaaggttataaaaagtcaa

SEQ ID NO: 3189 - DNA, 397 bp, Bos taurus
  Clone ID: 14-LIB34-008-Q1-E1-D5
cagagaccaaggggaatggagcggggctggtggccgggtctgctgagtccgcagcaggtgcatgcccagttgtcacccctccagaacatcgtccccatggactctgatggcattgactcttcagactctgagtctgagatcctgttgggcattctgttcaacttggacccagtcatgttcctcaaatgtccttccccagagtctgccagcctggagcagctcgcataagtggacccatgtggactcagttccttaccggcctccccttctccatcactggggacgtcatcagccatgctggaagccattaatgaactgattcgttttgatcacgtagatacagagcccctagtcttacagatgccctctgaaacagagagcgaagctaatgtggtag

SEQ ID NO: 3190 - DNA, 328 bp, Bos taurus
  Clone ID: 14-LIB34-010-Q1-E2-D5
aagaataacaatgacaacattttcctgtcacccctgagtatctccacagcttttgctatgaccaagctgggtgcctgtgacaacacactcaagcagttgatggaggtttttaagtttgataccatctctgagaaaacttctgatcagatccactttttctttgccaaactgaactgccgactctatcgaaaagccaataaatcctctgagttggtatcagccaaccgtcattttggagacaaatccattacattcaatgagacctaccatgacatcagtgacgtggtatatggggccaagctccagcccctggacttcaagggaaatg

SEQ ID NO: 3191 - DNA, 384 bp, Bos taurus
  Clone ID: 14-LIB34-011-Q1-E1-D5
atttcctgtcacccctgagtatctccacagcttttgctatgaccaagctgggtgcctgtgacaacacactcaagcagttgatggaggtttttaagtttgataccatctctgagaaaacttctgatcagatccactttttctttgccaaactgaactgccgactctatcgaaaagccaataaatcctctgagttggtatcagccaaccgtctttttggagacaaatccattacattcaatgagacctaccaggacatcagtgaggtggtatatggggccaagctccagcccctggacttcaagggaaatgcagagcagtccagattgactatcaaccaatggatatccaataagactgaaaggcgtatcactgatgtcattcccc

SEQ ID NO: 3192 - DNA, 416 bp, Bos taurus
  Clone ID: 14-LIB34-012-Q1-E1-D9
gcccttagcttgattccagactttgctgcagctgctctccagccgtttgcaggattcaaagaactacagaagctgttcccaagatggtgatccgtgtgtatattgcatcttcctctggctccatggcgattaagaaaaacagcaagatgtgcttggtttcttagaagctaacaaaataggatttgaagaaaaagatattgcagccaatgaagaaaatcggaagtggatgagagaaaatgtacctgaaaacagtcgaccagccacaggataccccctgccacctcaaattttcaatgaaagccagtaccgtggggattatgatgccttctttgaagccagagaaaataatgcagtgtatgcctttttaggtttgacagccccacctggttcaaaggaagcagaagctcaggcaaagc

SEQ ID NO: 3193 - DNA, 409 bp, Bos taurus
  Clone ID: 14-LIB34-013-Q1-E1-D5
ttcgccggtcgacccacgcgaccgaagcaatccaaatcagctataacgctgatcaaccatcaaagccaaataacatagagagtgctaccaagaattccaagagtatgatggaagaaattatgaaatatgaaacactgatatcaacacatgaatcaacaattcgatttttgcaagaaatatataactcaaatagtcaaaaaatcgttaacctaagagataaagtggtcgagcttgaagcaaactgtcaagagccttgtcaagatacagtgaaaatacatgatgtaactgggagagattgccaagatgttgccaataagggggccaaagagagtggactttactttatcagacctctgaaagctaagcaccagttcttagtctactgtgacattgatgggtctggaaatgg

SEQ ID NO: 3194 - DNA, 419 bp, Bos taurus
  Clone ID: 14-LIB34-014-Q1-E1-D5
agtcaatcggatttctaggtttcatcgtatgagcccaccatatattcactgtcggaatagacgtcgacacacgagcctacttcacatcagccactataattattgctattccaaccggggtaaaagtcttcagctgattggcaacacttcatggaggtaatatcaaatggtctcctgctataatgtgagccctaggctttattttcttatttacagtagggggtttaactggaattgtcttagccaactcttccctcgatattgttcttcacgacacatactacgttgtcgcacatttccactatgttttatcaataggagctgtatttgctattatagggggatttgttcattgattcccactattctcaggttatactctcaacgatacatgagccaaaatccacttcgcaattata

SEQ ID NO: 3195 - DNA, 399 bp, Bos taurus
  Clone ID: 14-LIB34-014-Q1-E1-D9
attcccatgcggttgtggctcgaactgtgggcggcaaggaggatgtgatctgggaacttctcaatcacgcccaggaacattttggcaaagataaaccagacaatttccagcttttccaatcccctcatgggaaggacctgctgtttaaggactctgctgatgggtttttaaagattccttctaagatggattttgagctgtacttgggatatgaatatgtcactgctcttcagaatctaagagaaagtaaacccccggactcctcaaaggatgagtgcatggtgaagtggtgtgcaattggtcaccaggagaggacaaagtgtgatcggtggagtgggttcagcggcggggcaatagagtgtgaaacagcagagaacactgaagagtgcatcgccaaga

SEQ ID NO: 3196 - DNA, 395 bp, Bos taurus
  Clone ID: 14-LIB34-015-Q1-E1-D5
gatctcacaaaagtccacaaggaatgctgccatggtgacctacttgaatgcgcagatgacagggcagatcttgccaagtacatatgtgataatcaagatacaatctccagtaaactgaaggaatgctgtgataagcctttgttggaaaaatcccactgcattgctgaggtagaaaaagatgccatacctgaaaacctgcccccattaactgctgactttgctgaagataaggatgtttgcaaaaactatcaggaagcaaaagatgccttcctgggctcgtttttgtatgaatattcaagaaggcatcctgaatatgctgtctcagtgctattgagacttgccaaggaatatgaagccacactggaggaatgctgtgccaaagattattcacatgc

SEQ ID NO: 3197 - DNA, 399 bp, Bos taurus
  Clone ID: 14-LIB34-016-Q1-E1-D9
attgggtttgtattgagctacaagtgccattttggctataagccagagacagatggacctacaactgtgacttgtcagagcaatttggagtggagcccatacatagaatgtaaggaggtatgttgcccagaaccaaacctgaataattatggaagcatcactctacacagaagacctagcactagtactcactgtacctatatcagtggagataagatttcatatgaatgtcatagtaaatatatgtttgatgctttatgtacaaaacatggcacttggagtcctagaacaccagaatgcagaccagattgtaaatcccctcctgtcattgcccatggacaacataaagtagtctctaaattctttacatttgatcaccaagctgtatatgaatgtgat

SEQ ID NO: 3198 - DNA, 402 bp, Bos taurus
  Clone ID: 14-LIB34-017-Q1-E1-D5
agagtgagccttctctaattggcaaagctatctttcaagaaggatttggtatttctcttgtgcctctgagaagtaaatcatctatctgggctctctggaactttaatcttacatgacctctaatgggaaatagatggggaaacagtagaaacagtggcagactttatttttgtgggctccaaaatcactgcagatggtgattgcagccatgaaattaaaagacgcttactccttggaaggaaagttatgaccaacctagatagcatattcaaaagcagagacattactttgtcaacaaatgtctgtctagtcaaggctatggtttttcctgtggtcatgtatggatgtgagagttggactgtgaagaaagctgagcactgaagaattgatgcttttgaactg

SEQ ID NO: 3199 - DNA, 402 bp, Bos taurus
  Clone ID: 14-LIB34-017-Q1-E1-D9
ctgacctggtggagcatttcaagaggacggggatcgaggaggcctccggcgctttcgtctacctacggcagccatactatgccacgagggtgaacgcggctgacattgagaaccgggtcttggaactgaacaagaagcaggagtcagaggagacagccaaggccggcttctgggaggagtttgagagtctgcagaagcaggaggtgaaaaacttgcaccagcggctggaagggcagcggccagaaaacaagagcaagaaccgttacaagaacatccttccgtttgaccacagtcgagtggtcctgcagggacgcgacagtaacatccctgggtctgactacattaacgccaactatgtgaagaaccagctgctaggccctgatgagaacgctaagacctaca

SEQ ID NO: 3200 - DNA, 407 bp, Bos taurus
  Clone ID: 14-LIB34-018-Q1-E1-D5
agctgattgatctggtgcccagcctgtgtgaagacctcctgtcctcggttgaccagccactgaaaatcgccagagacaaggtggtggggaaggactacctcctgtgtgactacaacagggacggggactcctacaggtcaccatggagtaacaagtatgaccctcccctggaagacggggccatgccttctgctcgcctgaggaagctggaggtggaagccaacaacgcctttgaccagtaccgagacctgtattttgaaggtggtgtctcatctgtctacctctgggatctggatcatggttttgctggagtgatcctcataaagaaggctggagatggatcaaagaagatcaaaggctgttgggactccatccacgtggtggaggtgcaggagaagtccagtggt

SEQ ID NO: 3201 - DNA, 399 bp, Bos taurus
  Clone ID: 14-LIB34-022-Q1-E1-D5
ctggaagtcaccaaatttgctatagaggctgggttccgccatattgacagtgctcatttgtaccaaaatgaagagcaggttggccaggccattcgaagcaagattgccgatggcactgtaaagagagaagacattttctacacttcaaagctttggtccacttcccttcgtccagaattggtccgaccagccttggaaaagtcactgaataatcttcaactggactatgtcgatctttatattattcattttccagtggctctgaagccaggggagacacttttcccaacagatgaaaatggaaaaccaatatttgactcagtggatctctgtcgcacatgggaggccctggagaagtgtaaggacgcagggctgaccaagtccatcggggtgtccaac

SEQ ID NO: 3202 - DNA, 406 bp, Bos taurus
  Clone ID: 14-LIB34-023-Q1-E1-D5
tgggctgcggctcaggatccactgcccacaccccgctctcgcaggcagacatgaggacagagagaatgtcccccctcctggctctggggatcctggtggctgggctctgctccagggtccactgcctcccagagaatgtgaccccagaagaacagcacaaagtgacatctgtggatggccactcattagcctccagcaacactgacttcgccttcagcctctacaagcagttggctttgaaggaccccaataagaacgtcatcttctcccctctgagcatctccatagccttggccttcttgtccctgggggctcatggccccactgtgacagagatcctggaaggtctcaagttcaacctcacagagacccccgagacagaaatccaccaggggcttcagcacct

SEQ ID NO: 3203 - DNA, 380 bp, Bos taurus
  Clone ID: 14-LIB34-024-Q1-E1-D5
gtaccactgggaaaatctaacatgttgatgttaatcaatgtccttctcaccttgtggttttacactgctcatggacaggggaaacattgtaattatccagtaataagacatggacggctatatcagtcatacagtggatactttccagcacgtgtaaatcaacagtttctctataactgtgatcagtattttgtgcctccttcactatattcctcggattacctgacttgcacagcagaaggatggtttccagaagaaccatgccttagagaatgtattttcaataatttggaaaatggatataccccaagtagtgaaagaaaagctgtacagggtgaaacagtaagggttcgctgctattatggctacagtcttcaaaa

SEQ ID NO: 3204 - DNA, 405 bp, Bos taurus
  Clone ID: 14-LIB34-025-Q1-E1-D5
tcggagccccgggcccgccgacaccatgagttggtcctcgcaccctccgagtgtaatcttctacattctttcattgctttcttcagcatgcctggcatatgttgctacccgagacaactgctgcatcttatctgatagacttggtagttattgcccaactacctgtggaattgcagagttcctgactaattagcagaccagtgtagacaaagatctacgaactttggaaggcatcttatctcacgttgagaacaaaacatcataagccagagatctggtcaacgcaatctacatcagctaaaagcctgatcaaccatcaaggccaacttccatagagactgctaccatcaattccaacagtatgatggtagaaattatgacatatgattcactgataacttcaca

SEQ ID NO: 3205 - DNA, 255 bp, Bos taurus
  Clone ID: 14-LIB34-027-Q1-E1-D5
ggagtttttcaagaatgctgccaagctgaagataaaggtgcctgcctgctaccaaagattgaaactatgagagaaaaagtactgacttcatctgccagacagagactcaggtgtgccagtattcaaaaatttggagaaagagctttaaaagcatggtcagtagctcgcctgagccagaaatttcccaaggctgagtttgtagaagttaccaagctagtgacagatctcacaaaagtccacaaggaatgctgccat

SEQ ID NO: 3206 - DNA, 411 bp, Bos taurus
  Clone ID: 14-LIB34-028-Q1-E1-D9
cggacgcgtgggcacaggtgtcgtgaaaaccaccgttaaacctaagccaaaatgggaaaggagaagacccacatcaacatcgttgtcattgggcacgtagattcagggaagtctaccacgactggccatctgatctataaatgtggcgggatcgacaagagaacaattgaaaagttcgagaaggaggctgccgagatgggaaagggctccttcaaatatgcctgggtcttggacaaacttaaagctgaacgtgagcgtggtatcaccattgatatctccctgtggaaatttgagaccagcaagtactatgttaccatcattgatgccccaggacacagagacttcatcaaaaacatgattacaggcacatcccaggctgactgtgctgtcctgatcgttgctgctggtgtt

SEQ ID NO: 3207 - DNA, 423 bp, Bos taurus
  Clone ID: 14-LIB34-029-Q1-E1-D5
gcaactgaactgaaagagaaacttctcagaggagccagaatgatcaatgtgactgactttgtaaattgggccgcttccttaaatcatgctccggtgctcataagccaaaaactagttccgatatatgatctgattccagtgaaaatgaaagatgcacacctcaagaaacaaaatttggaaagagccattgaggactacatcaatgaattcagtgtaagaaaatgccaaccgtgccaaaatggagggactgtggttctgctggatggagaatgtgtgtgttcctgcccaaaagagttcaagggagttgcctgtgaaataaaaaaatagaaaatttataaaggattgcagttgaaaaaaaaagtagagttgttggtttccctgggatcattatggaaagaaaacaccagcaccttccagagatag

SEQ ID NO: 3208 - DNA, 413 bp, Bos taurus
  Clone ID: 14-LIB34-030-Q1-E1-D5
taacaaccctttctataaagagaatgcgatgaagttatcaagaattcaccatgatcagcctgtgaaacccctggaccgagcagtcttctgggttgagtttgtcatgcgccacaaaggagccaagcaccttcgaccagctttctatgacctcacctggttccagcaccactctttggatgtgattggcttcctgctagcctgtgtggcaactgttacattcctggtcactaaatgttgcctgtctttttgctggaagtttagtaaaactgaaaagaagaaaaagagagagtagtagtatttttgtttgtttttttagcggttggcctggaatccttggaatggttcacggaagtaaccagccattgattagtagagactcctctcctactccactggattcttggtcattcctc

SEQ ID NO: 3209 - DNA, 382 bp, Bos taurus
  Clone ID: 14-LIB34-030-Q1-E1-D9
caagttctagatcgcgagcggccgcccttttttttttttttttttttttttttttttttttttttttttttttttttttttttttttttttttttttttttttttttttgttaaaggcctttcaatttttaataaatggagcacaaacaaaagaagcaaaatatttaaagaaatttacgttccttagggagagtgttgggttaacaccaacagaaaagggaaacagatgaataagccccgagttttcaattcccctttttccccctacccccaggggaggctgaaatgccggggggtgggtcgcgtttaggccaagggcgtttgggttgaaacaaccaaggttttgggcccccgaaaggaaagcaagggtccttggcaacag

SEQ ID NO: 3210 - DNA, 405 bp, Bos taurus
  unsure (370): unsure at all n locations; Clone ID: 14-LIB34-032-Q1-E1-D5
tgcttttgtatgaaaagtatatataatttaatagtataagaaaaggagatatatattcatttgcactcatgcaaaacaaactttgctggacacaatttcacgtttctctgtgatttaaaaatgcatgtatagcatgtgaaggaaaaccatctcagttaatgtttatcacacttttcttgtggtctgtttgtaaacagttgatttgggtttgggggggattttcttattgtagttgtttttaaatcacagtagacctctgtatatgctagattactgaactggtctcattaacaattcgtaagaaatatggattcgtgtccttggcttgctatcccttccaggagatggcaggagatggtgcaggtcatangtatgcgtgctattttagtatagctggtttgggta

SEQ ID NO: 3211 - DNA, 419 bp, Bos taurus
  Clone ID: 14-LIB34-032-Q1-E1-D9
cggacgcgtgggttgcagagtggccagacacgttaccactgtctctggctctgggaacggttggcatgcccggcctaacagcctactttggcctgttggacatctgtggagtgaagggtggagaaacagtgctggttagtgcggcagcaggagcagtgggctctattgtggggcagatcgctaagctcaagggctgcaaagttgttggaacagcagggtctgatgaaaaagttgcttggcttaaaaagcatggatttgatgttgcccttaactacaaaacagtgaagtctttggaagaagctctgaaagtagctgctcccgagggttatgattgttattttgataatgtgggtggagagttttccaatgttgctatcacccagatgaagaaatttggaagaattgctatatgtggggcc

SEQ ID NO: 3212 - DNA, 399 bp, Bos taurus
  Clone ID: 14-LIB34-034-Q1-E1-D5
acagatagtcacctttgatctaagggttcagcctttcagtgtgacagaaggaaagtattctactgcccaagagtgttcgctggatgatgacaccattctaataccaattatagttggtgctggtctttcaggcttgattatcgttatagtgattgcttacctaattggcagaagaaaaagttatgctggatatcagactctgtaacactaatctacatgataataaaagcaagtacaaattccaacatgcaatactattcaacttaaggtgtatatagtttacagtgctgatcttaaaacaggtggtattgggggatttcaaactcaaatacataaaaacacccctaaaatgatcaactataaattaatcacatgattttggcttttccaactaaggaa

SEQ ID NO: 3213 - DNA, 435 bp, Bos taurus
  Clone ID: 14-LIB34-035-Q1-E1-D5
tacagatttcctgaataattaccaaaccagtgtagacaaagatctacgaactttggaaggcatcttatatcaggttgagaacaaaacatcagaagccagagagctggtcaaagcaatccaaatcagctataaccctgatcaaccatcaaagccaaataacatagagagtgctaccaagaattccaagagtatgatggaagaaattatgaaatatgaaacactgataacaacacatgaatcaacaattcgatttttgcaagaaatatataactcaaatagtcaaaaaatcgttaacctaagagataaagtggtccagcttgaagcaaactgtcaagagccttgtcaagatacagtgaaaatacatgatgtaactgggagagattgccaagatgttgccaataagggggccaaagagagtggactttactttatcag

SEQ ID NO: 3214 - DNA, 279 bp, Bos taurus
  Clone ID: 14-LIB34-036-Q1-E1-D9
acttaacagacttgccatcggagaaggacagcagcaccaactggggggagccaaacaggctggagacgtataaaagaccatttcaaaagtgatttacttttttaaagaactttatctgaaaagaaaaagataatatttttcctatgggacaatggacttgcaaagcctcacttcactttaaaagtaaaaagaacccatgttgagaactccactaacagttttatgccggtgataatttatctacataccatttcaataaatattttgtttcctaagact

SEQ ID NO: 3215 - DNA, 419 bp, Bos taurus
  Clone ID: 14-LIB34-037-Q1-E1-D4
aggcgccatctttgaaccctcgctatcagttggaacagagaatgacacattcactgttctcaacctggctgtagcagctacaccccacctctatccaagcacatttgttcagataatactcaatgtatttatcaaaaactcaaactcttttatgtttcaaaaaagaactctgaaagaactattgtggggctataaggatccattcttgagttcggttccatactctattcctaccacagttggtgtgttttatccttacaacaacactgcagatggagtttataaagttttcaatggaaaagatgacataagcaaagttgccagaattgacacatataaaggcaaaaagcatctctcctattggccaagttattgtggcatgattaatggtacagacggagccacatttccacctttca

SEQ ID NO: 3216 - DNA, 411 bp, Bos taurus
  Clone ID: 14-LIB34-037-Q1-E1-D9
cttattaccggagctggacacggtattggcaggcagactgcctacgaatttgccaaacttaagtgcaagctggtcctgtgggatataaataagcatggacttgaggaaacagccaccgaatgcaagagactgggtgcaaaggctcatacctttgtggtagactgtagtaaccgagaagatatttacagctctgcaaagaaggtgaaggcagaagttggagatgttagtattttagtaaataatgctggtgtagtctacacatcagacttgttcgctacacaagaccctcagattgaaaagacttttgaagttaatatccttgcacatttctggactacaaaggcatttcttcctgagatgatgaagaataatcatggccatattgtcactgtggcttcagcagctgggcat

SEQ ID NO: 3217 - DNA, 242 bp, Bos taurus
  Clone ID: 14-LIB34-038-Q1-E1-D5
gactagttctagatagcgagcggccgccctttttttttttttttttttttttttttttttttttttttttttttttttttttttttttttttttttttttttttttttttttttttttttttttttttttttttttttttttttttttttttttttttataaacttcaaaaattttttagaaaataaaagcaccaaatttttgggcgtacagttcaagatatgacgctttgcagagaggcca

SEQ ID NO: 3218 - DNA, 393 bp, Bos taurus
  Clone ID: 14-LIB34-038-Q1-E1-D9
ggagcttctcctggcctctgccatcttctgcctggtgttctgggtggtcaggacctggcggcctcgggtccctcaaggcctgaagagtccaccggagccctggggctggcctctgcttgggcacatgctgacgttggggaagaacccgcacgtggtcctgtcgcagctgagccagcgctatggggacgtgctgcagatccgcattggctgcacacccgtgctggtgctcatcggcctgtacaccgtccggcaggccctcgtgcggcagggcgatgatttcaagggccggcccgacctctacagcgtcaccttggtcactgatggcgatagcatgaccttcaacccagactctggaccagtgtgggctgctcggcgacgcctggcccataatgc

SEQ ID NO: 3219 - DNA, 422 bp, Bos taurus
  Clone ID: 14-LIB34-040-Q1-E1-D5
taattgaatcatcagattttgcatgtttctagtgtaggttgtttttttttttttttaagaaggcccagaaataatagcttaaagatttctaataattgttctacaaaaaaacagtcagatagatgataaaaagagaaagtggcctccaagacctagaaaagatactctatctcgtctttgattaaaaacaccagcaatgtcaacaagaagcctaagaaccatgagagaacattgccgctggcccatctctgagcttaaacagtttgcacaaaggttttgattgcacagagattctcagctaacagtttctcaggttttacagactctccttcggaagtgaaaactgcttttctgcccccatgatgaaatcttgattcccgagtctgggttttttttgggggggtggcggggaggcggggggc

SEQ ID NO: 3220 - DNA, 411 bp, Bos taurus
  Clone ID: 14-LIB34-041-Q1-E1-D5
tacacatgaagtacttatgacacaatgaagtgggtgacttttatttctcttctccttctcttcagctctgcttattccaggggtgtgtttcgtcgagatacacacaagagtgagattgctcatcggtttaaagatttgggagaagaacattttaaaggcctggtactgattgccttttctcagtatctccagcagtgtccatttgatgagcatgtaaaattagtgaacgaactaactgagtttgcaaaaacatgtgttgctgatgagtcccatgccggctgtgaaaagtcacttcacactctctttggagatgaattgtgtaaagttgcatcccttcgtgaaacctatggtgacatggctgactgctgtgagaaacaggagcctgaacgacatgaatgcttcctgagccac

SEQ ID NO: 3221 - DNA, 357 bp, Bos taurus
  Clone ID: 14-LIB34-042-Q1-E1-D5
ctcctccctctaatactaatagctagccaacatcatctatcaaaagaaaacctaacccgaaaaaaactatttattactatgctgatctcactacaactattcctaattataacctttaccgccatggaactaatcttattttatattctatttgaagcaacactagtcccaacactcattattattacccgatgaggaaaccaaacagaacgcctaaacgccggactctatttcctattctatacactagctggctccctacccctattagtcgcactaatttatatccaaaacacagtaggatccctaaatttcctaatattacagtactgagtacaacctgttcataactcttga

SEQ ID NO: 3222 - DNA, 411 bp, Bos taurus
  Clone ID: 14-LIB34-042-Q1-E1-D9
gggtcgacgcacgcatccatacagactcatatgaggaaggaaggaaatagaatccatttccaaaccaaggtccaagaaactggaggcatcgtcatttcaaatgcatatgtggatcttgtaccagcgtctgctatttcagctaagacaccatctgagggtgcggggcttcagagtacccttgtgtttgaagaaataggtcgccgccttcagggtattggggaagaggtggtcaagaaagtccgtgctgtgtttgagtggcatatcactaaaggtgaaaatactgcagccaagtggactattgacctgaaaactggttctggaaaagtgtatcaaggccctgcaaaacgctctgctgatgtaaccatcacactttcagatgaagatttcaatggaagtagtcttgggcaagct

SEQ ID NO: 3223 - DNA, 414 bp, Bos taurus
  Clone ID: 14-LIB34-043-Q1-E1-D5
cttaaatctctctccctttactctttcagctgtttccccctaactgttgttcagtcatcctagttttaatgtagtgccttgtcttatgtccttgaatctagttgtataactttacttttttaggcaataattagaacagttcccttcagaggctgcatttgccttccatctcctgaagagatacaagtctacaagtctgcctttgaaccatcatttaaaatataaaaaaacactgaacatgtttttgttatggttaccttctggggtttcagttcctcagaagtaacttttcacaatgagaagttaaaaaccctgaacaaaaatgaagcttcacgtatatttcaaatagtataaagtttattttacaaaagagaagtgactctcgggagaaatttagaatcatgctgacacaga

SEQ ID NO: 3224 - DNA, 354 bp, Bos taurus
  Clone ID: 14-LIB34-044-Q1-E1-D9
ccgggccgacccacgagtccatgaagacgctgtcacaagagtcagggatccaacaacaggccttgagaaatgtggctcttatacctcctgctgccagtcctgttctacagggtgggaggcgccacacccacccctcagaagctctatggggaagtgatgtccccgctgttccccaagccttaccctaacaattttgagaggaccactgtgatcacagtacccacggggtacaaggtgaagcttgtcttctggcaatttgacctgcagccttcggaatgttgtctctaagactaggtcaagatttctgctgataacaagaccatggggacgttccgttggcaactgggttctccc

SEQ ID NO: 3225 - DNA, 414 bp, Bos taurus
  Clone ID: 14-LIB34-046-Q1-E1-D5
aatcatcctcatggacatcatccccatgacaatgatttctatgaccatggaccctgtgacccaccaccacataggcaagatccccaagaccaccatcgccaaggccgtgacgcaccacctaggcactccaaagaaagaggtccaggtaaaggacactttcgcttccactggagaccaactggatatattcaccgacttccttcactaaagaaaggtgaagttctccctcttccagaagccaattttcccagcttctcattgccaaaccacaataatcccctacagccagagattcaggccttcccccagtcagcctctgaatcatgtcccgggacattcaacattaagtttctacatatatcaaagttttttgcatatacattaccaaaatacagtctgatttccttgatgggg

SEQ ID NO: 3226 - DNA, 427 bp, Bos taurus
  Clone ID: 14-LIB34-046-Q1-E1-D9
caaaagcctttgatgagaaattgttcaccttccatgcagatatatgcacacttcccgatactgagaaacaaatcaagaaacaaactgcacttgttgagctgttgaaacacaagcccaaggcaacagaggaacaactgaaaaccgtcatggagaattttgtggcttttgtagacaagtgctgtgcagctgatgacaaagaagcctgctttgctgtggagggtccaaaacttgttgtttcaactcaaacagccttagcctaaacacgacacaaccacaggcatctcagcctaccctgagagtaagaggaaaaaagagaaatgaaaactcagagcttattcatctgttttccttttctgttggtgttaaaccaacactctcactaaagaacgtaaatttcgttaaaaattttgcttcgtttgtttgtgca

SEQ ID NO: 3227 - DNA, 372 bp, Bos taurus
  unsure (357): unsure at all n locations; Clone ID: 14-LIB34-047-Q1-E1-D5
ttctgaaaccctagaggacgcaactgtgagtgtctctgtcctagcctctcaacttgctttcctgtgtcctgtgagtatcgtcctgcctgaatgggcgctttatcctactggtgctgaggaaggcaaggtctgtacagctgttccagtccaggagggacatgcttcccctccctctctccatattgctcctgctcacacagtcccagagtttcctgggcgaagaaatggatgtctattctgagaaaaccctcaccgatccctgcaccctgattgtgtgtgctccaccagcagatagccttcgtggtcatgatggacgagatgggaaagaaggcccccatggacataagggggatccanggcctcgaggtatgc

SEQ ID NO: 3228 - DNA, 428 bp, Bos taurus
  Clone ID: 14-LIB34-048-Q1-E1-D9
gggggggtacgctctgcttgatgaaccccccatcaaggtcggtgagcgaagaccaatgcggaactctcagaagactgctgtgaatgctgatggtgtgaccaccagtgaaccacaccacccacctcagattacccgggcccgggcagactccagagttgattcgtgaggatgcttgtctcgaatagaattggatttatggtgacgtttcctgaagatttacatcgatggcttggtgcagactgagacttagtcaccacacagtggcatcttttccagctcccagccacaaggaacttagctactattttggtcgaatacgccaactgctctgtatcgcaatgccatgttgatatcaaagagtatgcacttaatgaagttgtcgcaaggataaaacagtatttcaacatgatattgggcacccagctgct

SEQ ID NO: 3229 - DNA, 435 bp, Bos taurus
  Clone ID: 14-LIB34-049-Q1-E1-D5
agtggagcaacaaacaatggatcccaaaggccagagagtgaagcttaatgatggccacttcattcctgtcctgggatttggaacctttgcacctcgagaggttcctaagagtgaagctctggaagtcaccaaatttgctatagaggctgggttccgccatattgacagtgctcatttgtaccaaaatgaagagcaggttggccaggccattcgaagcaagattgccgatggcactgtaaagagagaagacattttctacacttcaaagctttggtccacttcccttcgtccagaattggtccgaccagccttggaaaagtcactgaataatcttcaactggactatgtcgatctttatattattcattttccagtggctctgaagccaggggagacacttttcccaacagatgacaatggaaaaccaatatttga

SEQ ID NO: 3230 - DNA, 255 bp, Bos taurus
  Clone ID: 14-LIB34-049-Q1-E1-D9
actatatccagttcgcgaactgacgactctacgcaagcttcttggctgccttagatctagatgtttgtggttcattgacaattgatcacttgagcggcagtatgatgtcagtgattgtcacctgcacgtgtcaacatactgccccatgggcattgcatcgttctgctcaagaagatcggtctcgttcacgaacggggagtaaacgacaccatgaaagacgagctgccggagtagcgcggttattacgcgggctac

SEQ ID NO: 3231 - DNA, 432 bp, Bos taurus
  Clone ID: 14-LIB34-050-Q1-E1-D5
caactacctggagacctcgggcgccgcggtcagcagtgttggagcatgagttccaagccacagtccatcggggtcattggagctcccttctcaaagggccagccacgaggaggggtggaagaaggccctacagtacttagaaaggctggtctgcttgagaaacttaaagaactagagtgtgatgtgaaagattatggggacctgtcctttgctgataatcttgatgacagtccctttcaaattgtgaagaatccaaggtgtgtgggaaaagcaagtgaaaagctggctgatgtggtggcagaagtcaagaagactggaaggatcagccttgtcctgggcggagaccacagtttggcgatcggcagcatctctggccatgccagggtccacccagacctctgtgtcatttgggtggatgctcacacggacatc

SEQ ID NO: 3232 - DNA, 230 bp, Bos taurus
  Clone ID: 14-LIB34-051-Q1-E1-D5
ttttatattgctgctgctgcttagtcacttaaggcatgtgaccctgtggactgtagcctgctgggctcctctgttcatgggattctccaggcaagagcactggagtgggtgccatgccctcctccaggggatcttcctgacccagggatcgaacctgggtctcctgcattgctggcagattctttaccgctgagccaccaaggaagcccattctgtcttgggctatagct

SEQ ID NO: 3233 - DNA, 242 bp, Bos taurus
  Clone ID: 14-LIB34-052-Q1-E1-D9
agcccccctctgccatcccgcagccgaccatcaccaagcaggaagtcatctagcaagtcaatgcggggcgggggctctgctgatcccccagccccctccgagagcccctgatggtcacttggtcacagtgaagcaagctgtgaccaccggccagtcccagagcagtgatgggaagggcgaggacccttgaactcgggctgtgggttgcatcccactgccccccttcaccatttgctctggat

SEQ ID NO: 3234 - DNA, 237 bp, Bos taurus
  Clone ID: 14-LIB34-054-Q1-E1-D5
gagaccggtggccccaaaggcaaagactactgcatcctctacaacccgcagtgggcccacctgccgcatgacctcagcaaagcgtctctcctgcaggtgcgggactggaccagctccgtgctctgctctcccgccgacctccccccaaaaggcttcagcaaccagatcccgctggtggcacgggggaactgcaccttctacgagaaagtgcggctggcccagggcagtggggcccga

SEQ ID NO: 3235 - DNA, 352 bp, Bos taurus
  Clone ID: 14-LIB34-055-Q1-E1-D5
cagggatgtgaagatcaaaaagaaagggagcatctatagcctcaatgaaggctatgcgaaggactttgatcctgccctcaccgagtatgtccagaggaagaagttccccccagacaactcagccccctatggcgccaggtacgtgggctccatggtagccgatgtacaccgcaccctagtctatggagggatctttatgtatccagctaacaagaaaagccccagtggaaagctgagactactgtatgaatgtaaccccatggcctatgtcatagagaaggcaggaggaatggctaccaccgggaaggaaactgtgctggacattgttcccactgacatccatcagaagtcg

SEQ ID NO: 3236 - DNA, 370 bp, Bos taurus
  Clone ID: 14-LIB34-056-Q1-E1-D5
cggacgcgtgggctggtttcagctgtacgatgagaagaagtggaatcagttttacagtgaagtagtaggaaggcccactacaatggcagagttgatggggaaagccgaaatgtggcttattcgaaactattgggatttttcatttcctcgcccacggctaccaaatgttgaatttgtaggaggcctccactgcaaacctgccaagcccctgcctaaggaaatggaagaatttgtgcagagctctggagaacatggtattgtggtgttttcattggggtcaatggtcagtaacatatcagaagaaagagccaatgtgattgcatcagcccttgcccagattccacagaaggttctatggagatatgatggc

SEQ ID NO: 3237 - DNA, 220 bp, Bos taurus
  Clone ID: 14-LIB34-057-Q1-E1-D5
ggcctttcatgaaaagtcaatccttttaaggcatcagacagttcatactggagagaaaccttacaaatgtgatgagtgtggcaaggcctttcatgaaaagtcaatccttttaaggcatcagacagttcatactggagggaaaccttacaaatgtgatgagtgtggcaaggcctttcgtgtaaactcaatccttttaaggcatcaaacagttcatactgga

SEQ ID NO: 3238 - DNA, 205 bp, Bos taurus
  Clone ID: 14-LIB34-058-Q1-E1-D5
agatcacgaatcaaggaagaactacttcacttacatgaccagacgccacgagttgtcttcttagataacggattagcacgttacatcaggtcagtaataggaacgaggaagcggcaccacacggacacgatagatgcgcaagaagtgtagacacgctgaaccagtctgcccgccagcatcgtaggtcgaattgctcctccttcgt

SEQ ID NO: 3239 - DNA, 221 bp, Bos taurus
  Clone ID: 14-LIB34-058-Q1-E1-D9
cctacttttatgcaccagaactcctttactatgctaataaatataatggagtttttcaagaatgctgccaagctgaagataaaggtgcctgcctgctaccaaagattgaaactatgagagaaaaagtactgacttcatctgccagacagagactcaggtgtgccagtattcaaaaatttggagaaagagctttaaaagcatggtcagtagctcgcctgagc

SEQ ID NO: 3240 - DNA, 206 bp, Bos taurus
  unsure (187),(197): unsure at all n locations; Clone ID: 14-LIB34-059-Q1-E1-D5
ggaaatagcatttattggtgagcatgattaaggaggggacagcactgatgctcatgagtgtagggcccgccatttgtccaggggaccacgattagggatgtatttgaccccacagccgtctgggatgagtcgcttttctgccaccatgttctcaaattcatccgcgttgaacttggtaaatccccancttcttagangatgtggac

SEQ ID NO: 3241 - DNA, 209 bp, Bos taurus
  Clone ID: 14-LIB34-059-Q1-E1-D9
aatcgctgagcctgtcacctgtgttccaggagcggaaccagcaatgtcgtcctcagccatgccagacgtacctgccccactcaccaatttgcagtttaaatatactaagatcttcataaacaatgaatggcatagttcagtgagtggtaagaaatttccagtctttaatcctgcaactgaggagaaactctgtgaggtggaagaaggat

SEQ ID NO: 3242 - DNA, 234 bp, Bos taurus
  Clone ID: 14-LIB34-060-Q1-E1-D5
gaagcaaaagatgccttcctgggctcgtttttgtatgaatattcaagaaggcatcctgaatatgctgtctcagtgctattgagacttgccaaggaatatgaagccacactggaggaatgctgtgccaaagatgatccacatgcatgctattccacagtgtttgacaaacttaagcatcttgtggatgagcctcagaatttaatcaaacaaaactgtgaccaattcgaaaaactt

SEQ ID NO: 3243 - DNA, 336 bp, Bos taurus
  Clone ID: 14-LIB34-061-Q1-E1-D5
gtgagagtgccctgctggcctggtcctgggtgccggcgtggtgaggaacccagcgctcgaagaggcagccatggggctgctgtctggggacacgctggggcccctggccgtggccctgctcatcttcttgctcttgctggacctgatgcaccggcgctcacgttgggccccacgatacccaccaggccccatgccgctgccggtgctgggcaatctgctgcaggtggacttcgaggacccacgtcccagctttaaccagttgcggcgccgtttcgggaacgtgttcagcctgcagcaggtctggacaccggtactcgtgctcaacgggctggcggc

SEQ ID NO: 3244 - DNA, 433 bp, Bos taurus
  unsure (346): unsure at all n locations; Clone ID: 14-LIB34-063-Q1-E1-D5
cccgggtgcacccacgcgtcaggacaatcgcacctgccaaggaaatggtcggtgggatggggaaacggccatctgtgatgatggaccaacttactgccccaacccgggcatcccccttggcacaaggaaggtgggcacccagtaccgccttgaagaccgtgtcacctactactgcaaccgggggctcactcaacgtggttctgagcagcgaacatgcctggaaggtggctcttggagtggaacggacccttcctgccaagactcctttatgtacgacactcctgcagaagtggccgaagctttcctgtcttccctgacagagaccataaaaggagttgatgccgangatggacatagcccaggggaacaacagaagagaaagattgtcctggacccctcaggctccatgaacatctacctggtaatggatgga

SEQ ID NO: 3245 - DNA, 257 bp, Bos taurus
  Clone ID: 14-LIB34-063-Q1-E1-D9
caatttcctactgactatgacgagggacaagatgacagacctaaggtaagtttgggtgcccgcggtcatcggccctatgacaagaagaaggaagaggccccagcctgagacctgtgcccctcccatcagcggaggtggctatcgggctcgtcccgccacagcaactgtggggcagaagaaaatggagagaaagccccctgacgctgatggctgcctgcacgcggaccggaatctgggtgtgttgtgtcctacaggat

SEQ ID NO: 3246 - DNA, 215 bp, Bos taurus
  Clone ID: 14-LIB34-065-Q1-E1-D5
cttttatttctcttctccttcccctcaaccccgcctaatcccaggggtgtgtttcgtcaaaatacacacaaaattgaaattgctcatcggtttaaagatttgggaaaagaacattttaaaggcctggtactgattgcctttcccaattaccccaacaattgtcaatttgagaacacgttaaaatatagtaccaactaactgagtttgcaaaaaca

SEQ ID NO: 3247 - DNA, 196 bp, Bos taurus
  Clone ID: 14-LIB34-065-Q1-E1-D9
ccttgcacatttctggactacaaaggcatttcttcctgagatgatgaagaataatcatggccatattgtcactgtggcttcagcagctgggcatactggggtccccttcttactggcttactgttcaagcaagtttgctgctgttggatttcataaagctctgactgaagaattgagtgccttaaaaagaaccgga

SEQ ID NO: 3248 - DNA, 202 bp, Bos taurus
  Clone ID: 14-LIB34-067-Q1-E1-D9
cagacgcgtgggctattgtatatgcctgtaataaaggttttcggcttgaaggcgatagtttaatccattgtgaagctgataatagctggaatcctcctcctcccacttgtgaactcaatggttgtcttggcttaccacacatccctcatgccttgtgggaaagatatgaccaccagacacaaacagaacagcaagtgtatga

SEQ ID NO: 3249 - DNA, 211 bp, Bos taurus
  Clone ID: 14-LIB34-069-Q1-E1-D5
gcccattttgctttccacttagagaagatatatacttttcaagagacataactgaatagttaaccatttgacagaggcccatagatgagcagtgcggggaccggttgccagggtccaaattcggattgatttctctactgctatctatctgttttgacacaaacttcctttgaaaatgtgcctagccttaccaataatgaaatgggggaag

SEQ ID NO: 3250 - DNA, 237 bp, Bos taurus
  Clone ID: 14-LIB34-069-Q1-E1-D9
acgcggacgcgtgggggcagcaaatgttacaggccctggtggagttccagtgcaaggcagtaaatacgcagcagaccgtaaccattacagacgctatccacgtcgcaggggtcctccacgcaattaccagcagaactaccagaatagtgagagtggggaaaagaatgagggatcggagagcgctcccgaaggccaaggcccaacagcgccggccctaccgcagggcggaggttccca

SEQ ID NO: 3251 - DNA, 391 bp, Bos taurus
  Clone ID: 14-LIB34-071-Q1-E1-D5
acggacgcgtgggtgctcctcttgagtcagccctatccacggcagagatgttttccgtgagggacctctgcctggtcctgagtttggtgggtgcaattaagaagatggtagtgatcctcccagtggtgactttttaactgaaggaggaggggtgcgtggcccaagacttgtggaaagacagcaatctgcctgcaaagagacaggctggcccttctgctctgatgaagactggaatacaaaatgcccttctggctgcaggatgaaagggttgattgatgaagtcgatcaagattttacaagcagaataaataaactaagagattcactatttaattatcagaagaacagtaaggactctaatacattgaccaagaacatagtgggactaatg

SEQ ID NO: 3252 - DNA, 400 bp, Bos taurus
  Clone ID: 14-LIB34-071-Q1-E1-D9
actaagccaaaatgggaaaggagaagacccacatcaacatcgttgtcattgggcacgtagattcagggaagtctaccacgactggccatctgatctataaatgtggcgggatcgacaagagaacaattgaaaagttcgagaaggaggctgccgagatgggaaagggctccttcaaatatgcctgggtcttggacaaacttaaagctgaacgtgagcgtggtatcaccattgatatctccctgtggaaatttgagaccagcaagtactatgttaccatcattgatgccccaggacacagagacttcatcaaaaacatgattacaggcacatcccaggctgactgtgctgtcctgatcgttgctgctggtgttggtgaatttgaagccggtatctccaagaa

SEQ ID NO: 3253 - DNA, 400 bp, Bos taurus
  unsure (276): unsure at all n locations; Clone ID: 14-LIB34-072-Q1-E1-D5
acctcagaccacactatctccactcgctcagacctgtggaagattagcgaccatgatttccaatgggataggaaccgtcaccgctggaaaaaggagtatatgtcttctccctttgctgcttattggcctctggggctgtgtgacctgtcatcggagccctgtggaagacgtctgcacagccaaacctcgggacattcctgtgaatcccatgtgtatttaccgttcctcagagaagaaggcaactgagggccaaggctccgagcagaagatccctgnggccaccaaccggcgggtctgggaactttcaaagccaattcccactttgccactgccttctatcagcatttggcagactccaggaataacaatgacaacattttcctgtcacccctgagtatct

SEQ ID NO: 3254 - DNA, 413 bp, Bos taurus
  Clone ID: 14-LIB34-073-Q1-E1-D5
cgcggcggcaagatggccgtgcaaatttccaaaaagaggaagtttgtcgctgatggcatcttcaaagctgaactgaacgagtttctcactcgggagctggctgaagatgggtactctggagttgaggtccgagttacaccaaccaggacagaaatcattatcttggccaccaggacacagaatgtacttggtgagaagggccggcggatccgggaattgactgctgtggttcagaagagatttggcttccctgaaggcagtgtagagctttatgctgaaaaagtagccacaagaagactgtgtgccattgcccaggcagagtctctgcgttacaaactcctaggaggccttgctgtgcggagggcctgctatggtgtgctgcggttcatcatggagagtggggccaaaggctg

SEQ ID NO: 3255 - DNA, 418 bp, Bos taurus
  Clone ID: 14-LIB34-074-Q1-E1-D5
cccgggccgacccacgacgtccgctgctgcctcatccacagcttctgatagatccaagaggactctcctctctcagactacctgtcaccatggcccaccagtttccagccctcacttcagaacagaagaaggcactctcagaaactgcccgacgcattgttgccaatgggaaggggatcctggctgcagatgagtccgtaggcacgatggggaaccgcctgcaaaggatcaaggtggagaacacggaagagaaccgccggcagttccgcgaactcctcttcactgtggacagctccgtcagccagagcatcgggggtgtgatcctcttccatgagaccctctaccagaaggacggccagggaaaactgttcagagacatcctcaaggaaaaagggatcgtggtgggaatcaagttaga

SEQ ID NO: 3256 - DNA, 435 bp, Bos taurus
  Clone ID: 14-LIB34-075-Q1-E1-D5
cccacacgtccaaaccactataattattgctattccaaccggggtaaaagtcttcagctgattggcaacacttcatggaggtaatatcaaatggtctcctgctataatgtgagccctaggctttattttcttatttacagtacggggtttaactggaattgtcttagccaactcttccctcgatattgttcttcacgacacatactacgttgtcgcacatttccactatgttttatcaataggagctgtatttgctattataaggggatttgttcattgattctcactattctcaggttatactctcaacgatacatgagccaaaatccacttcgcaattatatttgtaggcgtcaatataaccttcttcccacaacactttctaggactatctggcatgcctcgacgatactcggactacgcagatgcatacac

SEQ ID NO: 3257 - DNA, 485 bp, Bos taurus
  Clone ID: 14-LIB34-076-Q1-E1-D5
ccgggtcgaacacgaatccggtaaagcccctttcattatgaagcatgcagtgttatcggagagcaaggacggcctgagtgtatatgaagggagacgtgtgttgcaggtattcggtacgtgtatcacctcagatggcaaaccggattgtggattctgcaaggagcatcctcaacaagtttatacctgatatctatatttacacagaccacatgaaaggcatcaactctgggaagtctccgggctttgggctgtccctggttgctgagaccaccaatggcacttttctcagtgctgagctggcttccaacccccagggccagggcgcagcgatgctgcccgaagaccttggcaggaactgtgccaggctgctgcttgaagagatctaccggggtggatgcgtggactccaccaaccagagcctggctctattactcatgacccttggacaacaggatgtttccaaagtcctgctccgaccactctct

SEQ ID NO: 3258 - DNA, 378 bp, Bos taurus
  Clone ID: 14-LIB34-076-Q1-E1-D9
cgacccacaagtcagacttgtagtcggttacaccaagagttatctctctatggtagggtcctgctgtacttcaccaaagccatcagtatgctttttgaacgagagacttcagcttaaacatttttcacttctcaccattatgacaaacagaatctgctcacaatacgctgcttatgggaaggagaagtcaaggctcagccatctcatcagatttgcccagagagtgcctactgcacatctggaagatgttctgccacttgctgaagatatgtacaacaatccgctccaagtgctgtgactctgtctctgaggactgcatcaaggagcttcctgaatatgcagtaaaactctgtgacaacgtatccactaaaaattcga

SEQ ID NO: 3259 - DNA, 460 bp, Bos taurus
  Clone ID: 14-LIB34-077-Q1-E1-D5
aaaactctagagagagtcgtctaagtcctctcagaacccagagcgaaaacagagcctggtgggctgggactcccatctttctagaatcttcctattgctgctatttgtagtctcagcccaggggctcaccccaaatcctgaagcctgtctggtgttctcctcggtcaatggcagctccatctcctgccagccacctgcccaaatcccccacagcctcccagctgacaccatctttctggctgtggagttcttcaacctgactcagctgcctgccgacttcctccagggcgtccctaacctccaggaactccacctttccagcaaccgactggaggacttctcccccaagttcctgctgcccgtgccccagctaaaggtgctcgacctgacccgcaattccctgaccgggctgttccctggcttcttccgggtctcggctgccctctgcaccctggtgctg

SEQ ID NO: 3260 - DNA, 453 bp, Bos taurus
  unsure (370): unsure at all n locations; Clone ID: 14-LIB34-078-Q1-E1-D5
ctcttatcagaagaacacagagaaaatcagcatgagtactaccgggaaagttatcaggtgcaaagcagccatagtctggaagcctggtggatcattttccattgaggaggtagaagtggctccaccaaaggcaaaagaagttcgcataaagatggtggccacggcgctctgtgggactgagatgaaaatgttgaaggataaaaatcttcagcaccaacactaccctatcattatgggccatgaaggagctggaatagtcgagagtgtgggagaaggagtgagcacagtgaaagcaggagataaagttatcgcactctttctaccacagtgtggtgaatgcacctcttgccttaattctgcagacaatttntgtataaaactcaaacaggcagaaacccacctgatgtctgatggtaccagtagatttacctgcaaaggaaaaccagtatacca

SEQ ID NO: 3261 - DNA, 434 bp, Bos taurus
  Clone ID: 14-LIB34-078-Q1-E1-D9
gtcgtattacttcttcataatgaatctgattctgtggggagaaggatcttcagcagctattcctttcgggaccttggttgccatattggctctttggttctgtatatctgtgcctctgacatttattggtgcatactttggttttaagaagaatgccattgaacacccagttcgaatcaatcagattccacgtcagattcctgaacagtctttctacacaaagccattacctgatattatcatgggagggattttgccctctgggtgcatctttatacagcttttcttcatcctgaatagtatttggtcacaccagatgtattacatgtttgggttcctgttcctgatgtttatcattttggttattacctgttctgaagcaactatacttctttgctatttccacctgtgtgcagacgattatcattgtcagt

SEQ ID NO: 3262 - DNA, 213 bp, Bos taurus
  Clone ID: 14-LIB34-079-Q1-E1-D5
actcacgagtccagacgcctccagctgcctgcctgctgagacaccggggcctctctgaagccatcatgaaatccttcgttctgctcttttgcctggctcagctctggggcttccattcggatgccgcatgacccggttgcaggttagagcgaaccggcctgtgatgatgcagatacagagcaaccagccttggctgcggtgcactacatcatc

SEQ ID NO: 3263 - DNA, 411 bp, Bos taurus
  Clone ID: 14-LIB34-080-Q1-E1-D5
agcctatggtgacatggctgactgctgtgagaaacaagagcctgaaagaaatgaatgcttcctgagccacaaagatgatagcccagacctccctaaattgaaaccagaccccaatactttgtgtgatgagtttaaggcagatgaaaagaagttttggggaaaatacctatacgaaattgctagaagacatccctacttttatgcaccagaactcctttacgatgctaataaatataatggagtttttcaagaatgctgccaagctgaagataaaggtgcctgcctgctaccaaagattgaaactatgagagaaaaagtactgacttcatctgccagacagagactcaggtgtgccagtattcaaaaatttggagaaagagctttaaaaacatggtcagtagctcgcctgag

SEQ ID NO: 3264 - DNA, 426 bp, Bos taurus
  Clone ID: 14-LIB34-081-Q1-E1-D5
acttcccatgcggttgtggctcgaactgtgggcggcaaggaggatgtgatctgggaacttctcaatcacgcccaggaacattttggcaaagataaaccagacaatttccagcttttccaatcccctcatgggaaggacctgctgtttaaggactctgctgatgggtttttaaagattccttctaagatggattttgagctgtacttgggatatgaatatgtcactgctcttcagaatctaagagaaagtaaacccccggactcctcaaaggatgagtgcatggtgaagtggtgtgcaattggtcaccaggagaggacaaagtgtgatcggtggagtgggttcagcggcggggcaatagagtgtgaaacagcagagaacactgaagagtgcatcgccaagatcatgaaaggagaagctgatgccatg

SEQ ID NO: 3265 - DNA, 409 bp, Bos taurus
  Clone ID: 14-LIB34-082-Q1-E1-D5
attttcttatttacagtagggggtttaactggaattgtcttagccaactcttccctcgatattgttcttcacgacacatactacgttgtcgcacatttccactatgttttatcaataggagctgtatttgctattatagggggatttgttcattgattcccactattctcaggttatactctcaacgatacatgagccaaaatccacttcgcaattatatttgtaggcgtcaatataaccttcttcccacaacactttctaggactatctggcatgcctcgacgatactccgactacccagatgcatacacaatatgaaatactatctcatcaataggctcattcatttccctaacagcagttatactaatagttttcatcatctgagaagcatttgcatctaaacgag

SEQ ID NO: 3266 - DNA, 403 bp, Bos taurus
  Clone ID: 14-LIB34-083-Q1-E1-D5
caaaaaccatgaacattcagaacagcctagagagaaataaatggtaagactccccatgggaacaccgtcaatctctatggatgacataaaactgtgtgcagaattctaactcctttctgaggtttcctcccaggttttcttaactagcacagaaaatggacaaactaatatacttgtggcctacttcagttgcttttctgataatgaatgtgtaccctcaaatgtacaatgtcaattttcatacaaagattcctgacattttgaataaactgtaacatctggtccttatgtggcaataagggaagttaagagactgaatgtcgaacttcttaatggagggaaaaaaataataaaaacctccagaggtcaaagaggaacaagagagaaagacagattggccaaa

SEQ ID NO: 3267 - DNA, 404 bp, Bos taurus
  Clone ID: 14-LIB34-083-Q1-E1-D9
aggaacaatggaagagaatacggacattgctgtctccaaccttcaccagtgggaagctcaaggagatgttccctatcattgggaagtatggagatgtgttggtgaggaacctgaggaaggaagcagagaaaggcacgtccgtcgacatgaaagaggtctttggggcctacagcatggatgtgattactagcacatcatttggagtgaatattgattcccttggcaacccacaagatccctttgtggagaatgccaagaagctcttaagatttgatatccttgatccatttctactttcagtagtactctttccattccttatcccaatctttgaagtattaaatatcagcatatttccaaaaagtgctgtgaattttttgacaacatccgtaaaaaagataaaa

SEQ ID NO: 3268 - DNA, 413 bp, Bos taurus
  unsure (305),(342): unsure at all n locations; Clone ID: 14-LIB34-085-Q1-E1-D5
agggcggcggctctggatccactgcccacaccccgctctcgcaggcagacatgaggacagagagaacttccttcctcctggctctggggctcctggtgtctgggttctgctccagggtccactgcctcccagagaatgtgaccccagaagaacagcacaaagggacgtctgtggatggccactcattagcctccagcaacactgacttcgccttcagcctctacaagcagttggctttgaaggaccccaataagaatgtcatcttctcccctctgagcatctccatagccttggccttcctgtcnctgggggctcatgaccacactgtgacagagatcctgnaaggtctcaagttcaacctcacagagacccccgagacagaaatccaccaaggcttccagcacctcctgcag

SEQ ID NO: 3269 - DNA, 394 bp, Bos taurus
  Clone ID: 14-LIB34-085-Q1-E1-D9
agcagagagccaaaagtaacagctttggaacttaatcttagggaacccagggatggaaccgtggcaaccaaagaaaaatctcatttcagcccttttagtgcctcatccctttgaacattttaattatcctcttagatgttaaactgatgacagtcccatgaccttttgacaccggtatttttcctacactttgccctgtcccacctttacttccactcagctgcccttaaagaaaaaggttttgcttaccatgtgtaattcagagaaaaacaccatacctgaagttacacgatcccactttgtgttagcgccaacccagccagctgagagcagccattctaaatctcagcaggatggagagcaactcctcattggtcagaagtgggacatccag

SEQ ID NO: 3270 - DNA, 453 bp, Bos taurus
  Clone ID: 14-LIB34-086-Q1-E1-D5
tacaactgccaggagaagatggccgcgctagcagtgtccgggctgtcccagcaggtgcgatgcttcagtacatctgtggtcaggccatttgccaagcttgtgaggccacctgttcagatatatggcatcgaaggccgctacgccacagctctgtattccgctgcatctaaacagaataaactggagcaagtagagaaggagttgttgcgagtaggacaaatcttgaaggaacccaaaatggctgcttctcttttgaatccctatgtaaagcgttcagttaaagtgaaaagcctaagtgacatgacggcaaaggagaagttctctcctctcacgtccaacctgatcaatttgcttgctgaaaatggtcgcttgactaatacccctgcggtgatttccgcattttctaccatgatgagtgtccacgtggagaagtacatgcacagttaccactgc

SEQ ID NO: 3271 - DNA, 437 bp, Bos taurus
  Clone ID: 15-BOVMS1-002-Q1-E1-D3
acaacaacctgaacaaaatatcaccactggtgatttttaattaacaaagactttatcttagtgattttagttttgttccacttcatttggcagaatttttatctggattgtacagatacataatttcctagtgagtgtatgttaggaccaaaagataaattaatatcagcacattataaatatttagcctgctaaatatttgtaattatttttacatccatttatttctaacttgttctacagcacttaaatgtttgcaagtttcattctaaaatttatactacaggaaagttgcagctcattttcacccatggatcatcacattcttcatttgtaaacatctgaggtttttatgaaaattaaacattcccctgtagttctttaaatttcattcaaagcactttaatgatagatgcaactaaattttcaattttttt

SEQ ID NO: 3272 - DNA, 467 bp, Bos taurus
  unsure (422): unsure at all n locations; Clone ID: 15-BOVMS1-003-Q1-E1-D11
ggtcggaatcacgggtcgacgacgcgtccgctaaactacacaggattttagttggagggttgttaattcaaaattgtccttaaaatctgatcggtgattaaaacagtaatgttaagacagccaaggaaaaaatcaatttcctaatgttagaaataggaatggttcataaaaccctgctggatggcaaggaatggttcatgaaaccttgcagctgtaccctgatgctggatggcacttaccttgtgtggtcctaaattggtttgtcaaataattcaacttcctcaagaggtaccactgcccatgttgcagatgctacagttgcccttcaaaccagatgtgtatttactgtgtaatataacctctggttcctttagccaaggtgcctagtccaacttttttccctccagttgatcacttcctgngatccaatgtacaaatccagtattgcatgccatgtgcataactgt

SEQ ID NO: 3273 - DNA, 301 bp, Bos taurus
  Clone ID: 15-BOVMS1-003-Q1-E1-D3
atgcgacgtcatagctcttctatagtgtcacctaaattcaattcactggccgtcgttttacaacgtcgtgactgggaaaaccctggcgttacccaacttaatcgccttgcagcacatccccctttcgccagctggcgtaatagcgaagaggcccgcaccgatcgcccttcccaacagttgcgcagcctgaatggcgaatgggacgcgccctgtagcggcgcattaagcgcggcgggtgtggtggttacgcgcagcgtgaccgctacacttgccagcgccctagcgcccgctcctttcgctt

SEQ ID NO: 3274 - DNA, 353 bp, Bos taurus
  Clone ID: 15-BOVMS1-004-Q1-E1-D3
gtccggtttactattccaaaattgacgggcccaacaatgctaaatgggctgaaagttttacagtttgaccaaccttttggttggtggggactaatacagttttcccttggagaaaaaggacagggtcacctgaaaatttggtggaatttaactccttgggcaataatcctccttgggatgaactcctcccagaagacaccttgcaagagctaggactagggaagctgctgaatcgttaccttattatagctcttctcaatgccatacctggctcagatgttgttaaaaagtgcagccaggtaagttgtgtagaaattgatcatcattttatcatttttaaaagttattaaaat

SEQ ID NO: 3275 - DNA, 193 bp, Bos taurus
  Clone ID: 15-BOVMS1-006-Q1-E1-D3
cactttactactaactattaatgtccttctcacttctcactgacctacttatctgaatcgggtttgctataaatatactcgccatcatccccatcataataaaggggggccacccaagagcttcaataattacaaccagggattttttgactcaatcactatcctcaataccactaattataatcctcatcat

SEQ ID NO: 3276 - DNA, 369 bp, Bos taurus
  Clone ID: 15-BOVMS1-007-Q1-E1-D11
tacagtaaaaaaggatttacagatattttttaaaatatgcaaactgtccaatcgagtgatttaatcagtttgggcaactgttacagctgatagtgaatattttgcttcatacagaaattgccactgatttgagtttgtgcactctaattttaacttattgatgctctattgtgcagtagcatttcatttaactttaagataaggctcatttagtatacccaactagttggtaatgtgattatgtggtaccttggctttaagttttaattcgcacgaaacaactttttggcaagcctaactttccggtaacaccctcacctgccttggttttgttttttggggtttattttgaccctggtttttggtttt

SEQ ID NO: 3277 - DNA, 433 bp, Bos taurus
  Clone ID: 15-BOVMS1-007-Q1-E1-D3
gttaattatatgtattggcaaaaggcatccagacgcatgctggaagacgaacgtgttcctctcacctttgtgccaaccaaggaaaaaactcaagaacagcatgaagcgataggcaaaagcaataaaaatatgtcccagtatttaaaagaaaaacttaacagtgaaatcattgcccataaaagagaatcacagggcagtgacaatgtccaagaaacaaataatgatgataatgaagatgagggggaagatgaagaagatgatgcagaagatgaagaagaagatgaaggaaaagaagacagtgaagagagtgatcaaacaaaaagaggggaggaaggtgagataaaggagcaaataaaaaatggtgagaacacgggccaacaggtaactagtaaagtaactgaagaacagaaaggcagaccagaggctcccctcc

SEQ ID NO: 3278 - DNA, 329 bp, Bos taurus
  Clone ID: 15-BOVMS1-008-Q1-E1-D3
atgcaaagtcatacctcttcaaaagtgtcacctgaattcaattcaccggtcgtcgatttataccgtcgtgactggaaaaaccctgcggtgacccaacttaatcgccttgaagcacatcctcctttcgctagctggcgtaataccgaataggcccgcatcgatagcgccttcacaacagttgcacagcctgattggcgaatgggacacgccctgtgcctgagcattaagctcggcaggtgtggtgggtacgcccagcgtgattgctacacttgccaaccccctagcggccactcctttcgcgttcttcccttcctttctcgccacgtttt

SEQ ID NO: 3279 - DNA, 452 bp, Bos taurus
  Clone ID: 15-BOVMS1-009-Q1-E1-D11
gtcacatcacgccaagatgtttgctgaactcagaacattccgggacaaacatacattgggtaaatcaagtcccttggccagaaaggggcagaagaaaaaggactcaattgtgaaagccgatttctttgttcttgtccctgtttcctgaagacacttttcatgcttgacatacctaccagtattaccattcccgacaacacgtacacatatgagaatatactttgttttatttatttttgtgtaggcggttcaccttcacaaatgtcagtgtctactcctagaagaaccaaatacctcaatttttgtgtttgagtactgtaatgtcctgtaaatatatcctaagcaggtttgttttcagcactggaaagcaccagtgttgattttgttttgtttttttaagttgccaacagttgtatgtttgctaattatttatgacctgaaataatatatat

SEQ ID NO: 3280 - DNA, 171 bp, Bos taurus
  unsure (76),(137): unsure at all n locations; Clone ID: 15-BOVMS1-009-Q1-E1-D3
acaaaagccaatgatatgatgaccaaaaataaatgcactccatatggagggctgcctggaagtgtgtaacttcagntacaatcagatggtaccatcttataaagcctcttcttgtaacagtgaaaacttgtgggtangacagtggatgaagtttaatgctcaactactcct

SEQ ID NO: 3281 - DNA, 445 bp, Bos taurus
  unsure (321): unsure at all n locations; Clone ID: 15-BOVMS1-010-Q1-E1-D3
gaaaacacccaaccttaactggcctggtggtggtggcccttgcaaggccaaaacatcctaccaagcacaaaggactccctaaagaagtcctcaatgaaaatttactcaggttttttgtggcaccttttccagaagtgtttggaaaggagaaggtcaatgaactgagcaaggatattgggagtgaatcaactgaggatcaagccatggaagatattaagcaaatggaagctgaaagcatttcgtcaagtgaggaaattgttcccaatagtgttgagcagaagcacattcaaaaggaagatgtgccctctgagcgttacctgngttatctggaacagcttctcagactgaaaaaatacaaagtaccccagctggaaattgttcccaatagtgctgaggaacgacttcacagtatgaaagaaggaatccaatgccaacagaaagaacc

SEQ ID NO: 3282 - DNA, 342 bp, Bos taurus
  Clone ID: 15-BOVMS1-011-Q1-E1-D11
gccgccatcatgggtcgcatgcacgctcccgggaagggcctgtcccagtcggctctgccctaccgccgcagcgtccccacctggctgaagctcacttctgacgacgtgaaggagcagatctacaaactggccaagaaaggcctgactccctcacagatcggtgtgatcctgagagactctcatggtgttgcacaagtacgttttgtgacaggcaacaaaatcttgagaattcttaagtccaaaggacttgctcctgatctccctgaggatctctatcatttaattaagaaagctgttgctgttaggaagcatcttgagaggaacagaaaggataaagatgct

SEQ ID NO: 3283 - DNA, 456 bp, Bos taurus
  Clone ID: 15-BOVMS1-012-Q1-E1-D3
ctaggattccaagatgcaacatcaccaatcatagaagaactacttcactttcatgaccacacgctaataattgtcttcttaattagctcattagtactttacattatttcactaatactaacgacaaagctgacccatacaagcacgatagatgcacaagaagtagagacaatctgaaccattctgcccgccatcatcttaattctaattgctcttccttctttacgaattctatacataatagatgaaatcaataacccatctcttacagtaaaaaccataggacatcagtgatactgaagctatgagtatacagattatgaggacttaagcttcgactcctacataattccaacatcagaattaaagccaggggagctacgactattagaagtcgataatcgagttgtactaccaatagaaataacaatccgaatgttagtctcctctgaagac

SEQ ID NO: 3284 - DNA, 295 bp, Bos taurus
  Clone ID: 15-BOVMS1-013-Q1-E1-D11
aaagataccctctcgactaaacaaccaagatagaataaaacataacatttaatcccaatttagagtataagagatagaaatctaagtacggcgctatatagaaagtaccgcaagggaacgatgaaagaaaccactaaaagtataaaacagcaaagattaccccttgtaccttttgcataatgaattaactagtataagacttaacatcatgaactttagctaagcagcccgaaaccagacgagctactcacaaacagtttaccacgaactaactcatctatgtggcataatagtg

SEQ ID NO: 3285 - DNA, 389 bp, Bos taurus
  Clone ID: 15-BOVMS1-014-Q1-E1-D3
aattgttctatctaatactgtaagtagttgtcatattctggaaaatttaatagttttagagttaagagaactcctctccttggttagggaagaagagagcccttcaccactgtggaacgatgccctggctttaaggtgtgtagccctacatcatgcttcttttgagaattatatttggtagttataattacagaaactgattacttgtcagttgcaggtagatttagcacagtactcatcactctggatagattgagatgttctttcacaacagataaatgatctgtaacactgtaagatactgatctttacaactgtttaatcagttttatttttgtacagtattactgacctaagttactttgctgtcccagttttgtcaatcaaat

SEQ ID NO: 3286 - DNA, 421 bp, Bos taurus
  Clone ID: 15-BOVMS1-016-Q1-E1-D11
gaagcaaacagctactaaagtaaaagaagtacagaaaacctcacccaaacctaaaaaggacgagaaagatgctgcagccgtgtccaagcatgaacagaaagatcagtatgcattctgtcgatatatgattgacatatttgtccatggggacttaaaaccagggcagagcccagccataccacctccgttaccaacagaacaagcttccagacccactcttgcatcacctactcttgaagaaaaagaagaagaaaagaagaaagctgagaagaacgtgacttctgaaacaaaaaagaaagacaaagaagatgtcaaaatgaaaactgagaaggaaactgccatggatgtgaaaagaaaagagcctagcaaagccccagaaaccaaacaagggacaataaaagttgcagcacaagcacctact

SEQ ID NO: 3287 - DNA, 416 bp, Bos taurus
  Clone ID: 15-BOVMS1-019-Q1-E1-D11
ctgggctgggaggcaacagaaagtacagtgggacaatggatgcctacaggaccatcgccagagaggaaggggttcggggcctgtggaaaggaattctgcccaacatcacgaggaatgccattgtcaactgtggtgagatggtgacctatgacatcatcaaggaaaagctgctagactaccacctgctcaccgcccagtatctgctcttcctaccctgcgacagacaacttcccctgccacttcgtctctgcctttggagctggcttctgtgccaccctggtggcctccccggtggacgtggtgaagacgcggtatatgaactcgcccccaggccagtaccacagccccttcgactgtatgctgaagatggtgacccaggagggccccacagccttctacaacggatttacaccctc

SEQ ID NO: 3288 - DNA, 153 bp, Bos taurus
  Clone ID: 15-BOVMS1-019-Q1-E1-D3
tggacgagatgatcagagaggcggacatcgacggggacgggcaggtcaactacgaagaattcgtacagatgatgactgcaaaatgaagacctactttcaactccttttcccccctctagaagaatcaaattgaatcttttacttacctcttgc

SEQ ID NO: 3289 - DNA, 365 bp, Bos taurus
  Clone ID: 15-BOVMS1-020-Q1-E1-D3
atgcgacgtcatagctcttctatagtgtcacctaaattcaattcactggccgtcgttttacaacgtcgtgactgggaaaaccctggcgttacccaacttaatcgccttgcagcacatccccctttcgccagctggcgtaatagcgaagaggcccgcaccgatcgcccttcccaacagttgcgcagcctgaatggcgaatgggacgcgccctgtagccgcgcaataaaccgcgggggtgttgtggttaaccccagcgtgaacgctacacttgccaacgccctagcgcccgcgccttttcgctttcgtcccgtccctttccccccaacgttcgcccggcttttccccgtcaaacctctaaaatccgg

SEQ ID NO: 3290 - DNA, 326 bp, Bos taurus
  Clone ID: 15-BOVMS1-021-Q1-E1-D11
ctatttcccattctatacactaactggctgcgctacccctattagtgcgcactaatttatatccaaaacacatgtaggatccctaaatttccgaatattacagtactgagtacaacctgttcataactcttgatctaatgtcgtcatatgactagcatgttcaagagcattcatatcaggaataacaccatatggcctccacctttgactacctagagctcacgtagaagcccccatcacaagctccatagtcattgcagcagttctacgataactaagggggtacagtctgcgtctactcacactagatctaaaccctatgaccg

SEQ ID NO: 3291 - DNA, 425 bp, Bos taurus
  Clone ID: 15-BOVMS1-022-Q1-E1-D3
gagaattgaaaatgttgtcctagatgcaaattgcagcagagatgtaaaacagatgcttttgaagcttgtagaactccggtcaagtaactggggtagagtccatgcagcttcaacatacagggaagcaacacctgaaaatgatcctaattattttatgaatgagccaacattttatacatctgatggtgttcctttcactgcagctgatccagattaccaagagaaatatcaagagttacttgaaagagaagacttttttccagattatgaagaaaatggaacagatttatcagggggtggtgatccgtacttggatgatattgatgatgagatggacccagagatagaagaagcttatgaaaagttttgtttggaatcagagcgtaagcgaaaacagtaaagttaaatttcagcatatccgtttt

SEQ ID NO: 3292 - DNA, 299 bp, Bos taurus
  Clone ID: 15-BOVMS1-023-Q1-E1-D3
gtccggaagaaggacactgctcccacactgtcctcgggctccccaggccctcccgtctatggatttgaccaaccgcacccactccccaataaattgattctcctgggaaaaaaaaaaaaggaaaagggaaaaaaaaaaaaaaaaaaaaaaaaaaaaagaaaaaaaaaaaaaaaaaaaaaaaaaaaaaaaaaaggaaaaaaaaagcataaaaaaaaaaaagggggggccgcccgcatataaaacggggggttaaatgtcaaatttgtggttaaaccttcaaaaaaaagttccctgggggg

SEQ ID NO: 3293 - DNA, 285 bp, Bos taurus
  Clone ID: 15-LIB188-001-Q1-E1-D3
tggccgcgggatacccttccgttggtctcagcacacaatctaggctacggtgtttggatgatttccggttctctgccaggacaggcaccaggccacacttgcccgcagtgtagatatatcctccatccaagttcagggcatctgcttcccctttcagcaccaggacgatgcagtcgtcagtggtggacgccgtggcacaggtcacgttctggccgctctgctggctccactgctggcacttcttctgctcctcaggtcccacggcacaccacacgaccctggtgt

SEQ ID NO: 3294 - DNA, 415 bp, Bos taurus
  Clone ID: 15-LIB188-002-Q1-E1-D3
tgggcgcggcatacggaatactgaagttctgacactgattacgtaagggttgctgctatcagccttgcccactgtgacttctccaaacccaaggaggaaccctagataaaatgccccaacactgtgatgagagcatccagatgttgccatgagaaaccggaaggcagatcttcacagaagccccaagggctcactcctgcccagtgttaggagacagggttgttgacagctcctgtctcactgcagcctctagcacttggtcagtcactctccgccttagcactttgttcactgtcctgtgtcagagctctgagctcgctctacccttttctgaaaaagtatgtgggctgaaggtggtttcattttttggtttttaaatggtatatctttttgtatgaaaaaaactatattttgt

SEQ ID NO: 3295 - DNA, 418 bp, Bos taurus
  unsure (286),(382): unsure at all n locations; Clone ID: 15-LIB188-003-Q1-E1-D11
ggccgcgggatccgagagctggagctgctctatgcccgggcccagctggagctggaagtgggcaaggcccaacagctggctgaggtggaggtgaagaagttcaagcagatgacagaggccctggggcccagcaccatcagagacatggctgtggcagggccggagatgcacgtaaaattgctgcagagcctgggcctaaaatccaccctcatcaccggatgggtttccacgcccaaattcaacctcctttcgaacacagccctttgggttttgctgggggctcggnggctgagggcccaagcccccagccaagatccccaccgggggacccagcgtccaaaagggcttgcttcccatctccactgctgcccccctaactctntggaacaaccaggttgtgccttagctctgtatcact

SEQ ID NO: 3296 - DNA, 413 bp, Bos taurus
  Clone ID: 15-LIB188-003-Q1-E1-D3
ccggatccgctgggttaaattcagctgccggatgagctcattgatgcgttcacctcgatagcctggtgagcccacttccttgaggaagcccactctattcttggtagcgtgacgggccactgagagttggaaagggcgtaggaaccttgagatcgccaggaaattcttccccgggaaggcaatttcatgaatgaggtcttccaagcaaatgacatcaaacttccccaggtgttcctcaataactgtgttgtctgtcagagggatgaccttgttcttgaccttcgcttgtccacgtttcaagatgagttcccgaacagacttcagatttggaaatccccaggtcacataaggttccacgatacgaagcgtctttatggtttcaggggtcaccttcacaaagacaccactgaaaa

SEQ ID NO: 3297 - DNA, 286 bp, Bos taurus
  Clone ID: 15-LIB188-004-Q1-E1-D3
gccgggtccagagtcaaacacgactgaagtgacttagcatgcatgcatgcattggagaagggaatggcaaccaattcaattatccttgcctgaggaatcacagggatggaggagcctgttgggctgccatctatggggtcacacagattcggtataaatggacgcaactataaaacaacaacaatatatatacacatatacattacatgtgtcccttttccttttatacagtgtgtccgcgtttgcgatagtgtcctctctctcttcacaaaattttcactctaaa

SEQ ID NO: 3298 - DNA, 392 bp, Bos taurus
  Clone ID: 15-LIB188-006-Q1-E1-D3
gggcgcgggctacgtgaataaagaaattaaaaatgccctcaaggaggtgaaacagataaagacccaaatagaacaaaccaatgaagagcgcaaattactgctcagctccctagaggaagccaagaagaagaaagaggacgccctgaatgacaccagggattctgaaaacaagctgaaggcgtcccagggggtgtgcaatgagaccatgacagccctttgggaggaatgtaagccctgcctcaagcagacctgcatgaagttctacgcgcgggtgtgcagaagcggatcgggactggttggccaccagcttgaggagttcctaaaccagagctcccccttctacttctggatcaacggtgaccgcatcgattccctgatggagaatgaccggg

SEQ ID NO: 3299 - DNA, 383 bp, Bos taurus
  Clone ID: 15-LIB188-007-Q1-E1-D11
acaaaaatactccagcgaaactgtcttaaatatttttctacaggtgtaaaaccaaagtttcctgcaaaccccagtccacgcccttcatgaatctactgtgtatctattttgcctctctagttctagaaaagtagagacaactttgaatccagggtttggagctgccccgcgtctgtctttcctatgcactctgagttaaaacgggactcgcgggaccgttggcggcgtgctccggcccctcagcaccttctgtggatttggcgcctccggcctctttgtctccttcggaagtctccagggcctccggggggcttgtgcagttagcatccggcttagctttgtccacctcgttatcaatctcaaccttatcttctggatgcttg

SEQ ID NO: 3300 - DNA, 392 bp, Bos taurus
  Clone ID: 15-LIB188-007-Q1-E1-D3
cccgagcgccatgggcccgggacacaccagggtcgtgaggtgtgccgtgggacctgaggagcagaagaagtgccagcagtggagccagcagagcggccagaacgtgacctgtgccacggcgtccaccactgacgactgcatcgtcctggtgctgaaaggagaacacgaatggagagagcactgcagactgggctaagaacttgaatcgtgaggacttcaggttgctctgcctcgatggcaccaggaagcctgtgacggaggctcagagctgccacctggcggtggccccgaatcacgctgtggtgtctcggagcgatagggcagcacacgtgaaacaggtgctgctccaccagcaggctctgtttgggaaaaatggaaaaaactgcccggac

SEQ ID NO: 3301 - DNA, 385 bp, Bos taurus
  unsure (381): unsure at all n locations; Clone ID: 15-LIB188-008-Q1-E1-D3
gccgcgggatacttgtcctccgactcagtctgccggtctctctgccactccacgtctacatcttctgggtagaagccgatgaccatgcaggtgacgctgaccgtgcttttgctgagctcttccttgggtgggtccaggacatacacctgcggctcccgggccggccctttgctcctggagatgatcctcacgatggaggccgagaggcctttgatgttgaccttgcacttgaactcctttcctccagtccagtcctggtgctggatgggcagggcgctgaccacgcggtacgtgattacagagctagggtttccagcagggctccagatggtcaggcatggcttctatagcaggtctaaggaagcagcggggacgtcacangacg

SEQ ID NO: 3302 - DNA, 405 bp, Bos taurus
  Clone ID: 15-LIB188-009-Q1-E1-D11
tggccgcgggatactttgcagaggccctggggccactggagagctttgaagcctggcctgatgacttgctcatcagcacctaccccaagtcgggcaccacctgggtaagcgagatcctggacctgatctaccaggagggtgacctggagaagtgtcagagagcccctgtcttcttgcgggtgcccttccttgagttcagcgcccctggggttcccacaggtgttgagcttctgaaagatacaccagccccacggctcctcaagacacacttgcctctggccctgcttccgaagaccctgctggatcagaaagtcaaggtgatctacatcgcccgcaacgccaaggatgtggccgtctcctattaccacttctatcgcatggccaaggtgcaccctgaccctggca

SEQ ID NO: 3303 - DNA, 306 bp, Bos taurus; identical to SEQ ID NO: 3065
  Clone ID: 15-LIB188-009-Q1-E1-D3

SEQ ID NO: 3304 - DNA, 243 bp, Bos taurus
  unsure (175): unsure at all n locations; Clone ID: 15-LIB188-010-Q1-E1-D3
atggccgcgggatacttatgatcggccagcccaccgggcactttgacaagcttgttgttgttcaaatgaagttccctcaaatggggagtgttggccaaagagccattgtcaaccgcagagatgctgttgaaactcagtcccaacttagccaaattattcagtcctttcaggctanctgcatcaactttggtgattttgttgccatcgagatgtaattcagtaacggaatgaggaagacctttg

SEQ ID NO: 3305 - DNA, 409 bp, Bos taurus
  Clone ID: 15-LIB188-011-Q1-E1-D11
ttgtgccgacgctgcatgctgccgtacgccatggaggccggatacatgaacaataaacatagatgataaaaatcagttgcactgaaacacttcagccaactgtagaacagagagggtgtggacactgatagggcaggggtggcaattccagaccagcttccctcaaagggctcgtggtccaagcccaaaaccatagggtgctctgggcaggaccgtgcagtgcacactctgggcaggcagacaagaaggaccagtcacaacagggactgctgctgggcacgagtttattagcttctggcctctcgctcctgcttgatgaagttgatcagcccattggtggaagaatcgtgagaagtcactgggctgctcccgtcaagctcaagttcaattttcttagccagctgctttc

SEQ ID NO: 3306 - DNA, 91 bp, Bos taurus
  Clone ID: 15-LIB188-011-Q1-E1-D3
gccatgggcgcgggatactcctgcatgctgatccacatctgctggaaggtggacagcgaggccaggatggagccgccaatccacacggagt

SEQ ID NO: 3307 - DNA, 414 bp, Bos taurus
  Clone ID: 15-LIB188-012-Q1-E1-D3
accttgccgtggcagttgtcaagaaagcaaatgaggggctcacatggaattctctgaaagacaagaagtcgtgccacaccgccgtggacaggactgcaggctggaacatccccatgggcctgatcgtcaaccagacaggctcctgcccatttgatgaattctttagtcagagctgtgcccctggggctgacccgaaatccagactctgtgccttgtgtgctggcgatgaccagggcctggacaagtgtgtgcccaactctaaggataagtactcgtccaagaagaagatcttcatgggcctcatcccctacgaccacagcggcttcgtcaacgccatccggcaagtcatcaccacacgggaaacatgcagtgcgacctggtggcgtggcaggccccgtccagatcgtcaacaac

SEQ ID NO: 3308 - DNA, 359 bp, Bos taurus
  Clone ID: 15-LIB188-013-Q1-E1-D11
acagttctccaggttcgtggacgacgtggaggtgcacacggccaggacgaacccgagaaaggagcagttcaacagcacctaccgcgtggtcagcgccctgcgcatccagcaccaggactggactggaggaaaggagttcaagtgcaaggtccacaacgaaggcctcccggcccccatcgtgaggaccatctccaggaccaaagggccggcccgggagccgcaggtgtatgtcctggccccaccccaggaagagctcagcaaaagcacggtcagcctcacctgcatggtcaccagcttctacccagactacatcgccgtggagtggcagagaaatgggcagcctgagtcagaggacaagt

SEQ ID NO: 3309 - DNA, 370 bp, Bos taurus
  Clone ID: 15-LIB188-014-Q1-E1-D3
accggctggagcatggcaggcagctctggcttcgaacccttccgttcagagatggtggtggtgggcagtaattcatccttgggttccacaatgctcacgtgatcacgcagaggtttcttacggccaatcttaccagtcgggtccaaggcagcatgatctttaccgtgatgcccagcacaccctgtctgagcagcacatggctcactgcagtgtctacatagtagttaacagggtccccactgtggatcatgacgccatccacaaacttcatggatttagccctctgtcctcgaagtttcgcagacaccacgacctcgcagccttatggcccactctccatgatgaaccgcagcacaccatagcaggccct

SEQ ID NO: 3310 - DNA, 392 bp, Bos taurus
  Clone ID: 15-LIB188-015-Q1-E1-D11
cgccatggagcggataccctataattcgggcatctgctgattattcccatggagccaaagacactattgccatgccataccaaatctgacggcaaaaacgtgtagtagcgctcccagtagttggtggacacgaatagggcgtagatgcccacatccaggaacatcatccacttggtgccaaagaacctgatgagcactggcgtgtagaccagggcagctatgggcgtcacgttgatacccatcagcatcttgctgtcgatgtcgggcagccccatgttgccgtactgtggctcctgctgggcacatggcagcaccaatgccatgactgaccggattaacatcaagaggaagggggcctggccgtccacactgttgtcggtgcagcacgtgct

SEQ ID NO: 3311 - DNA, 364 bp, Bos taurus
  Clone ID: 15-LIB188-015-Q1-E1-D3
accagctggacgtgacccacaggaaggagacagagcccagcagctccagcgtcgtcaatcagaatgacgcctggactcccactgtggactttgctgacttcatcaacaatgagaccattgctggaaaggacttggtggcctgagtgacagccggtttcctgcacatccctcatgcagaggacattcccaacacagtgacagtggggaacggtgtgggcttctttctgcgaccctacaacttctttgatgaggacccctccatcaattctgctgactcaatctacttccaaaaacaccaggatgctgggtcctgtgaggtcaactcgctggcttgtctgccaaaggatcctgcctgtgcccctga

SEQ ID NO: 3312 - DNA, 186 bp, Bos taurus
  Clone ID: 15-LIB188-016-Q1-E1-D3
ccatagccgccggatacctctccttagagttgagcacacacttgtccaggccctggtcaaccccaacacacaagggacaaaatccggatttccaatcaaccccaagggcaaaactctgactaaagaattcaacaaatgcccaagaacctgtccgggtgaacattaaggccaatgggaatttccaac

SEQ ID NO: 3313 - DNA, 463 bp, Bos taurus
  Clone ID: 15-LIB188-017-Q1-E1-D11
ccgacgctgcatgcgtccgtacgccatggacgccggatacacaatttagaggatcaatttatcagaaagtatgtgaagatcttgacacttcagtaaaccttgcttggacatcacgaaccaactgcactcgctttggaattgcaactaaatatcaactggatcccactgcttccatttctgcaaaagtcaacaactctagtttaattggagtgggctatactcagactctgaagcctgatgtgaagcttacactgtctgccctggtacacgggaatagcattaatgctggacgccacaaacttgggcttgccctggaatttggcgcttatttcagctgaaataaacctctggaaatgggtatcagaagatttggccttaatatatttccagtgtgaccagcaggcttcccccaccctaccccccgaaggtgatcaaaacaaaggatgatctacacaagagctgt

SEQ ID NO: 3314 - DNA, 440 bp, Bos taurus
  Clone ID: 15-LIB188-017-Q1-E1-D3
gcggccggatcacactgcaaagcgtttatcgggaagatgctacactcgtcacaaccattgaacatcactgtctaagagtcaagctcgagcggcccctcatcgatgacagctgtggctataggcacctgttttgctgcagtggctattgttgcggccataataacctggttccgcctcaggagaaagccaatctcagttggagcatggcatacagggattccttgtgtcctggagatgaatgaagacactagatgcattgtctcagactccttccccacttcctgaggaatgctgctttgcagatactgagctgctttccgcactggcaaaccggtctcactgatgctgaaaatgatgctgccagaactgaggctgagaacacagtcacctattcactcctctcgcacccggatgttgcagaggaagactcagagtccgat

SEQ ID NO: 3315 - DNA, 427 bp, Bos taurus
  Clone ID: 15-LIB188-019-Q1-E1-D11
cacctgcagggaagattgctattgacagaggctatgacatcgcccagatatcccgacacctggacttcatcagccttttgacctatgactttcacggagcctggcgccagacagtcggacaccacagccccctgtttcgaggccaggaagatgcaagttctgacagattcagtaacgctgactacgctgtgagctacatgctgaggctgggggctccagccaataagctggtgatgggtatccccacttttgggaggagctacactctggcctcttccaagacagatgtgggagcccccatctcagggccaggaattccaggccagttcaccaaggagaaagggatccttgcctattatgagatctgtgacttcctccacggagccaccacccacagattccgtgaccagcaggtcccctatgccac

SEQ ID NO: 3316 - DNA, 398 bp, Bos taurus
  Clone ID: 15-LIB188-019-Q1-E1-D3
acttaaagctgcagcagtaactgtagaaagcaccactacagaggaaactccacaaagggctcagcagccgcccacccagtcctgaccacccccaccccagtaatatgtaaatgctgttaggtttttcttatgctaataaaggcataccacctagtgtgctaaagactaaaactagcagcattagagcagtaaagtgaaaataggaagcctacaggaatgatctaaatgcctacttagaagaaacaaagcagcagacaggacccttgccctctccctgtgttcacagggaagtggtagaattaaacagtcagatttacccacattaacacaaacttaacacaacttccgcaagacaccagaataaaaacctgacctttccagtcaaggggcacagacag

SEQ ID NO: 3317 - DNA, 394 bp, Bos taurus
  Clone ID: 15-LIB188-021-Q1-E1-D11
tggcggcgggctaccatgctgatggctggggcaaacccccagtagatgagaccgggaaacccctctacggggatgtgtttggaaccaatgctgctgaattccagaccaagactgaggaagaagagattgatcggaccccttggggggagctagagccatctgatgaagaatcttcagaagaagaggaagaggaggaaagtgatgaagataagccagatgagactggcttcattacccctgcagacagtggcctcatcactcctggagggttctcgtcagtgccagctggaatggagacccccgaactcattgaattgaggaaaaagaagattgaggaggcgatggacggaagtgagacgcctcagctgttcactgtgttgccagagaagagaac

SEQ ID NO: 3318 - DNA, 285 bp, Bos taurus
  Clone ID: 15-LIB188-022-Q1-E1-D3
ccatgtacgccggataccttgccgaggcagttgtcaagaaagcaaatgaggggctcacatggaattctctgaaagacaagaagtcgtgccacaccgccgtggacaggactgcaggctgggacatccccatgggcctgatcgtcaaccagacaggctcctgcgcatttgatgaattctttagtcagagctgtgcccctggggctgacccgaaatccagactctgtgccttgtgtgctggcgatgaccagggcctggacaagtgtgtgcccaactctaaggagaagt

SEQ ID NO: 3319 - DNA, 403 bp, Bos taurus
  Clone ID: 15-LIB188-025-Q1-E1-D11
caagctatttttatttttttttttttttttttttttattttttttttttttttttttttttttttttttttttttttttttttttttttttttttttttttccaaaaaacaacatttaatttccaaaaaggaaaaaaaaacccaaaacccaggcaaaaaaaaccaaaaccggggaaaaaaagggccaaccccccccccggcggaaaaaggaaattggttcggggaaaaaaacacaggccagggggggaaggggcaacacgggcaagggggggccaaaccccccaaaccccaacttaaggtaaaaaggggcaaacccccatccaaacccacctccaaaaaaaggggcccgggaatctaatcccaaaacccgggaaaaaccaccacccaacccccccaaggccgg

SEQ ID NO: 3320 - DNA, 376 bp, Bos taurus
  Clone ID: 15-LIB188-026-Q1-E1-D3
gcggcatacacgcatttgaaactggatgagaactgtggggtcctgatcccactgcatcatcgccgggaaatttccgatcccttggtaatatcccctagagcaaccttcatgtcccctaaggagaccactgacattgctaagttgaaaaatcccatagattgtaatcctgcaacctctctggactctcaacctctgatcagtgataggttcattgttaaagtgtgataaatactgtattttgtcatgtatagatggcatctcccacttaatgtgaaaatggtcccggacaatgcaacttcctgtatgcactgtgcatttaccctgaatgtggaagaagttgtaagtccatttgagaaacaatttcgactttgacatc

SEQ ID NO: 3321 - DNA, 243 bp, Bos taurus
  Clone ID: 15-LIB188-027-Q1-E1-D3
tcccgaccgccaagggcgcgggatacctcggaaacctgctggagacctgccacttccaagccttctggcaagccctggatgaaaacatggacctcctggaaggtataaccggctttgaagactctgtccgaaaatttatctgccatgtcatgggcatcacgtatcaacacatcgatcgctggctgctggctgagatgctcggggatctgacagacagccagctaaaggtgtggatgagcaagt

SEQ ID NO: 3322 - DNA, 367 bp, Bos taurus
  Clone ID: 15-LIB188-028-Q1-E1-D3
agactaaactccctagtgcgctcagcccagcttggtggccagctctttggccttcgccttttccagcttggcgatgcgcgccaccgacttcggccccaggacgttgcctccccagtgacgacggatctcatcgtatctgtcgttgtaattggtcctgatggcttccaccagcttagccagggcactcttgtcctccgagttgacttgtgtgaaggctacggtggtgcacgtcttcctgtgcaccaggcgccccagccgggccttgcccttgatgatgcagtagggaacccccatcttgcggcacagggcaggcaggaagaccacgagctcaatgggatccacgtcgtgagcgatcaccaccagctga

SEQ ID NO: 3323 - DNA, 287 bp, Bos taurus
  Clone ID: 15-LIB2809-001-Q1-E1-D3
tggccgccggatacaaagacgacacagaaccctcactcaagcaacatctgtaacatctcctgtgacaagttcctggatgatgatcttactgatgacattatgtgtgtcaagaagattctggataaagtatgaattaactactggttggcccataaagcactctgttctgagaagctggatcagtggctctgtgagaagttgtgaacacctgctgtctttgctgcttctgtcctctttctgttcctggaactcctctgccccgtggctacctcgttttgcttctttgt

SEQ ID NO: 3324 - DNA, 297 bp, Bos taurus
  Clone ID: 15-LIB2809-002-Q1-E1-D11
tggccccgggataccgcactatgaagggccatcggtggaagaaaggggccttctgcacagcgacactgtatcctggcgtggtttttggcatctgcttcgtattgaattgcttcatctggggaaagcactcgtcaggagcggtgccctttcccactatggtggccctgctctgtatgtggtttgggatctccctgcctctggtctacctgggttactacttcggcttccgtaagcagccatatgacaaccctgtgcgcaccaaccagattccccggcagatccccgaacagcggtggt

SEQ ID NO: 3325 - DNA, 357 bp, Bos taurus
  Clone ID: 15-LIB2809-002-Q1-E1-D3
atgcacataccacccgtgagatctcgagttgacatcctcacggaacacgcttgacaactgtcagaataaggtatatcacgagatatcgggtgaactctaggatatgaattgaagacggtgctgaggctgattcatgtatcactgcctcacatgcatacatccgtgcaaattttcaacatcactaagattctcgcactcactttcatttagtggctcagctgttcatttaggcaaaggtatttctattctccaatgtgtatgaggctccttcacgttcgggcatcgcaatgcttcatcgctgaatgacaagttggaccattacatgggtttcatagcctagatcgaagtctttgttgg

SEQ ID NO: 3326 - DNA, 415 bp, Bos taurus
  unsure (387): unsure at all n locations; Clone ID: 15-LIB2809-003-Q1-E1-D11
actcggtcctgaccggggatagggcactgctttctggggaacaggcaggactttggactgagaaagggacagcacggactgaggaggaaacatgacagttggaggaagaggctggtgaggctggtgcatccaagactggagcagaggcagaggaaggtgcagattttcaacatcagtgagagtcaggctctggctttcagtaaagggctcaactggatatttagggaagggcatttctttgtgcttaggagccatagcctccttcactttggagactcccattacttcaggctgaaggaaaggcggcaccaccacaggggtttgagtaagaggagggatgttttgtgggaggctgttagggatgggcccagggaagggatagactanagactgtgtctgggcaaaggggtggatt

SEQ ID NO: 3327 - DNA, 378 bp, Bos taurus
  Clone ID: 15-LIB2809-004-Q1-E1-D3
ccatgaccgccggatactcgacaggaaaacacgaagcttaccagttacactgctcccttttggaagccctcagcagacgtgccatgcccacagtcccttttaagggattaagcatgagttgccatgcgctgtgatgaatattctatcgggtcagctactgaagaatctgctgaagttgccacacaggaagttaagattactgtggacgataagcactaccagaaagcactgaatgaaatcaatcagttttatcagaagttcccccagtatctccagtatctgtatcaaggtcgaattgtcttgaacccatggcatcagcttaagagaaattctgtgcccattacgcccaccctgaacagagagcagctctccaccagt

SEQ ID NO: 3328 - DNA, 430 bp, Bos taurus
  Clone ID: 15-LIB2809-005-Q1-E1-D11
atacccagctggaaattgttcccaatagtgctgaggaacgacttcacagtatgaaagagggaatccatgcccaacagaaagaacctatgataggagtgaatcgggaactggcctacttctaccctgagcttttcagacaattctaccagctggatgcctatccatctggtgcctggtattacgttccactaggcacacaatacactgatgccccatcattctctgacatccctaatcccattggctctgagaacagtgaaaagactactatgccactgtggtgaagagtcaagtgaattctgagggactccacagttatggtctttgatggttctgaaaattccatgctctacatgtcttttcatctatcatgtcaaaccattctatccaaaggcttcaactgctgttttagaatagggcaatctcaaat

SEQ ID NO: 3329 - DNA, 432 bp, Bos taurus
  unsure (14),(324): unsure at all n locations; Clone ID: 15-LIB2809-008-Q1-E1-D3
gctgcaacataacntcccgggggccgtgcactcgaattgaatttgataacgacgctgacccttcatcggaaagcaaggaagatcagtggatgggagtcactgtccaaagccagagtccaggcggcaaagttgtgacatgtgctcatcgatatgaaaaaagacaacatgtgaggaggaagcacgaatcccgagacatctttggaaggtgctacgtcctaagtcagaatctcaggattgaagatgatatggatggaggagactggagtttttgtgatggccggttgagaggtcatgaaaaatttggttcttgccagcaaggtgtancagctacttttactaaagacttccattacattgcgtttggagccccaggcacttacaacctggaaaggattgttcgtgtagagcaaaagaataacactttttttgaca

SEQ ID NO: 3330 - DNA, 424 bp, Bos taurus
  Clone ID: 15-LIB2809-010-Q1-E1-D3
acagcagaaaggcctgaatgggcatatctctctggggatagggcactgctttctggggaacaggcaggactttggactgagaaagggacagcacggactgaggaggaaacatgaaagttggaggaagaggctggtgaggctggtgcatccaagactggagcagaggcagaggaaggtgcagattttcaacatcagtgagagccaggctctggctttcagtaaagggctcaactggatatttagggaagggcatttctttgtgcttaggagccatagcctccttcactttggagactcccattacttcaggctgaaggaaaggcggcaccaccacaggggtttgagtaagaggagggatgttttgtgggaggctgttacggatgggcccagggaagggatagactagagactgtgtctgggcaaa

SEQ ID NO: 3331 - DNA, 301 bp, Bos taurus
  Clone ID: 15-LIB2809-011-Q1-E1-D11
acccaactcactgtgaatccatggatatagccctccaggctcctgcggttcatggaattctcaaggtaagaatactagaatgagttgccaatgcctcttccatgggatttgctcaaaccaatgataaagccagagtcgcctgcattggtaaaggggttccttaacgataacaccagttgggaatgcacaattgttttccgacttctgaaagttaatccaacaacattggatgattggacacctcatgtctctgataatacctaaatttaccgaaggctgtcctcgctattcactatggctc

SEQ ID NO: 3332 - DNA, 409 bp, Bos taurus
  Clone ID: 15-LIB2809-013-Q1-E1-D3
gcggccggatacaaatgcacaagccggctttccagaaaccaacaggaagaataccaggtgcttggcttcacaggcatttgtgaaacggaagatgcttcctcaaattacagcggttcagaagcgctgaccagttcctccttcagcatcaacatatatgacagaaagatgaccaggcaaatcaaaaagagccatatctctacagatatgccaagtttgactgttcttccaagctccttggatactgtgtgcctgactatgaattccttctgttacttaatgaacggtaaccaagatagctcacagcgtccaagagttgttaacatgcagacagtaaaatatagttttctaaagatatattttatcaagtattagtccttaagccattcaaattggtgtataaacaactatt

SEQ ID NO: 3333 - DNA, 333 bp, Bos taurus
  unsure (12): unsure at all n locations; Clone ID: 15-LIB2809-014-Q1-E1-D3
gatccaaaacanagacagcacagaatatggactcttccagataaataataaaatttggtgcaaagacgaccagaaccctcactcaagcaacatctgtaacatctcctgtgacaagttcctggatgatgatcttactgatgacattatgtgtgtcaagaagattctggataaagtaggaattaactactggttggcccataaagcactctgttctgagaagctggatcagtggctctgtgagaagttgtgaacacctgctgtctttgctgcttctgtcctctttctgttcctggaactcctctgccccgtggctacctcgttttgcttctttgt

SEQ ID NO: 3334 - DNA, 390 bp, Bos taurus
  Clone ID: 15-LIB2809-015-Q1-E1-D3
ctggtgagattgtggaaagcctttcaagcagtgaggaatctattacacgcatcaataagaaaattgagaagtttcagagtgaggaacagcagcaaacagaggatgaactccaggataaaatccacccctttgcccagacacagtctctagtctatcccttccctgggcccatccataacagcctcccacaaaacatccctcctcttactcaaacccctgtggtggtgccgcctttccttcagcctgaagtaatgggagtctccaaagtgaaggaggctatggctcctaagcacaaagaaatgcccttccctaaatatccagttgagccctttactgaaagccagagcctgactctcactgatgttgaaaatctgcaccttcctctgcctc

SEQ ID NO: 3335 - DNA, 392 bp, Bos taurus
  Clone ID: 15-LIB2809-017-Q1-E1-D11
gccatgggcacgggatactgtcaatgagcatccagaatatggagaagtaatcagctacagagtgaccagtgcaagaacatatgccagttcctggtagagattggactggctaaggacgaccagctgaaggttcatgggttttaagtgcttttggctcactgaagcttaagtgaggatttccttgcaatgagtagaatttcccttctgtcccttgtcacaagtttaaaaacctcacagcttgtataatgtaaccatttggggtctgcttttaacttggactagtgtaactccttcatgcaataaactgaaaagagccatgctgtctagtcttgaagtccctcatttaaacagaggtcaagcagtaggcgcctggcagtgtccagcctgaaaca

SEQ ID NO: 3336 - DNA, 436 bp, Bos taurus
  unsure (394),(406),(422): unsure at all n locations; Clone ID: 15-LIB2809-017-Q1-E1-D3
gccaagggcgcgggatacagcagaaaggcctgaatgggcatatctctctggggatagggcactgctttctggggaacaggcaggactttggactgagaaagggacagcacggactgaggaggaaacatgacagttggaggaagaggctggtgaggctggtgcatccaagactggagcagaggcagaggaaggtgcagattttcaacatcagtgagagtcaggctctggctttcagtaaagggctcaactggatatttagggaagggcatttctttgtgcttaggagccatagcctccttcactttggagactcccattacttcaggctgaaggaaaggcggcaccaccacaggggtttgagtaagaagagggatgttttgtgggaagctgttanggatgggcccanggaaaggatagactanagactgtgtctggg

SEQ ID NO: 3337 - DNA, 393 bp, Bos taurus
  Clone ID: 15-LIB2809-020-Q1-E1-D11
ctcaagggcttcgggacctttgccaaaaatggtggatgctgtggaggaaatgggaacaacccaaactgctgcatgaaccagaagaaagaccacaccgttactctctcagcatctttattcaacccagaggagttcatgcccctggatcctacccaggaacccatcttccctccagagttgctgaagctgaaagacgttccaccgaagcagctgcgttttgaaggggagcctgtgacctggatccaagcctccaccttgaaggagttgctggacctcaaagctcagcatcccgaggccaagctggtggtggggaacacagagatcggcattgagatgaagtttaagaatcacctatttcctatgatcatctgcccagcctggatccctgagctg

SEQ ID NO: 3338 - DNA, 362 bp, Bos taurus
  Clone ID: 15-LIB2809-020-Q1-E1-D3
gggacactgtggatcgaaatagtggatgcggacgtaaccatcttcgccgccactgctgtagctcttgccatcaggatggaaggcaacactgttgataggtccgaagtgacccttgactcttccaaactcttcttcaaaggccaagtggaagaacctggcctcgaacttcccaatcctggtggaggtggtggttacatccatggcttcctgaccaccgcccagcaccacatgatcgtacttgggagagagggcagctgagttgacaggtcgttctgtcctgaaagtcttctggtgttcaagggttctggagtcgaagagcttggcagtgttgtccttggatgcagtgacgaacatggtcatat

SEQ ID NO: 3339 - DNA, 288 bp, Bos taurus
  Clone ID: 15-LIB2809-023-Q1-E1-D3
taccatcaactaccaccggggctgcaccctccgccttgaaccccctggggggaaatttaaagggtgcaccgaacccctaagcctgaagggtaataccatccccaacaagcagattaagcctccagctactacaaaacctggggcctgagtgcccttagcaggtttcctactacgcacgactggataatcacggcaagttcaacgcctggaccgcccagaccaacagtgcctctgagtggctgcagattgacctgggctcccacaaacgagtcacgggcatcatcaccc

SEQ ID NO: 3340 - DNA, 409 bp, Bos taurus
  Clone ID: 15-LIB2809-027-Q1-E1-D11
agcagaaaggcatgaatgggcatatctctctggggatagggcactgctttctggggaacaggcaggactttggactgagaaagggacagcacggactgaggaggaaacatgacagttggaggaagaagctggtgaggctggtgcatccaagactggagcagaggcagaggaaggtgcagattttcaacatcagtgagagtctggctctggctttcagtaaagggctcaactggatatttagggaagggcatttctttgtgcttacgagccatagcctccttcactttggagactcccattacttcaggctgaaggaaacgcggcaccaccacaggggtttgagtactacgagggatgttttgtgggacgctgttatggatgggcccagggaagggatatactccacact

SEQ ID NO: 3341 - DNA, 258 bp, Bos taurus
  Clone ID: 15-LIB2809-027-Q1-E1-D3
gaatgggcatatctctctggggatagggcactgctttctggggaacacgcatgactttggactgagaaagggacagcacggactgacgacgaaacatgacagttggaggaagaggctggtgaggctggtgcatcccagactggagcacacgcagacgaaggtgcacattttcaacatcagtgagagtcaggctctggctttcagtaaagggctcaactggacatttacggaagggcatttctttgtgcctacgagcca

SEQ ID NO: 3342 - DNA, 378 bp, Bos taurus
  Clone ID: 15-LIB2809-028-Q1-E1-D3
atagagacgggtcgcatccaagctgagctggatgatctgaaggcctccagccactcgcttccccttgaccaccaggggctctggctggcactttacctcctggtcctccaagacctgcacagggcctcccttaacaatgctgcccccgaggaagattgtcccacgaggcggggcctcttggggtcagagatgtcatactgtcgcaggtccccgtgcagccagttgctgaagtagaggaagcggtcgtccagggacagcaggatgtcagtgatcaggcttggcatttcaggcagtatccaacccttcactttcttggggggcacctggatcaccttctccactgaccaagtccctccctggtttccttttaggaaacga

SEQ ID NO: 3343 - DNA, 376 bp, Bos taurus
  Clone ID: 15-LIB2809-029-Q1-E1-D3
tgctccgtatgccatgggcgcgcgataccccagcaggaaattgttcccaatagtgctgaggaacgacttcacagtatgaaagagggaatccatgcccaacacaaagaacctatgataggagtgaatcagcttttcagacaattctaccagctggatgcctatccatctggtgcctggtattacgttccactaggcagacaatacactgatgccccatcattctctgacatcccgaatcccattgggtctgagaacagtgaaaagacgactatgccactgtgcggaagagtcaagtgaattctgagggactccacagttatggtctttgatggttctgaaaattccatgctccaaatgtcgtttcatctatcatgtc

SEQ ID NO: 3344 - DNA, 426 bp, Bos taurus
  Clone ID: 15-LIB2809-032-Q1-E1-D3
gccaagggcgcgggatactgcagaacttttccaatcacatccttaacagaaggaataggtttttttgggataaaatggtttctttcaagtggtagaacggtcacattttcttttttcagtctcaacttttcctctgctatgattttcttgcgcttctcaagataaggtccaaagcttggcagtttctttcccacaagttcagcaatacaatggactggtttccctttctggtgactcttcgtggctggactctgctcatcacagtcatgtagttcttcaatgcttttcagataaagcacagctttgaggccagtgcagtactcgtggatgatagtgaaatcctgattttgaatatcactgcatacctggaacatctaatcaccaccgtgtagaaactgaagaccactttcagctgagtcaattcca

SEQ ID NO: 3345 - DNA, 271 bp, Bos taurus
  Clone ID: 15-LIB3057-001-Q1-K1-D3
ccggattcccggtcgaccacgcggtccgttctcatgaacattaatatgaatatctctgatcctattgattggatcaacatagggactatgcctattaccccattgattcacaccgtcagctcatctatcaataaacctaggcatatccatacgcctgtgagcaggagccgtaattacaggcttccggaatataactactgcatgactggcccattacttaccgcatagaacaccaactgcactaatcccaatactagtcactattgaaact

SEQ ID NO: 3346 - DNA, 344 bp, Bos taurus
  Clone ID: 15-LIB3057-002-Q1-K1-D11
gtcggagcgcgtgctatccgactacacgcaagtgttctacaaccacgtgcagaagcgcaagcgctacccgtccatcgaggagttcctggtgcgcgacggccgcctcaacgtggactacaaggctctcaaccgcagcctgtaccacctgcacatgcagaactggctgcgtttcttcccgctgcgccgcatccacatcgtggacggcgaccgcctcatcagggaccccttccccgagatccagaaggtggagcggttcctgaggctgtcgccgtagatcaacgcctgcaacttctactttaacaaatccaagggcttctactgcctgatggacagctgcctgcacc

SEQ ID NO: 3347 - DNA, 169 bp, Bos taurus
  Clone ID: 15-LIB3057-003-Q1-K1-D3
cggactcgtgggtacggacctcttgtacatggaaatactacagtttaatatgacgggaagagtgtgttgacaccagatgctggtgccaatttccatgtgctgacggatcatggagtgtctagcttgtttacagcgcctactgcaatttgagcgatccgtcaacaggacc

SEQ ID NO: 3348 - DNA, 362 bp, Bos taurus
  Clone ID: 15-LIB3057-004-Q1-K1-D3
ccgggtcggaccaagccttccgatcgtcaggattaagcgccttacgaagggaggtaaaaaggaagccaagaagaaagtgggtgaccaattttttaaaaaagattggtatgatgtgaaagcaccagctatgttcaacataaggaatattgggaaaacattggtcacgagaactcaaggaaccaaaatcgcgtctgatggcctcaaaggtcgtgtttttgaagtgagtcttgctgatctgcagaatgatgaagtagcgtttagaaaattcaagctaattactgaggatgttcagggcaaaaactgcctgactaagtttcatggtatgggatctacccgtgacaaaatgtgctccatggtcaaaa

SEQ ID NO: 3349 - DNA, 437 bp, Bos taurus
  Clone ID: 15-LIB3057-006-Q1-K1-D3
cgctgcagcctccgccgtagccgccgcggagcccactgccaacgcttctgagcagaagatggctgtgcctcccacgtatgctgatcttggcaaatctgccagggatgtcttcaccaagggctatggatttggcttaataaaacttgatctgaaaacaaaatctgagaatggactggaatttacgagctcaggttcagccaacaccgagaccaccaaagtgacgggcagcctggaaaccaagtacagatggactgaatatggtctgacgtttacagagaaatggaacactgacaacacgctgggcacggagattactgtggaagatcagctttgacgtggcctgaagctgaccttcgattcatccttctcaccaaacactgggaaaaaaaatgctaaaatcaagacagggtacaagcgggaacatatcaacctgggct

SEQ ID NO: 3350 - DNA, 418 bp, Bos taurus
  Clone ID: 15-LIB3057-008-Q1-K1-D3
gtttcttgaaatcatcaccaccatggacagcaaaggttcgtcgcagaaagggtcccgcgtgctcctgctgctggtggtgtcaaatctactcttgtgccagggtgtggtctccacccccgtctgtcccaatgggcctggcaactgccaggtatcccttcgagacctgtttgaccgggcagtcatggtgtcccactacatccatgacctctcctcggaaatgttcaacgaatttgataaacggtatgcccagggcaaagggttcattaccatggccctcaacagctgccatacctcctcccttcctacccctgaagataaagaacaagcccaacagacccaccatgaagtccttatgagcttgattcttgggttgctgcgctcctggaatgaccctctgtatcacctagtcaccgaggta

SEQ ID NO: 3351 - DNA, 427 bp, Bos taurus
  Clone ID: 15-LIB3057-009-Q1-K1-D3
taccggcttcgagccacgcgtccggcggtatgctgacagggaattagcgcgtccttaaaccactgctgaatcttgcggtaggagcagatctgggggctcgagtaccagcggtcgaggtggcgggactcaccgttccggtcagggcgcttttggaaacatgtgtcgtcggggccgcatgtttgcgccaactatgacctggcgaccttggctccgcagactgaatacgacgcataagcgatacaccatctgctctgcactggctgcctcagtcttaccagcgctggtcatgtctaaaggtcatcgtatagaggaagctcctgaacttgctttggtggcggaagattaagttgaaagctacaagaagacccatgacgctgtgatgctattgaacaaacttaaggcctctaatgatatcaaaaatgtctat

SEQ ID NO: 3352 - DNA, 414 bp, Bos taurus
  Clone ID: 15-LIB3057-010-Q1-K1-D11
gagaagaggaagaaagagaaaaagaaagagctcgagacagagaaagaagaaagaggaggggatcacgaagtaggcattcaagccgaacttctgaccgaagatgcagcaggtctcgggatcacaaaagatcacgaagtagagagagaaggaggagcagaagtagagatcgacgaagaagcagaagccacgatagatcagaaagaaagcatagatctcgtagtcgggatcgaagaagatcaaaaagccgagatcgaaagtcatataagcaccggagcaaaagtcgagacagagaacaagatagaaaatcgaaggagaaagaaaagaggggatctgatgataaaaaaagtagtgtgaagtccagtagtcgagaaaagcagagtgaagacaccaacactgaatcaaaggaaagcgata

SEQ ID NO: 3353 - DNA, 439 bp, Bos taurus
  unsure (362),(415): unsure at all n locations; Clone ID: 15-LIB3057-010-Q1-K1-D3
gaggacgacgaggaggagaatatggcaaggaggaacatgaaaaagaagctatcgcagaggagatctttcaggatggggagggggaagaagggcaggaggccgtggaggcccacatggctcctccagaagaggaagaggaagatgatgaagagtcagacattgacgactttatcgtggacgatgatggacaacctctgaaaaaacctaagtggcggaaaaagcttcctggatacactgatgcggctctgcaggaagcccaggagatttttggtgtggactttgactacgacgaatttgagaaatacaatgagtacgacgaagagctggaggaagagtacgagtatgaggacgacgaggctganggcgagatccgagtgcgccccaagaagaccaccaagaaacgtgtgagccgcangagcatcttcgagatgtatgagcc

SEQ ID NO: 3354 - DNA, 324 bp, Bos taurus
  Clone ID: 15-LIB3057-011-Q1-K1-D3
cgcggaatcgccgcgagatccggtctcggtccacgctgcccgtcgcgcagccagtcggccaacccagcgtccgccgctaccgcagccatgggagtgcaggtggagaccaccttcccgaagcgtggccagacctgcgtggtgcactacacggggatgcttgaagatggaaagaaattcgattcctcccgggacagaaacaagccctttaagtttgtgctgggcaagcaggaggtgatccgaggctgggaagaaggggttggccagatgagtgtgggtcaaaaaagccagctgactattctcccagactatgcctatggtgccact

SEQ ID NO: 3355 - DNA, 441 bp, Bos taurus
  unsure (7),(278): unsure at all n locations; Clone ID: 15-LIB3057-013-Q1-K1-D3
gcgccgncagcgggcccccaacttgaggtccaacccccttcccttggccggccttttagcaggttcttctggggcatttcaaccaccttgggaacccagcggccggtccaggaaatggggccgtccccctggggccttttcggcagaggagcacttgccaagtcagtgagggctggtaggcccctggagaacagcaccgacaatgacgacaacaagagatccccttccccacccctttgcacccctcccactgcgggtgtcctagagggaggaacggngcttagggggagcagactcctgagatctgggcacaggcaacgcattcagatctggaccaagtcgggacagcaccatcccagccccgcagccatggccatgccagcaggccgcaccacagagatccagacaactacaccagccagcaaaatggacattccaaca

SEQ ID NO: 3356 - DNA, 248 bp, Bos taurus
  Clone ID: 15-LIB3057-014-Q1-K1-D11
ccgggtcggaccaagccgtccgtttcagtccacctggtgtgctgggttaatggctagtactgtattggctccgtggaaacatgtctgtgaaaagagtatgtagtggcttctttcaaattgttagatgctgaatatgttcacttttaaatcccaattctgtcccgatcttacagacgctactgtacttgaatggttaataaaactgcacagtgctgttggtggcaaaaaaaatctggtaacttcagaaa

SEQ ID NO: 3357 - DNA, 432 bp, Bos taurus
  Clone ID: 15-LIB3057-017-Q1-K1-D11
cggattcccggtcgatgacgcttccgctcggctctggactcactgctcagcttcccctaaccctgagccagagcaccccaggtcggggcgtccctttcccacgcccgaggcagaatgggcaaggacaagacccacatcaacatagtgctcatcgaccacgttgactcactcaagtccaccacgactggccacctcatctacaaatgctgtggcatcgacaagaggaccatcgagaagtccgagaaggatgcggccgagatgggaaagggctccttcaagtatgcctgggtactggacaagctgaatgctaagcggtaactcagcatcaccatcgacatctccctcttcaaatttgagaccaccaaatactacatcaccatcatcgacgcccaatgccaactcgacttcattaataacacgatcacaggcaca

SEQ ID NO: 3358 - DNA, 109 bp, Bos taurus
  Clone ID: 15-LIB3057-018-Q1-K1-D11
gcaaattgtgcaattgaataaaacccacactttccatttagattcttgcaactgtatcatgtgtaatagtatcactttttctacattttggtcaaataaatttttacat

SEQ ID NO: 3359 - DNA, 165 bp, Bos taurus
  Clone ID: 15-LIB3057-018-Q1-K1-D3
ggcaagattgacacttaccttaagctcctgaattgcagaatcatctacggcaacgactgctaagcccacatgcatcctatccatttctgagatggttcttaatgatccattccctggcaaacttctctgagctttatagctttgtaatgcatgcctggctctaat

SEQ ID NO: 3360 - DNA, 399 bp, Bos taurus
  unsure (237): unsure at all n locations; Clone ID: 15-LIB3057-020-Q1-K1-D3
cggagggcttgccggccctggccttggagcagggctcggggctttgcccggcgccttggcaggggctctggtgcccggtggcccggctggcgctgctgcagcctataaagccgctgccaaggccggtgctgctggtctcggggtcggcggcattggtggtgttggcggcttaggagtgtctacaggtgcagtggtgcctcaacttggagccggagtcggggctggagtgaagcctgngaaagtgccaggtgtggggctcccaggtgtgtacccgggcggagtgcttccaggcgcaggagctcggttcccgggtataggggtgctccccggggttcccactggagcaagagtcaagcccaaagccccaggtgggggcggagcttttgctggaatcccaag

SEQ ID NO: 3361 - DNA, 289 bp, Bos taurus
  Clone ID: 15-LIB3057-021-Q1-K1-D11
ggcagcccgcccaaggacaagcgctactgtgggttcatgacctccgagaagagccaaacgccccttgtcacgctgttcaaaaacgccatcatcaagaacgcccacaagaagggccagtgagggcgcagcgggcaggggtctctctccgcggaaagttgaccccgaaggcctctcttctgccctcctgccgcctcgcagcctgggtgaggattcgcccaggcagtgatggcgccaggtatcccgactcttaaagctgtctgtagttaagaaataaaacctttcaagtttc

SEQ ID NO: 3362 - DNA, 412 bp, Bos taurus
  Clone ID: 15-LIB3057-021-Q1-K1-D3
atttattcctaaatgcaataataatcagtagtgacgcctttgaagtaacaattagggcacagagcccaaagaagtgtttcaaaagaaatttgtagaaatattaatttatgatctttttattcttcccagacattagctttttgatgtttagctatggaaaatatgctttatggaatcttgagccccacactactgtttctataagctataaaagtacaaggaagatgtctggcttacttgctatttcctcagtgcctgggaaagcctttgctcacagtggaaagaaatctttgttaaatgaacaagggagtttattcttaacagtggccacaaacttgaagagagtcaaatttaataccatagctcatttttgaaatctcacaacctagtaaatcatctggggtcccatcag

SEQ ID NO: 3363 - DNA, 290 bp, Bos taurus
  Clone ID: 15-LIB3057-022-Q1-K1-D3
ttacatgcatgtcctttacagttaatatcctttcatcattaatttttatgctaacttatatttacactgcaaaaacctataaccacaattgtcctacatcgctacacactttaaagatcaaaccaaattcaaactgaaactctcatctctttattccactttaaaccaatttctctccaacctatactttattattgtattccctacaatcaatatatttcataaatgtgagtcttctgtttattactactgtatactcactatatcctacattttttccctttcccttt

SEQ ID NO: 3364 - DNA, 200 bp, Bos taurus
  Clone ID: 15-LIB3057-024-Q1-K1-D11
ggaagactgtaaaagctgatgaagattgtgacataagtggtactttgggatttaattttattaccatttaagtgaacaggtaggatacgttatacgtacctacccatgcatattataactactccagcagacccaccatgaagtgcttatgaacttgattattgcgttgctaatctcatggaatgaccctatctatcacc

SEQ ID NO: 3365 - DNA, 430 bp, Bos taurus
  unsure (292): unsure at all n locations; Clone ID: 15-LIB3057-025-Q1-K1-D3
ctgggcgcagactggttgcgcgcctctttttcttcgctgcctcccagttctagattaggcgtcgccatgggttttggagacttgaaaagccccgctggcctccaggtgctcaacgactacttggcggacaagagttacatagaggggtatgtgccatcacaagcagatgtagcagtgtttgaagccgtctccggcccaccacctgccgacttgtgtcatgccctccgttggtataatcatatcaaatcctatgagaaggaaaaggccagcctgccaggagtgaagaaagctntgggcaagtatggccctgctaatgtggaagacaccacagaaagtggagctacagataagtaaagatgatgacgacattgatctctttggatctgatgatgaggaggaaagtgaagaagccaagaggctaagagaagaa

SEQ ID NO: 3366 - DNA, 317 bp, Bos taurus
  Clone ID: 15-LIB3058-001-Q1-K1-D3
caaatatgtaccatggatgagatgcatacaatgctttgaatacactactttaagaatttgcattgaatacttcaggatattccaaacacaacattatatatatatatatatatgctacagccttgaatctgtactgttttaactacgagagagactattcaataaaaaactcattgggtctgtaaaaaaaaaaaaaaaaaaaaaaaaaaaaaaaaaaaaaaaaaaaaaaaaaaaaaaaaaaaaacaaagcaaaagatcttaaagtacactatttaccaatacttcataaacaataatttaaatttatccttttgaaa

SEQ ID NO: 3367 - DNA, 307 bp, Bos taurus
  Clone ID: 15-LIB3058-005-Q1-K1-D3
gcgtgcgctgagcctcagccgcgagatcaccggctttgtgtaagccaaacacgtggcccagcagggggcccaactcgcccagttcctgaaggataatgtaaagcactaacagcgggacaagatacggcaagccgtaggtgaagccgacgcagcgcggatgttgtcagatgccctgagcaagaacccaggttatatcaagctacgcaagatcctatctacccataccatctcctagacgattgccagcttacacaatctgatctatattaatgctgacaacctggtacttaactctacatgatgaaag

SEQ ID NO: 3368 - DNA, 389 bp, Bos taurus
  Clone ID: 15-LIB3058-007-Q1-K1-D11
cccctgtgttcgtatgatccgtaataattaccgccgtactactactactctcgctccctgtattagcagccggcatcacaatgctattaacagaccggaacctaaatacaaccttcttcgacccggcaggaggaggagaccctattctatatcaacacttattctgattctttggacaccccgaagtctatattttaatcttacctgggtttggaataatctctcatatcgtgacctactactcatgaatcaaaagaaccattcggatatatgggaatagtttgggctataatgtcaatcggatttctaggtttcatcgtatgagcccaccatatattcactgtcggaatagacttcgacacacgagcctactttacatcagccactat

SEQ ID NO: 3369 - DNA, 393 bp, Bos taurus
  Clone ID: 15-LIB3058-007-Q1-K1-D3
ggcgctagaagcgagcggcggctggcgaagcactccaggcccggacactactgcacctaggctcagggctcgtgcctcgtctgctgcaaaccagcctgaacgcctggacacggcccgatccctcatcggcccgagcccacccaggcccagcccagccgagcctgtgcgtccacctgccgcagcctctgccgcagccgccactccatccccaacccgggccccgcatctaggccgccaggatggacgtgttcatgaagggcctgtccatggccaaggagggcgtcgtggccgccgcggagaaaaccaagcagggggtcaccgaggccgcggagaagaccaaggagggtgtcctctacgtcggaagcaaaacccgagaaagggtggtgcaaggag

SEQ ID NO: 3370 - DNA, 251 bp, Bos taurus
  Clone ID: 15-LIB3058-008-Q1-K1-D3
accaggccgtgaccataagcaaatgccttcactttgggactatgattgactggacggtcatccgctcgatccatgcgaagtgcccttaccttacctgcgaacgaacacgaaagccgatgatgattgtgcacggatggccaggctccttcaacgagtactataagatcattccgctgctgactgaccctactagccacagactgagtgatgatgatgaccttgaagtcatctgaccatccatctctggatac

SEQ ID NO: 3371 - DNA, 347 bp, Bos taurus
  Clone ID: 15-LIB3058-011-Q1-K1-D3
tcggttctagatcgcgagcggtcgccctttttttttttttttttttttttttttttttttgtttttttttttttttttttttttttttttttttttttttttttttttttttttttttttttttttttttttaaaaaatttttttttttataatttggggggaaaaaatttttttttaaaattataaattgtgaaaaatgctttatttaatttttgaaaaaaaaaggggggctttttaaaaaaatttttttttatgggtaaattgaattttttttttcgggtttcctttatttgggcattaaggggggtgaaaaaataaaatttttaaaggggttttttttttaaaa

SEQ ID NO: 3372 - DNA, 387 bp, Bos taurus
  Clone ID: 15-LIB3058-013-Q1-K1-D11
gttctaatcgcgagcggccgaccttttttttacctattcaccctccactttccgtctcgagatctataaacgtggtcacctttctatttatagtgccttccgaactcacgtggcgttcatttacacccacatgcgacagcactctgcacctccctaccaacaccacacattatttttctacaggtccaatcaaatttaccataactcctaatgccctgcatttccacttacggaccaaaaaaaggttaaccagccaatatcggttatgtacattctcctatggagtacgtatgggtagaaaccagccattttcaatgatctcggatttccaatacaaccttcaaagcttaccctgttctactgtgactttacttgtgctgtgaccat

SEQ ID NO: 3373 - DNA, 416 bp, Bos taurus
  Clone ID: 15-LIB3058-016-Q1-K1-D3
ccggccgcgagcggccatttccactttttccctgcgacttttttcggcggaaagttcttttctaacgtcgcctgtgcttcttgaggagggacggtatcactgaaccgcagctatgactgaggctgacgtcaatccgaaggcctaccctcttgcagatgctcacctcaccaagaaactattggatctcgttcagcagtcatgtaactacaagcagcttcgaaaaggagccaatgaggccaccaaaaccctcaacagaggcatctctgagttcattgtgatggccgcagatgcggagcccttggagatcatcctgcacctcccgctgctgtgtgaggacaagaacgtgccctatgtgttcgtgcgctccaagcaagctctggggcgagcctgcagggtctccaagcctgtcatcggct

SEQ ID NO: 3374 - DNA, 279 bp, Bos taurus
  Clone ID: 15-LIB3058-018-Q1-K1-D11
atccgaacggttgtaaagctttaagttcaaaagaggagaattcttccatccttgtaactaagtcttagggtctggttggagcagccacataagcagaaaggagctctttcaagttcacagattgttagatcttcattaacctacgctaagcaataatgttttgtgtgtaaattcctacatatgtctaaccaaggataaggctaatactgtcataaatctgatttctggtctcttcttcacataaataattgctagctcattaaagaatatttctaacat

SEQ ID NO: 3375 - DNA, 434 bp, Bos taurus
  unsure (356): unsure at all n locations; Clone ID: 15-LIB3058-018-Q1-K1-D3
ttctttctttttttttttgtaaatccacagtatgtatttcaattaaaaattcaaataaaatcgcatcctcttcccttcagcctttttaaaaatggaactagactgtatggttccctctccttgaaatacgtcagatggggctccactcccgctcttggtcgctggcaggcggggagccctccgcacagggcccagcctcagtccacgccgtctagctcctgccgctgtctcccctccagctggaggacctgggtttcgatgcaacggaactgccaaggccaacgggtgttgtacagaaatggccgcaggtcgaacctgttgtcgtccgggctgtagctctcggcgtggtatgcggnggtcagtgtggtcatcttgtgtctgttcatggaatacttggagaaaaagcacttcactttgtcagccaccctgtcggg

SEQ ID NO: 3376 - DNA, 464 bp, Bos taurus
  Clone ID: 15-LIB3058-019-Q1-K1-D3
cagaaataaacccatgcacaagtggtcagttaacctatgataaagcaaccaggaatatacaatgaggaaagaataatctcttcaataactggtgctgggaaaactggacagctacatgtaaaagaatgcaattagaacattctctaacaccgtatacaaaaatagactcaaaatggattaaagacttaaatgtaagactgaatactgttagtatcctagaagaaaacataggcagaacactctctgacataaatcacagtagtgttttttggttccatctcccaaagcaaaggaaataaaagaaaaacaaatgggacctaattaaatttaacagcttttgtagagcaaagaaaaccataaacaaaacaaaagacagcctattgaatatgggagaaaatatttgcaaatgattgttaaaggataaatatccaacatatataaacaactcgtacaactcaacatcc

SEQ ID NO: 3377 - DNA, 321 bp, Bos taurus
  Clone ID: 15-LIB3058-020-Q1-K1-D3
cggacgcgtggggccaagaggctagccaggcccagcaagctcacagctctgactgactggctgcaaagtacaagctgagaatccgtgacatagtcacccacttccagacagcttcagtgtaaagtgttcaagaaaaacatttcttgactaaatgtgtctgagttacccggacagttcaaatacattccaacaaaaaggccccttgtggcctaggaagaagtgacactaagccaatgcctttcctttctgctagagcaggttgagctggagaaagggggagcagtggggcccagggcgtgctgccctcacaggcagtgaggc

SEQ ID NO: 3378 - DNA, 456 bp, Bos taurus
  Clone ID: 15-LIB3058-021-Q1-K1-D11
gcgagtcctgatcataagggatcctaccttgtctaccaccatccatcagatgtcacccgtcattcagtcactcggcagcaccttgtgctaaccagcactgtgaggagacagagacccttgctctgaattcgacaggaccctgccacctatgcagcattacagaagccatggggatgccacacacagaggcctgtaccctgtctccagcaaaccttgaccaatttacatcagtgcctatctctcaccagcaagagaacaaattagaccgctacagcatcaacagctgtattatagtcaagatgactccaacagaaagaactctgatgcctacagattgtatgtgcagactactcatatctacgaagatcccaagttagatgaccgagggcactttccagcttctactgattattctacacagtatggactgaaatcaaccactaattacgtggactt

SEQ ID NO: 3379 - DNA, 465 bp, Bos taurus
  Clone ID: 15-LIB3058-021-Q1-K1-D3
ctttgctccagtcaatgtaacaactgaagtgaagtctgtagaaatgcaccatgaagcattgagtgaagcccttcctggggacaatgtgggctttaatgtcaaaaacgtgtctgtcaaagatgtccgtcgtggcaatgtggctggtgacagcaaaaatgatccacccatggaagctgctggcttcacagctcaggtgattattttgaaccatccaggccaaatcagtgctggatatgcacctgtgctggattgtcacacagctcacattgcttgcaagtttgctgagctgaaggagaagattgatcgtcgttctgggaaaaagctggaagatggccctaaattcttgaaatctggtgacgctgccatcgttgatatggttcctggcaagcccatgtgtgtcgagagcttctctgattattcctccctgggccgttttgctgtgcgtgacatgagacagacagtcgc

SEQ ID NO: 3380 - DNA, 175 bp, Bos taurus
  Clone ID: 15-LIB3058-022-Q1-K1-D3
tcctaattcccggtcgagtacgcgtccgccgatatatctgaacaggtcctgaactacatgttcacttcagagatctccgtgaaaaaagaataggtgagcttaatgatatcatccggacaaatactctgcatcctgaacctacatactcttttctctcagaagcggtaccacttct

SEQ ID NO: 3381 - DNA, 293 bp, Bos taurus
  Clone ID: 15-LIB3058-023-Q1-K1-D11
cggacgcgtgggcgcggtttctggaggcgaagaacgcggttggccaatcgcaagccagaagatgaaggttctgtgggttgccgtggtggtcgcgcttctggcaggatgccaggcggatatggagggagagctggggcccgaggagcccctgactacgcagcagccccgggggaaggacagccagccttgggagcaggcgctgggccgcttctgggattacctgcgctgggtgcagaccctgtctgaccaggtgcaggaggagctgctcaacacccaggtcattcaggaactga

SEQ ID NO: 3382 - DNA, 421 bp, Bos taurus
  Clone ID: 15-LIB3058-023-Q1-K1-D3
caaaagatgacttgagaaaggattgtagactaatggaattcaattccttgattaataagtgcttaagaaaagatgcagaatctcgtagaagagaacttcatattcgaacatatgcagttattccattgaatgatgaatgtgggattattgaatgggtcaacaacactgctggtttgagacctattctgaccaaactatataaagaaaagggagtttatatgacagggaaggaacttcggcagtgtatgctgccaaaatcagcagctttgtctgaaaaactcaaagtattccaagaatttctcctgcccaggcatcctcctgtttttcatgagtggtttctgagaacattccctgatcctacatcatggtaaccagtaagcccaaagggaatcagcatactgtcgttccaccgcagttatgt

SEQ ID NO: 3383 - DNA, 244 bp, Bos taurus
  Clone ID: 15-LIB3058-025-Q1-K1-D11
acccactcgggcgatccggaccatgctgccacccccatttatgaaacagagcattaagatccgagccgagactgaggggatcaacatcagggaggaagctctgaaccacctgagggagattggaaccaagaccaccttgaggtactccgtgcagctgctgaccctcgccaacctgcttgccaagatcaacgttaaggactgcatttagattgagcacatgaatgatatcagctagctcttatac

SEQ ID NO: 3384 - DNA, 424 bp, Bos taurus
  Clone ID: 15-LIB3058-027-Q1-K1-D11
gcccttggaaggtgctttctcgggcaccataccccagctgtccaaaaaggcctccgttgatggaataattcttttgattatctccggtaaagaatagtacttcggagataataaaaagaattattctttaccggatttttctgagctttctaccactcaagcctcgcccccacccctgaactaggcggctgctgacccccaacaggcattcacccactaaaccccctagaagtcccactgctcaacacctctgtcctattggcttccggagtttctattacctgagcccatcatagtttaatagaaggggaccgaaagcatatattacaagccctatttatcaccatcacattaggagtctacttcacactactacaagcctcagaatactatgaagcaccttttactatctccgacggagttt

SEQ ID NO: 3385 - DNA, 401 bp, Bos taurus
  Clone ID: 15-LIB3058-027-Q1-K1-D3
gatcgcgagcggccgccctttttttttttttttttttttttatacataggattttatggtgcactgctataacaatttcattatagaccaagggagataaaagaaaaagggtaaaaccaccacactgagtaaattactaaagcttttctacatttaacaggattttccatctggtagatttattgtcatatccccttcaaaacagacaagatgcttaccatattttaaagattataggttgccactgaaagaaaaattttacacagttcactgtacatcaaggttgaaaaactgtcctgcatgaaaaatagaaatcatgtgaataaaaggaaaagaaaacattattgttgaaagaaagattacagtcctcgaaacgtgccatctacacgtggacgctcgat

SEQ ID NO: 3386 - DNA, 265 bp, Bos taurus
  Clone ID: 15-LIB3058-028-Q1-K1-D3
gccaggtcagtcatgttggggaaggtctcattcaggtgaaggagctgccactggggatggaggaagcgacgacatttctctggcttgaagtttgaatccagtgggatggagattctcagcaggacatcagggctgaggatcccagtatcattatcagagacagtggcattatcaagattgtggacccagcagtgatgaccaggaacggctgcagtgaagttctccagcaatgagtgacagactactatcatgtaaaaaggaaaag

SEQ ID NO: 3387 - DNA, 235 bp, Bos taurus
  Clone ID: 15-LIB3058-031-Q1-K1-D3
cttcgataacctcatgctgaacccggtgtcccagctgtcccaggccatccgcgagagcgacggagcacctcgctgagaagatgaagatcctcttccagaattcagggcgagcgtgggaggacttggaggccaggatcaatgccgagaacgaggtgcccatcctgaagacgtccaataaggagatcagttccattcttaaggagctgatgcgtgtgctgaagcagttggaagttat

SEQ ID NO: 3388 - DNA, 432 bp, Bos taurus
  Clone ID: 15-LIB3058-033-Q1-K1-D11
acgcttatacatcgcgagcggccgtatcaccttttaagagcacctactgtaatatacggaacggggacattataaaatgtctacaggtaccataccaatttaatcgaggatgaatacaagctatatcacatcatgagggactacactaacggggccaagctcaccggcgagctcaaaaatgagctcatcgaaatactgcagtccctgattgcctagcaccataccccgctcaaggaggtcaccgacgataatctgaaagaatatatgaccccccggaagctgacctacgacttttagtaacgctcactttctctatgcttactcaaagaagtaatttacccataatcccaaatcagtctaatcagcacccccctgctgctgccctaggctctatcaaatggtaattattggcccaggtctgaaagttctgtg

SEQ ID NO: 3389 - DNA, 406 bp, Bos taurus
  Clone ID: 15-LIB3058-034-Q1-K1-D3
ctggtttctgctgcatgacaacgtgacatttttttataaaactaaacatgcaactggggctttgcaagtggcccagtggtaaagaactctcccgcagtgaaggagatggggtttcagtccctgggttgggaagatcccctggagaaggaaatagcaatccactccagggttcttgtctgggaaatcccatggacaaaggagcctgatgggatacagtccagggtcgtaaaagagctggacacgactgagcaactaaacaacaacagcaaacatgcaactaccaaatgatcaagcaactgcactcttgggcatataccagagcaagcaaaccttaggttcacaccccaacctgtacacaaatgttcatagcaactttatttgtaatagccaaagaagtggaaatgac

SEQ ID NO: 3390 - DNA, 431 bp, Bos taurus
  Clone ID: 15-LIB3058-035-Q1-K1-D3
tgtttggccaggatgagatgattgatgttattggggtgaccaagggcaaaggctacaaaggtgtcaccagccgttggcacaccaagaagctgccccgtaagacccaccgaggactgcgcaaggttgcctgtattggggcgtggcatcctgcccgggtggccttctctgtggctcgggctgggcagaaaggctaccatcaccgcactgagatcaacaagaagatctacaagattggtcagggctacctcatcaaggacggcaaactgatcaagaacaatgcctctactgattacgatctgtctgacaagagcatcaaccctctgggtggctttgtccactacggtgaggtgaccaatgactttgtcatgctcaaaggctgcgtggtgggaaccaagaagcgagtgctcactctgcgcaagtccttgctggta

SEQ ID NO: 3391 - DNA, 422 bp, Bos taurus
  Clone ID: 15-LIB3058-036-Q1-K1-D11
ctgcgtgaaaacctttgactgtgtagatcacaacatactgtggaaaattgttaaagagatgggaataccagaagaccttatctgcttcctgagaaacctgtgtgtaggtcaagaagcaacagttagaaccaggcatggaacaacagactggttccaaactgggaagggagtacatcaaggcaatatattgtcaccctgcttatttaacttatatgcagagtacatcatgagaaatgctgggctggatgaaacacaagctggaatcaagattgctggggagaaatatcaataacctcagatatgcagatggcaccatccttatggcagaaagcaaagaggagctaaaaagcctcttgatgaaagtgaaagtggagagtgaaaaagttggcttaaagctcaacattcattaaactaagatcatg

SEQ ID NO: 3392 - DNA, 359 bp, Bos taurus
  unsure (258): unsure at all n locations; Clone ID: 15-LIB3058-037-Q1-K1-D11
gaccactcgtccggatgaatgtggatctgcaggaggagcttccatccctgtggaacagccgtgtgggtttgtatgtcaacacatttcagagcattgcgggcctggaggaaaacttccacaaggaaatgagtaagctcaaccagaacctcaacgatgtgctcatcagtctggagaagcagcacgggagcaacacgttcacagtcaaggcccagcctagtgacaacgtgcctgcgaaagggaacaagagcccctcaccgncgcctgatggctcccctgctgtcacccccgagatcagagtcaaccatgagcccgagccggcttgtgcgggcacccccggggccacccttcccaagttcccg

SEQ ID NO: 3393 - DNA, 434 bp, Bos taurus
  Clone ID: 15-LIB3058-037-Q1-K1-D3
ggtcaaggaccagttaagtgatgattggtgtagaagggaggttggcatggtggttgcctaacattgtagcagctgaataccagaacagctttgtgaagcagtcagctaagtgataaatggggaaatgtacacacatcacagtttccagttctgtagaactagcaatattgtcttgtagcttttaaaaaactggctgatacactttgttgtggaaaccatccctggtttcactttcatagctgagtaacatgttggtttagtcttgtttcttttccagtcttttgaaaagcctctactttaaggaccctccagagacttgcccacctctcattacatgtacgttcttgtttgtatcattagcacctacatgctcatggtgacaccaggctcgaagagcagttctcagagaagtacgacatgctgcacagcctaac

SEQ ID NO: 3394 - DNA, 435 bp, Bos taurus
  Clone ID: 15-LIB3058-039-Q1-K1-D3
ggcggtggagcagcgcagcgtggtctgtcagcctgagatgcgtgacgctgtgttctgaggagcggccagcggcgcgatggagcgggccagggaccggttacacttgagacggactacagaacagcacgtaccagaggtggaagtccaagtcaaacgtagaatgacagcctcactgaacaaccaggagtgtcacgtgtacctgaggcgatctcagcagcagcaagtacctgtggtggatttccaggcagaactgagacaggcattcttagctgagacaccaagaggtggttaaagcagtattggaacaccaaggctccatctactatttgaagcttctgcctcagcttgcattatttgtaagagaacctgcgtcatacctttatctgtagccttcccttaagtctttaagatcctggaactgtcctgtggacattg

SEQ ID NO: 3395 - DNA, 238 bp, Bos taurus
  Clone ID: 15-LIB3058-040-Q1-K1-D11
tcgcggacgcgtgggcgaaaaggtcacagagtggcttcctgtagggagcagaggagctggagctggcactggcttagagaggccccgggccctggtgtgaagggaggagactgaaattcatgtcttatctctattctgttaataaaacaggtgttggtgggttttttaaaaattctgtttctaaatggaggaataaacgccttgctttattttggtgggggttgggacttgtggctat

SEQ ID NO: 3396 - DNA, 437 bp, Bos taurus
  unsure (374): unsure at all n locations; Clone ID: 15-LIB3058-040-Q1-K1-D3
ccacgcgttcgatgctggtggccaccagaccctcactgttcttaccatcctccgtcgccgcacgttgccctggctccccgcaaggcccctgtggcgatggcctctcccgtgccctgttctttctctttagtcagggcttccccctcccgccttcctgccctctgaagaggttgggaagtgaccacttggatgtctgggccctgccaaggggacagggagggtcagagggaggccagctgcttcctgcccccaccctttccccaggcccactgtgctgcttttgtgccaagattaaggttagccagtcccttcccgtcttgttctgtgtgcttccgcctacccctcatcaccgccatgcccctgccccacacctncccaaagaattgaaatgtcagctcaggatatggggccaatttatgtgaatccagcatgtccct

SEQ ID NO: 3397 - DNA, 429 bp, Bos taurus
  Clone ID: 15-LIB3058-042-Q1-K1-D3
tgcaaatatttgaatgcatactatgtgtggcatcttaggaaaaatacagcaaagcttcagattcattccatacctttaagttgtttgagtagtagggtaggtcagtcagttcagttgctcagtcgtgtcctactctttgtgaccccatggactgcagcacgccaggcctccctgtacatcaccaactcctggagtttactcaaactcatgtctattgagtcggtgatgccatccaaccatctcatcctctggtggtcccttcttcttgccttcaatctttcccagcatcagagtcttttcttaggagtcaggtctttgcatcaagtggcccaagtattggaagttcaacctcaacatcagtccttccagtgaatagtcaggattgatttcctttatgactgaccatgtgcagtgattttggagctcaaa

SEQ ID NO: 3398 - DNA, 427 bp, Bos taurus
  Clone ID: 15-LIB3058-047-Q1-K1-D3
tcgcagccccgtgcatttccactacaggactgactgcgaatcctccacctccttactctgctccttccctgttgccaatgtcacactggctaagggtggacgtgatcgggtactgatgtatggacagccgtaccgcgttaccttagaacttgagctgccagagtctcctgtgaatcaagatttgggcatgttcttggtcaccatctcatgctacaccagaggcggccgaatcatctgcacctcttcacgctccgtgatgctacattaccgctcaagcctgctccagatgctcgacacgctggtcttctcgagcctactgctgtttggctttgcggagcagaagcagctctttgaagtggagctatacccagaatacagagagaactcgtacgtgccgaccaccgtagccattatcgagatccacagc

SEQ ID NO: 3399 - DNA, 441 bp, Bos taurus
  Clone ID: 15-LIB3058-048-Q1-K1-D3
tcgagcacaccggcgccgtcctggactgcgctttctacgatccaacacatgcctggagtgggggattagaccatcagttgaaaatgcatgatttgaacactgatcaagaaaatcttgttggaacccatgatgcccctatcagatgtgttgaatactgtcccgaagtgaatgtgatggttactggaagctgggatcagacggttaaattgtgggatcccagaaccccttgtaatgctgggaccttctctcagcctgaaaaggtgtataccctgtcggtgtcgggagacccgctgatcgtgggcactgcaggccgcagagtgctggtgtgggacttgcggaacatgggctacgtgcagcagcgccgcgagtccagcctcaagtaccagacgcgctgcatccgcgcattccccaacaagcagggttatgtattaagttctatcg

SEQ ID NO: 3400 - DNA, 446 bp, Bos taurus
  Clone ID: 15-LIB3058-052-Q1-K1-D11
ctagatgcgagcggccgcccttttttttttttttttttttttttttttttttttttttttttttttttttttttttttttttttttttttttttttttttttttttttttttttttttttttttttttttttttttttttttttttttttttttttttttttttttttttttttttttttttttttttttttttttttttttttttttttttttttttttttttatatttttttttttttttttttttttattttttttttattttttttttattttttttatttattttatttatttttttttttatttttttattttttttttttttttttttttttttatttttttttattttttatattattttattttttttttttatttttttttttttttttttttttttttattttttattttttttttttttttttttttttttttt

SEQ ID NO: 3401 - DNA, 282 bp, Bos taurus
  Clone ID: 15-LIB3058-056-Q1-K1-D3
atctgggtcaagaagagggtactggggttggcaaagttcctgcccgtaaagatttgagggaagaaggttaaccctaagacgtggatgtgttccatctgaactgaaggttatagatttgagggatatgtctaggactggttctttgtagagatggtgtcaaggaggttgcaggatggagatgggagacttcatgggacctggtcagctagctctggaccaggttgaacacctaggagctggcaaagtatttggaatatcttcattggaaggaggaagggcttt

SEQ ID NO: 3402 - DNA, 391 bp, Bos taurus
  Clone ID: 15-LIB3058-057-Q1-K1-D11
gttaaaaataaatgcttaacatcagctgtttactatcactggggaagaagttaacttgaaatatttactgataaatagccttttcttaaagtgtgacttttctgccttgtctgcatactatgtcacatgttctatttgcactgttgcaatatgggtcaaaagtcttgtggcatagggctagggaaatgtcagtctctcacttgtcccatttgttctgttactgttctgtgggactgatctaccctcataaacctgtgatcatcgcctaaatgttaagttgtgaatgtgtcaccttttgcttggttatttcaaccatgcattgaatatatatgtatatgtatatattcaatgctgcttgtttttaatcatatgtggcacagtttattcagtt

SEQ ID NO: 3403 - DNA, 417 bp, Bos taurus
  Clone ID: 15-LIB3058-057-Q1-K1-D3
ggggaccataaaggtccagtcctctctgtgtgggctccctctggtcaccaccgccttgcagctaccccttcctccccgccgggatgacgcggcacggcaagaactgcacagcaggggccgtctacacctaccatgagaaaaagaaggacacagcggcctcaggctatggcacccagaacattcgactgagccgggatgccgtcaaggacttcgactgctgctgcctctcgctgcagccctgccacgaccctgtcgtcaccccagatggctacctgtatgagcgggaagcaatcctcgagtacattttgcaccagaagaaggaaattgcccggcagatgaaggcctacgagaagcagcggtgcgcccggcgagaggagcagaaggagctgcagcgggcagctgcgcatgaccacgtgc

SEQ ID NO: 3404 - DNA, 387 bp, Bos taurus
  Clone ID: 15-LIB34-001-Q1-E1-D3
actagttctagatcgcgagcggccgcccttttttttttttttttttttttttttttttttttttttttgtggaacagaagtgaagctttattgcgtggacagtgtgtatgaaagggtgtatgtgtgtggtacacccgggaccgcctggtgccagggcctgtgtttggaagcaaagacaacttccatggcttagccatctttctggacacataccccaacgatgagaccacagagcgcgtgttcccgtacatctccgtgatggtgaacaatggctccctgtcctacgaccacagcaaggacggccgctggactgagctggcgggctgcacggctgacttccgcaaccgcgatcacgacaccttcctggcagtgcgctactcccggggt

SEQ ID NO: 3405 - DNA, 410 bp, Bos taurus
  unsure (301): unsure at all n locations; Clone ID: 15-LIB34-002-Q1-E1-D11
cgggccggaccacgcgtcagggcaccgccatgttgggacttgtgggtcgtgtggttgctgcctcggcctccggggccttgcggggactcagcccttcagcgccgctaccgcaagcccagcttttactgcgggccgctcctgcagcgctccagcctgccagagactatgccgctcaagcatctccatcgccaaaggccggcgccaccactgggcgcatcgtggcggtcattggtgcagtggtggacgtccagtttgatgagggactgcctcccatcctaaatgccctggaggtgcaaggcanggagaccaggctggttttggaggtggcccagcatttgggtgagagcacagtaaggaccattgctatggatggtacagaacgcttggttagaggtcataaagtcctggat

SEQ ID NO: 3406 - DNA, 408 bp, Bos taurus
  Clone ID: 15-LIB34-002-Q1-E1-D3
agattgttccatgctgactatacaacggatctcccagtccaatagtgactacggctaaaaggctcacgagaggtagaaagagctcatcgtcatgacaggaaagtttctgtggtttgaagggatacccttcccaagtgtggattactcacctgaactcctgagagaggtacaggagagttttcttattaaagatgaagatgtcttactgctgactttccccaaatcaggaacgaactggttgattgaaactgtctgcctgatttactccaagggggatcccaagtgggtccaatctgagcccatttgggaccgctccccctgggtagagactaagcatgggtatgaattactaaaggagaagggaaggccacgtctcatcagttctcacctcgccatccaactcttccc

SEQ ID NO: 3407 - DNA, 411 bp, Bos taurus
  unsure (289): unsure at all n locations; Clone ID: 15-LIB34-003-Q1-E1-D11
tgaggacaaatatcattctgaggagcaacagtcatcaccaacctcttatcagcaatcccatacatcggcacaaatttagtcgaatgaatctgaggcggattctcagtagacaaagcaacccttacccgattcttcgctttccattttatccttccatttatcatcatagcaattgccatagtccacctactattcctccacgaaacaggctccaacaacccaacaggaatttcctcagacgtagacaaaatcccattccacccctactataccattaaggacatcttangggccctcttactaattctagctctaatactactagtactattcgcacccgacctcctcggagacccagataactacaccccagccaatccactcaacacaccccctcacatcaaacccgag

SEQ ID NO: 3408 - DNA, 312 bp, Bos taurus
  Clone ID: 15-LIB34-003-Q1-E1-D3
atttaaaaccatgaaacatctattactgctacttttctgtgcttttatagttcaagcccaatttcctactgactatgacgatggacatgatgacagacctaatgtaggtttgggtgcccgcggtcatcggccctatgacaagaagaatgaagaggcccccagcctgagacctgtgccccctcgcatcagcggacgtggctatcgggctcgtcccgccacagcaactgtgggccagaagacactggagagaaagccccctgacgctgatggctgcctgcacgcggacccggatctgggtgtgttgtgtcctac

SEQ ID NO: 3409 - DNA, 407 bp, Bos taurus
  Clone ID: 15-LIB34-004-Q1-E1-D3
cgccctgcccgccgcccgggccacccgcccgcccgtagccatgagcgcgctccgcccgggccgagcccgccgccccctggactagttctgccgccgcccggacccgcccgcaccatggagtcccctgccccgagcccgcccgccggcgtgcccacgtccaaaggaaagtccaggaggaaaaaggatttacgaatctcctgcatgtccaagccgccggcgcccagccccacgctcccccggaacctggactcccgggcattcatcaccattggagacaggaactttgaggtggaggcggatgacctggtgaccatttcagagctgggccgaggtgcctatgggggtgtggagaaagtgcggcatgcccagagtggcaccatcatggccgtgaagcgcatccggggcca

SEQ ID NO: 3410 - DNA, 408 bp, Bos taurus
  unsure (395): unsure at all n locations; Clone ID: 15-LIB34-005-Q1-E1-D3
ctctatgagatatttacatcgttttggtgctaaatgtgttgctgttggtgagtctgatggcagcatatggaatccagatggtattgacccaaaggaactggaagacttcaaattgcaacatggaacaatcctgggctttcccaaagcaaagatctatgaagggagcatcttggaggttgactgtgacatactaatccctgctgccagcgagaagcagctgaccaagtccaatgcaccaagagtcaaagccaagatcattgctgaaggtgccaacggaccgacaactccagaagctgataagattttcctagagaggaacattatggttattccagatctctacctgaatgctggaggagtgacagtgtcctactttgagtggctgaagaatctanatcatgtcagcta

SEQ ID NO: 3411 - DNA, 409 bp, Bos taurus
  Clone ID: 15-LIB34-006-Q1-E1-D11
ttataaccagctcaatctgcctccgtcaaacggacctaaaatcactcatcgcatactcctctgtaagccacatagcactcgttatcgtagccatccttatccagacaccttgaagctacataggagcaaccgcccttatgattgcccacggcctcacatcctccatacttttctgtctagcaaactcaaactacgaacgaatccacagccgaaccataattctagctcgaggcctacaaacgctccttccactaatagccacctgatgactactagcaagtctaaccaacttagctctacccccaacaatcaacttaattggagaactatttgtagtaatgtcaaccttttcatgatctaacattacaattattctaataggagtaaatatagtaatcaccgccctata

SEQ ID NO: 3412 - DNA, 177 bp, Bos taurus
  Clone ID: 15-LIB34-006-Q1-E1-D3
catgcctgaggccgagacggtcccggagtctcctagatgcgtccgggccgtgctcttagggcctcgctggatcccaaacggttagtcagcacccagtttgggtaaaagcttctgtgatcgcgaaattttcttagtcacgacatgcagaagtctatggtggcttccgcctcaaatttc

SEQ ID NO: 3413 - DNA, 398 bp, Bos taurus
  Clone ID: 15-LIB34-007-Q1-E1-D3
acccaataagaatgtcatcttctcccctctgagcatcgccatagccttggccttcctgtccctgggggctcatgaccacactgtgacagagatcctggaaggtctcaagttcaacctcacagagacccccgagacagaaatccaccagggcttccagcacctcctgcagacgttcaatcagcccagcaaccagctgcagctgagcgtgggcaacgccatgtttgtgtcagaggagctgaagctgctggacaaattcaggaaagatgccgaggctttttacgcctctgaggttttatccactaacttcaaggattctgaagctgccgtaaagcttatcaatgaatatgtgaagaataaaactcatgggaaaattgagaagctcttcagtgatcttgacg

SEQ ID NO: 3414 - DNA, 363 bp, Bos taurus
  Clone ID: 15-LIB34-008-Q1-E1-D11
gtgcgagctgggcgcgcgtgaagaggttcgagttctgttttccttgcggattccagtacttgttggtctcctgattcgacagcatgaaggagacgccactgtcaaactgcgagcgccgctttctactccgcgccattgaagagaataagcggctggatggcagacaaacctacgattataggaacatcaagatttcagttggaacagattatgggtgctgcattgtggagcttgggaaaacacgagttcttggataggtttcctgtgaacttgtttctccatgactcaatagggcagcagaaggtattcttttttttaaccttgaactctcgcagatggctgccccagcttttgaacctggca

SEQ ID NO: 3415 - DNA, 410 bp, Bos taurus
  Clone ID: 15-LIB34-008-Q1-E1-D3
caaatcatgaagtttaagtctttagatgatgtaatcaagagagcaaacaatactttctatgggttatctgcaggaatatttaccaatgatattgataaagccatcacagtctcctctgctttgcagtctggaaccgtgtgggtgaactgctatagtgtggtatctgcccagtgcccctttggtggattcaagatgtctggaaatggtcgagaactgggagaatatggtttccatgaatacacagaagtcaagacggtcacaatcaaaatttctcagaagaactcataaactatgagagtacagagatgactcctcaatagctaagcatctcctgcagtggctaatatatcttagtggttttaaatgcaaaattgttctttccttgattctttaaacataagctaatcata

SEQ ID NO: 3416 - DNA, 399 bp, Bos taurus
  Clone ID: 15-LIB34-010-Q1-E2-D11
aaaacatttaatcccaatttaaagtataggagatagaaatctaagtacggcgctatagagaaagtaccgcaagggaacgatgaaagaaaaaactaaaagtataaaaaagcaaagattaccccttgtaccttttgcataatgaattaactagtataagacttaacaaaatgaattttagctaagcagcccgaaaccagacgagctactcacaaacagtttaccaagaactaactcatctatgtggcaaaatagtgagaagatttgtaagtagaggtgacatgcctaacgagcctggtgatagctggttgtccagaaaatgaatctaagttcagctttaaagataccaaaaattcaaataaaccccactgtagctttaaaagttagtctaaaaaggtacag

SEQ ID NO: 3417 - DNA, 347 bp, Bos taurus
  Clone ID: 15-LIB34-010-Q1-E2-D3
gggtccacgcacgcgtccgaacatttccccgaataaataatataagcttctgactcctccctccctcattcctactactcctcgcatcctctatagttgaagctggggcaggaacaggctgaaccgtgtaccctcccttagcaggcaacctagcccatgcaggagcttcagtagatctaaccattttctctttacacttagcaggagtttcctcaattttaggagccatcaacttcattacaacaattatcaacataaagccccccgcaatgtcacaataccaaacccctctgttcgtatgatccgtaataattaccgccgtactactactactctcgctccctgta

SEQ ID NO: 3418 - DNA, 350 bp, Bos taurus
  Clone ID: 15-LIB34-011-Q1-E1-D11
actacaacctggacgagagtgaaggtgtctgtgacctctttgatgtgcctgttctcaacctctgactgacaggagcatgccctttgtggctgggacacagactgtctgacctgggggctgcctggggacctctccccactcccctacagcttgagagccgcagacttctggcttccccagccttccctcactgcacagttctggccccaagtcctgctcctgcaagtccacctgttctgtgcactgagagccggggaaaggagcatatccccctccaccatggagcctacgtgtttgcctctccttttggggggccttaccctacctggtatcctcctcaagccctccca

SEQ ID NO: 3419 - DNA, 363 bp, Bos taurus
  unsure (144),(355): unsure at all n locations; Clone ID: 15-LIB34-011-Q1-E1-D3
ataaaatatatatgcttttgcaagtttaaaaattcaaattcacttttgactagataggtctttctaaaaactctttaaggcaaacttggtgttagcgttctcctgcatgttgaggggcaagggaccctcctgtctgtaggctcncagagccttctctctgaccgccgggaaagacagtggaaggaagatgaactttgtgccatcaacccttctgtgtcctctgcaggaagctcagtttttacaaatcatcttgtctgtatttccagtcactgtttaatctgtacttcctaagccagacttgattttatctgacttactaagattatttccctttgataaaacaagtgtttgtcangatgccct

SEQ ID NO: 3420 - DNA, 326 bp, Bos taurus
  Clone ID: 15-LIB34-012-Q1-E1-D3
aatgtcatcgccaaaaaggtgcaaatgctgatgacgccgaccaatcactcttcggatgacctcctatgctcagcaccatcacgtgctgcatatctgcacgcatatgccggcagtcatgacccgagacgtgcacacgaatgacgtgccagacgtggtcagataattgagtccagatagcattgagccagacaaaaacaacgcttgccaagctatttatccacaccatgatatcatcggcatcaccactctcacgctgtacagccccagctttgaaatgggaaaacacatcgggcaacatggtgaacgtactattctcggaaaatcta

SEQ ID NO: 3421 - DNA, 361 bp, Bos taurus
  Clone ID: 15-LIB34-013-Q1-E1-D11
gtcgacggacgcgtccgggcagaaaatctggacctcgcctaagctgtgtctctgactcatttcggactttaggcaatttcttctaatgggagaactggcaaagatgtttacattcatccttgtcactactgctctggtaatgggcacgggaaacgcaggtcgggacaaactgccatcaacatgcatgcgcagtccaaagcgtatgtgataactgctggtcatgctggtcaagcatcacaatttcatcatcacgcagcgtttgcatgtcaaacaactcgagcactatggattccagagatggacactaatgtcattgacacttggaggagtacacgcaatagtcactctgtttctcgatttt

SEQ ID NO: 3422 - DNA, 386 bp, Bos taurus
  Clone ID: 15-LIB34-013-Q1-E1-D3
aaagtgtcaactccaactctcgtggaggtttcaagaagcctaggaaaagtgggtactaggtgttgtacaaagccggaatcagaaagaatgccctgtactgaagactatctgagcttgatcctgaaccggttgtgcgtgctgcatgagaagacaccagtgagtgaaaaagtcaccaagtgctgcacagagtcattggtgaacagacggccatgtttctctgctctgacacctgatgaaacatatgtacccaaagcctttgatgagaaattgttcaccttccatgcagatatatgcacacttcccgatactgagaaacaaatcaagaaacaaactgcacttgttgagctgttgaaacacaagcccaaggcaacataggaacaactgaa

SEQ ID NO: 3423 - DNA, 441 bp, Bos taurus
  unsure (414): unsure at all n locations; Clone ID: 15-LIB34-014-Q1-E1-D3
ggtccacgcacgcgtccgattctgaaaccctagaggacgcaactatagcactgcagactccagtactagcctgtccagagcagcaagtgagaggaaacaagccagcattgtaagaggacatgcttctcctccctctctccgtgctgctcctgctcacacagccctggagatccctgggagcagaaatgacaaccttttctcagaaaatactggccaatgcctgtaccctggttatgtgtagccccctggagagtggcttgcctggtcatgatggacaagatgggagagaatgtccccatggagagaagggggatccaggttcaccaggacctgcaggacgagcaagaaggcctggatgggttggccctattgggccgaaaggagacaatggctttgttggagaacctggaccanagggagacactgggccacgtgggcctc

SEQ ID NO: 3424 - DNA, 357 bp, Bos taurus
  Clone ID: 15-LIB34-015-Q1-E1-D3
tcctgcaacttcgaaacttttaaaatgatggtgcatctagtagtgctaactatctgtgcgttaacatgtccaggcctgtggttcctaacatactatgatcatggacaatgcgacagtctgaaggtcggtttgtcgtgccagacgtcagtagcccgaatacctggctagtgaatacgcatggatctgcacaacagtggattactcaccgtcggattgtgaattttgcacccacgctgatgtcctggatctccacaagaatctagacacagtgccctgtgcacctgatcatagcatgctacatgaacggaatctgtgtctgttgtctcagatagattgtaacttgctacagagtctttc

SEQ ID NO: 3425 - DNA, 416 bp, Bos taurus
  Clone ID: 15-LIB34-017-Q1-E1-D3
tcttgccaagtacatatgtgataatcaagatacaatctccagtaaactgaaggaatgctgtgataagcctttgttggaaaaatcccactgcattgctgaggtagaaaaagatgccatacctgaaaacctgcccccattaactgctgactttgctgaagataaggatgtttgcaaaaactatcaggaagcaaaagatgccttcctgggctcgtttttgtatgaatattcaagaaggcatcctgaatatgctgtctcagtgctattgagacttgccaaggaatatgaagccacactggaggaatgctgtgccaaagatgatccacatgcatgctattccacagtgtttgacaaacttaagcatcttgtggatgagcctcagaatttaatcaaacaaaactgtgaccaattcgaaaaac

SEQ ID NO: 3426 - DNA, 347 bp, Bos taurus
  Clone ID: 15-LIB34-018-Q1-E1-D11
acgggatgagggctggctggcggagcacatgctgctcctacgtagcaccaatccagcggggaataagcgctatgtggcagccgccttccccagtgcttgtggcaagacaaacctggccatgatgcggccggcactgccaggctggaaagtggagtgtgtgagggatgacatcgcctgaatgatgtttgacagtggtagacgactccgggccatcaatcctgataatggcttccttggggtggcccctggcaactctgccaccaccaaccccaatgctatggccacaatccagagtcagaccattttcaccaatgtggctgagaccaccgcaggtggcgtgtattggg

SEQ ID NO: 3427 - DNA, 419 bp, Bos taurus
  Clone ID: 15-LIB34-018-Q1-E1-D3
actcagaccacactatctccactcgctcagacctgtggaagattagcgaccatgatttccaatgggataggaaccgtcaccgctggaaaaaggagtatatgtcttctccctttgctgcttattggcctctggggctgtgtgacctgtcatcggagccctgtggaagacgtctgcacagccaaacctcgggacattcctgtgaatcccatgtgtatttaccgttcctcagagaagaaggcaactgagggccaaggctccgagcagaagatccctggggccaccaaccggcgggtctgggaactgtccaaggccaattcccactttgccactgccttctatcagcatttggcagactccaagaataacaatgacaacattttcctgtcagccctgagtatctccacaacttttgctatgac

SEQ ID NO: 3428 - DNA, 392 bp, Bos taurus
  Clone ID: 15-LIB34-019-Q1-E1-D4
caaaagttcacagtccagtctgaatgaggtggtacagaatcttgcagccactaaatttgttaaggtcgagcacacacagtgcattctgtatgtgatgccggagacagcgaggaaacttcttccttccctgccagagacaaagaacttacctgttggatatggcgcacccaaagccattaaccaggagatgtttaagctctcatcaatggatcctacccatgccgctttggtgaataaattctggcattttggtggcaacgagaggagccagaggttcatcgagcgctgtatccgggccttcgccaccttctgccttctggggcctgaggggaaccctgcctcctggtccctgatggaccagacgggagagattcgggatggggccacgctgc

SEQ ID NO: 3429 - DNA, 397 bp, Bos taurus
  Clone ID: 15-LIB34-020-Q1-E1-D11
gccggaatcagaaagaatgccctgtactgaagactatctgagcttgatcctgaaccggttgtgcgtgctgcatgagaagacaccagtgagtgaaaaagtcaccaagtgctgcacagagtcattggtgaacagacggccatgtttctctgctctgacacctgatgaaacatatgtacccaaagcctttgatgagaaattgttcaccttccatgcagatatatgcacacttcccgatactgagaaacaaatcaagaaacaaactgcacttgttgagctgttgaaacacaagcccaaggcaacagaggaacaactgaaaaccgtcatggagaattttgtggcttttgtagacaagtgctgtgcagctgatgacaaagaagcctgctttgctgtggagggt

SEQ ID NO: 3430 - DNA, 419 bp, Bos taurus
  Clone ID: 15-LIB34-020-Q1-E2-D11
gccggaatcagaaagaatgccctgtactgaagactatctgagcttgatcctgaaccggttgtgcgtgctgcatggagaagacaccagtgagtgaaaaagtcaccaagtgctgcacagagtcattggtgaacagacggccatgtttctctgctctgacacctgatgaaacatatgtacccaaagcctttgatgagaaattgttcaccttccatgcagatatatgcacacttcccgatactgataaacaaatcaagaaacaaactgcacttgttgagctgttgaaacacaagcccaatgcaacagaggaacaactgaaaaccgtcatggagaattttgtggcatttgtagacaagtgctgtgcagctgatgacaaagaagcctgctttgctgtggagggtccaaaacttgttgtttcaact

SEQ ID NO: 3431 - DNA, 229 bp, Bos taurus
  Clone ID: 15-LIB34-020-Q1-E2-D3
gtccgacgattcagctggccctgcattgggacaggtttgctgctgttcgaggggcagacgtggttccagcaccggcggatgctgagcccagccttccacgatgacatcctgaaggccgacgtgggaatcatgcgccgactctgtccgagtgatgcgtgacaagtgggaggaggtcgtcagccaggatgcacgtcgggagatctttggagaggtctccttgaggacgctg

SEQ ID NO: 3432 - DNA, 433 bp, Bos taurus
  Clone ID: 15-LIB34-022-Q1-E1-D3
catcgagcagggagctggtggctcttccatccccagaccagccaagcctgtgagtgacaccccagacagaggaaccagagccatgcggagtctcagcggactgctgttgttactgactgcctgcctggcggtaaacgccagctccgtgcccacattgcccgatgacattcaagtgcaggagaacttcgacctgtctaggatctatgggaagtggttcaatgtggccgtgggctccacctgcccatggctgaagacgttcaaggagaagatgaccatgagcacagtggtgttgaaagcggggccgacgagcaaggagatcagcgtcaccaacactcacagggcggaaacgtgtctgtgaatcgatctctggtacttatgagaaaacaagcacggatgggaaagtttctctatcaaaaaagccaagtggaatatc

SEQ ID NO: 3433 - DNA, 336 bp, Bos taurus
  Clone ID: 15-LIB34-023-Q1-E1-D3
aatggcatgcagactgcctacgaatttgccaaacttaagtgcaagctggtcctgtgggatataaataagcatggacttgaggaaacagccaccgaatgcaagagactgggtgcaaaggctcatacctttgtggtacactgtagtaaccgagaagatatttacagctctgcatagaacgtgaacgcagaagttggacatgttagtattttagtaaataatgctggtgtagtctacacatcagacttgttcgctacacaggaccctcagattgaagagacttttgaagttagtatccctgcacatttctggaccacacaggcatttcgtcctgagatg

SEQ ID NO: 3434 - DNA, 411 bp, Bos taurus
  Clone ID: 15-LIB34-025-Q1-E1-D3
acctgataggctacagtccatgggttgccaggagttggacacgactgagtgacttcacttgtcttgttttgatagttaagtattttagctacctacctgtaatgtatttacagagaaggcaagggcaccccactccagtactcttgcctggaaaatcccatggacggaggagcctggtaggttgcagtccatggggtcgctaggagttggatacgactgagcgacttcactttcacttttccctttcatgcattggagaaagaaatggcaacccactctagtgttcttgcctggagaatcccagggacaggggagcctggtgggctgccgtctatggggtcgcacagagtcagacacgactgaagcaacttagcagcagcagcatagtgtttttaagaagtttaaaacctg

SEQ ID NO: 3435 - DNA, 412 bp, Bos taurus
  Clone ID: 15-LIB34-026-Q1-E1-D11
agtttaccttggttggaattgccaaattttcactttgtgcccatatgacatccttcctatttcatctaataaattttgcactaatctgtgaaaacaaatcagtcgccggactaaccctgacctatgatggaaatactccagtggcatcgcatgtaaatgtaccactttcttattgcaactcagactgcaattgtgacccaactcaatgggaaccactctgtgggagcaatggaataacttacatgtcaccttgtttagcaggatgtacatcttcaagtggcagcaaaaagtctattgtgtttcataactgtagctgtgtggaagaaaatggtttccagagcaaaaataactcaatgaagttgggtgaatgtccgaaaagtgatgactgtaaaagaaaattttatatttacat

SEQ ID NO: 3436 - DNA, 324 bp, Bos taurus
  Clone ID: 15-LIB34-026-Q1-E1-D3
ctcggagccccgggcccgccgacaccatgagttggtcctcgcaccctccgagtgtaatcttttacattctttcattgctttcttcagcatgcctggcatatgttgctacccgagacaactgctgcatcttagatgaaagatttggtagttattgcccaactacctgtggaattgcagatttcctgaataattaccaaaccagtgtagacaaagatctacgagctttggaaggcatcttatatcaggttgagaacaaaacatcagaagccagagagctggtcaaagcaatccaaatcagctataaccctgatgaaccatcaaagc

SEQ ID NO: 3437 - DNA, 274 bp, Bos taurus
  Clone ID: 15-LIB34-027-Q1-E1-D11
tcgacccacgcatccggttcaagatctcgggcggccgccctaggtaaaaccagggactcactaaaagcctttggctgtgtgtcacagacaaatgatgatcccctgtacagatcaaacatcaattcccagaggtctgtcaactgtgtgcagagaaaaaggacaaacaaatgtgcctgcaccaaacaacgatccagacttccgctactcaagggcctttaaatgtctcatggacggcgccggggatctggcttttgtcaaacactcaacggtattc

SEQ ID NO: 3438 - DNA, 362 bp, Bos taurus
  Clone ID: 15-LIB34-027-Q1-E1-D3
ttctcaaccaaccataaagatattggtaccctttatctactatttggtgcttgggccggtatagtaggaacagctctaagccttctaattcgcgctgaattaagacaatccggagctctgctcggagacgaccagatctacaacgtaattgtaaccgcacacgcatttgtaataatcttcttcatactaataccaatcataattggaggattcggtaactgacttgttcccctaataattggtgctcccgatagagcatttcctcgaataattaagtataagcttctgactcttctcacactcattcggactactcctcgaatcgtctatagttgaagctggggcatgaacaggctgacccg

SEQ ID NO: 3439 - DNA, 189 bp, Bos taurus
  Clone ID: 15-LIB34-028-Q1-E1-D3
cactgagccaccttggaatccctgaggttagctgcaaaatggccgctgctttaattttgctctccaggttttccactgggaaatattgagggcacgacgagaatgatgcaacagaggatgagctggttggatggcatcaccgactcaatggacttgagtttgagcaaactccagggtatagtgacggac

SEQ ID NO: 3440 - DNA, 137 bp, Bos taurus
  Clone ID: 15-LIB34-029-Q1-E1-D11
aagaccaaggaccttccccaggcccagaggatgaacagcctcctgggctgcgctccccaccagcactcctgatgcgagtttggctcagctcctcctcccagtttcctcacaataaagccagagtgcttcttcacctg

SEQ ID NO: 3441 - DNA, 273 bp, Bos taurus
  Clone ID: 15-LIB34-029-Q1-E1-D3
atcaattgcacaaacgtcgctcacacaagcaatgatgacgtgtattagaactgtcattcatcagcctcctcgagctcctatcatcgtgatttcgtgccaaggtacactgtgtcaaactgaatataacgacacctgtgcacatcacaagtctctcttttgttcgccggtcacgtaactgccacaacaaatgacttgcctgtgaggctccacaaggattcggcattgacggaatcatctttgaatgcagtatacccactcgaatccatctgcata

SEQ ID NO: 3442 - DNA, 369 bp, Bos taurus
  unsure (331): unsure at all n locations; Clone ID: 15-LIB34-030-Q1-E1-D3
aggacgcgtgggggtgaggccacctggtctgggtccgagtttgaggtctccttcccagacagccccggcgcccaggcccagccagaccacctgcctcagctgacccttcccgacagcctcacttctgccgcctcacccgaagactggctgtctgctgagctgctcgaagcccatgcggaggaggagccagcatgcccagatagcccagactgcgggatggaggctgggggggctcctggccaggcccggctctccactcctggacactctgggctgtgaaccaagccctctgacggcgtctcacgacgcctggaagtggggggcagctcangccacactgtgtcgggtggcccgtgttagtgcttcctg

SEQ ID NO: 3443 - DNA, 258 bp, Bos taurus
  Clone ID: 15-LIB34-031-Q1-E1-D3
tccggtatcaccacgcgtccggacggctctggatccactgcccacacaccgctctcacaagcagacatgaggacaaatagaacgtccgtcctcctggctctggggctcctggtgtcagggttctgctcgagggtcgtctgcctcgacacaaaatgtgaccccatgagaacattacatgcggacgtcgctggatagccagacattagcctccactatcacggacctcgccatcacttcctacgctcatttttgtttgaa

SEQ ID NO: 3444 - DNA, 409 bp, Bos taurus
  Clone ID: 15-LIB34-032-Q1-E1-D3
cagactgtagatgtcttttattccaactccctgagtagttttattactttctaggtaatacaggttggtagctcctggatgagatgtttgctgctgcttttttcctcttatttttgatgacttatcagcctggggtaaccatacaggagaaggtgaactggagagtcagtcgagctgttcagagtttcacccccacagcggtctcctgccagctggacaactgggcagagtggacagactgctttccatgccaggacaaaaagtacagataccggagcctcttgcaaccaaacaagtttgggggaaccatctgcagtgggaatgtctgggaccaagccagctgtcacagtcccacagcttgtctgagtcaagcacagtgtggacaggaattcaagtgtaaggagacaag

SEQ ID NO: 3445 - DNA, 398 bp, Bos taurus
  Clone ID: 15-LIB34-033-Q1-E1-D11
gatgactgcgcgatattctttgtcaaacaggattcacactgggtagaagataaacaacttttcattaagagaaaccaggagcttttagaaaagatagaaaaacaagaggcagaaaatcaccggctccaacaggaactacaggatgccagagaccagaatgagctgctggagtttcgaaacctagaactagaagatgtgaatatccctgatctcataaagcagcttgatatcttgggtgataatgggaatttaagaaatgaagagcaagtggctataattcaggccagcactgtgctgtccctggcagaaaagtggatccagcaaattgaacgaacagaggctgccctgcaccagagaatgatggaattggaaagtgacatggaacaattctgcaaaat

SEQ ID NO: 3446 - DNA, 386 bp, Bos taurus
  Clone ID: 15-LIB34-034-Q1-E1-D3
gaagacatccctacatttatgcaccagaactcctttactatgctaataaatataatggagtttttcaagaatgctgccaagctgaagataaaggtgcctgcctgctaccaaagattgaaactatgagagaaaaagtactgacttcatctgccagacagagactcaggtgtgccagtattcaaaaatttggagaaagagctttaaaagcatggtcagtagctcgcctgagccagaaatttcccaaggctgagtttgtacaagttaccaagctagtgacagatctcacaaaagtccacaaggaatgctgccatggtgacctacttgaatgcgcagatgacagggcagatcttgccaagtacatatgtgataatcaagatacaatctcc

SEQ ID NO: 3447 - DNA, 394 bp, Bos taurus
  Clone ID: 15-LIB34-035-Q1-E1-D11
acaagaagcaaagggacagcctgcatgcagaggtgcagaaacagctgcagcagcggcaacagcagcaacgggaacaagcggccaagacccctcccatgggagcccaaggagcagacaccctcgcctgcaccttggggctcccggatgggcagctacccctgggctcctcgcctgacctgccagaggcctcagcctgtccccctagtctcctgagggctccaggctgtgggccctcctactccaacagcctggccaagaccgggctcaacggggcctcgtaccacctggaatacagccctgagcggggcaaggctgagggcagggagaacttctatggcataggcagccagctggccccagacaggggtggacttcactctgaagaccccaggcg

SEQ ID NO: 3448 - DNA, 437 bp, Bos taurus
  Clone ID: 15-LIB34-035-Q1-E1-D3
taattacaattacagtcccgccctttcagctaccggctctggatggggatcggtaacccagaaagggccagcaaaagcgcggacgtgtttagaggagcggaagtagtgaaatgtctctgaagaccgtaaagtgcagctgcctgtctccctttccggataaagaaaacagttccgacagtcagtgccggccttcctcctgtaaggggatctgtcggacacttgcgaagtcagtttttcttccccactccgggcccttccctatcgtcgcccccttcaccttggatcatgtttaagaaatttgatgaaaaagaaaatgtgtccaattgcatccagttgaaaacctcagttataaatggtattaagaatcacttgatagaacagtttccaggtattgaaccatggcttaatcaaatcatgcctaagagagatcctgtcaa

SEQ ID NO: 3449 - DNA, 420 bp, Bos taurus
  unsure (165): unsure at all n locations; Clone ID: 15-LIB34-036-Q1-E1-D3
gtctgcagagatttttttcacagccttttgtaaaactccagtcataaggctcagcacaggaattttatagttagcaacaagaataaaggaggcacgcctgaaaggctcaaaattgacgtgacatgtgaattttcctagtggccaagcccagagctcatggggtangggtggagttacctgcagctgacagcaggtggaggcctgagtgtcagaactgagtttgcaaagaaaagtgtcaatgaagcatcagcgagttccagttatgatccttcatagcaaggggacaatggcatcctggcccttctctaagctgtggagtatctctgatccaattctgttccaagtgaccttggttgctactctgttggccactgttcttggcagttgtggtattccaccctatttagactttgcttttca

SEQ ID NO: 3450 - DNA, 440 bp, Bos taurus
  Clone ID: 15-LIB34-037-Q1-E1-D3
gggtccagccacgcgtgcgcgattaatgaattccaggatctgaacaaggatgggaagctggacaaagatgagattcgtcactggatccttccccaagactacgaccacgcgcaggccgaggccaggcacctggtgtacgagtcagacaaaaacaaggatgaaaagctcactaaagaggagatcttagacaactggaacatgtttgttggaagccaagctaccaattatggggaagacctcaccaaaaaccacgatgagctctgatgcaaactcaccataacatgacagactgttttgttttattgtcctggatggttgctacaattgtctcacttacagcagttatgtctccacagaaagcaaatttatcacctcagattggggttaaaattgttttttacccaatatttgctggaaaatactcaccactaatctttgag

SEQ ID NO: 3451 - DNA, 429 bp, Bos taurus
  Clone ID: 15-LIB34-038-Q1-E1-D3
tattgattattctaaagaggtaacattgttttgtgttgaagtagtctatggggtcgcacagagtcagacatgactgaagcgacttagcagcagcagcagccatattttcaaggggtgaaatctcacacagtgaagacagttgggtctggaatgaaaccacaaggtgatgagatccttctagtgacctgagtactgctgtaccagcctgtgtgtatgtggaattcctcaactgaggccttgcaaagcaagccagctgtgccatgttgggaggaggagcagggaaagctagatcaaaagaaaactgagctaactatttgttagatccagcttttaaaacacaagtcgcccaaattttctgaaggcacactttcctagctaccctttggccttatgtctggcacctgtgtccctgatgagtgttctttttga

SEQ ID NO: 3452 - DNA, 423 bp, Bos taurus
  unsure (382): unsure at all n locations; Clone ID: 15-LIB34-039-Q1-E1-D11
aaggactgccacaaaaatataacttttcacactgctgccataaggtcgactttgaaagaagactctgtttcttccataataagaaagctgatataggacttttgcctcctctccctactctggatcctgaggagaaatgccagacttacaaaaataacagggaatcttttttgaataattatgtttatgaagtttccagaaggaaccccttcgtttttgctcctacacttctaactgttgctgctcgttttgaggagatgactaaaacatgctgtgaagaacaagaaaaagctaactgctttcaaacaaaggcagaacctttcatatactatttaaaagcattgtcttcttatcaaaaaaatgcctgcagggcacttatganatttggacgacaaatcttacaatctataaacattgctatac

SEQ ID NO: 3453 - DNA, 259 bp, Bos taurus
  Clone ID: 15-LIB34-039-Q1-E1-D3
cgcgtccgattaaattcttattatttttttttttttttttttttttttttttttttttttttttttattttttttttttttttttttttttttttttatgtgtttacttttttttttggggttctatttttttctatttttgctcttttttggactaacccccccccggaaaaagggcaaaaaccccgggcccttcggggaaaagaagggggggaaaaaaagcaaaacgacgaaccggccccaaaaaacacccgcccca

SEQ ID NO: 3454 - DNA, 324 bp, Bos taurus
  Clone ID: 15-LIB34-040-Q1-E1-D11
atgtctgattgggcagccctcctgctgctctggggtctgtccctgagcccagtgactgagcatgcgacgttctttgaccccaggccatccctgtgggccgacgccggctcaccgctggcaccctgggccgatgtgacgctgacctgcgagagcccgctgccgacccatgagtttcagctcctcaaggattgcgtgggccatgaaccggtgcacctgtagtcccctgcccatgagcacaggttccctctgggaccagtgactaacaccagccggggcctctaccgctgcagctccaagggcaacaacgattggatcagcccgggc

SEQ ID NO: 3455 - DNA, 427 bp, Bos taurus
  Clone ID: 15-LIB34-040-Q1-E1-D3
gggtcggcctgccaatgcaggggacgtgggtttgatccctggtccgggggggtccccgaaggggggaatggcaactcactccggtgagaaccccatggacagaggagcctggcatgctgtactcctcggggtcacaaaagagtcagacctgacttagccactgaacgacagcaaagaatcattaacctccttatcagaaatccttcatagcttctggatgattttatcttcctccagaagaaattaacttttgcttgagcaggcagtgcttagtccaagtaggagctaagtcaacttgatgatacatttcagtctttgagggctggtctatttccaggtcacctctactcttagggtgcagctctttgggaatctcagaggaaagctttgagtatgtaccagggcttttccttggggattctggact

SEQ ID NO: 3456 - DNA, 347 bp, Bos taurus
  Clone ID: 15-LIB34-041-Q1-E1-D11
atcgctaacttgaaaccagaccccaatactttgtgtgatgagtttaaggcagatgaaaagaagttttggggaaaatacctatacgaaattgctagaacacatccctacttttatgcaccagaactcctttactatgctaataaatatcatggagtttttcaagaatgctgccaagctgaagataaaggtgcctgcctgctaccaaagattgaaactatgagagaaaaagtactgacttcatctgccagacagagactcaggtgtgccagtattcaaaaatttggagagagagctttaagaccatgggtagtagctcgcctgagcgagaaatttcccagcgctgagtt

SEQ ID NO: 3457 - DNA, 396 bp, Bos taurus
  Clone ID: 15-LIB34-041-Q1-E1-D3
gaaagacgcggtttctggaggcgaagaacgcggttggccaatcgcaagccagaagatgaaggttctgtgggttgccgtggtggtcgcgcttctggcaggatgccacgcggatatggagggagagctggggcccgaggagcccctgactacccagcacccccgggggaaggacagccagccttgggagcacgcgctgggccgcttctgggattacctgcgctgggtgcagaccctgtctgaccaggtgcaggaggagctgctcaacacccaggtcattcaggaactgacggcgctgatggaggagaccatgaaggatgtgaacgcctacaaggaagagctggagggacagctaggccccatggcccattagacacaggctcgcgtgtccaaggagct

SEQ ID NO: 3458 - DNA, 413 bp, Bos taurus
  Clone ID: 15-LIB34-043-Q1-E1-D3
agcctcggccaccgcgcagctgccggtccacctccgccaccgcttagccgcgctcggagccctgccgaggaggctgccgccgccgccaggagcccgcagcccgtgccccgagcccgccgccaccgccctccgagggcgccccaggccgcgccatggtgaaggtgacgttcaactcggctctggcccagaaggaggccaagaaggacgagtccaagagcggcgaggaggcgctcatcattcctccggacgccgttgccgtggactgcaaggacccagatgaagtggttccggttggccaaagaagagcttggtgttggtgcatgtgctttggactggcgtttatgctcgcaggtgtcattctggggggagcatacctgtacaaatactttgcatttcaaccagatgacgtctac

SEQ ID NO: 3459 - DNA, 437 bp, Bos taurus
  Clone ID: 15-LIB34-045-Q1-E1-D11
cagacgcgtggggatttcttgcaacttcgaaaaatttaaaaccatgaaacatctattactgctacttttctgtgcttttatagttcaggcccaatttcctactgactatgacgagggacaagatgacagacctaaggtaggtttgggtgcccgcggtcatcggccctatgacaagaagaaggaagaggcccccagcctgagacctgtgccccctcccatcagcggaggtggctatcgggctcgtcccgccacagcaactgtgggccagaagaaagtggagagaaagccccctgacgctgatggctgcctgcacgcggacccggatctgggtgtgttgtgtcctacaggatgtaagttgcaagatactttggtaagacaggagagaccaatccgaaagagtatagaagatttacgtaatactgtggactctgtttccc

SEQ ID NO: 3460 - DNA, 412 bp, Bos taurus
  Clone ID: 15-LIB34-045-Q1-E1-D3
cggacgcgtgggtggaaaagcaccagttatatatagatgagactgtgaagaataatatcccaactaagcttcgtgtgctccgttcaattctggagaatttgagaagcaaaatacaaaaattagaatcggatgtctcaactcagatggaatactgccgcaccccgtgtactgttacttgcaatattcctgtggtgtctggcaaagaatgtgaggaaatcatcaggaatggaggtgaaacatctgaaatgtacctcattcagcctgaggattctagcaaaccatatagagtatactgtgatatgaaaacggaaaaaggaggatggacagtaattcagaaccgtcaagatggtagtgttgactttggcaggaaatgggatccatataaacaaggatttgggaatattgcaaccaa

SEQ ID NO: 3461 - DNA, 422 bp, Bos taurus
  Clone ID: 15-LIB34-046-Q1-E1-D3
aatggatcccaaaggccagagagtgaagcttaatgatggccacttcattcctgtcctgagatttggaacctttgcacctcgagaggttcctaagagtgaagctctggaagtcaccaaatttgctatagaggctgggttccgccatattgacagtgctcatttgtaccaaaatgaatagcacgttggccaggccattctaagcatgattgccgatggcactgtaaagagagaagacattttctacacttcaaagctttggtccacctcccttcgtccagaattggtccgaccagccttggaaaagtcactgaataatcttcaactggactatgtcgatctttatattattcattttccaatggctctgaatccaggggagacacttttcccaacagatgaaaatggcaaaccaatatttgact

SEQ ID NO: 3462 - DNA, 425 bp, Bos taurus
  unsure (363): unsure at all n locations; Clone ID: 15-LIB34-047-Q1-E1-D11
gacctatgaggaggtgctgaggcggaagctcatgcagtacgacattgtcatcaaagtcaagccccagcagctggtgcagcattttgagatcgacgtggacatctttgagccccaggggatcaggaagctggatgtcgaggcctccttcctccccaaggaactggctgcccaacttatcaagaagtccttctcagggaaaaagggtcacgtgcttttccgccccacagtgagccagcagcaaacctgccccacgtgctctacaaccttgctgaatggggacttcaaggtgacttacgatgtcaatcgggatgatgcctgtgacctcctggtcgccaataactactttgcccacttctttgctcnccaaaacctaaagaaactgaacaagaatgtggtttttgtgattgacatcagctcctccatgg

SEQ ID NO: 3463 - DNA, 438 bp, Bos taurus
  Clone ID: 15-LIB34-047-Q1-E1-D3
gtgattttcgtgttccccagctcttaaagccttttattaatggctcggctcatcacacagaccaccatatgctctttgactataattatggacagtatttcaccttgtgggatagaattggaggctcattcagaaatccctcctcctttgaggggaatggacctcttaattatgtgaagaaaatggcagaagaaaagcacaatagccatggaggaaatggttataaaaatgaaaaattattcaatggagagtgtacaaagactgagtagattatttcccaattattaaaaatttttaatcaaggaaaaataattacatatgttaccatgaggaggcatagcaagtgaacagtatcatttgaaaaatcagtattgtgggtatagctgaggaatgctcataatggtagatcaagggaacatgccatgtgtaccacgattt

SEQ ID NO: 3464 - DNA, 273 bp, Bos taurus
  unsure (16): unsure at all n locations; Clone ID: 15-LIB34-048-Q1-E1-D3
agtgagtcgtattacncgcggctcgtcggtcatcagagcagctcagcctgtgacatgaaagtcagacgtacggcgaacagagatgcggactcacatcgtgtgtgcggctgtaagaggttgcctgcccgtctgtacacaccagcaccgtgaacccgttgcccgagcacaccacagtggatgagatccactacgtcgtcaggatgtcaggtaccaggaccacagtggccgtgggtacgacatgatcacggtcgtcgatctcgactgagaacatga

SEQ ID NO: 3465 - DNA, 412 bp, Bos taurus
  Clone ID: 15-LIB34-050-Q1-E1-D11
ttccggagcgacccacggctccgaaacgcgagtacttagtactgagtctcagggccgactcggttcgggtctcggaggcagcaccagtgatcgttaagcaaagagagcctagggtagttggccaagatgccgaatatcaaaatcttcagcggcagctcccaccaggacctatcccagaagattgccgaccgcctgggcctggaactgggcaaggtggtgactaagaaattcagcaaccaggagacctgtgtggaaatcggagaaagtgttcgtggagaagatgtctacattgttcagagtggctgcggtgaaatcaatgacaatctcatggaacttttgattatgattaatgcctgcaagattgcttcagccagccgggttactgcagtcatcccgtgcttcccttatgccc

SEQ ID NO: 3466 - DNA, 434 bp, Bos taurus
  Clone ID: 15-LIB34-050-Q1-E1-D3
cacacgcgtccgcccagcaggaaggaccccaaatacagggaatggcaccatttcctggtggtcaacatgaagggcaacaacatcagcagtggcacggttctctccgattatgtgggctctgggcctcccaagggcacaggcctgcaccgctatgtctggctggtttacgagcaggaaggaccactgaagtgtgatgagcccattctcagcaaccgatctggagaccaccgtggcaaattcaaggtggcctctttccgcaaaaagtacgagcttggggccccagtggccggcacgtgttaccaggccgaatgggatgattatgtgcccaagctctacgagcagctgtctgggaagtagaggagatggacaccgtctcagagttcccaaacagtgtttcagtttagtgatgcatgtagattttccccatctctctg

SEQ ID NO: 3467 - DNA, 347 bp, Bos taurus
  Clone ID: 15-LIB34-055-Q1-E1-D11
gcttcacactgagaggcaggcagagaacatcacacacagctgaaaggaaactcagaggagggaatcgccaagaaaagtggccatggagctaatcccaaacttttccgtggaaacctgggttctcctggctatcagcctggtgctcctctatctatatggaacttattcacatggactgtttaagaagctgggggttcctggcccaagacctctgcctctttttggaaacgttctatcctaccgaaagggtgtttgtgagtttgatgaagaatgttttaaaaagtatgggaaaatgtgggggatttttgaaggtaaacatcctctgttggttatcacggatccagaca

SEQ ID NO: 3468 - DNA, 356 bp, Bos taurus
  Clone ID: 15-LIB34-055-Q1-E1-D3
agcttgcaacttcgaaaaatttaaaaccatgaaacatctattactgctacttttctgtgcttttatagttcaggcccaatttcctactgactatgacgagggacaagatgacagacctaaggtaggtttgggtgcccgcggtcatcggccctatgacaagaagaaggaagaggcccccagcctgagacctgtgccccctcccatcagcggaggtggctatcgggctcgtcccgccacagcaactgtgggccagaagaaagtggagagaaagccccctgacgctgatggctgcctgcacgcggacccggatctgggtgtgttgtgtcctacaggatgtaagttgcaagatactttgg

SEQ ID NO: 3469 - DNA, 375 bp, Bos taurus
  unsure (182),(351): unsure at all n locations; Clone ID: 15-LIB34-056-Q1-E1-D3
aggacccaatggccatcttcttcaccagtgggaccacgggcttccccaagatggcaaagcacagccacggattcgctttacgatcctatttcccagcatgcaggaaattgttgcagctgaagatgtctgatgtcttctggtgcctgtcagacacaggctggattctggctgccttggggtcnctgcttgaaccatggacagcggggtctacagtctttgctcatcatctgcctcagtttgaccctaaggtcattatagagacatttttcaaatacccaattacccaatgccttgctgcaccttctgtatatcgaatgattttgcagcagaattacaccagtcttaggttcnccactctggaacactgctgtactg

SEQ ID NO: 3470 - DNA, 225 bp, Bos taurus
  Clone ID: 15-LIB34-057-Q1-E1-D11
ggctttgatgctaccaccctggatgagcatgggaacatgctgtttttaaaaggggagtttgtgtggaagggtcatgcctgggcccggcagttgatctcagagaggtggaaggatgcccccagtcccgtggatgctgcattccgctatgatcgtaacagtgtccttctgatcaagggggacaaattctgggtatatcctcctgagaagggggaggaatatccaaag

SEQ ID NO: 3471 - DNA, 221 bp, Bos taurus
  Clone ID: 15-LIB34-057-Q1-E1-D3
gtgggaccccaaggatggggagccttgtgcccaccccaactcacggttctgcactccggccagccagtgccccatcattgaccctgactgggagtctccagagggcgtgcccattgagggcatcatcttcggagggcgccggcctgttggtgtccctctggtctacgaggctctcagctggcagcacggtgtgtttgtgggggcggccatgagatctgagg

SEQ ID NO: 3472 - DNA, 332 bp, Bos taurus
  Clone ID: 15-LIB34-060-Q1-E1-D11
tcgacccacgcgaccggcctcagaccacactatctccactcgctcagacctgtggaagattagcgaccatgatttccaatgggataggaaccgtcaccgctggaaaaaggagtatatgtcttctccctttgctgcttattggcctctggggctgtgtgacctgtcatcggagccctgtggaagacgtctgcacagccaaacctcgggacattcctgtgaatcccatgtgtatttaccgttcctcagagaagaaggcaactgagggccaaggctccgagcagaagatccctggggccaccaaccggcgggtctgggaactgtccaaggccaat

SEQ ID NO: 3473 - DNA, 238 bp, Bos taurus
  Clone ID: 15-LIB34-060-Q1-E1-D3
ggaaagaaccagtccagagggattgcctcagaccacactatctccactcgctcagacctgtggaagattagcgaccatgatttccaatgggataggaaccgtcaccgctggaaaaaggagtatatgtcttctccctttgctgcttattggcctctggggctgtgtgacctgtcatcggagccctgtggaagacgtctgcacagccaaacctcgggacattcctgtgaatcccatgtgt

SEQ ID NO: 3474 - DNA, 387 bp, Bos taurus
  Clone ID: 15-LIB34-061-Q1-E1-D11
acgcctgcctgtaccagactggtattcccggtagcccccacgggcccgctcactattatactgtggcggtggtgaagaaggacactgacttcaagctgaatgagctcagaggcaagaagtcctgccacacaggcctcggcaggtccgctgggtggaacatccccatgggcaaactttataaggaattgcctgatccacaggaatcaattcagagagctgcggccaacttcttctctgccagctgtgtcccctgtgcggatcaatcatcatttcccaaactctgtcaactgtgtgcggggaaagggacagacaagtgtgcctgctccaaccacgaaccatacttcggctactcaggggcccttaaatgtctgaaggacggcgctgggg

SEQ ID NO: 3475 - DNA, 416 bp, Bos taurus
  Clone ID: 15-LIB34-061-Q1-E1-D3
acgtagggccacgtggtcctctccccagtctggttcctgtacagcctgatcatgaagctgttccagcgctccaccccggccatcacgctcgagaatccagacatcaagtacccgctgcggctgattgacaaggaggtcatcagccatgacacgcggcggttccgctttgcactgccgtcgcctgagcacatcctgggcctccctgtcggccagcacatctacctctcggctcgaatcgatgggaacctggttattcggccctacacgcccgtctccagcgatgacgacaagggctttgtggacctggtcatcaaggtttacttcaaagacacccatcccaagtttcccgctggagggaaaatgttccaattacttggaagccatgagaattggcgacaccattgagttccggggcc

SEQ ID NO: 3476 - DNA, 210 bp, Bos taurus
  Clone ID: 15-LIB34-062-Q1-E1-D11
agcagggtgcgcaggtcctgggtgcagcctggcccctgggcactgaggatccaccctgcctgtccccacctgctcacctctgggaaggtgacagtgatgatgctgggggctctacatgcacagggagtctgcatcctctgggtcacctcctgctgtgaggctatacccatcatgggaacttgccttataacctttcaaatgtcatgatgg

SEQ ID NO: 3477 - DNA, 431 bp, Bos taurus
  Clone ID: 15-LIB34-064-Q1-E1-D3
ccgcctgggacccaactatctccagatacctgtgaactgtccctactgtgctcaagtggccaactaccagcgtgacggccccatgtgcatgatggacaatcagggtggggctccaaattactaccccaatagctttagtgctcccgatcatcagccttctgccctggaacacaggacccacttctctggggatgtacagcgcttcaacagtgccaacgatgacaatgtcactcaggtgcggactttctatttgaaagtgctgaatgaggagcagaggaaacgcctgtgtgagaacattgccggccatctgaaagacgcacagctttttatccagaagaaagcggttaagaacttcagcgatgtccatcctgaatatggctcccgcatccaggctcttttggacaaatacaatgaggagaaacctaagaacg

SEQ ID NO: 3478 - DNA, 218 bp, Bos taurus
  Clone ID: 15-LIB34-065-Q1-E1-D3
ggaggctgcataaaaacactacgctactgtgcaggctgggctgacaagatccagggccgtacaatacccatggatggaaacttttttacatatacaagaagtgagcctgttggtgtgtgtggccaaatcattccttggaatttcccattgctcatgttcctctggaagatagggcctgcccttagctgcggaaacacagtggttgtcaaaccagcaga

SEQ ID NO: 3479 - DNA, 217 bp, Bos taurus
  Clone ID: 15-LIB34-066-Q1-E1-D11
gacccacacgtcagtacgaatggtttagcaccaggcgccccacgaacgtgcggtgcgtgacgggcgagggggcggccgcctttccggccgcgccccgtgtcccgggacgaagggctctccgcaccggaccccggtcccgacgcgcggcgggggcgcgccgcgccgcgccccgggggacgcgggcgacggcccgccggcggggacggcgggggaccgg

SEQ ID NO: 3480 - DNA, 255 bp, Bos taurus
  Clone ID: 15-LIB34-066-Q1-E1-D3
caaaagtccacaaggaatgctgccatggtgacctacttgaatgcgcagatgacagggcagatcttgccaagtacatatgtgataatcaagatacaatctccagtaaactgaaggaatgctgtgataagcctttgttggaaaaatcccactgcattgctgaggtagaaaaagatgccatacctgaaaacctgcccccattaactgctgactttgctgaagataaggatgtttgcaaaaactatcaggaagcaaaag

SEQ ID NO: 3481 - DNA, 239 bp, Bos taurus
  Clone ID: 15-LIB34-067-Q1-E1-D3
gcccagacctccctaaattgaaaccagaccccaatactttgtgtgatgagtttaaggcagatgaaaagaagttttggggaaaatacctatacgaaattgctagaagacatccctacttttatgcaccagaactcctttactatgctaataaatataatggagtttttcaagaatgctgccaagctgaagataaaggtgcctgcctgctaccaaagattgaaactatgagagaaaaagta

SEQ ID NO: 3482 - DNA, 196 bp, Bos taurus
  Clone ID: 15-LIB34-068-Q1-E1-D11
gagcgatgcgcgtggaggctcagtcatgctcactgtagatgatgtactggagcaggttggggagttcggctggttccagaagcaaaccttcctgatcctgtgcctgctctcggccgccttcgcccccatctacgtgggcatcgtcttcctggccttcaccccggaccaccgctgccggagccccggggtggcggaa

SEQ ID NO: 3483 - DNA, 197 bp, Bos taurus
  unsure (66): unsure at all n locations; Clone ID: 15-LIB34-068-Q1-E1-D3
tctccctctcgtaacccttatcgtactattcccaagcctactattccaacatcaaacgactagtancaatcgcttgtaccctcacaatgatactcacttgtacaaacaatatgagtatcacattctaaagaaacatgaacattaatattaatatctctgatcctatttattggatcaacaaacctactaggcctatt

SEQ ID NO: 3484 - DNA, 217 bp, Bos taurus
  unsure (195): unsure at all n locations; Clone ID: 15-LIB34-069-Q1-E1-D3
atccacaggaatcaattcagagagctgcggccaacttcttctctgccagctgtgtcccctgtgcggatcaatcatcatttcccaaactctgtcaactgtgtgcggggaaagggacagacaagtgtgcctgctccaaccacgaaccatacttcggctactcaggggcctttaaatgtctgatggagggcgctgggngatgtaggcctttgtcaagcac

SEQ ID NO: 3485 - DNA, 241 bp, Bos taurus
  Clone ID: 15-LIB34-070-Q1-E1-D11
acgaaacaaactgcacttgttgagctgttgaaacacaagcccaaggcaacagaggaacaactgaaaaccgtcatggagaattttgtggcttttgtagacaagtgctgtgcagctgatgacaaagaagcctgctttgctgtggagggtccaaaacttgttgtttcaactcaaacagccttagcctaaacacgacaaccacaggcatctcagcctaccctgagagtaagaggaaaaaagagaa

SEQ ID NO: 3486 - DNA, 247 bp, Bos taurus
  Clone ID: 15-LIB34-070-Q1-E1-D3
tccggtcaccacactccgctcgggctctggcgactctacgcgagagtagcgactctggttcaggcagcatgtctgacaagcggccagcagtggacacccaagctcggcggcttcctgactccttcaaggatagccccagtacaggcctcggtgtctgtggatggattttggtggctgtgtcgttcttgttcacggttataactttcccaatgtcaatatggatgtgcataaagatcataaaagaata

SEQ ID NO: 3487 - DNA, 407 bp, Bos taurus
  Clone ID: 15-LIB34-071-Q1-E1-D3
aacctaggacgccaaggagaggcccctctccgggtccctccctccaccatggaatacctctctaacctggaccccagcagcctgctcaggtcagtatccaacatgagcgccgatttgggccgaaaggtctggacctcggctccaccacgccagcgacctttccgagtctgtgataacaagcggaccacccggaaaggcctgacagccgctacccgtcaggaactgctagacaaggctctggaggccctggtgctgagtggagcgctcacactggtgctggaggaagacgggaccaccgtggagagcgaggagttcttccagctgttggaggatgacacgtgcctgatggtgctggagttgggacagagctggagcccccgcaggagtggggtgctgtcatatggcct

SEQ ID NO: 3488 - DNA, 404 bp, Bos taurus
  Clone ID: 15-LIB34-072-Q1-E1-D11
gggccgagccacgcgtccagtacacctcacatctggaaaagcaccagttatatatagatgagactgtgaagaataatatcccaactaagcttcgtgtgctccgttcaattctggagaatttgagaagcaaaatacaaaaattagaatcggatgtctcaactcagatggaatactgccgcaccccgtgtactgttacttgcaatattcctgtggtgtctggcaaagaatgtgaggaaatcatcaggaatggaggtgaaacatctgaaatgtacctcattcagcctgaggattctagcaaaccatatagagtatactgtgatatgaaaacggaaaaaggaggatggacagtaattcagaaccgtcaagatggtagtgttgactttggcaagaaatggggatcatat

SEQ ID NO: 3489 - DNA, 385 bp, Bos taurus
  Clone ID: 15-LIB34-072-Q1-E1-D3
cctatagtgagtcgtattactggtatgtacgcaagatcaaccgcacccaagctgaggaaatgctgagtggcaagcgggacggtaccttcctcatccgtgagagcagccagcggggttgctacgcctgttctgtggtggtggacggggataccaagcactgcgtcatctaccgcacggccaccggcttcggcttcgcggagccctacaacctgtacgggtccctgaaggagctcgtcctccactaccagcacgcctcgctggtgcagcacaacgacgcgctgaccgtcacgctcgcccaccccgtgcgcgcccccggccctgggcccccgccggctgcccgctgagcacgcgcgccccccgggcctgagccccatccgctgggccc

SEQ ID NO: 3490 - DNA, 411 bp, Bos taurus
  unsure (216): unsure at all n locations; Clone ID: 15-LIB34-073-Q1-E1-D3
acaaggatccgaactccccaaggggtcaaggtttgcaataatttccccgcaccctttgattatttaccaggaagtcataacacagtacttaaaaatgttgctaatttaaaaagttttgtgttggagaaagcaatggaacacaaagcatccctggatattaacaaccctcgggactatattgattgtttcctaatcagaatggagcaagaaaaacanaatcaacaattggagtttactttggaaaacttgacaaacactgtatttgatttgtttggagctgggacagagacaatgagcaccactctgagatatgggctcctcctgctgctgaagcacccagaggtcacagctaaggtccaggaagagattgaccgtgtgattggaagacaccggagcccctgcatgcaggac

SEQ ID NO: 3491 - DNA, 385 bp, Bos taurus
  Clone ID: 15-LIB34-075-Q1-E1-D11
tcgtattattttttttttttttttttttttttttttttttttttttttttttttttttttttttttttttttttttttttttttttttttttttttttgtgggttttttttttttttttttttttttggggggggggggggttacccctttgggggggaaaattttggaacccccccttgggttcccctttttttgggcccccaaaaaggggttttttaactgaattgggtttcggaaaaaattttttttcccccaaaggggtggcccccaaaatttttgggcctttttaagggggggggggcaaattaatttaggtcgtttcgaagtgggggacccccaaatgggggggccaagaagttttccccgtccgggggattttccaag

SEQ ID NO: 3492 - DNA, 388 bp, Bos taurus
  Clone ID: 15-LIB34-077-Q1-E1-D11
tctaacaaaagcagcacgatttgccctgataattatcaaacagcacagctgcttgccttaattttagaactactcacattttgtgtggaacatcacacgtatcacataaggaactatattatgaacaaggacttgctaagaagagtcttggtcttgatgaattcaaagcacacttttctggccttgtgtgctctccgttttatgaggcgaataattggccttaaggatgaattttacaatcgttacatcacgaagggaaatctttttgagccagttgtaaatgctcttctggataatggaactcggtacaatctattgaattcagctgttattgagttatttgaatttataagagtggaagatatcaagtctcttactgcacatatag

SEQ ID NO: 3493 - DNA, 407 bp, Bos taurus
  unsure (9),(13): unsure at all n locations; Clone ID: 15-LIB34-077-Q1-E1-D3
tgttatgtnctanagtgtatgactttgtatgggtttcttcaaccctttctctgccactagcaaccagaatagcactttaccatttggttggctagataagtggctggctaccgatttttctcactgtggtgtcattggctaaacagtctttcattaacaattgaaatgtaaattgaagtcacatggaagaatcaccttcggttgtaaacttccaatattttgattctctatccatgtattcgtcacatgctgagtaaaagtgccttacaatgtaaaaattgtacagtacttatgttcccaagtagcatcatcatcgtttgggtaattattacattgtgggatgaatatttagaagaatggacctcagcagtggtattactgttcatctcttaagtccttaactgttg

SEQ ID NO: 3494 - DNA, 369 bp, Bos taurus
  Clone ID: 15-LIB34-078-Q1-E1-D3
ccgaaagtcaaggtagcggtttctggaggcgaagaacgcggttggccaatcgcaagccagaagatgaaggttctgtgggttgccgtggtggtcgcgcttctggcaggatgccaggcggatatggagggagagctggggcccgaggagcccctgactacgcagcagccccgggggaaggacagccagccttgggagcaggcgctgggccgcttctgggattacctgcgctgggtgcagaccctgtctgaccaggtgcaggaggagctgctcaacacccaggtcattcaggaactgacggcgctgatggaggagaccatgaaggaggtgaaggcctacaaggaagagctggagggacagctaggccccatg

SEQ ID NO: 3495 - DNA, 253 bp, Bos taurus
  Clone ID: 15-LIB34-079-Q1-E1-D3
acgcgacaggtgacacggagagctgacaccatggttcatcaggtgctctaccgggcgctggtctccaccaagtggctggcggagtccgtccgggctggtaaagtgggccctggccttcgggtgctggatgcgtcctggtactcgccgggcacccgcgaggcccgcaaggaatacctggagcgccatgtgcccggcgcctccttttttgacatagaggagtgtcgggacaaagcctcgccttacgaggtgatgc

SEQ ID NO: 3496 - DNA, 416 bp, Bos taurus
  Clone ID: 15-LIB34-080-Q1-E1-D11
acaaatttaatcttgttgaattatatcttctttaaagcccagtggaagacgccatttaatcctaaccatacttacgaatcagagttccacgtgagccagaacgagagggtgattgtacccatgatgaccctttacctggaaaccccttacttccgggacgaggagctgggctgcacgctggtggagctcacgtacaccagcaacgacagcgccctcttcatcctccccgatgagggcaaaatgcaggacctggaagccaagctgaccccggagacgctgacgcggtggcgaaactccctgcagcccagacttatacatcgactcaggctgccaaggttttccatctccagccactaccagctgaaagacatcctttcccagctgggtatcaagaaaatcttcaccagcgatgcgga

SEQ ID NO: 3497 - DNA, 425 bp, Bos taurus
  unsure (351): unsure at all n locations; Clone ID: 15-LIB34-080-Q1-E1-D3
cacgcgtccgcggaagcgaaggacgcggtttctggaggcgaagaacgcggttggccaatcgcaagccagaagatgaaggttctgtgggttgccgtggtggtcgcgcttctggcaggatgccaggcggatatggagggagagctggggcccgaggagcccctgactacgcagcagccccgggggaaggacagccagccttgggagcaggcgctgggccgcttctgggattacctgcgctgggtgcagaccctgtctgaccaggtgcaggaggagctgctcaacacccaggtcattcaggaactgacggcgctgatggaggagaccatgaaggaggtgaaagcctacaatgangagctggagggacagctaggccccatggcccaggagacacaggcccgcgtgtccaaggagctgcaggcagccca

SEQ ID NO: 3498 - DNA, 400 bp, Bos taurus
  Clone ID: 15-LIB34-081-Q1-E1-D11
gataccatggaacttcggcgggccgggtcaacgccctgaccgccggagggtctcagcacctctgcgcccgcccgccgcccttccagctgcagacatgctcgcgggatccggatctcagggaagacgcagcctggccgcgctctcccaaatcgcctaccagcggaatgacgatgacgaggaagaggccgcccgggaacggcgccgccgcgcccgacaggaaaggctgcggcagaagcaagaggaagaagccttggggcaagtgaccgaccaagtggaggtcaacacccagaacagtgtgcctgacgaggaggtcaagacaaccacgaccaacactcaagcggagggcgatgatgaggctgctctcctggagcgactggctcggcgggaggaaagacgccaa

SEQ ID NO: 3499 - DNA, 337 bp, Bos taurus
  Clone ID: 15-LIB34-082-Q1-E1-D3
agaagcttcacactgagaggcatgcacagaacatcacacacagctgacaggaaactcagatgagggaatcgccaagaaaagtggcatggagctaatccgaaacttttccgtggaaacctgcgttctcctggctatcagcctggtgctcctcaatctatatggaacttattcacatggactgtttaacaagctgggggttcctggtccaagacctctgcctctttttgtgaacgttctagcctaccgaaagggtgtttgtgagtttgatgaagaatgttttaaaaagtatgggaaaatgtgcgggatttttgaaggtaaacatcctctgttggttatc

SEQ ID NO: 3500 - DNA, 404 bp, Bos taurus
  Clone ID: 15-LIB34-083-Q1-E1-D3
aagataatacaggtattctaaagacaccacttttaatccatcagagaattcaacatcaaatttaccaacttgttcgattaaccaaaatttgttacccaatagaacgtcattggaggtagtgggaaaaggtttggaaaaggattctgggtcttatatgtggatatatgttctcatgggtaatatgcttcgtggaattggggaaacccctattgggcccttggggatttcttacatcgatgattttgctgaagaaggacattcttctttgtatttaggtaatttgcttgcagtaacaatgattggtccaatcattggctttatactggtatctcagttttctaaaatgtatgtggatattggatacgtggatctgagcactatcagaataactcctaaggactctc

SEQ ID NO: 3501 - DNA, 359 bp, Bos taurus
  unsure (270): unsure at all n locations; Clone ID: 15-LIB34-084-Q1-E1-D3
gtcacgacgcgtccaagcagaacccaacaactgtcacaggtttcctggtgccatctggcccgaggcccgaatcatgctgtggtctcacggaaagataaggcaacttgtgtggagaaaatattaaacaaacagcaggatgatttggaaaatctgtaaccgactgcacgagcaatttttgtttattccaatcaaattccaaggaccttctgttcagggatgacactaaatgtttggcttcaattgcgaaaaaaacatatgactcctacttangggatgactacgtcagagctatgaccaacctgagacaatgctcaacctcaaaactcctggaagcatgcactttccacaaaccttaaaat

SEQ ID NO: 3502 - DNA, 443 bp, Bos taurus
  Clone ID: 15-LIB34-085-Q1-E1-D3
ttccaggccgacccacgcgtcagggtcgatatacatgggatatacttctcaggaaacactttcctgtcaagaggagaaaggagagacacagcaaacctcttccctcaaacaagtttgagtctcttcatgaagccagatactgcagggacttttgatgtggaatgcctcacaactgatcactacacaggtggcatgaaacaaaagtacactgtgagccagtgcagccagaggtccgaagatttatacctctacctgggagaaaggacctactacatcgcagcggtggaggtggaatgggattattccccaagtaggaaatgggaaaaggagctgcatcatttacaggaacaaaatctttcaaatgcatttttagataaggaagaattttacataggctccaagtacaagaaagttgtgtatcggcaattcactgacaacacatt

SEQ ID NO: 3503 - DNA, 367 bp, Bos taurus
  Clone ID: 15-LIB34-086-Q1-E1-D11
gtcccaggcagacgtgcacaatgtcggagaaggcagggagtcagagcgggggctccccggaggccagtggcgtaactgtcagcgacgttcaggaactgatacggcgcaaggaggagatcgaggcccagatcaaagccaattatgaagtgctggagagccaaaaaggcatcgggatgaatgagccactggtggactgcgagggctacccccgggcagatgtggacctgtaccaagtccgaactgcaaggcacaacattgtctgcctgcagaacgaccacaaggcggtgatgaagcaggtagaagacgccctgcaccagctgcatgctcgcgacaaggagaagcaggcccgggacctggcggaagccca

SEQ ID NO: 3504 - DNA, 355 bp, Bos taurus
  Clone ID: 16-BOVMS1-001-Q1-E1-D7
atgcgacgtcatagctcttctatagtgtcacctaaattcaattcactggccgtcgttttacaacgtcgtgactgggaaaaccctggcgttacccagcttaatcgccttgcagcacatcgccctttcgccagctggcgtaatagcgaagaggcccgcaccgatcgcgcttcccaacagttgcgcagcctgaatggcgaatgggacgcgccctgtagcggcgcattaagcgcggcgggtgtggtggttacgcgcagcgtgaccgctacacttgccagcgccctagcgcccgctcctttcgctttcttcccttcctttctcgccacgttcgccggctttccccgtcaagctctaaatc

SEQ ID NO: 3505 - DNA, 428 bp, Bos taurus
  Clone ID: 16-BOVMS1-002-Q1-E1-D7
acatctgacactgattacgtaggggttgctgctatcagccttgcccactgtgacttctccaaacccaaggaggaaccctacataaaatgccccaacactgtgatgagagcatccacatgttgccatgagaaaccacaaggcagatcttcacagaagccccaagggctcactcctgcccagtgttatgagacagggttgttgacagctcctgtctcactgcagcctctagcacttggtcagtcactctccgccttagcactttgttcactgtcctgtgtcagagctctgagctcgctctacccttttctgaaaaagtatgtgggctgaatgtggtttcattttttgttttctaaatgtctatctttttgtatgagaaatactatattttgtacttaaccatcatatattgtcaacccaacctggggtta

SEQ ID NO: 3506 - DNA, 455 bp, Bos taurus
  unsure (399): unsure at all n locations; Clone ID: 16-BOVMS1-003-Q1-E1-D7
cgaaagtcccacccactaataaaaattgtaaacaatgcattcatcgaccttccagccccatcaaacatttcatcatgatgaaatttcggttccctcctgggaatctgcctaatcctacaaatcctcacaggcctattcctagcaatacactacacatccgacacaacaacagcattctcctctgttacccatatctgccgagacgtgaactacggctgaatcatccgatacatacacgcaaacggagcttcaatgttttttatctgcttatatatgcacgtaggacgaggcttatattacgggtcttacacttttctagaaacatgaaatattggagtaatccttctgctcacagtaatagccacagcatttataggatacgtcctaccatgaggacanatatcattctgaggagcaacagtcatcaccaacctcttatcagcaatcccatacat

SEQ ID NO: 3507 - DNA, 438 bp, Bos taurus
  unsure (350): unsure at all n locations; Clone ID: 16-BOVMS1-004-Q1-E1-D11
gaatattttgccactatcatcaaggaggtaggtgcagacttggtggaggccaagtaccagcatgccgagccccgcttgtccatctatggccgcagtcctgaggagtggagcaaactctccacctggttcgtccaaaaccgcgtctactgccccaacatgacatggatgatccaggtccccaggatctatgatgtgttccgatctaagaacttccttccacactttggaaagatgttggagaatgttttcatgccagtgttcgaagccaccatcaaccctcaggctcacccagacctcagtgttttcctcaagcacattacaggcttcgacagtgtagatgatgagtccanacacagcggccacatgttctcctccaagagccctaagctccaggactggaccatggcaaagaacccatcttacacttactatacctac

SEQ ID NO: 3508 - DNA, 216 bp, Bos taurus
  Clone ID: 16-BOVMS1-004-Q1-E1-D7
atgcaacgtcatagctcttctatagtgtcacctaaattcaattcactggccgtcgttttacaacgtcgtaactgggaaaaccctgacgttacccaacttaatcgccttgcaaaacatccccctttcgccagctggcgtaatagcaaagaggcccgcaccgatcgcccttcccaacagttgcacagcctgaatggcgaatgggacccccctgtaacg

SEQ ID NO: 3509 - DNA, 430 bp, Bos taurus
  Clone ID: 16-BOVMS1-005-Q1-E1-D7
caaaacctcaacttactccaatgctaaaatacattattccaacaatcatacttatacccctaacctggttatcaaaaaataatataatttgggttaactccacagcacacagccttctaattagctttacaagcctcctcctcataaaccagtttggcgacaacagccttaatttttcactactatttttctccgactccctatccactccactactaattttaaccatatggctcctccctctaatactaatagctagccaacatcatctatcaaaagaaaacctaacccgaaaaaaactatttattactatgctgatctcactacaactattcctaattataacctttaccgccatggaactaatcttattttatattctatttgaagcaacactagtcccaacactcattattattacgcgatgagg

SEQ ID NO: 3510 - DNA, 399 bp, Bos taurus
  Clone ID: 16-BOVMS1-006-Q1-E1-D11
atgcgacgtcatagctcttctatagtgtcacctaaattcaattcactggccgtcgttttacaacgtcgtgactgggaaaaccctggcgttacccaacttaatcgccttgcagcacatccccctttcgccagctggcgtaatagcgaagaggcccgcaccgatcgcccttcccaacagttgcgcagcctgaatggcgaatgggacgcgccctgtagcggcgcattaagcgcggcgggtgtggtggttacgcgcagcgtgaccgctacacttgccagcgccctagcgcccgctcctttcgctttcttcccttcctttctcgccacgttcgccggctttccccgtcaagctctaaatcgggggctccctttaaggttccgatttagtgctttacggcacctc

SEQ ID NO: 3511 - DNA, 391 bp, Bos taurus
  unsure (380): unsure at all n locations; Clone ID: 16-BOVMS1-006-Q1-E1-D7
acggtcgtgatttccgggtccgccacgcgtccgtaattattctactaaccattatactaggaactattattgtcataatcagttctcactgactacttgtctgaatcgggtttgaaataaatatactcgccatcatccccatcataataaaaaatcacaacccacgagctacagaagcatcaactaaatattttttgactcaatcaacagcctcaatactactaataatagccgtcatcattaacctaatattctcaggccaatgaaccgtaataaaactatttaacccaatagcctcaatacttataacgatagccctagctataaaactaggaatagccccatttcacttctgagtcgcagaagtaacacagggcatncccctatcctc

SEQ ID NO: 3512 - DNA, 441 bp, Bos taurus
  Clone ID: 16-BOVMS1-007-Q1-E1-D7
gataaaagccaataaaatggacaacctaaaaatgtacaatttcccaagactgaagcaagaagaaaatatgaagagaccaattaatagtaatgaatttgaatcagtaattaaacaacaagaaaaaaaaaccccaataaatagaagttgaggaccaggggcttccctggtggtctagtggctgagactgcactcacagtgcgggggaccctggtttgatttctggtcagggaactgtatcccacacgccacagctaaagatccctcatgtggcaaccaagacttggtgcagccaataactaatatttttaaaaagtcaaggaccagatttgcttcacaggtaaataataccaaacatccgcaggtgaatactaccaaacatttagagaagagttaacacctatccttctcaaactgtgctcaaaaaactacagaggaagaaca

SEQ ID NO: 3513 - DNA, 314 bp, Bos taurus
  Clone ID: 16-BOVMS1-008-Q1-E1-D11
atgcgacgtcatagctcttctatagtgtcacctaaattcaattcactggccgtcgttttacaacgtcgtgactgggaaaaccctggcgttacccaacttaatcgccttgcagcacatccccctttcgccagctggcgtaatagcgaagaggcccgcaccgatcgcccttcccaacagttgcgcagcctgaatggcgaatgggacgcgccctgtagcggcgcattaagcgcggcgggtgtggtggttacgcgcagcgtgaccgctacacttgccagcgccctagcgcccggtcctttcgctttcttcccttcctt

SEQ ID NO: 3514 - DNA, 361 bp, Bos taurus
  unsure (307): unsure at all n locations; Clone ID: 16-BOVMS1-008-Q1-E1-D7
atgcgacgtcatagctcttctatagtgtcacctaaattcaattcactggccgtcgttttacaacgtcgtgactgggaaaaccctggcgttacccaacttaatcgccttgcagcacatccccctttcgccagctggcgtaatagcgaagaggcccgcaccgatcgcccttcccaacagttgcgcagcctgaatggcgaatgggacgcgccctgtagcggcgcattaagcgcggcgggtgtggtggttacgcgcagcgtgaccgctacacttgccagcgccctagcgcccgctcctttcgctttcttcncttcctttctcgccacgttcgccggctttccccgtcaagctctaaatcgggggc

SEQ ID NO: 3515 - DNA, 479 bp, Bos taurus
  Clone ID: 16-BOVMS1-009-Q1-E1-D7
tataagagcactctcagaagctagaaatacaaaccagaaaatgcttcaagatttattccgagaggaatatattctgaacaatgccattgattcttgccagaaaccatatattgcacttattcatggaattacaatgggtgggggagttggtgtctcagttcatgggcaattccgagtggctaccgaaaagtctgtttttgcgatgccagaaacagcaatagggctattccctgatgtgggtggaggttatttcttgccacgacttcaaggaaaacttgggtacttccttgcattaacaggattcaggctgaaaggaagagatgtgtacacagcaggaattgctacacacttcgtagattttgaaaagttgggcatgctagaagaagatttgttagccctgaaatctccttcaaaagaaaatattgcagatgtcttagaaacttaccatgcaaagtcaaagactgatcaagacaagcctt

SEQ ID NO: 3516 - DNA, 386 bp, Bos taurus
  unsure (370): unsure at all n locations; Clone ID: 16-BOVMS1-010-Q1-E1-D11
atgcgacgtcatagctcttctatagtgtcacctaaattcaattcactggccgtcgttttacaacgtcgtgactgggaaaaccctggcgttacccaacttaatcgccttgcagcacatccccctttcgccagctggcgtaatagcgaagaggcccgcaccgatcgcccttcccaacagttgcgcagcctgaatggcgaatgggacgcgccctgtagcggcgcattaagcgcggcgggtgtggtggttacgcgcagcgtgaccgctacacttgccagcgccctagcgcccgctcctttcgctttcttcccttcctttctcgccacgttcgccggctttccccgtcaagctctaaatcgggggctccctttanggttccgatttagtgc

SEQ ID NO: 3517 - DNA, 299 bp, Bos taurus
  Clone ID: 16-BOVMS1-010-Q1-E1-D7
gaaatcaataacccatctcttacagtaaaaaccataggacatcagtgatactgaagctatgagtatacagattatgaggacttaagcttcgactcctacataattccaacatcagaattaaagccaggggagctacgactattagaagtcgataatcgagttgtactaccaatagaaataacaatccgaatgttagtctcctctgaagacgtattacactcatgagctgtgccctctctaggactaaaaacagacgcaatcccaggccgtctaaaccaaacaacccttatatcgtcccg

SEQ ID NO: 3518 - DNA, 450 bp, Bos taurus
  Clone ID: 16-BOVMS1-012-Q1-E1-D7
ggtgactctagtgtgcctgtatggagtggagtgaatgttgctggtgtctccctgaagaatttacaccctgaattaggcactgatgcagataaggaacagtggaaagcggttcacaaacaagtggttgacagtgcttatgaggtgatcaaactgaaaggctacacatcctgggccattggactgtcagtggccgatttggcagaaagtataatgaagaatcttaggcgggtgcatccgatttccaccatgattaagggtctctatggaataaaagaggatgtcttccttagtgttccttgcatcttgggacagaatggaatctcagacgttgtgaaagtgactctgactcatgaagaagaggcctgtttgaagaagagtgcagatacactttgggggattcagaaagaactgcagttttaaagtcctctaatgttgtatcacttcactgtc

SEQ ID NO: 3519 - DNA, 453 bp, Bos taurus
  Clone ID: 16-BOVMS1-014-Q1-E1-D11
gttatgcatccgctacacactccagccataggctcgccatggagatgggtctggagctgcccacttagcaccatgagccagaggatgccagctgtccatcatggtttccccacagcagtcgattaaaaacattcgtggtgtgatcacagccaaggtctttaggttgctctaccacgtggcttattaactgagccaagcaccaatggtttcttgggatcatttgtgccttaagcacctttctcctctgttcgataatcttctcacacgctgcatacattctgcgaaatatggaacgtacttggatctctgcatggtttatgaccaacatgtggtatcaatttacggttgatgatgccagcattgctccagcatactgtgttgaccacaatgttcatttggcattttaagacctgaatgatcgttttggacaggccaatagactgactatcaggt

SEQ ID NO: 3520 - DNA, 457 bp, Bos taurus
  Clone ID: 16-BOVMS1-014-Q1-E1-D7
aattgttctatctaatactgtaagtagttgtcatattctggaaaatttaatagttttagagttaagagaactcctctccttggttagggaagaagagagcccttcaccactgtggaacgatgccctggctttaaggtgtgtagccctacatcatgcttcttttgagaattatatttggtagttataattacagaaactgattagttgtcagttgcaggtagatttagcacagtactcatcactctggatagattgagatgttctttcacaacagataaatgatctgtaacactgtaagatactgatctttacaactgtttaatcagttttatttctgtacagtattagtgacctaagttattttgctgtcccatttttgtcaatcaaatgagattataagaggattctgacagtacgtattttgtacatatgtatataagttgtccaaataaaaata

SEQ ID NO: 3521 - DNA, 406 bp, Bos taurus
  Clone ID: 16-BOVMS1-016-Q1-E1-D7
actaactccaaataaacgtttacccttttgtttaggtttctttgttttgtttttgagcaaaagagaacggtagagttgtgtgtaggccattcttctgcaaagccacaacagcagaacgagaagccctgggcttcacgatggtgtgtaagtggatttccccccacccgactactgaggaagtcacgtgagccctgcagtaacactgaagagtatttttctattggtgtgacccacccatgtgaaggtgaaagggaaataagattaattttcctcactagatacaaggaaacttaagacacaacagctttaattaagatccgttcctcagcatagatgtgtgttaaaacaagttgctgtacacctagtgctcattctcttatttggagtgtgagcctttttgtggggt

SEQ ID NO: 3522 - DNA, 354 bp, Bos taurus
  Clone ID: 16-BOVMS1-017-Q1-E1-D11
cccatctcttacagtaaaaaccataggacatcagtgatactgaagctatgagtatacagattatgaggacttaagcttcgactcctacataattccaacatcagaattaaagccaggggagctacgactattagaagtcgataatcgagttgtactaccaatagaaataacaatccgaatgttagtctcctctgaagacgtattacactcatgagctgtgccctctctaggactaaaaacagacgcaatcccaggccgtctaaaccaaacaacccttatatcgtcgcgtccaggcttatattacggtcaatgctcagaaatttgcgggtcaaaccacagtttcatacccattgt

SEQ ID NO: 3523 - DNA, 95 bp, Bos taurus
  Clone ID: 16-BOVMS1-018-Q1-E1-D11
aaaaaaaaaaaaaaaaaaaaaaaaaaaaaaaaaaaaaaaaaaaaaaaaaaaaaaaaaaaaaaaaaaaaaaaaaaaaaaaaaaaaaaaaaaaaaaa

SEQ ID NO: 3524 - DNA, 322 bp, Bos taurus
  Clone ID: 16-BOVMS1-022-Q1-E1-D7
ggactttgctgcaagcaacaaagttactgtgaatgtgtattgcattctcagaactgtggtgctggaacagggattttccttttgatcaatgcatcagtgattatcatcattcgaggccaccgcttctgcctctggggttctgtgtatttggatgctcatggagaggaagaccgagatcttaggcgaggcaagcctctctacatttgtaaagaaagatacaaagttcttgaacaacagtggatttctcatacttttgatcacatcaatacaagatggtgtccacattacaatgggctgtgactcaccacctttggattgcatt

SEQ ID NO: 3525 - DNA, 434 bp, Bos taurus
  Clone ID: 16-BOVMS1-023-Q1-E1-D11
tccggcgccacccacgcgtccgtatttttttttttttttttttttttttttttttttttttttttttttttttttttttttttttttttttttttttttttttttttttttttttttttttttggccaaaaaagcaaaaacccttaaaccaaacgggccaaaaagggcaggggtaaacccaggttgggaaaattggggctgttccaaaggcccacccaaaaattgtaaccccacaaaatttaaaaggaacccaaccaaaaatttggaaaaaaaaacaaaaaaaacaaaagaaaaaaaaaagggccaaaaagtaccccccaaaccaacgggaaaatccctttgcctccccaaactaaaggcccccccggggttacattaaggctttgcccggttgtttccaatggggggaaaacttccacaaaaaagacatttgc

SEQ ID NO: 3526 - DNA, 223 bp, Bos taurus
  Clone ID: 16-BOVMS1-023-Q1-E1-D7
cacgcaaccgtgattttttttttttttgtttttttttttttttttttttttttttttttgttttgtttttttttttttttttttttttttttgtttctcttgtgttttttttttttggtttgggttttttttttttttttttttttttgggggggaatccttttgtgcactgtgtgggctcccccttgtggaaaggggattttttttttggggggcgtgtgcc

SEQ ID NO: 3527 - DNA, 410 bp, Bos taurus
  Clone ID: 16-LIB188-001-Q1-E1-D11
actcctggttctgccgctcggtgtcagctcgcacgtcactcagctgggcttcgataccactgatcagcgcctggatctgcgccagctgggctccgaagcgagcctccgtttccgccagtgtgccttccagggcggctttcatgctgagctgagactgcagctcgatctccagaccctggagggtgcgccgcaggtcggtgacctccgtcttgctgatctgcagctgctccgtgtggccagcgacctccctgttcagctcctcggtctggctgatgaaccaggcctcagcatccttccggttcttctcagcaatgacctcatattggcttctcaagtcactcaggatcttgggtaaggtcaatgcccggagcagaatcaacctcaacactgacctggccacccacctggcc

SEQ ID NO: 3528 - DNA, 414 bp, Bos taurus
  unsure (397): unsure at all n locations; Clone ID: 16-LIB188-001-Q1-E1-D7
accaacagaagccgggccaggggcctatgaggatcatttttaaagatagtgagcggccctcagggatctctgaccggttctctggctccagctcaggcaaaacagccacgctgaccatcagcggggcccagaccgaggacgaggccgactattactgtcagtcagctgacagcaatgataatcctgtttggggcagcgggaccacactgaccgtcctgggtcagcccaagtccccaccctcggtcaccctgttcccgccctccacggaggagctcaacggcaacaaggccaccctggtgtgtctcatcagcgacttctacccgggtagcgtgaccgtggtctggaaggcagacggcagcaccatcacccgcaacgtggagaccaccctggcctccanacagagcaacagcaggt

SEQ ID NO: 3529 - DNA, 410 bp, Bos taurus
  Clone ID: 16-LIB188-002-Q1-E1-D11
accggtcttctaccagcaaccaaattaggtagcctgtttatcttgagctgacttcctgctccagggctggcttcctaatccagtcatattgctgaagtgtggctgaggtgagcccaggcctctctccgcgggtgagggttgctcctcacttaggttgtggggagaaccccccccacagtaaatggaagcagttgcctgcctgcctctggagtcccttttgcaacactcctttctttccctgggctgaagccaggacctggtggtgttccttacaggatagtcagtgacgatgccgggcacagctttccggagtgaaggccattgggcccgagcaccctttcacttggctccccccaacctctctaggaatcacattatgactgaatgctacgggtggggggcggagatga

SEQ ID NO: 3530 - DNA, 427 bp, Bos taurus
  Clone ID: 16-LIB188-002-Q1-E1-D7
ccgccactggccgcgggatacaggcaagacgcctacgacggcagagattacatcgccctgaacgaggacctgcgctcctggaccgcggcggacacggcggctcagatcaccaagcgcaagtgggaggcggcagattatgctgagtctttgaggaactacctggagggcacgtgcgtggagtggctccgcagatacctggagaacgggaaggacacgctgctgcgcgcagaccctccaaaggcacatgtgacccatcaccgtagctctgagcgtgatgtcaccctgaggtgctgggccctgggcttctacgctgaggagatctcactgacctggcagcgcagtggagaggaccagatccgggacttggagcctgtggaagaccaggccttcaggggacggaaacttccacaattgggcggccctggtg

SEQ ID NO: 3531 - DNA, 433 bp, Bos taurus
  unsure (8): unsure at all n locations; Clone ID: 16-LIB188-003-Q1-E1-D7
catgcacncgtacgccatggcggccggatacagtgcagattccttcagtcctgtgggtccttcctgggaaggatccagagagcttggcccttcagactcaggcatctgtagagactgcagttcacctgtagacgggtccacctcttttgaagacagatgagtccagtcatcatctcctcctgaacagttatcagactccatctgttcctcatgctgaccccctgactccagggcgatcttattcatctgctccgtcagagactgtgctgtgccctccacgtccctgtctggcttgctggggtcagagcagcagctgcttggctgagagctacacttctcctctgtgctggaactgcctgcagaggtgggggtcaggcggcttctcttgcctccgtgttccacatcaatatcgacatcaatgcccagagggctg

SEQ ID NO: 3532 - DNA, 381 bp, Bos taurus
  Clone ID: 16-LIB188-004-Q1-E1-D11
acttggccaagcgctcggatcggcaaggggcaccagtcttgatctgccccgtgcacagccccaccaccaggtcagcaatgaaggtgtcctcagtctccccggagcgatgagacaccatgacgccccacccgttggactgggccagcttgcacgcctgcagggactcggtcacagagccaatctggttcactttcagcaggaggcagttgcacgatttctcgctcacggccttggcgatccgcttggggttggtcaccgtgaggtcatcccccaccacctggatccctgcgctggcagtgaacttctgccaagcttcccagtcatcctggtcgaaggggtcctcgatagacaccactgggtagtccctgatgaaggacttgt

SEQ ID NO: 3533 - DNA, 441 bp, Bos taurus
  Clone ID: 16-LIB188-004-Q1-E1-D7
actttgcagaggccctggggccactggagagctttggagcctggcctgatgacttgctcatcagcacctaccccaagtcgggcaccacctgggtaagcgagatcctggacctgatctaccaggagggtgacctggagaagtgtcagagagcccctgtcttcttgcgggtgcccttccttgagttcagcgcccctggggttcccacaggtgttgagcttctgaaagatacaccagccccacggctcctcaagacacacttgcctctggccctgcttccgaagaccctgctggatcagaaagtcaaggtgatctacatcgcccgcaacgccaaggatgtggccgtctcctattaccacttctatcgcatggccaaggtgcaccctgaccctggcacctgggacagcttcctggagaagttcatggccggggaagtgtgctacg

SEQ ID NO: 3534 - DNA, 439 bp, Bos taurus
  Clone ID: 16-LIB188-005-Q1-E1-D7
catgctaccgaacgccatgcgcgcgggatacttgagcaggacagagtcactcgagcccctccagggagctgtggctaaattcttctctgccagctgtgttccctgcattgatagacaagcataccccaacctgtgtcaactgtgcaagggggagggggagaaccagtgtgcctgctcctcccgggaaccatacttcggttattctggtgccttcaagtgtctgcaggacggggctggagacgtggcttttgttaaagagacgacagtgtttgagaacttgccagagaaggctgacagggaccagtatgagcttctctgcctgaacaacagtcgggcgccagtggatgcgttcaaggagtgccacctggcccaggtcccttctcatgctgtcgtggcccgaagtgtggatggcaaggaagacttgatctggaagcttctc

SEQ ID NO: 3535 - DNA, 390 bp, Bos taurus
  Clone ID: 16-LIB188-006-Q1-E1-D7
ggaaccacaggagtattaattccccctcacagtcatgcttggaagattaaacagcttagtatacaataaagtataaaataaagggcttccctggtggctcagatggtaaagaatctgcctgcaatgcagaagacccaggttcgatccctgggtcaggaagatcccctggagaaaggaatggctatccactccagtattcttgcctggagaagtccgtggacataagagcctggtgagctacagtccatggggtctcacagagctggacacgactgagcaactaccatgtaataaagtgcttagaactctgcttagtaagtggtttgcacagcatatatggggcatgacaacatcagtgagaaagacagacatataagacatgtcctcagt

SEQ ID NO: 3536 - DNA, 393 bp, Bos taurus
  Clone ID: 16-LIB188-007-Q1-E1-D7
catactccctaccgccatgggcccgggataccggccaaggcgggggtcacaggcagccatcatgttcttggcatcgaagacctgctgggtgagctcagggacagtgagggcccgatactgctggctgccacggctggtaagaggggcaaagccaggcatgaagaagtggaggcgtgggaagggcaccatgttgacggccagcttgcggaggtcagcattgagctggccaggaaagcggaggcaagtggtgactccactcatggtggccgagacgaggtggttcaggtctccataggttggtgtggtcagcttgagggtgcggaaacatatgtcgtaaagggcctcgttgtcaatgcagtaggtttcatcagtgttctccaccagctgatggac

SEQ ID NO: 3537 - DNA, 449 bp, Bos taurus
  Clone ID: 16-LIB188-008-Q1-E1-D7
gccatgggggcgggatacagacacaatcagatgcagctgcagaaagaggggtccagtgatctgaagtcacatagcgggatgcagcattactcagtccccacaaggcagctgtctcaaactttaggaaccgtgagagacacatcagagccctggtcactgtcaccacttgcagcctgggtgtaggtctgtcttttttcacctgagcgcttcttcctccagatcacagctccagccaccacagctactacgaggagaaccaggccaacaatgatgcccatggtgaggaaggaggtctgaggaggttcccatctcagggtgaggggctcctgaagcccttcgtgctgcacatggcacgtgtatctctgctcctctccagaaggcaccaccagggccgcccacttctggaagtttccgtcccctgaaggcctggtctccacaagctccatgtc

SEQ ID NO: 3538 - DNA, 361 bp, Bos taurus
  Clone ID: 16-LIB188-010-Q1-E1-D11
acgattactccaagcccatccaggggcagcagaagaagccctttgagcagcactggaggaagcacacgctctcctacgttgacatcaagactgcctgcgcctcggtgcatggtgccaaccgtctgggtgcaaactcgctcctggacctggttgtcttcggccgggcgtgcgccctgagcatcgcagagtcctgcagacccggagataaagttccctcgattaaaccaaatgctggggaagaatctgtcatgaatcttgacaaattgagatttgccaatggaagcataagaacatcggaactgcgactcaacatgcagaagtcgatgcagagccatgccgcggtgttccgtgtggggagtgt

SEQ ID NO: 3539 - DNA, 277 bp, Bos taurus
  Clone ID: 16-LIB188-010-Q1-E1-D7
acactttgatgaagatgagctctggactgaggggacctaccggggggtgaacctgcgcatcatcgcagcccatgtaattgtccatgccctggtgctggggcactcccgatccacgcacgccctcatggttctggtcaacgcttgctaccggcctcacttcaaccttcatcctgagtatttggctcggattcattcactctatcgcacgaagagcctacagcttcaagaggaggtggacgaagaccacttggcaatcgcgactatctccctagtgccc

SEQ ID NO: 3540 - DNA, 301 bp, Bos taurus
  Clone ID: 16-LIB188-011-Q1-E1-D7
gcatgatcccaaccgccactgggcgcgggataccttgccgtggcagttgtcaagaaagcaaatgaggggctcacatggaattctctgaaagacaagaagtcgtgccacaccgccgtggacaggactgcaggctggaacatccccatgggcctgatcgtcaaccagacaggctcctgcgcatttgatgaattctttagtcagagctgtgcccctggggctgacccgaaatccagactctgtgccttgtgtgctggcgatgaccagggcctggacaagtgtgtgcccaactctaaggagaagt

SEQ ID NO: 3541 - DNA, 382 bp, Bos taurus
  Clone ID: 16-LIB188-012-Q1-E1-D11
accaaaggcgaaaaatccaacaggagacacagacacacccaacctctctgccaagacctgtgcagagatttttttgaatttttagaaagatatatccacggtaactgatcactggcaactttacatgaaacgaggagaaagtcaccacggagacgggtgcccctgctcccactccccaactttcctgccctgtggacccttccatcatcccggggtgggggtgggggccggtttgagaattcctcttccctccggttcccacacgtcagatgcacacagttcactgagaccaagtgccttctgtagtcacgtgagttacaaaggagacgccgctcaaaggctaagagcaggaaattcacactgttttatatgcactgactgt

SEQ ID NO: 3542 - DNA, 243 bp, Bos taurus; identical to SEQ ID NO: 3063
  Clone ID: 16-LIB188-012-Q1-E1-D7

SEQ ID NO: 3543 - DNA, 401 bp, Bos taurus
  Clone ID: 16-LIB188-014-Q1-E1-D7
cgccatgggcgcgggatacccacaaatttggttgaagcgcacattttgaaagtgtggaaaaacccgccaatgtgacaggcagggcacccccacctttggctcgggaacacattggcatcggagggaccacttctgatccgccgaggatcttcgagagtgggactgacgacgcgccggcagaaggccaggccacagaggataagaaggaacccaaggaacctcgacaaggagttgggactgtggaggaagaagcaaaggagaagaccagtgaggcacccaagaaggacgatgagaaagggaaggatggcgatagtgagaaggagtcagaaaagagtgatggagacccgacagcggatcctaagaaggagaaggagcccaaggaaaggcacgacgaggtgctg

SEQ ID NO: 3544 - DNA, 408 bp, Bos taurus
  Clone ID: 16-LIB188-015-Q1-E1-D7
acctgcccgaggcggccgctcgaactttcagaacacagcctcagtttccttctgtcagtcacagcccctgaccataagattcgttatctgcagttctggctggtggattctgcaggtctctcccaccactgatcctctagccctagaagcatccttgccaacatcacgtgcctgttacttccctttgtccatcttcaggccacttagggatgaccccctggcagccaataccctgatataaaattaacacaaagtctgacttggtgaatattagttttgaacagaaaagtagaaaatctgaagatgcaatgtgtgttgaaagcagactcgagcagatcaagtgttcacccatgtgccaccaggacaatgggtggaggtgcacgcggcaggaggaaaacgggaccattc

SEQ ID NO: 3545 - DNA, 411 bp, Bos taurus
  Clone ID: 16-LIB188-016-Q1-E1-D11
acccacatctgccaccagaagctgacccccggctgattgagtccctctcccagatgctgtccatggggttctctgatgaaggtggctggctcaccaggcttctgcagaccaagaattacgacatcggggctgccctggacaccatccagtattcaaaacacccaccacctttgtgacgatgtttgctcacccattctgtgtcccctttcttgtctcatagtcgtgttgagttagtgtagaaccccagtgcctctaagtcccaatttctcgtcattcttctttcagaatctggggggtggggatgcacaaagccctttagggcagtagaacaagtgacacggggggagttccaagggtgtgagtgcggattctgagaaacactgatcagcttcccatggatgctggctcctt

SEQ ID NO: 3546 - DNA, 389 bp, Bos taurus
  Clone ID: 16-LIB188-016-Q1-E1-D7
actcagtccatcagaagagtccttggaacaagcaactggctattgaaaaggttattttgtaacattttgtctaactttttacttgttttaagctttgcctcaggtggcaaactcattttatgtgccatttttttgctgttattcaaatttcttgtaatttagtaaggtgaacgacttcagatttcattattgacttggatatttgaggtaaattttcctttttgtttatatagtgctgactttttttgtttggaattaaacagattggtaacctaatttgtggcctcctgacttttaaggaaacgtgtgcagccattacgcacagtctaaagctgtcaagagattgactcaacattgccttcctaccttaaaattaaaaacctacaaaa

SEQ ID NO: 3547 - DNA, 440 bp, Bos taurus
  Clone ID: 16-LIB188-017-Q1-E1-D7
gccatggcggcgggatacagaggaactacctggagggcgaatgcgtggagtggctccgcagacacctggagaatgggaaggacacgctgctgcgcgcagaccctccaaaggcacatgtgacccatcaccccatctctgaccgtgaggtcaccctgaggtgctgggccctgggcttctaccctgaggagatctcactgacctggcagcacaatggggaggaccagacccaggacatggagcttgtggagaccaggccttcaggggatggaaccttccagaagtgggcggccctggtggtgccttctggagaggagcagaaatacacatgccgagtgcagcacgaggggcttcaggagcccctcaccctgaaatgggaacctcctcagtcctccttcctcaccatgggcatcattgttggcctggttctcctcgtggtcact

SEQ ID NO: 3548 - DNA, 226 bp, Bos taurus
  Clone ID: 16-LIB188-018-Q1-E1-D11
accctggatgatgccactgatgactggggaataaaggtggagcgcgtggaaatcaaggacgtgaagctgccagtgcagttgcagagagccatggctgcagaggcagaggcgtcccgggaggcccgagccaaggtcattgcggctgagggagaaatgaacgcgtccagggctctgaaagaggcctccatggtcatcaccgagtctcccgccgccctccagctgcggt

SEQ ID NO: 3549 - DNA, 226 bp, Bos taurus; identical to SEQ ID NO: 1184
  Clone ID: 16-LIB188-018-Q1-E1-D7

SEQ ID NO: 3550 - DNA, 368 bp, Bos taurus
  Clone ID: 16-LIB188-019-Q1-E1-D7
acctccatggccccaccccctcgggccgtcttcccacaccccagctagctggattggtggaaagggcagtgcccgccctctccggtcacgcctggggcgggtcctggttgaaggggcggaagacaaggaagatgggcttgtccggcgtcaggatgaggttgaatatggtgtccacgtcaccgatatgctgcatttcaaccttgaagttctccagaatgtggatgaggaagagggtcatctccagctcggcgatccgccggcccacgcactgccgcactccccagccaaagcccaggttccggaagtggatgaggtctttgtctttactcagccacctggttgggtcaaacttgtccggactggagaag

SEQ ID NO: 3551 - DNA, 411 bp, Bos taurus
  unsure (401): unsure at all n locations; Clone ID: 16-LIB188-020-Q1-E1-D11
acaagcttatttttttttttttttttttttttctttttttttttttttttcaggtttatgcctttattgctgaaggaggagcggccccaagcaggaggccccaggaggggcctggaggggcctgggtcccaggaggggtgaatgtggtcccggttcctcctggtcccctgatggggcaggcggggatgacatcgtctgtccccagaggggccaaggctcccgggctctagatgtggcactgctcctccagctgggttgggttgaaggacagccggatgtgcatgggcagggccttgagggctttgtcgaatttctccagggcctcgtcgtccacctccggggtcctgaccaggcactggcaggccaggctttgctcgggctcagcactgttctccatgcanaagagcaggt

SEQ ID NO: 3552 - DNA, 410 bp, Bos taurus
  Clone ID: 16-LIB188-021-Q1-E1-D7
actcccagatgcactacttacacgtcttccttcgtcttcacctaccctgaggctgactccttccccagctgtgcggctgcccaccgcaagggcagcagcagcaacgagccttcctctgactcgctcagctcacccacgctgctggccctgtgagcgggcagagaggggaggcagtgggcgtgcacgtggccactgcctgagttggcgcattacagagaggagaaacacgtcttccctcgagggttcccatagacctagggaggaccttatctgtgcgtgaaacacaccaggctgtgggcctcaaggacttgcaagcgagcatccccgtgtggactcaagtccttacctcttctggagatgtagcaaaacgcatggagtgtgtattgttcccagtgacacatctgagagct

SEQ ID NO: 3553 - DNA, 368 bp, Bos taurus
  Clone ID: 16-LIB188-022-Q1-E1-D11
actcagaggtgtgatgctcgccaggccccagccctggtgctgggaggggcggagctgcctcgcaatccgcttctttgctttggcccccgtggcctgggtgaaccacctggctgacttcaggaccatccgcttgtgtccccctcgctggcctgcttttcctgtggggcctgggagatgctcacaatgggtcaacccttttaggctgaatgattccttgggtctcgaaaattcagtccaacagcccttggcttctttcgatcggctctgacactggtctacatgactggtctttctaaagtcagtgagtttggttatgtaactctcaacttgaccagttttactaaggggctgacaaatcaaaaacacac

SEQ ID NO: 3554 - DNA, 420 bp, Bos taurus
  Clone ID: 16-LIB188-022-Q1-E1-D7
actccagcaagaggaaatatgacacccccaaaaccaagaagaactgagtggggcttccacagccctccctgcccaagaaatccaggtgctttccagactccaaagggaatctcaaatgcagtgtcttctcctttagcccctggccatcttctcctggatcctgtcctgctctaactagagcgaaggactaggcctgggagtctgtgagcgcctctttggttccatcatgaagccggacaaacaggaatgccttcggcagccgtcgtgacctcggggccctgtgttgcagcactgaggtgccgggggtgtgttgctggctatgtgaactctcagaggtccaggaaagggcatttcggaggctgcctgacaccaccccatcccccacaacccctctcaaaagagggtggaagataagatgaa

SEQ ID NO: 3555 - DNA, 327 bp, Bos taurus
  Clone ID: 16-LIB188-023-Q1-E1-D11
ggccggatacaaatctgagactagcttcaaggggatcctcaaaaacccaagagcaaagtccttgaacagcacgtccctctggccgggtggacagccaaatagctggaagctccaagacttgttttttcgaaatttctcctgcgccttgcgtagaagcttcgagatcaagtcttccttgccatccagacttcgggccatgatagcatgagaaaggacctgggccaaggttcactccttgaaagcatctattggcgcccgactgttgttcatgcacagaaactcatactgctccctgtcatccttctctggcaagttctcaagcactgt

SEQ ID NO: 3556 - DNA, 356 bp, Bos taurus
  Clone ID: 16-LIB188-023-Q1-E1-D7
acatacagctgagtgggagtaaacaaaaagacaaacacgcgtgttaacggctgtgcgcgagcactcgggatgaaagcctgagcaggaacggcctcaccgcagcggggatgctgggcaaatagatggtgatggcaacggtgtagaacacgtgttcaaagactaaccctaaaacccagagtgtacatctatgctcagagttagcataatttggagctattcaggaattgcagagaaatgcattttcacagaaatcaagatgttatttttgtagactatatcacttagacgactgtgtttcatttgctgtaatcagtttttaaaagtcagatggaaaaagcaactgaagtcccagaaaa

SEQ ID NO: 3557 - DNA, 396 bp, Bos taurus
  Clone ID: 16-LIB188-024-Q1-E1-D7
accactgaaatttttttttttgaccgcactgcaggacatggggaatcttagttccctgactaaggattaggcctgcgtcccttaacaggggaattgaggattcttaaccactggaccaccggggaagtcccactactagacttctaatgtttatttatcgctaaaacaaaagagtgatatattccaggacttataatagtgcctaaagtgctgtagccaaagacagaagctggcaagagggcacagcagagggcaaatgtgaaaaatgggcttcgagatggcaggggcagttgccactaagcctggcaattgagccagctgaggctgaagacagttgaggtggctctacctccaccccctggaaattctgaactagaggaatctcaacatgtgttt

SEQ ID NO: 3558 - DNA, 438 bp, Bos taurus
  Clone ID: 16-LIB188-025-Q1-E1-D7
gggatacagaattctcgaggattcaactgccaccatgtcgagcaaaagagcaaagaccaagaccaccaagaagcgcccccagcgcgcgacctccaacgtgttcgccatgtttgaccagtcccagattcaggagttcaaggaggccttcaacatgatcgaccagaacagggatgggttcattgacaaggaagacttgcatgacatgcttgcttccctgggaaaaaatccaactgatgagtatctggatgccatgatgaacgaggctccaggtcccataaattttaccatgtttctcacaatgtttggtgaaaagttaaatggcacagatccagaagatgtcatcagaaatgcttttgcttgctttgatgaagaagcaactggcaccattcaggaggattacctgagagaactggctgacacaatgggagaccggtttac

SEQ ID NO: 3559 - DNA, 355 bp, Bos taurus
  Clone ID: 16-LIB188-027-Q1-E1-D11
actttgaaaatctccggttccaatgcattcgacttagagctgcatcatgccctgtgtgagctcaatgctcacaatgtggtatccatgtactcatcgtgcattgggtcgagtcattcgctacacttcactctgacacattacagtggaacatctgtgataatgtcgtcattgctctccagaattcatccaacgtcaatttgacaagtcacattggcaattcggtaatccctaagcccatgcagtggggcggaagtgttggtcaggccaagtatctcatactggtctctgtaatccttctctgggatcttcttagataatgtcgtccctttagtaaaatccgcttctccacctccgt

SEQ ID NO: 3560 - DNA, 379 bp, Bos taurus
  Clone ID: 16-LIB188-027-Q1-E1-D7
actcctgggtcgggcgtagcccctctgcacgggtcagggccagctctgagtccaggtgcatgaggactccgtttacctgctccatctgcatggcaatatcgggcctcgacttccctcaagctgttccccaagctggccttcagaattctcatggaatccaagtcaatctccaaggactggacactgtgcctcagctccgtgtcggtcatcacagcatctccaatctcagctgtctgcgacgtgatcactgtggtgccctcctcactctgctgggactactaccgtgccatggcatttgtcaacagagcatatgatgggctcacatggaattctcagaaagacaagatctcatgacacagcgccgtggacaggacggcaa

SEQ ID NO: 3561 - DNA, 349 bp, Bos taurus
  Clone ID: 16-LIB188-028-Q1-E1-D7
aacctctaccgtgtgacttaggtgggacattgtccagccagaactgatgtctctgtttggatactgcagaagggggccctaggcacacccataaaggtagccatacccatcgagggttgattggcaggctggaagaaaaattccatgacaaaggcacttttacctcaatagggacctgggagttgactgggagtgttataggggtggggaggaattatttcaatagaggtgttatttgcacactgctgaaagaaatgaagatagttcacctacaccgggccatctgcaggatcagtaggggctgctgtatgtctctgctgccgcaaggggaacgtaatgtctgcatcat

SEQ ID NO: 3562 - DNA, 373 bp, Bos taurus
  Clone ID: 16-LIB2809-002-Q1-E1-D7
acctggtgagattgtggaaagcctttcaagcagtgaggaatctattacacgcatcaataagaaaattgagaagtttcagagtgaggaacagcagcaaacagaggatgaactccaggataaaatccacccctttgcccagacacagtctctagtctatcccttccctgggcccatccctaacagcctcccacaaaacatccctcctcttactcaaacccctgtggtggtgccgcctttccttcagcctgaagtaatgggagtctccaaagtgaaggaggctatggctcctaagcacaaagaaatgcccttccctaaatatccagttgagccctttactgaaagccagagcctgactctcactgatgttgaaaat

SEQ ID NO: 3563 - DNA, 178 bp, Bos taurus
  Clone ID: 16-LIB2809-003-Q1-E1-D7
gtcgcatgcatccggaagccatggccgggcgatactgttgcattaaaagcgccatcagggacatcgagcaggggtcaaaagtccagagcgccattcatgcacccctggagattagtccttacatgtccattgtcactacagggcccagggctcagagacgagttagcttcaagggggt

SEQ ID NO: 3564 - DNA, 471 bp, Bos taurus
  Clone ID: 16-LIB2809-004-Q1-E1-D11
acttgctgctgttccagaaggcatccccgaactgcgggtcatacttgatagcaacagggtaaactgtggctccaatttcgaaacttccctttttgaacatcatcaccgatgtattattgatgcaggttccctctggaaagatgaggatgggcaacttgcttttatcctgcacatgctcggtcagccttctggccaccaggtggcgatccttcacttcggagcgctcgaaccagacgtgggggcaggccttgaccatggctctctggatgactcccatgaggccgccgtgcacctgccccaccatggcgtactagccgtcgctggccaggatgatgacgtcaatgggtgacgtgtggttagccacacagatgccgccgtttctaggccggttcttcctgtcatggtaggtgatgatggccgtcagagcgcgcacgcaaatccggtagcacatgaggtgaacgtgcttgctca

SEQ ID NO: 3565 - DNA, 409 bp, Bos taurus
  Clone ID: 16-LIB2809-004-Q1-E1-D7
cggatacctcacataaggaataacctttgtcttaggttgaatccatggcttcatagctttcggatgctgataaacagtcttgagatactggggcaaggcgaatttctggtaacgctggctgatttttttcagaagatttaggcgagtcttttcttcgtcagtcagtttagttttcttagtgaatacttctgttgattccatgtcaacggtcttctttgaattttcctcactggtggagagctgctctctgttcacagtgggagtaatgggaacagcatttctcttaacctgatcccatgggttcaaaacaattggaccgtggtagagatactggagatactgggggaacttctgataaaactgattgatttcagtcagtgctttctggtagtgcttatcgtccacagta

SEQ ID NO: 3566 - DNA, 431 bp, Bos taurus
  Clone ID: 16-LIB2809-005-Q1-E1-D7
acccaccagaatgaaaagaacgatagctgggatcatcctggcgatatccaagaggttctccctgggcaccaatatcaagtccaagatcagcagtcgcattccaagccattggctccgttctgaagagagaactggtcagctcaaccgaaagccgtttcttataatcctgtggcttgtcctcagacattcggaacaaaacagcagctgcatatgttgccacaccttcattcctagaatgaagtaattctgtcagaggagctgtggctccctcggcttcaatagcttctgcagcttccttgtcctgagcaagttcacagaggacccctgcagctactctttggatattttcaataggagaataaagcagctgcacaaacaatggaatggtatttagtcctctgataacgattcggttgtgaacatcccgagct

SEQ ID NO: 3567 - DNA, 450 bp, Bos taurus
  Clone ID: 16-LIB2809-006-Q1-E1-D11
acccatttccaaagagctccacagcccagaacccattctcgggagtcatggggtcaaatcctttcttcatcacattctccctacacaccccaattgcccagtccgtcctgtctcccacctccacctcccagtaatgtctccccgaggtgaaggcctcgcgacccatcacacagggccaggagtcaaatctctctggtttctcaggaagtttctgacgtgaatcttccagtcggacagattttgaatcttcgtacagaaagaggtgggggtgggcagtatctggatccagagtcacatccactgcatgcaatgtagcccttttccatttgagctcttccaggagtttctctttagagctgaattcattcctcctctgtctggatctttccttgtatagtctccaggtaaaaaatatggacccaattgtgagaagtcctaagaccaccaaga

SEQ ID NO: 3568 - DNA, 412 bp, Bos taurus
  unsure (406): unsure at all n locations; Clone ID: 16-LIB2809-009-Q1-E1-D11
acagcaaaaaggcctgaatgggcatatctctctggggatagggcactgctttctggggaacaggcaggactttggactgagaaagggacagcacggactgaggaggaaacatgacagttggaggaagaggctggtgaggctggtgcatccaagactggagcagaggcagaggaaggtgcagattttcaacatcagtgagagtcaggctctggctttcagtaaagggctcaactggatatttagggaagggcatttctttgtgcttaggagccatagcctccttcactttggagactcccattacttcacgctgaaggaaaggcggcaccaccacaggggtttgagtaagaggagggatgttttgtggggggctgttagggatgggcccagggaatggatagactanagactg

SEQ ID NO: 3569 - DNA, 310 bp, Bos taurus
  unsure (269): unsure at all n locations; Clone ID: 16-LIB2809-009-Q1-E1-D7
gggatacctggagacatcgtgtctctctccatcggagaccgcgtccctgctgacatccgtctcacagaggtcacagacctcctggtggacgagtccagtttcacgggagaagccgagccaagcagtaagacagataccccactgacaggcgagggtaacctcacgaccctgagcaacatcgtcttcatggggaccctggtgcagtgcgggaagggccagggcgtcgtgatcggaacaggagaaaagtcccagtttggagaggtgttcangatgatgcaggctgaagagacacctaaaactcctctacaga

SEQ ID NO: 3570 - DNA, 438 bp, Bos taurus
  unsure (315): unsure at all n locations; Clone ID: 16-LIB2809-014-Q1-E1-D11
actttgactgttcatcttatctaaattacccaggaatttgtggctaaaatcagtttaccacagataagctatgatgtgtctggttaattagcatttttatcttgaatgtaaattaatgtcataaaactaacaatacatgttttttattttttaaggaaattgttcccaatagtgttgaggtgagatatatctactaaatttaaaatatattaacatcatccaggatatcttaaaatttaattaaactttttattttttgaattttttagcagaagcacattcaaaaggaagatgtgccctctgagcgttacctgngttatctggtaaaattttattaaaagttaatcaaagaccaatgtatcagggaatgagcaagaatgttgtattgataaattatctctccttttcaatatctgctaaacttaaagtaagcagtct

SEQ ID NO: 3571 - DNA, 398 bp, Bos taurus
  Clone ID: 16-LIB2809-014-Q1-E1-D7
cgtatgtgtatgatacataaggttatgtattaattgtagccgcgttctaacgacaatatgtacaagcctaattgtgtagcatctggcttactgaagcagaccctatcatctctctcgtaaactgccgtcagagtcggtttggttggacgaaccttctgagtttctggtaacgccgtcccgcacccggaaatggtcagcgaaccaatcagcagggtcatcgctagccagatcctctacgccggacgcatcgtggccggcatcaccggcgccacaggtgcggttgctggcgcctatatcgccgacatcaccgatggggaagatcgggctcgccacttcgggctcatgagcgcttgtttcggcgtgggtatggtggcaggccccgtggccgggggactgtt

SEQ ID NO: 3572 - DNA, 385 bp, Bos taurus
  Clone ID: 16-LIB2809-015-Q1-E1-D11
acctggtaagattgtggaaagcctttcaagcagtgaggaatctattacacgcatcaataagaaaattgagaagtttcagagtgaggaacagcagcaaacagaggatgaactccaggataaaatccacccctttgcccagacacagtctctagtctatcccttccctgggcccatccctaacagcctcccacaaaacatccctcctcttactcaaacccctgtggtggtgccgcctttccttcagcctgaagtaatgggagtctccaaagtgaaggaggctatggctcctaagcacaaagaaatgcccttccctaaatatccagttgagccctttactgaaagccagagtctgactctcactgatgttgaaaatctgcaccttcct

SEQ ID NO: 3573 - DNA, 195 bp, Bos taurus
  Clone ID: 16-LIB2809-016-Q1-E1-D7
ggatacaaggaaaacatgctggaatcaagattgccaggagaaatatcaatatcctcagatatgcagatgacaccaaccttatggcagaaagtgaataggaactcacaagcctcttgatgagtcttatagtggacagtcaacccctcggcggttccgctcaacattcagatcgcgaagctcatggtgtccagtccc

SEQ ID NO: 3574 - DNA, 435 bp, Bos taurus
  Clone ID: 16-LIB2809-017-Q1-E1-D7
gccatgggcgcgggatacctggtgagattgtggaaagcctttcaagcagtgaggaatctattacacgcatcaataagaaaattgagaagtttcagagtgaggaacagcagcaaacagaggatgaactccaggataaaatccacccctttgcccagacacagtctctagtctatcccttccctgggcccatccataacagcctcccacaaaacatccctcctcttactcaaacccctgtggtggtgccgcctttccttcagcctgaagtaatgggagtctccaaagtgaaggaggctatggctcctaagcacaaagaaatgcccttccctaaatatccagttgagccctttactgaaagccagagcctgactctcactgatgttgaaaatctgcaccttcctctgcccctgctccagtcttggatgcaccagcctc

SEQ ID NO: 3575 - DNA, 286 bp, Bos taurus
  Clone ID: 16-LIB2809-019-Q1-E1-D11
gggatacctgtaaagattgtggatggcctttcaagcaatgaggaatctattacaggcatcgatacgaaaattgagaagtttcagagtgcggatcagtagcttgcagtggatgaggtccaggactgtatccagtcttttgctcatacacactcacaattctatcccttatctgagcccatctctaacagtctcccacatgtgatgcctcctcatattcgaacctctgtggtggtgcctcctttccatcaccctgatttaattcgagtctcctgtgtgaacgacgcta

SEQ ID NO: 3576 - DNA, 424 bp, Bos taurus
  Clone ID: 16-LIB2809-019-Q1-E1-D7
acctggagagattgtggaaagcctttcaagcagtgaggaatctattacacgcatcaataagaaaattgagaagtttcagagtgaggaacagcagcaaacagaggatgaactccaggataaaatccacccctttgcccagacacagtctctagtctatcccttccctgggcccatccctaacagcctcccacaaaacatccctcctcttactcaaacccctgtggtggtgccgcctttccttcagcctgaagtaatgggagtctccaaagtgaaggaggctatggctcctaagcacaaagaaatgcccttccctaaatatccagttgagccctttactgaaagccagagcctgactctcacggaagttgaaaatctgcaccttcctctgcctctgctccagtcttggatgcaccagcctcaccag

SEQ ID NO: 3577 - DNA, 333 bp, Bos taurus
  Clone ID: 16-LIB2809-021-Q1-E1-D11
cgtatgtgtatgatacataaggttatgtattaattgtagccgcgttctaacgacaatatgtacaagcctaattgtgtagcatctggcttactgaagcagaccctatcatctctctcgtaaactgccgtcagagtcggtttggttggacgaaccttctgagtttctggtaacgccgtcccgcacccggaaatggtcagcgaaccaatcagcagggtcatcgctagccagatcctctacgccggacgcatcgtggccggcatcaccggcgccacaggtgcggttgctggcgcctatatcgccgacatcaccgatggggaaaatcgggctcgccac

SEQ ID NO: 3578 - DNA, 350 bp, Bos taurus
  unsure (326): unsure at all n locations; Clone ID: 16-LIB2809-023-Q1-E1-D7
cgtatgtgtatgatacataaggttatgtattaattgtagccgcgttctaacgacaatatgtacaagcctaattgtgtagcatctggcttactgaagcagaccctatcatctctctcgtaaactgccgtcagagtcggtttggttggacgaaccttctgagtttctggtaacgccgtcccgcacccggaaatggtcagcgaaccaatcagcagggtcatcgctagccagatcctctacgccggacgcatcgtggccggcatcaccggcgccacaggtgcggttgctggcgcctatatcgccgacatcaccgatgggggaaagggaanttttcccggggggggggggccccc

SEQ ID NO: 3579 - DNA, 412 bp, Bos taurus
  Clone ID: 16-LIB2809-026-Q1-E1-D11
acagcaaaaaggcctgaatgggcatatctctctggggatagggcactgctttctggggaacaggcaggactttggactgagaaagggacagcacggactgaggaggaaacatgacagttggaggaagaggctggtgaggctggtgcatccaagactggagcagaggcagaggaaggtgcagattttcaacatcagtgagagtcaggctctggctttcagtaaagggctcaactggatatttagggaacggcatttctttgtgcttaggagccatagcctccttcactttggagactcccattacttcaggctgaaggaaatgcggcaccaccacacgcgtttgagtaaaaggaaggatgttttgtgggaggctgttacggatgggcccaaggaagggatagactagagactg

SEQ ID NO: 3580 - DNA, 163 bp, Bos taurus
  Clone ID: 16-LIB2809-027-Q1-E1-D7
gggattagcggaagaggtatagggatgctttgcagtattcctctgaatctaaagatactgaattggctgattagctcttacagtggtttttgcaggaagaagagagagagtgctttggaggatgtctctttacgtgttatgatctggtggggccagatgttgt

SEQ ID NO: 3581 - DNA, 431 bp, Bos taurus
  Clone ID: 16-LIB2809-028-Q1-E1-D11
gggataaatggaaacatcgtgtctctctccatcggagaccgcgtccctgctgacatccgtctcacagaggtcacagacctcctggtggacgagtccagtttcacgggagaagccgagccaagcagtaagacagataccccactgacaggcgagggtgacctcacgaccctgagcaacatcgtcttcatggggaccctggtgcagtgcgggaagggccagggcgtcgtgatcggaacaggagaaaagtcccagtttggagacgtgttcaagatgatgcaggctgaagagacacctaaaactcctctacagaaaagcatggacaagctggggaagcaactgacactcttctcattcggcataattggcctgatcatgttcactggctggttgcaacggaaacacctgctcagcatgttcaccatcggggtcag

SEQ ID NO: 3582 - DNA, 341 bp, Bos taurus
  Clone ID: 16-LIB2809-028-Q1-E1-D7
attgtggaaagcctttcaagcagtgaggaatctagtacacgcatcaatgcgaagcttgagaagtttcagagtgcggaccagcagcacggagaggatgaactcgaggatagaatccaccccgttgcccagacacagtctcgcgtcgatcccttccctggggcgcagccagaacagcctcccacaaaacatccctcctcttactcaaacccctgtggtggtgccgcctttccttcagcctgaagtaatgggagtctccaaagtgaaggaggctatggctcctaagcacaaagaaatgcccttccctaaatatccagttgagccctttactgaaagccagagcc

SEQ ID NO: 3583 - DNA, 385 bp, Bos taurus
  Clone ID: 16-LIB2809-029-Q1-E1-D11
acaccaaactggtgggacaggatgtggccaagtttatgaactggatggcggatgaatttaactatcccctgggcaatgtgcatctcttgggatacagccttggggcccatgctgctggtattgcaggaagtctgaccaataagaaggtcaacaggataaccggcttagatccagctggacctaacttcgagtatgcagaagctccaagtcgcctttctcctgatgatgcggattttgtagacgttttacacacattcaccagggggtcaccaggtcgaagtatcggaatccagaaaccagtagggcatgtggacatttaccctaacggaggcactttccaaccaggatgtaacattggggaagctctccgtgtgattgcagagag

SEQ ID NO: 3584 - DNA, 359 bp, Bos taurus
  Clone ID: 16-LIB2809-031-Q1-E1-D11
cgtatgtgtatgatacataaggttatgtattaattgtagccgcgttctaacgacaatatgtacaagcctaattgtgtagcatctggcttactgaagcagaccctatcatctctctcgtaaactgccgtcagagtcggtttggttggacgaaccttctgagtttctggtaacgccgtcccgcacccggaaatggtcagcgaaccaatcagcagggtcatcgctagccagatcctctacgccggacgcatcgtggccggcatcaccggcgccacaggtgcggttgctggcgcctatatcgccgacatcaccgatggggaagatcgggctcgccacttcgggctcatgagcgcttgtttcgg

SEQ ID NO: 3585 - DNA, 403 bp, Bos taurus
  Clone ID: 16-LIB2809-031-Q1-E1-D7
accggttggagggcacccctcaatgtagtctgagatactgcacagaccctgccaccgcggaggacaagtgtgacaggacctgccgccccgaggaggagtgtcgcctcgtcagtggcacctggggctgcttctgcagacaggacctcaacgtctccgatgtgcacagtttgcagcctcagctggactgtggggacacagagatcaaagtgtcactggacaggtgtctgctgggaagtctgggtttcggagatgaggtccatgcctacctgcgggacgggaactggaactgcagcagcctcaggcagagtgaagaggagaactggatatctgtgaccaatcccacccaggctggtgcctgcggaaacattctggagagaaaccagacccatgccatccacattaa

SEQ ID NO: 3586 - DNA, 279 bp, Bos taurus
  Clone ID: 16-LIB3057-001-Q1-K1-D7
gcctgattgagaggagcgcggccttttcctctccccgacatgtcgtgtgctcgtgcactgatatcagtgtactccgaaaagggggagtcctctggcaaaaatgtcactttgcctgctgtgttcaaggctcccattcgacccgatattgttaactctgttcacaccaacttgcgcaaaaacatcagacagccctatgctgtcagcgaattagcaggtcatcaaaccagtgctgagtcttgaggtaccggcagagctgtggctcgaattcccagggttcga

SEQ ID NO: 3587 - DNA, 364 bp, Bos taurus
  Clone ID: 16-LIB3057-003-Q1-K1-D11
cggacgcgtgggctggattgtgttcgtttcgacgtccgcgaagatgcagctgaaaggaatggagattaaccccgagatgctgaacaaagtgctgacccggctgggggtcgccggccagtggcgcttcgaggatgttctgggactggaggaggagtctctgggctcggtgccagcgccggcctgcgcgctgctgctgctctttccgctcacggcgcagcatgagaacttcaggaaaaaacaaattgaagagctgaagggacaagaagtcagtcccaaggtgtacttcatgaagcagaccattggcaactcctgtggaaccatcggactcattcatgcagtggccaataatcaagacaaactggag

SEQ ID NO: 3588 - DNA, 332 bp, Bos taurus
  Clone ID: 16-LIB3057-003-Q1-K1-D7
gtgacatcgtctttaaaccctgcgtggcaatccctgacgcaccgccgtgatgcccagggaagacagggcgacctggaagtccaactacttccttaagatcatccaacttctggatgattatccaaaatgcttcattgtgggagcagacaacgtgggctccaagcagatgcagcagatccgcatgtcccttcgcgggaaggctgtggtgctgatgggcaagaacacgatgatgctcaaggccatccgagggcatctggaaaacaacccggctctggagaaactgttgccttacattcgggggaatgtgggcttcgtgttcaccaaggaggacc

SEQ ID NO: 3589 - DNA, 397 bp, Bos taurus
  Clone ID: 16-LIB3057-005-Q1-K1-D11
gcagaggctgctggcccgagctgagaagaaagccgcgggcaaaggcgatgtccccaccaagaggccacctgtccttcgagcaggggtcaacacggtcaccaccctggtggagaacaagaaggctcagctggtggtgatcgctcacgacgtggatcccattgagctcgtggtcttcctgcctgccctgtgccgcaagatgggggttccctactgcatcatcaagggcaaggcccggctggggcgcctggtgcacaggaagacgtgcaccaccgtagccttcacacaagtcaactcggaggacaagagtgccctggctaagctggtggaagccatcaggaccaattacaacgacagatacgatgagatccgtcgtcactggggaagcaacgtcctgggg

SEQ ID NO: 3590 - DNA, 454 bp, Bos taurus
  unsure (317),(415),(421): unsure at all n locations; Clone ID: 16-LIB3057-005-Q1-K1-D7
gtttcttgaaatcatcaccaccatggacagcaaaggttcgtcgcagaaagggtcccgcctgctcctgctgctggtggtgtcaaatctactcttgtgccagggtgtggtctccacccccgtctgtcccaatgggcctggcaactgccaggtatcccttcgagacctgtttgaccgggcagtcatggtgtcccactacatccatgacctctcctcggaaatgttcaacgaatttgataaacggtatgcccagggcaaagggttcattaccatggccctcaacagctgccatacctcctcccttcctacccctgaagatnaagaacaagcccaacagacccaccatgaagtccttatgagcttgattcttgggttgctgcgctcctggaatgaccctctctatcacctagtcaccgangtgcgnggtatgaaaggagccccagatgctatcctatcg

SEQ ID NO: 3591 - DNA, 384 bp, Bos taurus
  unsure (373): unsure at all n locations; Clone ID: 16-LIB3057-007-Q1-K1-D7
gtttgccgccgggacacaggtgtcgtgaaaaccaccgttaaacctaagccaaaatgggaaaggagaagacccacatcaacatcgttgtcattgggcacgtagattcagggaagtctaccacgactggccatctgatctataaatgtggcgggatcgacaagagaacaattgaaaagttcgagaaggaggctgccgagatgggaaagggctccttcaaatatgcctgggtcttggacaaacttaaagctgaacgtgagcgtggtatcaccattgatatctccctgtggaaatttgagaccagcaagtactatgttaccatcattgatgccccaggacacagagacttcatcaaaaacatgattacaggcacatnccaggctgact

SEQ ID NO: 3592 - DNA, 385 bp, Bos taurus
  Clone ID: 16-LIB3057-008-Q1-K1-D11
aatggggtggtctggacctgtgacagtccctgcagtgaagtcagtacagactgcgggggaccctgctcatttgaaattctgacatcagctggccagtcgccctctccatccctcctccctctactctgacacagcatttagcacctgaatcttcgcttctcttgcagggaccctccattccccatatccaggaaaatgtgatgagctacaggtttcagcttctagatcaccacttaacgttctagctacaagtggaaaatccaagggcagcaaggtccatcagaaggatgtctgaagaaatggcagaccaaagagaagaagctggggaaaaagaggcatgcagagaccagatcaaagaatccgacaaagaagaggaaccaccagc

SEQ ID NO: 3593 - DNA, 205 bp, Bos taurus
  Clone ID: 16-LIB3057-008-Q1-K1-D7
gcactgcataaagactttatggctgcattattgtaaaacagattcaagatctacagtaagagtgaaatattcacacaaagatttgcattaatgaagactacacagaaaaccttcctgaggatttgtgtggacctgatacttagcaaatttttgtgctttacattcttatggaaaagtcaatttaaaaatgatcatttgtaagacc

SEQ ID NO: 3594 - DNA, 425 bp, Bos taurus
  Clone ID: 16-LIB3057-009-Q1-K1-D11
cggacgcgtgggtgaagtccttatgagcttgattcttgggttgctgcgctcctggaatgaccctctctatcacctagtcaccgaggtgcggggtatgaaaggagccccagatgctatcctatcgagggccatagagattgaggaagaaaacaaacgacttctggaaggcatggagatgatatttggccaggttattcctggagccaaagagactgagccctaccctgtgtggtcaggactcccgtccctgcaaactaaggatgaagatgcacgttattccgctttttataacctgctccactgcctgcgcagggattcaagcaagattgacacttaccttaagctcctgaattgcagaatcatctacaacaacaactgctaagcccacattcatcctatccatttctgagatggttcttaatgat

SEQ ID NO: 3595 - DNA, 397 bp, Bos taurus
  Clone ID: 16-LIB3057-009-Q1-K1-D7
cggacgcgtgggccgcctttccggccgcgccccgtgtcccgggacgaagggctctccgcaccggaccccggtcccgacgcgcggcgggggcgcgccgcgccgcgccccgggggacgcgggcgacggcccgccggcggggacggcgggggaccggctatccgaggccaaccgaggctcccgcggcgctgccgtatcgttccgcctgggcgggattctgacttagaggcgttcagtcataatcccacagatggtagcttcgccccattggctcctcagccaagcacatacaccaaatgtctgaacctgcggttcctctcgtactgagcaggattaccatggcaacaacacatcatcagtagggtaaaactaacctgtctcacgacggtctaaacccagc

SEQ ID NO: 3596 - DNA, 373 bp, Bos taurus
  Clone ID: 16-LIB3057-011-Q1-K1-D7
tgaaaattttgttcatactgtatttatcaagtatgatgaaaagcaatagatatatattcttttattatgttaagttatgattgccattattaatcggcaaaatgtggagtgtatgttcttttcacagtaatatatgccttttgtaacttcacatggttattttattgtaaatgagtaaaaaaatcttaatttaagagattgtatgtaatatttatttcattaatttctttccttgtttacgtaaattttgaaagattgcatgatttctttacagaaatctatcttgatgctggggaagtagtttgaggaatatcctacgagtttttcttaaaatggataatgggtggaggccaatccactttaaaaggaaaaa

SEQ ID NO: 3597 - DNA, 369 bp, Bos taurus
  Clone ID: 16-LIB3057-012-Q1-K1-D11
tggacgcgtggggttctagatcgcgagcggccgccctttttttttttttttaaagtgggatacaacaaaatgtttaatgagcaaattcgtcttagcaaatatgaaactgccacagagaggaggggagggacaggggccacggggtggggggcaagtccgggagactagagagaatcgtctacgtaagaaccaggacaccagggtgaggaccaaaggccaggaagacgggagctgtggtcctgagagggaggggagggtaccgggccggacaacaggattcaaaagagtttggccataaaatataaacacgctatgtttctacggtggggaagggtaagagaaaaggggtatccgggagaagactgcttc

SEQ ID NO: 3598 - DNA, 430 bp, Bos taurus
  Clone ID: 16-LIB3057-013-Q1-K1-D11
gcagctccctcgctgcgatctattgaaagtcagccctcgacacaagggtttgtctacgaatggtttagcaccaggcgccccacgaacgtgcggtgcgtgacgggcgagggggcggccgactttccggccgcgccccgtgtcccgggacgaagggctctccgcaccggaccccggtcccgacgcgcggcgggggcgcgccgcgccgcgccccgggggacgcgggcgacggcccgccggcggggacggcggcggaccggctatccgaggccaaccgaggctcccgcggcgctgccgtatcgttccgactgagcgggattctgacttagaggcgttcagtcataatcccacagatggtagcttcgccccattggttcctagccaagcacatacaccaaatgtctgaacctgcggttcctattgtacttgagca

SEQ ID NO: 3599 - DNA, 409 bp, Bos taurus
  Clone ID: 16-LIB3057-013-Q1-K1-D7
gtgggggtatttttgtacaccaacaaacttgactgcaatgaaaaggacaagttcggggaaatacaccacatgaaacatcggaaggtttgggtcaggggagtctaaaatgtcagttgctttaacataaaagaaattaaagcagctagaaaaaggcttcttaagacacaccatggcctgtcaagattgcctttgcctgtccattttccttaaactgctgccagaaaaaaaacgtttggccagagtgtcactatcaaggggaccagctgacttgtgtgatagcctgtgtgataaaagacagctttggctgcatcttgtacctgacctggcctaagatttctgtttacacaagacttttcagcagttcaactttaagttgcagttgagacagctgccactcttgagggttctc

SEQ ID NO: 3600 - DNA, 275 bp, Bos taurus
  Clone ID: 16-LIB3057-014-Q1-K1-D7
accgacgggccacaggtgtcgtgaaaaccaccgttaaacctaagcctaactgggaatggagaagacccacataatcatcaccgtcattgggcacgtagattcacggaagtctaccaccactggccatctgatctataaatgtggcagtatcgaccagagacctactgaaacagttcgagaaggatgctatcaaaatagcaaagggctccatccaatattcctgagtcttgcacaaacttaaagcttaacgtgagcgtggcatcaccattgatctc

SEQ ID NO: 3601 - DNA, 449 bp, Bos taurus
  unsure (398)...(399): unsure at all n locations; Clone ID: 16-LIB3057-015-Q1-K1-D7
ctgggccgtctccatcgctgcaagcaatgacagtgcccagggctctgatgtgggtctgacggttcctaaagtgtgagacaactgccttgtggggactgagtgatgctgcatcccactatgtgacttcagatcaccggacccctctttctgcacctgcatctgaatgtgtctgtgttcctattagcataccatgaggagttggggagactggtcacccctgcccaccgcgccccttccccaccctgacctgtgttcttctccctgatccactgtcctgttccagcagagacggggctgggccgtctccatcgctgtctttgcttcatatgcactgagtaatgatgtcttatttcctctttgaaaataaaatctgtatatatatgaaaaaaaaaaaaaannataataaaattattaaaataatattttttttatattttttttttattttt

SEQ ID NO: 3602 - DNA, 415 bp, Bos taurus
  Clone ID: 16-LIB3057-016-Q1-K1-D11
cttgaaatcatcaccaccatggacagcaaaggttcgtcgcagaaagggtcccgcctgcgcctgctgctggtggtgtcaaatctactcttgtgccagggtgtggtctccacccccgtctgtcccaatgggcctggcaactgccaggtatcccttcgagacctgtttgaccgggcagtcatggtgtcccactacatccatgacctctactcggaaatgttcaacgaatttgataaactgtatgcccagggcaaagggttcattaccatggccctcaacagctgccatacctactcccttcctacccctgaaggataagaacaagcccaacagacccaccatgaagtccttatgagcttgattcttgagttgctgcgctcctggaatgaccctctgtatcacctactcaccgacgtac

SEQ ID NO: 3603 - DNA, 297 bp, Bos taurus
  Clone ID: 16-LIB3057-017-Q1-K1-D7
caagccttcggccaggttcccctggaaccaattcaggagttcccttttccagctgttgcagggggtgaagttctgccacacgcagggggtcatccatcgagacttgaagccccagaatctgctcatcagtgagttggggaccatcaagctggctgactttggactggctcgagccttcggggtgcctttgcgcacctacacccatgaggtggtgacactctggtatcgtgcccctgagatcctcttgggctgcaagttctactccacggctgttgatatctggagcatcggttgcat

SEQ ID NO: 3604 - DNA, 230 bp, Bos taurus
  Clone ID: 16-LIB3057-018-Q1-K1-D7
aggcgatgagtttcgagtggccttggcattatcgcttcccacctttctttacgtgtcaggctaacttatacactcggcagaagcagctcgccgcctggtgctcgctactactgaccttatgtcgcctgcacaaacagtccagcatgacggtcatagaagcccaagaaagcccgctcttcaacatcttttatctccagcataagctgcccgtgtaataaatccagtttacc

SEQ ID NO: 3605 - DNA, 373 bp, Bos taurus
  Clone ID: 16-LIB3057-019-Q1-K1-D11
taaggagactggctgaagctctgcccaaacaatctgtggatggaaaagcaccagttgccactggagaggaggatgatgatgaagttccagatcttgtggagaattttgatgaggcttccaagaatgaagcaaactgaattgagttaacttctgaagaagataaatcttgaagaagttactgggagctgctattttatattatgactgctttttaaaattttgtttatggatctgataaaatctagatctctaatatttttaagcctaagcccctggacactgcagctcttttcagtttttgcttatatacaattcattctttgcagctaatgaagctgaagaagcctaagaataaagtttgaggacaagattt

SEQ ID NO: 3606 - DNA, 375 bp, Bos taurus
  Clone ID: 16-LIB3057-019-Q1-K1-D7
tttagtattctctatgtagtgccaagtaggcaaaagctcactcatgttcttatagcagcaattattggagctgtacagattgccataatagtagcaattgtcatgtgcataaccagaaaatgccctaaaaataatagaggacgacgacagaagcaaaacctaggtcattttacttcagatacgtcatccagaatggtttgaactggtgacttttatatgtacactgaccatgtgatgtacatttattatgtctttttttaaagaatggaaatatttatttcagaggccttatttttggacatttttagtgtagtactgttggctcggatttagaatatttcaggcttcaaacagtttttgggaactgttttgggg

SEQ ID NO: 3607 - DNA, 303 bp, Bos taurus
  Clone ID: 16-LIB3057-020-Q1-K1-D7
cggacgcgtgggaaagaattgggtgaccacataaccaacctgcgcaagatgggggctcggggatctggcatggcagagtacctctttgacaagcacaccctgggacacagtgagagctaagcctcaggctggtttcccacagccacaggggtgacttcccacagccacaggggtgacttccctggtcaccaaggcagtgcatgcatatttgggttaccttcatcttttctataagttgtaacaaaacatctacttaagttctttctttagtaccattccttcaaataaagtaatttggtaccc

SEQ ID NO: 3608 - DNA, 422 bp, Bos taurus
  Clone ID: 16-LIB3057-022-Q1-K1-D7
cgagcggccgcccttttttttttttttttttttttttttttttttttttttgtcaaatgtttaaaattttaataagattttaaaaacatcatgactttgaactgaaaaacatacatgtttagcacacaaatattgtaatatgaatcaactccaactccacatgaaaacatgtgactcaaattacagttttagaagttagtaattcacatttaaccaagttagcgccttgctgaattcagctgtggtaaaaaagagacttagtgcatattgtaatggcacaatgtgcttttgtaccattttgttggtatttttcaccttattaaacaagatcaagttcttgaaagttggtagatagcggctaacttcctatgacatgtgaaatttccaatggtaacagatacattttgtaacaaaacactttt

SEQ ID NO: 3609 - DNA, 343 bp, Bos taurus
  Clone ID: 16-LIB3057-023-Q1-K1-D11
tttggctccaggaataacctggccaaagagactgagccctaccctgtgtggtcaggacgcccgtggctgcaaactaaggatgaagatgcacgttattccgctttttataacctgctccactgcctgcgcagggattcaagcaagattgacacttaccttaagctcctgaattgcagaatcatctacaacaacaactgctaagcccacattcatcctatccatttctgagatggttcttaatgatccattccctggcaaacttctctgagctttatagctttgtaatgcatgcttggctctaatgggtttcatcttaaataaaaacagactctgtagcgatgtc

SEQ ID NO: 3610 - DNA, 204 bp, Bos taurus
  Clone ID: 16-LIB3057-024-Q1-K1-D7
gtcaaaatcaaaattgtttctcaccgtccttgaagcctcaagaatgagcattgattacatgaaaaagtaatattaaacttctgtaccaactcgagttcggaaaaacaagaagaagaccaaaggaccagattcttccaacaaacttcccctggtgacgccttaaactcagtgcccgttaaaactgcttaaactagaaagaaataa

SEQ ID NO: 3611 - DNA, 408 bp, Bos taurus
  Clone ID: 16-LIB3057-025-Q1-K1-D11
cgagaagctcaacgggcaacttttaagttctgatcaactgaagcagctcttaggggaagctcattttcaacttgatgcggccaaaagtgaaacccagaaacaaagcgactagcttgccctgatcatgcatcaccttagtcagatgaagagccatgtccaggatggttacttggcttaagccccccgaacagaccaagaccacgcccaactgaatactcatctgcaacggactgaagcccttctgctggacgaacaaacccgtctacagaaactcacagccgattttgaagatgctcagctcgtgacgagtcatcttcacgcggactttgaaaatctccgttgcaccaacaccctttggtcttcgcatgtagatgaagctgcacaacttaatgacaagctccagaaaga

SEQ ID NO: 3612 - DNA, 384 bp, Bos taurus
  Clone ID: 16-LIB3057-025-Q1-K1-D7
cggacgcgtggggctctcaggagctcactggatggaccagcacttccgcacaacgcccgtggagaagaacgcccccgtgctgctggctctgctgggcatatggtacatcaactgctttgggtgtgagacgcacgccatgctgccctatgatcagtacctgcaccgctttgctgcctacttccagcagggtgacatggagtccaatgggaagtacatcaccaagtctggcacccgcgtgaactaccagacgggccccattgtgtggggggagccagggaccaatggccagcacgccttctaccagctcatccaccaaggtaccaagatgataccctgcgacttcctcatcccggtccagagccagcaccccataaggaacggttt

SEQ ID NO: 3613 - DNA, 418 bp, Bos taurus
  Clone ID: 16-LIB3058-001-Q1-K1-D11
cgactccctatccactccactactaattttaaccatatggctcctccctctaatactaatagctagccaacatcatctatcaaaagaaaacctaacccgaaaaaaactatttattactatgctgatctcactacaactattcctaattataacctttaccgccatggaactaatcttattttatattctatttgaagcaacactagtcccaacactcattattattacccgatgaggaaaccaaatagaacgcctaaacgccggactctatttcctattctatacactagctggctccctacccctattagtcgcactaatttatatccaaaacacagtaggatccctaaatttcctaatattacagtactgagtacaacctgttcataactcttgatctaatgtcttcatatgacta

SEQ ID NO: 3614 - DNA, 396 bp, Bos taurus
  Clone ID: 16-LIB3058-001-Q1-K1-D7
actgggagggcgctttcagatcctgatcctgagtcccttcatcatcggtgtgtactgcggcctgaccacttgtgttgtgcccacttacacatgatggagtgaaagtttgcacaatgaaaaatggcattgctttaacggcctcgtgtttggggagtcctgtgtatgtgttcagcattctcaactgctgagtgtcttttggttttattatgttttttattttggttgttttcttatgatatttcttatttttattttatcttttttatttttttttgttcttttttttatattttaatttttttatattttattttttgtttattttattatatttgttataatttattatgtttttattttctattttatgtttttttattattatttttattatat

SEQ ID NO: 3615 - DNA, 331 bp, Bos taurus
  Clone ID: 16-LIB3058-002-Q1-K1-D7
ccacacgagatttctgttctcgttgagctcatcttaggacacctgcgttatcttttaacagatgtgccgccccagccaaactccccacctgacaatgtcttccgcccggatcggcccggcgaggccgggccttggagccaaaaggaggggcggtgccccgcttccgacccacggaataagtaaaataacgttaaaagtagtggtatttcacttgcgcccggaggctcccacttatcctacacctctcaagtcatttcacaaagtcggactagagtcaagctcaacagggtcttctttccccgctgattccgccaagcccgttcccttggct

SEQ ID NO: 3616 - DNA, 430 bp, Bos taurus
  Clone ID: 16-LIB3058-003-Q1-K1-D7
gttgcatctggccttactgatgacaacagctttgtctttgtctcctgcaacaaaagcagactatacccatctgtgggataacaattctactgtgttggatccagatattcacaacaagacggacagaagccaaaatgaaaactttaacgcagaccctaaaactcctgaagcagataaacaagataattctacaaacatgcctgaaacagaaacatcatctcacatcacgtttttaactcctaaatctgaactggagctctatgtatcttctgttgtcaggaacagtccaccaacagtacagagcattgaaaacacaagcataagtcacagtgaaactatcaaaaagggtgtctgtgaggaggacaacaacaaaatggccatgctagtctgcttaatcataattgccgtgctctatcttatctgtaccatt

SEQ ID NO: 3617 - DNA, 133 bp, Bos taurus
  Clone ID: 16-LIB3058-004-Q1-K1-D7
gcctaacaagcctctcctagggcctttgtggagcaagccgagcaacgttggagaacagagttaagtggaatatttttgtacccgatgtttacagatgctgttgggaagttatcaataaagagactctgttact

SEQ ID NO: 3618 - DNA, 400 bp, Bos taurus
  Clone ID: 16-LIB3058-006-Q1-K1-D7
cggacgcgtgggctgagcaccatgaagactttgaatttatttcaggaacacgaatgcgaaaacttgcccgcgaaggccagaaacctcctgaaggtttcatggctcccaaggcctgggatgtgctgatggagtactacaaatccttggagaaggcttaagctgttcacccagtcagttcacctttgacaccacactgagtagcaagaggttactgttggcatttctctgtgatggtatctgtccagacatgcatccccaaaacagacccttttcctgaagtattaacagcatcagtttggtctgccgtatgagttctgttctgaactagtgtaatacactcctggttttaatgtatcttttccaacttattatagttatattcctacagtacagttttaaa

SEQ ID NO: 3619 - DNA, 404 bp, Bos taurus
  Clone ID: 16-LIB3058-008-Q1-K1-D7
caagcccttgacctcttacaggagctttgtatgccctcttaataacatccggcctaaccatgtgatttcactataactcaatgaccctgctaataattggcctaacaacaaatatactaacaatataccaatgatgacgagatgttatccgagaaagcacctttcaagggcaccataccccagctgtccaaaaaggcctccgttatggaataattctttgtattatctccgaagtactattctttaccggatttttctgagctttctaccactcaagcctcgcccccacccctgaactaggcggctgctgacccccaacaggcattcacccactaaaccccctagaagtcccactgctcaacacctatgtcctattggcttacggagtttctattacctgagcc

SEQ ID NO: 3620 - DNA, 375 bp, Bos taurus
  Clone ID: 16-LIB3058-009-Q1-K1-D7
gacacagcatgagtgctgtgtgaacgctacctgactatgctgatccgagcgggactttattacattggtcaaatatgtctctatatgaagagcgctgacgtgctaattgcatatgatgtgcaagtataccggatcttttgcacagcgcgtccatgtcttgcccctgaaatgtcatttattcagctttacggaacaggtcggcttgtgctgatccatgaggaattgtttcaggtccttcatcctaaaactggtgtaacaggaccttatgtgcttggaactgggcttatcttatatttactctccaaagaaatatacatgataactccagagaccatctgtgccatatcagcaatagggatccttgtctatatagtt

SEQ ID NO: 3621 - DNA, 393 bp, Bos taurus
  Clone ID: 16-LIB3058-011-Q1-K1-D7
caccatcttccaggagcgagatcctgccaacatcaagtggggtgatgctggtgctgagtatgtggtggagtccactggggtcttcactaccatggagaaggctggggctcacttgaagggtggcgccaagagggtcatcatctctgcaccttctgccgatgcccccatgtttgtgatgggcgtgaaccacgagaagtataacaacaccctcaagattgtcagcaatgcctcctgcaccaccaactgcttggcccccctggccaaggtcatccatgaccactttggcatcgtggagggacttatgaccactgtccacgccatcactgccacccagaagactgtggatggcccctccgggaagctgtggcgtgacggccgatgggctggccagaa

SEQ ID NO: 3622 - DNA, 430 bp, Bos taurus
  unsure (382),(413): unsure at all n locations; Clone ID: 16-LIB3058-012-Q1-K1-D11
ggaatatatgtgggggaccccaacccctacatttcaactctaccccatgcctatcagtcctgctttgtgggtgattgatctccacaggctgctccacctttaaacttctgtaaactacactacaccactgagtcccagccctctcccggtgcggggagaaggggagcaggactagtcctgagcctggctggcctggcagggtgacggggccctggtggagcgcagtattccctaaagctgtgggtggtttcggtgatacgtctgtctgacaatcgtcctccccttgtacatgcctggtctgtgtttagcttttcctagtattgtgaggtttcaaataggggttccatgtaaatattctttctgctactgaaatgccagcccncggattgtgcatcctccccacgaagggtttntgcctttacgctaacac

SEQ ID NO: 3623 - DNA, 362 bp, Bos taurus
  Clone ID: 16-LIB3058-012-Q1-K1-D7
ctgacctcgagtcactgttgccatgatttcccaggtgtttgcttcatgttctcgctttgagaaccacttccctttgttttctttccttcaccaccttcgtatgaggtaatggcaccttgccattggatggttggactctgccctttccttcgtgcagagttcctttcctataactattttcagttgggaaatcttaaactcaactgataggaaggaaatcagatctaatgtccaaaagaccacattaaaatgtgggtatttttgggggtggggctgggttttcaatcttctctcttctccccatccccccatggggtgtattggagatcaacttccttcacccccccaggtttaaccccccc

SEQ ID NO: 3624 - DNA, 431 bp, Bos taurus
  Clone ID: 16-LIB3058-015-Q1-K1-D7
gttctagatcgcgagcggccgccctttttttttttttttagatctttaagaaagaaatatctgaaaacttgaacacactatcatagataaaaatagcaattctgggaaaagtagggtaaaagcaacagagtcagaaatataaagataatagactacattgtttttctatggaaaagtatacatatgaatggaatatctctaaaaatgagtcaggaaagagtatgaccccagaagcacatcatctatagctttgaaaaatgtacttaaaagaaaaaaataagcatttctacaacacacctatcacaatgactaaaaaaataaactaacaataccaagggttgccaaggacatagaacaatggatgggaacacatacattcctttgatttatctctatttagacttttaaaattttttatttattttttaatt

SEQ ID NO: 3625 - DNA, 216 bp, Bos taurus
  Clone ID: 16-LIB3058-016-Q1-K1-D11
ctgacacatgggcaaccggccgcccttttttttttttttttttttttgcaagggaaagggttatttaattagaggattagcaacattttatccatcacaaagataaactctaccgatggcgacggaagtctctacagtacggttaagggctcagtcaccacacagggagcctacaggacacgaggtgggcacggaccgtgcaataagttacgaagc

SEQ ID NO: 3626 - DNA, 224 bp, Bos taurus
  Clone ID: 16-LIB3058-016-Q1-K1-D7
cttctctgggttgtgttcgtttcgacgtccgcgaagatgcagctcaaaccaatggagattaaccccgagatgctgaacaaagtgctgacccggctgggggtcgccggccagtggcgcttcgaggatgttctgggactggaggatgagtctctgggctcggtgccagcgccggcctgcgcgctgctgctgctctttccgctcacggcgcaccatgagaacttcag

SEQ ID NO: 3627 - DNA, 392 bp, Bos taurus
  Clone ID: 16-LIB3058-017-Q1-K1-D11
acgcatgattcggctatggaggcagagcgtttgactacaaatcggctcacaagggactcaaggggcacgacgcccagggcacgctttacaaaatcttcaagctgggaggacgagacagccgttccgggtccccgatggcaagacgctgaagcccagctacccttccagaaccccgtccccagcttcttaatacaaccgcctcgacgctaaccattgtctaaattcccaagtgcagcatgcatccccccaccctgcccacatgcgcgtcctgcaggctcctggccagcggctcaatggagaagactgtgcagctgtcagctcaccctcgaagatcagcgaggttcctgagggtccagggtgggcgacccttcacgcccacctctgccctggga

SEQ ID NO: 3628 - DNA, 481 bp, Bos taurus
  Clone ID: 16-LIB3058-017-Q1-K1-D7
gttcagcaaatttatcccactcattccactacctgaacgaacaacaaaaccatatcctgctgatattgtagttcagttcaaggatgtatatgcattgatgggccaaaacgtgactttagagtgttttgcacttggcaatcctgttcctgatatccgatggcgaaaagtcctagaaccaatgccaagcacagctgagatcagcacctctggagctgtcctcaagatcttcaatattcagctagaagatgaaggcatatatgaatgcgaggctgagaacaatagaggaaaggataaacaccaggcaagaatttatgttcaagcatttcctgagtgggtggaacacatcaatgacacagaagtggatataggcagtgatctctactggccttgtgtggccacggggaagcccattcctaccatccgatggctgaagaatggatattcgtaccatagaggggaactgatgctgtatgacgtgacc

SEQ ID NO: 3629 - DNA, 461 bp, Bos taurus
  Clone ID: 16-LIB3058-019-Q1-K1-D7
acgcttccagtcgcttaccctggctgggtaaggggtgttccagcgagctccagtgtgcggagcggaatgattacatgttcttatgtctgtggctgaacaatgtgcacagctacgtggaaccaaatgcgaaccggatgttgtatatggccatgtccaagtgtagactcaaaatggattaaagacttaaatgtaagactgaatactgttagtatcctagaagaaaacataggcagaacactctctgacataaatcacagtagtgttttttggttccatctcccaaagcaaaggaaataaaagaaaaacaaatgggacctaattaaatttaacagcttttgtagagcaaagaataccataaacaaaacataagacagcctattgaatatgggagaaaatatttgcaaatgattgttaaaggataaatatccaacatatataaacaactcgtacaactcaacttc

SEQ ID NO: 3630 - DNA, 324 bp, Bos taurus
  Clone ID: 16-LIB3058-020-Q1-K1-D7
aagattttatgctaaaatggtaaaaccctttattgtatgagcttatctaatcctatctttccagtgcttttctgtaatgcattatgtaataagaaaaatacttgtttttaaacagtaatagaaacacactgtaacgtatagtttgtgggttagccaaggctgtccatatttgagccctgggatgagaaacttaatctctgtgaccacagaacggaaactgttgtgccttgatacctggttccagctgctgactgtggttttaggatcttccacagcacgctttctatcttcagctctttggcttattggattcatctttccact

SEQ ID NO: 3631 - DNA, 299 bp, Bos taurus
  Clone ID: 16-LIB3058-021-Q1-K1-D7
cttggccctggtagtgcccccaccaccacccctgttctggtgccggccagggggccgggcatgcagtcctcacctctcagccctcgctggtcaagaccccccaagatctatttattgacttccttgcctggaggaataaaaggctctgccgaaaaaaaaaaaaaaaaaataaaaaaaaaaaaaaaaaaaaaaaaaaaaaaaaagccagaaaataaaatgagacagaaaaaaaactaaataggaaaacaccgtcgtagtagatcacttaatgcaacgcgcatctgattcattggacggcg

SEQ ID NO: 3632 - DNA, 451 bp, Bos taurus
  Clone ID: 16-LIB3058-022-Q1-K1-D7
caaagatgctggaactattgctggtctcaacgtacttcgaatcatcaatgagccaactgctgctgctattgcctatggcttagacaaaaaggttggagcagaaagaaacgtgctgatctttgatttagggggtggcacttttgatgtgtcaatcctcactattgaagatggaatctttgaggtcaaatctacagctggagatactcacttgggtggagaagactttgacatccgcatggttaaccattttattgcggagttcaagcgtaaacacatgatggatatcagtgaaaacaagagggctgtccgtcgcctacgtactgcttgtgagcgtgctaagcgcactctctcttgcaacacccaagccagtattgagattgattccctttatgaaggaatcgacttctatacctctattacccgttcccgatttgaaaaattgaatgctgac

SEQ ID NO: 3633 - DNA, 418 bp, Bos taurus
  Clone ID: 16-LIB3058-024-Q1-K1-D7
gtgacagcggccgcgctcgcactacgtgcccggcgccggcagccagcagccctatggccacgtcccgcctgcagctcgaccttcgcgccgtctactcgggtctcagctacgtggccggcttctacatcttcctagtctggacggaggtctacagacagtctggcaccgacggcatgggagggctcgcaagtgtgctggcgctgtggatgctggtaacgcacgtgatgtacatgcaggattactgcaagacgtgcctcaaggagctgctcggctacttcttcgtggacgtgctgatctaggacgtctccgtcgacacgttctgaaccttgttggtgctggccatcactggacaccagagcctcacagaccctaacatctactacctatcttgtgtacggagcatcattgccttcaagtg

SEQ ID NO: 3634 - DNA, 430 bp, Bos taurus
  unsure (367),(376): unsure at all n locations; Clone ID: 16-LIB3058-025-Q1-K1-D7
aagagagaagacaaagagtattttgcttctacaggtagaatagcagcagaatacactggtggttagaaatgtcaatcaaactaacttttccataaagattcccaagactcttttaaaaaaaatatttatttatttatttgtctatattgggtctttgtcactgcgtggacttttctctggttgtggtgaggaggtgctacattcaatttgcaatgcccaagcctctcactgtagtggcttctcttgttggggagtggagggtctagggcacacaggcttcagcagtggcaacacataggctcagtaattatggttccccagggcttccctggtagctcagatggtaaagcatctgactgcgatgcangagacctgngttcgatccctgggttgggaagatcccctggagaaggaaatggcaacccactcc

SEQ ID NO: 3635 - DNA, 375 bp, Bos taurus
  Clone ID: 16-LIB3058-026-Q1-K1-D11
cttccagtggatgaagaaaacagctgtgttagtcaacatcagcagaggagacgtgctgggccaggaggacctgtaccaggccctggccagctgtcagattgcagctgccgtactggacgtgacgaccccagaaccactgcctaccaaccaccctctgctgaccctgaagaactgagtgatcctgcctaacattggcagtgccacccactggacccgaaacatcatgtctgtctcgacagctgacaacctgctatctggcctgccatgggagccgatacccacttaacgtaagctatatccacacgggtactctgggacccagaggaaagtgtgatctgttcccattctgtggagggaagactgctactaacagat

SEQ ID NO: 3636 - DNA, 329 bp, Bos taurus
  Clone ID: 16-LIB3058-027-Q1-K1-D7
gcaggacccccgagggcgcggcaccctgctctccggtcccgagggagccagaggctgggacctcggccaacgggtgggcgggaggctgccagccgtggcgggacatcgtgttcatgaagacgcacaggacggccagcagcacgctgctcaacatgctgttacgcttcggcacagaatcacgggctcaagttcggcttaccgagcggacgcagcgacttcaactaccgcgccttattcgcgcgcagcctgttgcactactactggcccggggcctgcttgaacatcatctgcaaccacatgcgcttacactactacaaggtgcggggcct

SEQ ID NO: 3637 - DNA, 415 bp, Bos taurus
  Clone ID: 16-LIB3058-028-Q1-K1-D11
ggagctacaggcaaggaccactgacatgtctgagttagagaaggccgtggtggccctgattgacgtcttgcatcagtattccgggagggaaggtgacaagcacaagctgaagaagtcagaactcaaggagctcatcaacaatgaactttctcattttttagaggaaatcaaagagcaggaggttgtggacaaagtcatggagacactggacagtgatggggacggcgaatgtgacttccaggaatttatggctttcgttgccatgattaccactgcctgccacgagttcttcgaacacgaataaggaaaagaaagcagcggagctgtttctgcagcagagacggagtttgaccaagggaacacatgcagggcttgcagggctgtaggagctgagctttccgtgttgtagctaatt

SEQ ID NO: 3638 - DNA, 277 bp, Bos taurus
  Clone ID: 16-LIB3058-028-Q1-K1-D7
cgagcggccgccctttttttttttttttggggagtcaagtcatttatttgtgttttggatgaaaacaaaattgagggagggtgaacaagaggagaactagctggctgctcagatttttctgtagtcggaatggggcagccggccttgagacagaaattgggtccccgcagcaacgtggcaatggcgactggacctaaagccgtttactgaagcaccgttttctactaaatcttaaaccaagctaagcaagttaaggttacactggaaagcaacactg

SEQ ID NO: 3639 - DNA, 429 bp, Bos taurus
  Clone ID: 16-LIB3058-030-Q1-K1-D11
ggccagacatttaactgtgggattggggctgccctcgggtatcagaggacctggtgaagcagactctgcaggatattgagcagcaccaggaagaagcctgcgtgatcggcagagtggttgcatgtcccgagggttctcctcgtgtgaaagtcgagcatctgattgaaaccatgcaaataaatggatcagtattggagaatggaaccctgagaaatcatttctctgttcaaccaaaaaaggcaagagtagctgtcttaatttctgggacaggatcgaacctccaagctctcatagacagcactagggagccaagtagcttggcacacattgtcattgtgatctccaacaaagctgcagtggctggcttagataaagcagaaaaagccgggattcccacgagagtaattaatcataaattatataaaaatc

SEQ ID NO: 3640 - DNA, 390 bp, Bos taurus
  unsure (1): unsure at all n locations; Clone ID: 16-LIB3058-032-Q1-K1-D11
ngctgtgctgggcagtgggcagagtgtgtgactgagcttaggctcattccattcaggggccctgtggacacttgacgcagtgtttcagcgtgggcacatgcacccagtttcttaaattggatcttttgttttcttattttattgtttttttttattattctttattttttttattttatattttttttttattatttttttttttatttttttattttatttatttattttatttatttttttttttttttttctttattttttttttttttttttttttttttttttttttatatttttgttttttattttttattttttttttttttttgttttatttttttttctatttattcttttttttatttttttttttttttttatttttta

SEQ ID NO: 3641 - DNA, 405 bp, Bos taurus
  Clone ID: 16-LIB3058-032-Q1-K1-D7
gaaagcggttatagtgaaatatttctattgccactctggacatcatacactgtttccgagacaggctgacgtctctgacatccctgcacacctgaccaactgtgtccggcccgacgtccgcgtttctccgagtttcagtcagagctgtttggcctacaaaaatgatatacagatgtcctatggattcctctttcctccctatctgagctcgtccccagaagctaaatatgatgcattccttgttaccatatatggttccaatgtatccttgcttttaaacgcatgtttgatttatttccttagtgttttttgtgtattattttgctttatttttttttttggttatttttggatttttttttatttgtttgttgtttaacttttttttttttttttttttttctt

SEQ ID NO: 3642 - DNA, 444 bp, Bos taurus
  unsure (112),(159),(173),(402),(434): unsure at all n locations; Clone ID: 16-LIB3058-034-Q1-K1-D7
tcgcccaaatgtgagccggttccagcgtacctttgacacttatgatccctgagttcagctgaagagcgcggtcctccaacttccatcggcacggtccctcggacagcctccnttctcacagcccagcgtcaagggaagcggctgagggccttcctgggncttttcctatgcancctaccatggacctctttcctctagaaccggtcttagggttcggttgcaaacggattcttttagttaactcttttggcagaagcatgccagctgacaaggacagtcttaaaaggagaatttgcacaatccctggaagcttgcacatcttggcagtcttattgcacactgtttgctggaagcttttcgaagagcacatcctcctcagtgagcttgtgagattttcctctntattcttccttccaatgtggtgctatctctgnaatgagcagt

SEQ ID NO: 3643 - DNA, 393 bp, Bos taurus
  Clone ID: 16-LIB3058-035-Q1-K1-D7
atcgcgagcggccgccctttttttttttttttttttacataggattttattttgcactgctatagcaatttcattatagaccaagggagataaaagaaaaagggtaaaaccaccacactgagtaaattactaaagcttttctacatttaacaggattttccatctggtagatttattgtcatatccccttcaaaacagacaagatgcttaccatattttaaagattataggttgccactgaaagaaaaattttacacagttcactgtacatcaaggttgaaaaactgtcctgcatgaaaaatagaaatcatgtgaataaaaggaaaaggaaacattattgttgaaagaaagattaaagtcctcgaaacgtgccatctacacgaggacgctcga

SEQ ID NO: 3644 - DNA, 432 bp, Bos taurus
  unsure (354): unsure at all n locations; Clone ID: 16-LIB3058-036-Q1-K1-D7
aagtaactccttgaaggggcttctttttaatcggaggcagttcccaccctccccatcggccccgaagatcccctcctggcagatcccggtcaagtcgccctcgccctccagccccgcggcggtgaaccaccatagcagcagcgacatctcgcccgtcagcaacgagtccacatcgtcctcgcccgtgaaggaaggccacagccccgagggctccacagccacgtaccacctgctgggcccccaggaggagggcgagggggtggtagacgtcaagggccaggtgaggatggaggtgcagggcgaggaggagaagagggaggacgaggaagatggagaggacgagatgtgagccgngtggacgaggaggactgcctgggggtgcagagggaggaccgccggggtggggacgggcagatcaacgagcaggtggag

SEQ ID NO: 3645 - DNA, 387 bp, Bos taurus
  Clone ID: 16-LIB3058-038-Q1-K1-D7
gagaggagacgggtcacctcagccattcttcgctcctatgtctcctcctgagagatggtggtgggcggccgccgtctgggtcccggcacccgcctgtccctggctcgaatgccgcctccactcccagcccgggtggactactacctggccggtgcactcaactccggcttcaaggagacccgggccagcgagagggcagagatgatggacctcaatgaccgcttcgccagctacattgagaaggtgcgcttcctggagcagcagaacaaggcgctggctgccgagctcaaccagctgccggccaaggaacccaccaagctggctgacgtctaccaggcggagctgcgcgagctgcgcctgcggatcgatcaactcactgccaacagc

SEQ ID NO: 3646 - DNA, 167 bp, Bos taurus
  Clone ID: 16-LIB3058-042-Q1-K1-D11
cccacgcgtccggaagccaatggctcctcactccagtactcttgcctggaaaatggcgtggatggaggagtctggtgggctgcagtccatggggtcgctaagagtcaaaaacgactgatcgacttcactctcactgctcactttcatgcattggagaaggaaatggc

SEQ ID NO: 3647 - DNA, 417 bp, Bos taurus
  Clone ID: 16-LIB3058-042-Q1-K1-D7
tgccactgcccctggctgctgtctgtgttgcctcccactggactgtttagagggtgggcagtggctggcaggaatcacagagtgacagcagggttggttgtaatgaactcagcagcagagttcattcaacctgtactcttcagatttccaaataaatacccatttaattagaaaaagcagctgagttggggacttcatattaaacttgtagttttattcaggtttgattttaacaaatgtgtcggggagagagcccgaaggaaaggatgaagcccatgggagcagggccctcccagatgcctgaagagggggcatgtcccctcccctctcctcctcttccctccccatctttagatggggagagacataggcaggggagggggctggtccccagtctgtgggggtggtgcttgggat

SEQ ID NO: 3648 - DNA, 404 bp, Bos taurus
  Clone ID: 16-LIB3058-043-Q1-K1-D7
tgtttggattgatatcatgaaatcctctttctggaaattgggcttgattgttctttggtttatatcaatacatgttttcctaaagaagaaacacaaaactcattccaggtagctaggcattaactaagaaaaaaaagcacaaagttattagagctcttgaggaaatcggttgtcccagtgcccccagtcagaccactgtcccctcctgctctgtaaataatctctcccctctctacccttgaccccttctcataccgcccatatcccaccatggggagtaaagggaccagagtggtatctctggcaccacactagggattatcaggtaataaaagctttgactccctgaaaaaaaaaaaacaaaagccaaaaaaaaaccaaacaaagcaccaaaaacaaacaaa

SEQ ID NO: 3649 - DNA, 379 bp, Bos taurus
  Clone ID: 16-LIB3058-045-Q1-K1-D7
cgacccactgcgtccgccgaaacttacgaattagcatggacactaaccagacgtcgtcatatagaccttctacggtacattaaatgcatcagcgagaccaggtctaatccggaagccgctacaaagcagccaatgcctaaatttatactcatacacactcaagcacagatacatgtattcacaaggcaagccacagctacaataatcactgacgtcatgaaatactatatacacaaccaacgtcacacatataaccgacacatatagtaacacaaactcactcacctagacgaccaataagctctatgccagaatgactttatacaaaaccaagctatctactattgaatcaatgaataaaactgacatcatagaccac

SEQ ID NO: 3650 - DNA, 355 bp, Bos taurus
  Clone ID: 16-LIB3058-046-Q1-K1-D11
tgagtgtgagcactttgcctgttgccttttaccccacttctgttacctgagagggctgctgctgacaggcagggagtctgagcttgaagaatcctggtctgccgcttcaataagctgctggcttgtggggatggacaggttcattagggcctggtagagcagcctggctttgccaaccttgatgctttcatacaacacagccagaagcaggatgaccaacacggaaagggccatgcctgtcaaaggagactgagttacagagcccagccaggcaaacactgctccccttctggcagatttgctgtgtacttggcacatgtggggaaggtcacatctgctcaacatgcctctgaat

SEQ ID NO: 3651 - DNA, 242 bp, Bos taurus
  Clone ID: 16-LIB3058-047-Q1-K1-D11
gttctagatcgcgagcggccgccctttttttttttttttttttttttttttcttattgggttctttttgcaaaatgccccttcctaaccaactgcgatgctgccctggtccttttggctcacacccctttctcctttttcgtccccgcgctcccccacctaagtgctccgtgctgaatgcgtgtgctctctgttcttgtatactcaataaaagggaaataaatgtgtttgatgctgaaccac

SEQ ID NO: 3652 - DNA, 331 bp, Bos taurus
  Clone ID: 16-LIB3058-047-Q1-K1-D7
cggactcgtgggcggacgcgtgggggatgcgaccaccaacaatgcagttcttatactggattgcattaggactggcattatatagcagaagtcaactactgtacaattcttggggttaaccagctttagttaaatggagttttaatttaaattgaagctttgctaattttaagtgttaagcattttgcattaaagtattcatataatggtttgactcagtttattggcattattctctggttgcagagtcaacacacatttcatcagtattaatgggtgtaagagtttacaccacgaagtcattctaaaagcacagaaattcgatgtgtat

SEQ ID NO: 3653 - DNA, 431 bp, Bos taurus
  Clone ID: 16-LIB3058-049-Q1-K1-D11
ctcatgcttatcatatagtaaacctattctccttgacctcttacaggagctttgtctgccctcttaataacatccggcctaaccatgtgatttcactttaactcaatgaccctgctaataattggcctaacaacaaatatactaacaatataccaatgatgacgagatgttatccgagaaagcaccttccaagggcaccataccccagctgtccaaaaaggcctccgttatggaataattctttttattatctccgaagtactattctttaccggatttttctgagctttctaccactcaagcctcgcccccacccctgaactaggcggctgctgacccccaacaggcattcacccactaaaccccctagaagtcccactgctcaacacctctgtcctattggcttccggagtttctattacctgagccca

SEQ ID NO: 3654 - DNA, 403 bp, Bos taurus
  Clone ID: 16-LIB3058-049-Q1-K1-D7
ggggtccatacggcgttgtcttgaattcccgtcgtaacttaaagggaagctttcacaatgtccggagcccttgatgtcctgcaaatgaaggaggaggatgtcctcaaattccttgcagcaggaacccacttaggtggcaccaaccttgacttccaaatggaacagtacatctacaaaaggaaaagtgatggcatctacatcataaatctgaagaggacgtgggagaagcttctgttggccgctcgggccattgtcgccattgaaaacccggctgatgtcagtgtcatatcctccaggaatactggtgcacgagctgtgctgaagattgctgctgccactggagccactactatcgctggtcgcttcactactggaaccttcactaaccagatccaggacgcat

SEQ ID NO: 3655 - DNA, 373 bp, Bos taurus
  Clone ID: 16-LIB3058-053-Q1-K1-D7
cggacgcgtgggcgcgagcggttgccctgtttttttttttttttttttttttttttttgtttttttttttttttttttttttttttttttttttttttttttttttttttttttttttttttttttttttttttttttttttaacgagggtttaaaaaatttttttttgggggggggatgggtggaagaaaaagtttaaagggggtataaaatttcttttgatatttatgttgaggttttgtataatttgatgttaaaggggaggtaaaaagaactagtttaatagtgatccttttaacaccctggggttttttttataggggggtccttgctgtttaaagtctctcataaagcttttaatttttaaaatgtt

SEQ ID NO: 3656 - DNA, 416 bp, Bos taurus
  Clone ID: 16-LIB3058-054-Q1-K1-D11
caaaactggagtgaaaataggaaacagtgctataattctaattcattgtattatcctaaattaagtcaaactgagattacaatagatgtctcaatagatcagaaactggaaagcactatgtaaaatatttgccaaaatacattttatacattttttattttataatttggtctagttaaaatgctcattagctcaatttaatgggtgttactagattcattaagatgtctaaatatgaatatcatttccttagtattgtaatgttgcttgaaatatttgacagaaaacatttctttttagaaaaatgatttttgaattgaagtttgtatgtacaattcaatgcttagtaggtcagtatacattttcatgacatttttcagagtcaatagttttaaatatcttattgttattatatg

SEQ ID NO: 3657 - DNA, 273 bp, Bos taurus
  Clone ID: 16-LIB3058-056-Q1-K1-D7
cggacgcgtgggcagtttttaaaattgttaacctgttgctgacctttttatgttaattcctgtttcaacagctgtttcccttaattcagaatacaacttcttgtgtatgacagtttcccttcacacaccatttttgtgggtgtgtatatatctgacttggggagaattggggggaaaaacatagctttttaatttgtttaagagagactttctgcctgttacgttttgtgcttttaaccaattaaagaagccagtggcatttttagttttaaa

SEQ ID NO: 3658 - DNA, 388 bp, Bos taurus
  Clone ID: 16-LIB34-001-Q1-E1-D7
aatagatcccaaaggccagagagtgaagcttaatgatggccacttcattcctgtcctgggatttggaacctttgcacctcgagaggttcctaagagtgaagctctggaagtcaccaaatttgctatagaggctgggttccgccatattgacagtgctcatttgtaccaaaatgaagagcaggttggccaggccattcgaagcaagattgccgatggcactgtaaagagagaagacattttctacacttcaaagctttggtccacttcccttcgtccagaattggtccgaccagccttggaaaagtcactgaataatcttcaactggactatgtcgatctttatattattcattttccagtggctctgaagccaggggagacacttttc

SEQ ID NO: 3659 - DNA, 203 bp, Bos taurus
  Clone ID: 16-LIB34-002-Q1-E1-D7
acccacgcgtccagcctcaaagccttgctttatctgaaaagcattgaacaactacaggactgggatgggcacagtccagccacgaagagtcaccagaaagggaaaccagtcccttgtatgggggaacttgtgggaaagaaactgccaagctttggaccttatcctgagaatctccataacatcatatcagagcacaagttgac

SEQ ID NO: 3660 - DNA, 370 bp, Bos taurus
  Clone ID: 16-LIB34-003-Q1-E1-D7
acgcaactgtgagtgtctctgtcctagcctctcaacttgctttcctgtgtccaatagcactgcagactccagtactagcctgtccagagcagcaagtgagaggaaacaagccagcattgtaagaggacatgcttctcctccctctctccgtgctgctcctgctcacacagccctggagatccctgggagcagaaatgacaaccttttctcagaaaatactggccaatgcctgtaccctggttatgtgtagccccctggagagtggcttgcctggtcatgatggacaagatgggagagaatgtccccatggagagaacggggatccaggttcaccaggacctgcagggccaacatgaatgcctggatgggt

SEQ ID NO: 3661 - DNA, 424 bp, Bos taurus
  Clone ID: 16-LIB34-004-Q1-E1-D11
gtttcaaattattgcagatacttttctctttaagtggtgggataacttaaatcgtttgaatctgtttgttgaccatgagaaaatacacaggatgtaaaagtggagatgaatggttactaaagtactgaagaatttctatagtcagtaaacttaaaatgaactttaaaaaaatctggttccccactggaactatccttggaaatactgatactttacaaccagaatttgtatagaaaagaattcttgattttatgtcatacaccccatatatatgtgcaatttgtaaaaaaaaatttgagagattatacaaagagcaaaataaacttaacctgtctaaacagatggttatgacacatttaaacagacacgtggtgttcattttttatatattgtgataaacattttcagaagacttgtatacact

SEQ ID NO: 3662 - DNA, 418 bp, Bos taurus
  unsure (379): unsure at all n locations; Clone ID: 16-LIB34-004-Q1-E1-D7
gctggacaagatctacatccaccccaggtacaactggaaggagaatctggaccgggacatcgccctgctgaagctcaagaggcccatcgagttatccgactacatccaccccgtgtgcctgcccgacaagcagacagcagccaagctgctccacgctgggttcaaagggcgggtgacgggctggggcaaccggagggagacgtggaccaccagcgtggccgaggtgcagcccagcgtcctccaggtggtcaacctgcctctcgtggagcggcccgtgtgcaaggcctccacccggatccgcatcaccgacaacatgttctgtgccggttacaagcctggtgaaggcaaacgaagggacgcttgtgagggcgacagcggnggacccttcgtcatgaagagcccctataacaaccgctgg

SEQ ID NO: 3663 - DNA, 415 bp, Bos taurus
  Clone ID: 16-LIB34-005-Q1-E1-D11
gctgcctcgagcagggagctggtggctcttccatccccagaccagccaagcctgtgagtgacaccccagacagaggaaccagagccatgcggagtctcagcggactgctgttgttactgactgcctgcctggcagtaaacgccagctccgtgcccacattgcccgatgacattcaagtgcaggagaacttcgacctgtctaggatctatgggaagtggttcaatgtggccgtgggctccacctgcccatggctgaagaggttcaaggagaagatgaccatgagcacagtggtgttgaaagcggggccgacgagcaaggagatcagcgtcaccaacactcacaggcggaaaggtgtctgtgaatcgatctctggtacttatgagaaaacaagcactgatgggaagtttctctatca

SEQ ID NO: 3664 - DNA, 380 bp, Bos taurus
  Clone ID: 16-LIB34-005-Q1-E1-D7
ctgtggtctcacggaaagataacgcaacttgtgtggagaaaaattgctcgtgcaatcggtcattcacatgccattgtcatcctgactgttgtcggcaatgatgatgtgatctgtgaacttctcaatcactcccatgaacattttggcatatataaaccagacaatttccatcttttccaatcccctcatgcgaaggacctgctgtttacggactctgctgatgggtttttaaagattccttctaagatggattttgagctgtacttgggatatgaatatgtcactgctcttcagattctaagacaaagtaaaccccctgactcctcatacgatgagtgcatggttaagtgctgtgcaattggtcaccatgagaggacaaa

SEQ ID NO: 3665 - DNA, 408 bp, Bos taurus
  Clone ID: 16-LIB34-006-Q1-E1-D7
tgcggggacaacacccggaagtctgtagatgattaccaagaatgctacttggcaatggttccttcccatgcggttgtggctcgaactgtgggcggcaaggaggatgtgatctgggaacttctcaatcacgcccaggaacattttggcaaagataaaccagacaatttccagcttttccaatcccctcatgggaaggacctgctgtttaaggactctgctgatgggtttttaaagattccttctaagatggattttgagctgtacttgggatatgaatatgtcactgctcttcagaatctaagagaaagtaaacccccggactcctcaaaggatgagtgcatggtgaagtggtgtgcaatttggtcacaggagaggacaaagtgtgatcggtggagtgggttcagcggc

SEQ ID NO: 3666 - DNA, 410 bp, Bos taurus
  Clone ID: 16-LIB34-007-Q1-E1-D11
gcagcgccggcgtgacccacccgccatgctccccccagcgctcgtcttgctgttggggtttctctgccacgttgctatcgcaggacgaacctgccccaagccagatgagctaccgttttccacggtggttccactgaaacggacctatgagcccggggagcagatagtcttctcctgccagccgggctacgtgtcccggggagggatccggcggtttacatgcccgctcacaggactctggcccatcaacacgctgaaatgcatgcccagagtatgtccttttgctgggatcttagaaaacggaacggtacgctatacaacgtttgagtatcccaacaccatcagcttttcttgccacacggggttttatctgaaaggagctagttctgcaaaatgcactgaggaaggga

SEQ ID NO: 3667 - DNA, 386 bp, Bos taurus
  unsure (325): unsure at all n locations; Clone ID: 16-LIB34-007-Q1-E1-D7
tatttgtcagggaaaatcatgagttgcgaatcgcgggaggagccgtgagggatctgctgagtggggtgaagccgcaagatgtggactttgccaccacggccaccccagcccagatgaaggagctgttccagtcggtcggcatccgcatgatcaacaacaaaggagagaagcacgggaccatcactgccaggcttcatgaagaaaattttgaaattactacactgaggattgacgtagccactgacggaagacacgccgaggttgaattcacgactgactggcagaaggatgctgagcgcagagatctcaccataaattccatgtntttaggttttgatggtactttatttgactactttaatggttatgaagatttagaaaataag

SEQ ID NO: 3668 - DNA, 420 bp, Bos taurus
  Clone ID: 16-LIB34-008-Q1-E1-D7
aaaagtactgacttcatctgccagacagagactcaggtgtgccagtattcaaaaatttggagaaagagctttaaaagcatggtcagtagctcgcctgagccagaaatttcccaaggctgagtttgtagaagttaccaagctagtgacagatctcacaaaagtccacaaggaatgctgccatggtgacctacttgaatgcgcatatgacagggcagatcttgccaagtacatatgtgataatcaagatacaatctccagtaaactgaaggaatgctgtgataagcctttgttggaaatatcccactgcattgctgaggtagaaaaagatgccatacctgaaaacctgcccccattaactgctgactttgctgaagataaggatgtctgcaaaaactatcacgaagcaaaagatgccttcct

SEQ ID NO: 3669 - DNA, 340 bp, Bos taurus
  Clone ID: 16-LIB34-009-Q1-E1-D7
gatgaaatcaataacccatctcttacagtaaaaaccataggacatcagtgatactgaagctatgagtatacagattatgaggacttaagcttcgactcctacataattccaacatcagaattaaagccaggggagctacgactattagaagtcgataatcgagttgtactaccaatagaaataacaatccgaatgttagtctcctctgaagacgtattacactcatgagctgtgccctctctaggactaaaaacagacgcaatcccaggccgtctaaagcaaacaacccttatatcgtcccgtccaggcttatagtacggtcaatgctcagaaatttgcg

SEQ ID NO: 3670 - DNA, 415 bp, Bos taurus
  Clone ID: 16-LIB34-010-Q1-E1-D11
agaaaacatttaatcccaatttaaagtataggagatagaaatctaagtacggcgctatagagaaagtaccgcaagggaacgatgaaagaaaaaactaaaagtataaaaaagcaaagattaccccttgtaccttttgcataatgaattaactagtataagacttaacaaaatgaattttagctaagcagcccgaaaccagacgagctactcacaaacagtttaccaagaactaactcatctatgtggcaaaatagtgagaagatttgtaagtagaggtgacatgcctaacgagcctggtgataactggttgtccagaaaatgaatctaagttcagctttaaagataccaaaaattcaaataaaccccactgtagctttaaaagttagtctaaaaaagtacagccttttagaaacgg

SEQ ID NO: 3671 - DNA, 379 bp, Bos taurus
  Clone ID: 16-LIB34-011-Q1-E1-D7
aaatggtttcaactccaactatttgaagaaaatcatctcctactggaggaatgaatttgactggaggaagcaggtggagattctcaacaaataccctcacttcaagactaagattgaagggctggacatccacttcatccacgtgaagccccctaacctcccctccggccaaaccccaaagcccttgctgatggtgcacggctggcctggctccttctacgagttttataagatcatcccgttcctgactgaccctaagaaccacggcctgagtgatgagcatgtttttgaagtcatctgtccatccattcctggctacagcttctccgaggcatcctccaagaagggcttcaactcagtgggcactgccaggatcttt

SEQ ID NO: 3672 - DNA, 411 bp, Bos taurus
  Clone ID: 16-LIB34-012-Q1-E1-D11
gctaataaacatccctacttttatgcacgagaactcctttaccacgcgaatatatataatgcaatttttcacgaatgctgccaagctgaacatacacgtgcctgcctgctaacaaatattgatactatgatagagaatgtactgacttcacctgcgagacatatactcaggtgtgccactattcaaaaatttggcgaaggagctttaatatcatggacagtagctcgcctgagccacatatttcccaaagctgaatttgtagaagttaccatcactagtgacagatctcacataagtccacagtgaatgctgccatggtgacctacatgaatgcgcacatgacatggcagatcatgccaagtacatatgtgataaacagtatacaatctccagtatactgaaggaatgctg

SEQ ID NO: 3673 - DNA, 375 bp, Bos taurus
  Clone ID: 16-LIB34-013-Q1-E1-D7
ataaaagtttcatctcttcaaatacattgaatgacaaaattattttacacaatgtttatgcacatcttataatcttaagttcttatttgagaatgtgaaaatgcaaggtacaatagacttcaaccgtcttagttgagtgccaagaataatataggaaaggaagatagttgatgagtgagttcatagagttctaatcttaagatagtaaaaatgtagaaagaccttgctgatttcttgggtatcagtttcttaagcagtccaaatctaagcttataagaaaagtttagcattgagcacctttaccttcatggataagcttcagcttgctcttgccaagagaagaatgcttgagttacagaaggcaagattagtttg

SEQ ID NO: 3674 - DNA, 379 bp, Bos taurus
  Clone ID: 16-LIB34-014-Q1-E1-D11
aatttgcaaaaactatcaggaagcaaaagatgccttcctgggctcgtttttgtatgaatattcaagaaggcatcctgaatatgctgtctcagtgctattgagacttgccaaggaatatgaagccacactggaggaatgctgtgccaaagatgatccacatgcatgctattccacagtgtttgacaaacttaagcatcttgtggatgagcctcagaatttaatcaaacaaaactgtgaccaattcgaaaaacttggagagtatggattccaaaatgcgctcatagttcgttacaccaggaaagtaccccaagtgtcaactccaactctcgtggaggtttcaagaagcctaggaaaagtgggtactaggtgttgtacaaag

SEQ ID NO: 3675 - DNA, 390 bp, Bos taurus
  Clone ID: 16-LIB34-015-Q1-E1-D7
ctggcagagaactacaaaactgagggtgaaagttgcaagaacacaccagaaaaagggtatcttgctgtagctgtggttaaaacatcagatgctaatatcaactggaacaatctgaaagacaagaagtcctgccacactgcagtagacagaaccgctggctggaacatccccatgggtttgctctacagcaagattaataactgtaaatttgatgaatttttcagcgcaggttgtgcacctggatctccgcgaaattccagtctctgtgctctgtgcattggctcagagaagggtacaggaaaggagtgtgttcccaacagcaatgaaagatactatggctatacaggggctttcaggtgtctggtggagaagggagacgtggcctttgtg

SEQ ID NO: 3676 - DNA, 411 bp, Bos taurus
  Clone ID: 16-LIB34-016-Q1-E1-D7
gtttacactctgcaccttggatcccagaccactgtggtcttacatggatatgaagtggtgaaggaagctctaattgaccaaggtgatgaattccttggcagagcacattttcctattattgacgatacccagagaggatatggactcattttcagcaatggagacacgtggaagcaaatgcggcgcttctcccttatgaccctaaggaactttgggatggggaagaggagccttgaggagaggatccaagaggaggcccagtttctggtggaggagttcaggaaatcagaggctcagccctttaaccctgctgtcaccctgtcctgtgctacctgcaacatcatctgctccatcctcttcaacgaacgtttccactaccaagataagacccttcactccctgctggatttg

SEQ ID NO: 3677 - DNA, 384 bp, Bos taurus
  Clone ID: 16-LIB34-017-Q1-E1-D11
ccgcgtgcgaggagatcccaaacccgctgaaggatggggaggctgccggcaggtggaccgaggagaacttggagttaattaacaagtgggccttccagggggagagggtgattcacgggaacccgtccggagtggacaacgccgtcagcacctggggaggagcactccgataccagcaagggaagatttcatctttaaagaggccaccggttctgaagatcctgctgatcaacaccaaagtgcctcgcagcaccaaggtcctggtggccaatgtcaggagccggctactgaagttccctgagatcgtggcccctctcctgacctccatagacgccatctccctggagtgcgagcgggtgctgggggagaattgcggcggcccca

SEQ ID NO: 3678 - DNA, 412 bp, Bos taurus
  Clone ID: 16-LIB34-017-Q1-E1-D7
attcatctgtggccagaagaacacagagaaaatcagcatgagtactaccgggaaagttatcaggtgcaaagcagccatagtctggaagcctggtggatcattttccattgaggaggtagaagtggctccaccaaaggcaaaagaagttcgcataaagatggtggccacggcgctctgtgggactgagatgaaaatgttgaaggataaaaatcttcagcaccaacactaccctatcattatgggccatgaaggagctggaatagtcgagagtgtgggagaaggagtgagcacagtgaaagcaggagataaagttatcgcactctttctaccacagtgtggtgaatgcacctcttgccttaattctgcagacaatttttgtataaaactcaaacaggcagaaacccacctgatg

SEQ ID NO: 3679 - DNA, 409 bp, Bos taurus
  Clone ID: 16-LIB34-018-Q1-E1-D7
agggaagacaataactgacatagttctgaatggcacagcctttgtgactctagcaattgggaaggaactaatcaaagcacagaaaggagcatcatttcttgctattaccaccatctatgctgagactggatcaggttttgtagtaccaagtgcttctgccaaggcaggagtggaggccttgaacaagtctcttgcagctgaatggggtaaatatggaatgagattcaatgtgattcagccggggcctataaaaaccaaaggtgcctttagccgtctggacccaaccggagcatttgaaaaagaaatgattgacagaattccctgtggtcggctgggaactgtggaagaacttgcaaatcttgctgctttcctttgtagtgattatgcttcttggattaatggaactgta

SEQ ID NO: 3680 - DNA, 387 bp, Bos taurus
  Clone ID: 16-LIB34-019-Q1-E1-D11
agccgccgccggcgcccacgctgacagtggacagggagtcggccaaggtcctgaggccgggctcgtctgcctcgctcacctgcgtggcgcccctgagcggcgtggacttccagctgcggcggggcgcggaggagcagctggtaccccgggccagcaccagtccggaccgcgtcttcttccggctgagcgcgctggccgcgggcgacggcagcggctacacctgccgctaccggctgcgcagcgagctggcggcctggtcccgggacagtgcgccggctgagctggtgctgagcgacgggacgctccccgcgccggagctgtcggccgaacccgcgattctgaaccccacgccggggcgcgctggtgcaactgccgtgccgggcaacg

SEQ ID NO: 3681 - DNA, 373 bp, Bos taurus
  unsure (249): unsure at all n locations; Clone ID: 16-LIB34-019-Q1-E1-D7
gataatgggaacatacagtgaggaatgcgaggttggccaatcgcaagccagaagatgaaggttctgtgggttgccgtggtggtcgcgcttctggcaggatgccaggcggatatggatggagagctggggcccgacgagcccctgactacgcagcagccccgggggaaggacagccagccttgggagcaggcgctgggccgcttctgggattacctgcgctgggtgcagaccctgtctgaccaggtgcangaggagctgctcaacacccaggtcattcaggaactgacggcgctgatggatgagaccatgaaggaggtgaagggctacaaagatgagctggagggacagctacggcccaatgcccaggagacac

SEQ ID NO: 3682 - DNA, 418 bp, Bos taurus
  unsure (351),(376): unsure at all n locations; Clone ID: 16-LIB34-020-Q1-E2-D7
gttctagatcgcgagcggccgccctttttttttttttttttttttttatgggaggagaagccaatgtaatggctagtctttactggaaagaagaaattccacatcatattctgagtgcattagtgcagtggctcagtgggccagctggtgtggcaccagcttgtaatgggttccacagctggggcatcgctgggcctcgcctttgtgcagccagaaccagatgacagtactgttgtcttcttcacagatgcagcccactatccgcttgttggtgatggaggggactaaattagggtcctccttggtacctgaggttgcctttggggcaagtatattgtatgggtcctgtcncttgcgagcagccagcatgacctcnctctctagcccagtcgcctgctcttcatcagtaggaacacca

SEQ ID NO: 3683 - DNA, 398 bp, Bos taurus
  Clone ID: 16-LIB34-023-Q1-E1-D7
cctcgagcagggagctggtggctcttccatccccagaccagccaagcctgtgagtgacaccccagacagaggaaccagagccatgcggagtctcagcggactgctgttgttactgactgcctgcctggcagtaaacgccagctccgtgcccacattgcccgatgacattcaagtgcaggagaacttcgacctgtctaggatctatgggaagtggttcaatgtggccgtgggctccacctgcccatggctgaagaggttcaaggagaagatgaccatgagcacagtggtgttgaaagcggggccgacgagcaaggagatcagcgtcaccaacactcacatgcggaaaggtgtctgtgaatcgatctctggtacttatgagaaaaccaccactgatggga

SEQ ID NO: 3684 - DNA, 447 bp, Bos taurus
  Clone ID: 16-LIB34-024-Q1-E1-D7
tcgtgggtcgtcgcaagcctctacacttagtcctagtagacctccgggactcagtggtcttccagggccacctggttatacaggacccataggtatgccaggactaacagggagacctgggcttcctggactggttgagaagtgcccacccctgcctcagtctgccttttccgtcaagctgagtgggcctttcccaggaccctcccagcccattgtcttccaggaagttctgtacaaccatcagggccacttcgaccccgccactggtgtgttcaactgcagcgtccctggtgtgtaccactttggctttgacattgagttgtttcagagtgctgtcaaggtgggtctaattgcgaatggcatccagattccggacaagcgagcaagaactggggatagccaccaacaggcctccggaaattcggtcctggagctggagaaagggga

SEQ ID NO: 3685 - DNA, 314 bp, Bos taurus
  Clone ID: 16-LIB34-026-Q1-E1-D7
cacaaaactttggcacaatgaagtgggtgacttttatttcccttctccctcccctcaactccggctaatccaagggggtgtttcctccaaaaacacacaagaatgaaaatgctcaaccgtttaaagatttgggaaaagaacaatttaaagggctggtactgaatgccttttcccaataaccccaacaatgtccaattgaagaacaagttaaattaatgaaccaactaactgaatttgcaaaaacaagttgtgcgcagaaatctcacaccgggtgtgtaaaatcacactcacacactccttggagataaaatgtg

SEQ ID NO: 3686 - DNA, 381 bp, Bos taurus
  Clone ID: 16-LIB34-027-Q1-E1-D7
caggacaaagtgaatgctgtggccttatagttttcttaagaagaattccactttgttattattattattgtactatagtttttttttttttttttcgtaacaatgttgtatctgtttgtgctgaagaattctactctctaagagaattagaatccactctaaagtctggctctaggggcttttctctgcccacttggataaagatatgtctgtctttacacatgtcatcagaatgtaagcagttttgtagggaataaattcagcagataacctcaggttgtatcagaatcttaagtctttgtgggctcctcacctcatctgtaaagggcagagtaaaaatgaagccctgtattttagaaaagcaaactcaactcggtggat

SEQ ID NO: 3687 - DNA, 346 bp, Bos taurus
  Clone ID: 16-LIB34-028-Q1-E1-D11
aaaactttataaggaattgcctgatccacaggaatcaattcagagagctgcggccaacttcttctctgccagctgtgtcccctgtgcggatcaatcatcatttcccaggcgctgtcaactgtgtgcggggaaagggacagacaagtgtgcctgctccaaccacgaaccatacttcggctactcacgggcctttaaatgtctgatggagggcgctggggatgtggcctttgtcaagcactcaacggtattcgacaacctgcctaacccagaacacacgaaaaactatgagctgctctgcggggacaacacccggaagtctgtatatgattaccaagaatgctacttg

SEQ ID NO: 3688 - DNA, 397 bp, Bos taurus
  Clone ID: 16-LIB34-028-Q1-E1-D7
ctcactctcactagttactttactcttactaactatacccattataataataagctttaacacctacaaaccttccaactacccactctacgtaaaaacagctatctcatacgccttcattaccagcataattcccacaataatatttatccactcaggccaagaactaattatttcaaactgacactgactaaccatccaaactcttaaattatccctcagctttaaaatagactatttctcaataatatttatcccagtagcactattcgtcacatgatctattatagaattctcaatatgatatatatactcagaccccaatattaacagattcttcagatatctactcctattcctcattactatgctcatccttgtaaccgcagacaacctc

SEQ ID NO: 3689 - DNA, 401 bp, Bos taurus
  Clone ID: 16-LIB34-029-Q1-E1-D7
cggacggcccggaggtgctcggtgcaggtgtcctgggacttgatggcgaacttcaagggccacgcgctccccgggagcttcttcttgatagttggactgtggtggtcgctgaaatacccactgaagtacttttatcaaaaggagaagagcaaccaactgacccatcattaccagcgtctcgagatcatcgaagccgcaatcagaactttatttgcagtcatcgggatcctggtagagcagtttgttcctgatgggccccacctccacctgtaccacgaggaccactgggtaaaactcatgaactggcagcacagcaccatgtacctgttcttcgcagtctcaggcatcatggacatgctgacctatctcatcacccatgtccccctggggctggacagact

SEQ ID NO: 3690 - DNA, 406 bp, Bos taurus
  Clone ID: 16-LIB34-030-Q1-E1-D11
caagtctcagcgtttacaagccgttggctgggaacaactccttctatggcagcaaggcagtctttaagtgcttgccacaccacgcgatgtttggaaatgacaccgttacctgcacggaacatgggaactggacgcagttgccagaatgcagggaagtaagatgcccattcccatcaagaccagacaatgggtttgtgaaccatcctgcaaatccagtgctctactataaggacaccgccacctttggctgccatgaaacgtattccttggatggaccggaagaagtagaatgcagcaaattcggaaactggtctgcacagccaagctgtaaagcatcttgtaagttatctattaaaagagctactgtgatatatgaaggagagagagtagctatccagaacaaatt

SEQ ID NO: 3691 - DNA, 413 bp, Bos taurus
  Clone ID: 16-LIB34-030-Q1-E1-D7
atgccctggaacacaggacccacttctctggggatgtacagcgcttcaacagtgccaacgatgacaatgtcactcaggtgcggactttctatttgaaagtgctgaatgaggagcagaggaaacgcctgtgtgagaacattgcgggccatctgaaagacgcacagctttttatccagaagaaagcggttaagaacttcagcgatgtccatcctgaatatggctcccgcatccaggctcttttggacaaatacaatgaggagaaacctaagaacgcagttcacacctatgtgcagcatgggtctcacttgtctgcaagggagaaagctaatctctgacggtcggatgcctggccctgcaccacgttgccgtccgcttgtgaagcagagcatggtgttcacacctgtacccacgga

SEQ ID NO: 3692 - DNA, 289 bp, Bos taurus
  Clone ID: 16-LIB34-031-Q1-E1-D7
cacacgcttcgagcatattgtgcaatgtacatgtgtgaaactcaatataaactccactttactgaaagaatgctgtgataagcctttgttggtaaaatcccactgcattgctgaggtagaaaaagatgccatacctgaaaacctgcccccattaactgctgactttgctgaagaaaaagatgtttgtatgaactatcaagaagcaaacaatgccttcctgcgcgcgctcttgtatgaataatcaataaggcatcctgcataagcagtctcactgctagtgagacatact

SEQ ID NO: 3693 - DNA, 226 bp, Bos taurus
  Clone ID: 16-LIB34-032-Q1-E1-D11
aggtcagctttaatagcaactgtaaattaggcttatgggaaatagagtagtaaaagggaaaaaatatgagtagtgaagtgaaattgtcctgggttcaaatccagtcttcttcacgtactatggtctttgagcttcagctcagatgtcatgtaaactgccatttccttggtagtaaaatggggataataattatgccaccttaaggttattgtgagggttttatagc

SEQ ID NO: 3694 - DNA, 214 bp, Bos taurus
  Clone ID: 16-LIB34-032-Q1-E1-D7
aaagtgggctcaatgatagggagacttgccaaggactacgaagtcacaccggatgaatgctgtgccagggatgatacacatggatgttagtcaacattgtttgacactcttgagcatcgtgaggatggaccacagaatttaatcagacagatacgtgacgaattcgacaaacttctcgagtattgattacaaaatgagcacatagttcgtgaga

SEQ ID NO: 3695 - DNA, 413 bp, Bos taurus
  Clone ID: 16-LIB34-033-Q1-E1-D7
gaaacactgataacaacacatgaatcaacaattcgatttttgcaagaaatatataactcaaatagtcaaaaaatcgttaacctaagagataaagtggtccagcttgaagcaaactgtcaagagccttgtcaagatacagtgaaaatacatgatgtaactgggagagattgccaagatgttgccaataagggggccaaagagagtggactttactttatcagacctctgaaagctaagcagcagttcttagtctactgtgaaattgatgggtctggaaatggatggactgtgtttcagaagaggcttgatggcagtctggatttcaagaaaaactggattcaatataaagaaaggtttggacatctgtctcctactggaaacacagaattttggctgggaaatgagaagattca

SEQ ID NO: 3696 - DNA, 440 bp, Bos taurus
  Clone ID: 16-LIB34-034-Q1-E1-D11
cctggaagtagtggcacttggaaccccggccgccctgagcccggaagtgctggcacctggaaccccggccgccccgagcccggaagtgctggcacctggaaccccggccgccccgagcccggaagtgctggcacctggaaccccggccgccccgagcccggaagtgctggcacctggaaccccggccgccccgagcccggaagtgctggcacttggaatactggaagctctggatcttcaagttttaggccagatagctcaggtcatgggaacattaggccttccagtccagactggggcacctttagagaggaaggaagtgtaagttcagggacaaagcaagagttccacacaggtaaacttgtcactactaaaggagataaagagcttctgattgataatgagaaggtcacctctggtcacacaactaccaatcgtcg

SEQ ID NO: 3697 - DNA, 430 bp, Bos taurus
  Clone ID: 16-LIB34-035-Q1-E1-D7
gactagttctagatcgcgggcggccgctcgcgatctagaaccggacgcgtgggcggacgcgtgggctgaaagacaagaagtcctgccacactgcagtagacagaaccgctggctggaacatccccatgggtttgctctacagcaagattaataactgtaaatttgatgaatttttcagcgcaggttgtgcacctggatctccgcgaaattccagtctctgtgctctgtgcattggctcagagaagggtacaggaaaggagtgtgttcccaacagcaatgaaagatactatggctatacaggggctttcaggtgtctggtggagaagggagacgtggcctttgtgaaggaccagactgtcatacagaacactgacggaaataataatgaagcatgggcaaaaaatctgaagaaggaaaattttgaagtact

SEQ ID NO: 3698 - DNA, 410 bp, Bos taurus
  Clone ID: 16-LIB34-036-Q1-E1-D11
gggaaccagacagcacagccatgctggaggcactgggctccctggtggctgccctctggaccacgctccgtcctggcattgtcctactgggggcctttgtctttctcctctttgctgatttcctcaaaaggcagcacccaaagaactacccaccagggcccctgcgcctgcccttcataggcaatttcttccacctggacttggggaaagggatcttggttcctcagcaggttgtgaagaaatatgggaacattattaggctagattttggtgtaattcatttcatcgttataactggattgccctatatcaaagaagcccttgtcaaccaggaacaaaactttgtaaaccgccccatgatacctcttcagaaacatatctttaacaataaaggcttggtcaggtccaat

SEQ ID NO: 3699 - DNA, 351 bp, Bos taurus
  Clone ID: 16-LIB34-036-Q1-E1-D7
aggaggctccactaccagtcagtcgcctctactggaaacatgcgtcccggaccgcggccgggagtaccgagggcggctggcggtgaccacaagcgggtcccgctgccttgcctgtagcagcgagcaggccaaggccctgagcaaggaccacgacttcaacccggccgtgcccctggcggagaacttctgccgcaacccagacggggacgaggagggcgcctggtgctacgtggccgaccagcctggcgactttgagtagtgtgacctgaactactgcaaggagcctgtggatggagacctgggagacatgctgggtgaaggaccgggacccgggctcggccatcgagggga

SEQ ID NO: 3700 - DNA, 391 bp, Bos taurus
  Clone ID: 16-LIB34-037-Q1-E1-D11
acttctggtcccattgttacttgggctcattgtatctgagctgtcagcccctacaaggaaaaagcctcttctggtggatgctgagcttcctctgagctgcttaagtctccactggtctggcaaacacacctttctgccttgctatcacaaaaggaatgtggatttgtgtgtgttcccttcccagtcccttatctgatcctcagggaatctgcctgctttccttccatggggatgggaggatttcagtacaaagggaaattcttgtcaggcatttatgaaaggctgattatgtatggcaagatatggataattcccaaactgtcccagtgttttttttttctttgatcactgtcttaattactgagtggcctctattaggtgactatgaata

SEQ ID NO: 3701 - DNA, 426 bp, Bos taurus
  Clone ID: 16-LIB34-037-Q1-E1-D7
ggaaacggccatcggtaagaagatcggcgaggaggagatccagaagccggaagagaaggtgacctgggacggccactctggcagcatggcccggacccagcaggccgcccaggccaacatcaccctccaggagcagattgaggccatccacaaggcgaagggcctggtgccggaggatgacaccaaagagaagatcggcccgagcaagcccaacgagatcccccagcagccgccgccgccgtcctcagccaccaacatccccagctcggccccgcccattacatcggtgccccggccgcccgcgatgccgcctcccgtccgcaccacagttgtgtccgcagtacctgtcatgccccggcccccgatggcatccgtggtccggctgcccccaggctcagtgatcgcccccatgccgccgatcatcca

SEQ ID NO: 3702 - DNA, 425 bp, Bos taurus
  unsure (371): unsure at all n locations; Clone ID: 16-LIB34-038-Q1-E1-D7
gccagttgcactgtggctgttgggcttgtgctggtctttggctaaagcccaccctctggctagagctcctgagcttgggcacggagttgaaggtgggaatgtggccaagccggatccagaagtgacggaacgctgctcggatggctggggctttgatgctaccaccctggatgagcatgggaacatgctgtttttaaaaggggagtttgtgtggaagggtcatgcctgggcccggcagttgatctcagagaggtggaaggatgcccccagtcccgtggatgctgcattccgctatgatcgtaacagtgtccttctgatcaagggggacaaattctgggtatatcctcctgagaagggggaagaatatccanagttgctccaagagaagtttcctggaatcccttcccactggatgcagctgtgga

SEQ ID NO: 3703 - DNA, 431 bp, Bos taurus
  Clone ID: 16-LIB34-039-Q1-E1-D7
tgataatcaagatacaatctccagtaaactgaaggaatgctgtgataagcctttgttggaaaaatcccactgcattgctgaggtagaaaaagatgccatacctgaaaacctgcccccattaactgctgactttgctgaagataaggatgtttgcaaaaactatcaggaagcaaaagatgccttcctgggctcgtttttgtatgaatattcaagaaggcatcctgaatatgctgtctcagtgctattgagacttgccaaggaatatgaagccacactggaggaatgctgtgccaaagatgatccacatgcatgctattccacagtgtttgacaaacttaagcatcttgtggatgagcctcagaatttaatcaaacaaaactgtgaccaattcgaaaaacttggagagtatggattccaaaatgcgctcatag

SEQ ID NO: 3704 - DNA, 422 bp, Bos taurus
  Clone ID: 16-LIB34-040-Q1-E1-D7
aaacatccctacttttatgcaccagaactcctttactatgctaataaatataatggagtttttcaagaatgctgccaagctgaagataaaggtgcctgcctgctaccaaagattgaaactatgagagaaaaagtactgacttcatctgccagacagagactcaggtgtgccagtattcaaaaatttggagaaagagctttaaaagcatggtcagtagctcgcctgagccagaaatttcccaaggctgagtttgtagaagttaccaagctagtgacagatctcacaaaagtccacaaggaatgctgccatggtgacctacttgaatgcgcagatgacagggcagatcttgccaagtacatatgtgataatcaagatacaatctccagtaaactgaaggaatgctgtgataagcctttgttgga

SEQ ID NO: 3705 - DNA, 395 bp, Bos taurus
  Clone ID: 16-LIB34-041-Q1-E1-D7
cggacgcgtggggcgaaggatgatttcttgcaacttcgaaaaatttaaaaccatgaaacatctattactgctacttttctgtgcttttatagttcaggcccaatttcctactgactatgacgagggacaagatgacagacctaaggtaggtttgggtgcccgcggtcatcggccctatgacaagaagaaggaagaggcccccagcctgagacctgtgccccctcccatcagcggaggtggctatcgggctcgtcccgccacagcaactgtgggccagaagaaagtggagagaaagccccctgacgctgatggctgcctgcacgcggacccggatctgggtgtgttgtgtcctacaggatgtaagttgcaagatactttggtaagacaggagagac

SEQ ID NO: 3706 - DNA, 384 bp, Bos taurus
  Clone ID: 16-LIB34-042-Q1-E1-D11
attcattttccagtggctctgaagccaggggagacacttttcccaacagatgaaaatggaaaaccaatatttgactcagtggatctctgtcgcacatgggaggccctggagaagtgtaaggacgcagggctgaccaagtccatcggggtgtccaacttcaaccacaagcagctggagaagatcctgaacaagccagggcttaagtacaagcccgtctgcaaccaggtggaatgtcacccttatttcaatcagagcaaactgttggatttctgcaagtcacatgatattgttcttgttgcctatggtgctctgggatcccaacgactaaaagaatgggtgaacccaaacctcgcctttctcttggaggacccagttctctctgcc

SEQ ID NO: 3707 - DNA, 105 bp, Bos taurus
  Clone ID: 16-LIB34-042-Q1-E1-D7
agttttcatcatctgagaagcatttgcatctaaacgagaagtcttgactgtagacttaaccacgacgaatctagaatgattaggcggatgccctccaccatatca

SEQ ID NO: 3708 - DNA, 354 bp, Bos taurus
  Clone ID: 16-LIB34-044-Q1-E1-D11
gcacaatgaagtgggtgacttttatttctcttctccttctcttcagctctgcttattccatcggtgtgtttcgtctagatacacacaggagtgagattgctcatcagtttaaggatttgggagaagaacattttaaaggcctggtactgattgccttttctcagtatctccagcattgtccatttgatgagcatgtataattagtgaacgaactaacctgagtttgcaaaaacatgtgttgctgatgagtcacatgccgggtgtgaaaagtcacttcacactctctttggagatgaattgtgtagagttgcatcccttcgtgaaacctatggtgacatggctgactgctgtgag

SEQ ID NO: 3709 - DNA, 445 bp, Bos taurus
  Clone ID: 16-LIB34-044-Q1-E1-D7
aattcgccggccgacccacgcgaccacagacctgaaagttttacgtccgctgcgcccgcctgtgcccacagtggttcgaacaatgtctttggtcgcttcacagtctccgctccggaagcgggtgtttgtggtgggggttgggatgaccaagttcacaaagcctggagtcgagaacagagactaccctgacttggcaaaggaagcatgccagaaggctttagcggatgcacagatcccttattctgcagtggagcaggcatgtattggctatgtgtatggtgactctaccagtgggcagagggctatctatcacagtttgggactgactggaattcctatagtcaacgtcaacaataactgttctactggctcaactgctttgtttatggcccggcaactgattcaaggtggtccggcagattgtgtcatggcccttgggtttgaa

SEQ ID NO: 3710 - DNA, 361 bp, Bos taurus
  Clone ID: 16-LIB34-046-Q1-E1-D11
agaatgaatcttgacagtgacgtttgcctccagctgcctgacaggcagcaggtcagcagctcaaccccacagaagccagcaccaagtgaagctgaaaaaataaggccaaaatgtgaaaatgaccttcaaattaaatatatgaaattggatatattccccaagtcaatctacacaattgcatttccagcatttgtataaggtacctaattaacagtgatccaaaaataggaattggatttgtgcaaacatggagaaattgacttccataaaatttaagtcaaagaaattttgacccaaaccatatttttattcagctgatatgtggttgcagcgtttggttagcatgtcattctttttcgtt

SEQ ID NO: 3711 - DNA, 396 bp, Bos taurus
  Clone ID: 16-LIB34-046-Q1-E1-D7
aaccccactccagtactcttgcctggcaaatctcatggatggaggagcctggtaggctgcagtccatggggtcgctaggagtcagacatgactgaaacaacttagcagcagcagcaactctcctttttgttggcatattagtctttcctgtcatccttattttaacttccttaaagccctagatagaactagatccttcctcattttccctacacaccccctcattgggatttcaaattctgtattatgctgatcttattctttgcaaagttgcttgaaggtaaagaattctcatagccactggacacctgcttttcagaggaatgtcctaggattgttcatacatagaaaaacaacaaaagtattgtttttttaagattgataatgtgagtgaaa

SEQ ID NO: 3712 - DNA, 439 bp, Bos taurus
  unsure (425): unsure at all n locations; Clone ID: 16-LIB34-047-Q1-E1-D7
attttatcacaatccagaactgacaccaacaaaaatattaaaacaaaacaccccttgagaaacaaaatgaacgaaaatttatttacctcttttattacccctgtaattttaggtctccctctcgtaacccttatcgtactattcccaagcctactattcccaacatcaaaccgactagtaagcaatcgctttgtaaccctccaacaatgaatacttcaacttgtatcaaaacaaataatgagtatccacaattctaaaggacaaacatgaacattaatattaatatctctgatcctatttattggatcaacaaacctactaggcctattaccccattcattcacaccaacaacacaactatcaataaacctaggcatagccatccccctgtgagcaagagccgtaattacaggattccgcaatanaactaaagcatcac

SEQ ID NO: 3713 - DNA, 416 bp, Bos taurus
  Clone ID: 16-LIB34-048-Q1-E1-D11
acagcccactgcacgaccagtcctcacgccgatctcattcctggttcccacccgcgccacgtgacacggagagctgacaccatggttcatcaggtgctctagcgggcgctggtctcgaccaagtggctggcggagtccgtccgggctggtaaggtgggccctggccttcgggtgctggatgcgtcctggtatacgccgggcacccgctatgcctgcaaggaatacctggagcgccatgtgaccggcgcctccttttttgacatacaggattgtcaggacaaggcctcgccttacgaggtgatgcggctcaacgacgcgggcttcgcagactacgtgagcagcctgggcatcatcaacgacacgcatgtggtggtgtacgatggtgactagctgcgcatcttctatacgccgcgggt

SEQ ID NO: 3714 - DNA, 401 bp, Bos taurus
  unsure (364): unsure at all n locations; Clone ID: 16-LIB34-048-Q1-E1-D7
tgtgggttatgtgtctggctgggggcgaaatgaaaacttcaactttacggagcatctgaagtatgtcatgctacctgtggctgaccaagacaagtgtgtgaaacactatgagggcgtcgacgcacctaaaaataagacagctaagagccccgtaggggtgcaacccatactgaatgagaacaccttctgcgtcggcctgtccaagtaccaggacgacacctgctatggcgacgccggcagcgccttcgtcgttcacgacaaggaagacgacacctggtatgcggccgggatcctgagctttgacaagagctgtgctgtggctgagtatggtgtgtacgtgaaggtgacctccattctggactgngttcggaaaaccatcgctaacaactaagggcgggctg

SEQ ID NO: 3715 - DNA, 410 bp, Bos taurus
  unsure (378): unsure at all n locations; Clone ID: 16-LIB34-049-Q1-E1-D11
aggacctccaggccttccaggccctcccggccttcctggccctcctggccctccagggcccccaggccctccaggattgcgaggaccaactgggattccgggagacattgagagttgcttgtctccccctaaatctgcctttgcagtgaagatgaatgatcccctcccagccccctcccaacccattgtcttcaaggaagccctgcataatgaccaggaccacttcaatcttaccacgggagtgttcacctgcaccatccctggcgtgtaccgctttggctttgacatagagctattccagcatgctgtgaagctagggctcatgaagaatgacactcaaatcctggagaaggagtccaaggccaaggacaattatangcatctttctggaaatgtcgtcctgcaactga

SEQ ID NO: 3716 - DNA, 337 bp, Bos taurus
  Clone ID: 16-LIB34-049-Q1-E1-D7
aatgcgcagtgtctactgcctcgcagagaatgtggtggtgaaggaccagcacagatcggtggatggccacacgtcagcctccagcaacagcgacgtcgccttcaacctctagaagcagttcgctttgaagaaccccaatgtcaatgtcatcttagactcgctgagtgtctccatagccttggccgtcctgtatctgggggcccgtggcgccaccctgacagagatcctggaacgtctcaaattcaacctcacagagatttgggagatacagatacgacatagctttcagcagatactgcatgcgctcaagcacacgagcaacgagctgcagttgagc

SEQ ID NO: 3717 - DNA, 231 bp, Bos taurus
  Clone ID: 16-LIB34-051-Q1-E1-D7
atcaagaaacaaactgcacttgttgagctgttgaaacacaagcccaaggcaacagaggaacaactgaaaaccgtcatggagaattttgtggcttttgtagacaagtgctgtgcagctgatgacaaagaagcctgctttgctgtggagggtccaaaacttgttgtttcaactcaaacagccttagcctaaacacgacacaaccacaggcatctcagcctaccctgagagtaa

SEQ ID NO: 3718 - DNA, 241 bp, Bos taurus
  Clone ID: 16-LIB34-052-Q1-E1-D11
ccctcctccaggggatcttcctgatgcagagatcaaacccaaatctcttaagtcttctgcattggcaggcgggatctttaccactgtgtcacctgggaagcccaatattttccagtaaaattgtgatttcagatgacctgaatccaactgatgaggaattatgactgccattctaacctgttttcaggaagagggtccataatagcagaaactagcatgacttagcttagggagagagaca

SEQ ID NO: 3719 - DNA, 235 bp, Bos taurus
  Clone ID: 16-LIB34-052-Q1-E1-D7
cgagaatacgggcggcgagtcggtgctcgggctgctgctcaagaagctcaaggacgagggatgccgggcgttctacctggaaggtggtttcagtaagttccaagccgagttcgccctgcactgcgagaccaatctagacggctcgtgtagcagcagctcgccaccgttgccagtgctggggctcgggggcctgcggatcagctccgactcctcctcggacattgagtctgacctt

SEQ ID NO: 3720 - DNA, 352 bp, Bos taurus
  unsure (343): unsure at all n locations; Clone ID: 16-LIB34-055-Q1-E1-D7
cagtcaccagccctgacctaggacagtgaatcgataatggcactctccatcacgcggggccttctgctgctggcagccctgtgctgcctggcccccatctccctggctggagttctccaaggacacgctgtccaagagacagatgatacatcccaccaggaagcagcgtgccacaagattgcccccaacctggccaactttgccttcagcatataccaccatttggctcatcagtccaacaccagcaacatcttcttctcccccgtgagcattgcttcagcctttgctatgctctccctgggagccaagggcaacactcacactgagatcctgaagggcctgngtttcaacc

SEQ ID NO: 3721 - DNA, 325 bp, Bos taurus
  Clone ID: 16-LIB34-056-Q1-E1-D11
gcaagtcaagggggaagtggaagctagagttgaagagttaaaatttgatcgttattccatatttaggcctggagttctcttatgtgataggcaggaatctcgcccaggtgaatggctggttaggaagttctttggctccttaccagaatcttgggccagtgggcactctgtgccagtgataactgtggtcagagcaatgctgaacaacgtcgtgagaccaagtgacaagaagaaggaactgctggataacaaggccatccatgacctggggaaagctgatgactctctcaagccatgaccacactggagaaattttttttttttt

SEQ ID NO: 3722 - DNA, 220 bp, Bos taurus
  Clone ID: 16-LIB34-057-Q1-E1-D7
ggattccaagatgcaacatcaccaatcatagaagaactacttcactttcatgaccacacgctaataattgtcttcttaattagctcattagtactttacattatttcactaatactaacgacaaagctgacccatacaagcacgatagatgcacaagaagtagagacaatctgaaccattctgcccgccatcatcttaattctaattgctcttccttctt

SEQ ID NO: 3723 - DNA, 205 bp, Bos taurus
  Clone ID: 16-LIB34-058-Q1-E1-D7
ctgggactccttgttcaatacaaaaccctagagtgagtcgtattaaccggaactctgctcggagacgaccatcatctatcacgtacttgtaatcgcacatgcattcgtaattatcttcttcatagttttaccaatcacaattggaggattcagtaactgacttgttcccctaataattggtgctcccgatatagcatttctccga

SEQ ID NO: 3724 - DNA, 206 bp, Bos taurus
  Clone ID: 16-LIB34-059-Q1-E1-D11
gtgaaagtgaaagtgttagttgctcagttgtgtccaactctctcccccaccaggttcctctgtccatgagattctccaggtaaggatactggagtaggtagccatccccttctccaaaaggagtacgaaacttggacaaatctttccttttcaccttttaatttttctgaactggtttggtcttctattacctggaagtgatatta

SEQ ID NO: 3725 - DNA, 124 bp, Bos taurus
  Clone ID: 16-LIB34-060-Q1-E1-D7
gtttattcctgctttgaattaatcaggttttttaaaacttgcaattacatttatcctaatacagcactgattttgcagtagactgatttgtaattgctttcctttttccaataaaataatctgt

SEQ ID NO: 3726 - DNA, 362 bp, Bos taurus
  Clone ID: 16-LIB34-061-Q1-E1-D7
gtttcagaccatgaattttaaatcattataactaggctcaagcacatccttaataatcaaaataggaaccattacaatcaatgcatttttgccaacaagaaataagtttgtttattcttgtagcgtaaaaatctgtgcttcgggatttgaagaactcttggaaagtatttcctgcctcctgctggttgtggaggcattttccctgccaaaagttgttgagatgcttgaagaagagttagttggttggcaagaggtcaggtgaatatggcagatgaggcaaaacttcgtagcccaattcattcaacttttgaagcgttggttgtggggtgtgtggtcaggcgttgttgcagagaattgggccc

SEQ ID NO: 3727 - DNA, 423 bp, Bos taurus
  unsure (39),(271): unsure at all n locations; Clone ID: 16-LIB34-064-Q1-E1-D7
ccacgcgtccgagccctcagctgcctgcctgctgacacncggggcctctctgaagcaccatgaaatccttcgttctgctcttttgcctggctcagctctggggctgccactcgatcccgcttgacccggttgcaggttataaggaaccggcctgtgatgacccagacacagagcaagcagccttggctgccgtggactacatcaacaagcaccttcctcggggctacaagcacaccttgaaccagattgacagtgtgaaggtgtggccgangcggcccacgggagaagtgtatgacattgaaatagataccctggaaaccacctgccacgtactggaccccacgcccctggcgaactgcagcgtgaggcagcagacgcagcacgcggtggaaggagactgcgatatccacgtgctgaaacaag

SEQ ID NO: 3728 - DNA, 178 bp, Bos taurus
  Clone ID: 16-LIB34-065-Q1-E1-D11
cgccgcctccagcacgcactgcacagggtcggatatggtggttgtcgacactgatcatggtcctgctatcaatggaggcacgtctgaggagcatttccaggccttcttcaaagagaagacctttggcgccggggatgcgtactgtggtctgcgatgcctgttcgagaagaaacatgtg

SEQ ID NO: 3729 - DNA, 213 bp, Bos taurus
  Clone ID: 16-LIB34-065-Q1-E1-D7
ggaggccgccatcaaccgccagatcaacctggagctctacgcctcctatgtctacctgtccatgtcgtactattttgaccgtgatgatgtggctttgaagaactttgccaaatactttcttcaccaatctcatgaggagagggaacatgctgagagactgatgaagctgcagaaccagcgaggcggccgaatcttccttcaggatatcaagaa

SEQ ID NO: 3730 - DNA, 252 bp, Bos taurus
  Clone ID: 16-LIB34-066-Q1-E1-D7
actagttctagatcgcgagcggccgcccttttttatttttttatttcttgtcattagcagtgaattttaattaaaatcggaaattaagatggagtgtaggcaaacacaacagtgaacaaggaaatactttctaagcacacatgagttagagaacatttccatgctcacagatggctcaataggcggaccaggtcctataaacctgaattttttttatggtcaatactggtaagcagaaatgtagaacaggac

SEQ ID NO: 3731 - DNA, 201 bp, Bos taurus
  Clone ID: 16-LIB34-067-Q1-E1-D11
gagaaagtaaacccccggactcctcaaaggatgagtgcatggtgaagtggtgtgcaattggtcaccaggagaggacaaagtgtgatcggtggagtgggttcagcggcggggcaatagagtgtgaaacagcagagaacactgaagagtgcatcgccaagatcatgaaaggagaagctgatgccatgagcttggacggaggct

SEQ ID NO: 3732 - DNA, 234 bp, Bos taurus
  Clone ID: 16-LIB34-067-Q1-E1-D7
gccatgatgtggacttgaacttcctggaggtcatgtccctggagaacaacggacgtgtccagagaatctacgaggatcatgatgctacccagcagctgcagggtttctatgagcaggtagccaaccccctcctgagggatgtggagttgctgtacccccgggaagccgtctcagacctgacccagcaccgccataaacagtactacgaaggctcggaaatcatggtggcggggc

SEQ ID NO: 3733 - DNA, 210 bp, Bos taurus
  Clone ID: 16-LIB34-068-Q1-E1-D7
cactccagtattcttgcctagaaaattccatggacagaggagcttggggggctacagtccatgggtcgcaaagagttggatgtgaatgagtgactgagcacagacacagcacattacactgaccatccattcataccagctgcatgccacatacatgacacagtgttttacatctgggaaacatcactgacgttaaagagaaaagttgct

SEQ ID NO: 3734 - DNA, 210 bp, Bos taurus
  unsure (184)...(185),(203): unsure at all n locations; Clone ID: 16-LIB34-069-Q1-E1-D7
agaactggtgaaggatttcattgttgagccaatgcttgctgccaagtttccatatcccttacccactgtgtccctgggagtatgttaattaatatagttggtatatagaaaaaataagtagtagccttgatgttaacaactgtagacccttgagttaaattctttccttgttatagcccattgnncacctttgccctataganaaatgca

SEQ ID NO: 3735 - DNA, 393 bp, Bos taurus
  unsure (335),(339): unsure at all n locations; Clone ID: 16-LIB34-071-Q1-E1-D11
aggtgatgaaattctgggccaactttgctcggaatgggaaccctaatggggagggccttccccattggccagcgtatgaccacaaagaagggtaccttcagattggtgtcaacactcgggccgctgagaagctgaaagacaaggaagtagctttctggaatgagcttctgtccagggaggtggcaaagaaggcaccacacttaaaacatgttgagctgtgaacgggaggctcgactgggtccccagatggaggtttctctagaagtgtttatgtgccaaagaggcgtcttattgtggaggctgaggaattatccgatgggagtgggagaggtcangganggggagtttctgtttctggtggctcgattttggaataaacgttcctttggagac

SEQ ID NO: 3736 - DNA, 408 bp, Bos taurus
  Clone ID: 16-LIB34-071-Q1-E1-D7
agaggaacttcagagctgtccagtgaaggaacgcagcattcttactcagaggaagaaaaatatgcttttgttaactggataaacaaagctttggaaaatgatccagattgccggcacgtcataccaatgaacccaaataccgatgacctgttcaaagctgttggtgatggaattgtgctttgtaaaatgatcaacctttcagttcctgatacaattgatgagagagcaatcaacaagaagaaactcacaccattcatcattcaggaaaacttgaacttggcactgaactcggcttcagccattggatgtcatgttgtgaacattggtgcagaggatttgagggctgggaaacctcacctggttttgggactgctgtggcagatcattaagatcggtttgtttgctgac

SEQ ID NO: 3737 - DNA, 414 bp, Bos taurus
  Clone ID: 16-LIB34-072-Q1-E1-D7
tcgtgggtcgatacaagcctctacagtgagtcgtaatatcaagagccagctccaagaggcccctctagaatggaaggcactgctggaaatgcagcagacgaaaatggtgttggaaactttcggtggcgatggacatgccataggagactctgtatctcaaggaacaggattagcaccaggaagtcccagaaagcctggaaccagtagtattggaaatgtgaaccctgggagctatggacctggacgtagtggcacttggaaccccggccgccctgagcccggaagtgctggcacctgtaaccccggccgccccgagcccggaagtgctggcacctgtaaccccggccgccccgatcccggaagtgctggcacctggaaccccggccgccccgaacccggaattgctggcacctg

SEQ ID NO: 3738 - DNA, 169 bp, Bos taurus
  Clone ID: 16-LIB34-073-Q1-E1-D7
acaaccacaggcatctcagcctaccctgagagtaagaggaaaaaagagaaatgaaaactcagagcttattcatctgttttccttttctgttggtgttaaaccaacactctcactaaagaacgtaaatttctttaaatattttgcttcttttgtttgtgctacaattaat

SEQ ID NO: 3739 - DNA, 415 bp, Bos taurus
  unsure (275): unsure at all n locations; Clone ID: 16-LIB34-074-Q1-E1-D7
aatggacggtagcccaccgggctcctctgtccttggggattctccaggcaagaatgctggagtgggttgccatgccttcctccgggggatcttcccaacccagggattgaaccacatctcctgggtcttttgcattgcaggtggattctttactgctgagtcatcgggaaagcccgtaacttaacgtattcatctccatttttgatttattaagttaaactctatctaaatgtatcaatgtgatttgtcaatttttatcagttcaggtaccacanagatattcagttctaggccattgcaaataaatcaaatatcccaataaagccactcacatgattttctggtttcctggtatatataaaagttatattcatactagactatagtctgttaagtgtgcaatatcattgtgtct

SEQ ID NO: 3740 - DNA, 444 bp, Bos taurus
  Clone ID: 16-LIB34-075-Q1-E1-D7
ccgggtcgacccaaacgtccaaaggacgtggtggcagaaaaatgaagaggattctggttttcctccttgctgtagcctttgtgcatgctctagagagaggccgagattatgagaaagataaagtctgcaaggaccttgccagcctgggaagagatgacttcacatctttgtcaatggtcctatacagcagaaaatttcccagtggcacctttgaacagatcagccatcttgtgaatgaagttgtttccttaacagtaacctgctgtgcggaaggggccgatcctgactgctatgacaacaggacttcagcattgtctgacaagtcctgtgaaagcaactctccattcccaatgcaccctggaactcctgagtgctgcacccatgaaggccttgaaaagaagctctgtatggctggcctgaaacacaagccacaggaatttcaac

SEQ ID NO: 3741 - DNA, 457 bp, Bos taurus
  Clone ID: 16-LIB34-077-Q1-E1-D7
cgtccgcacagactgcctctgcggcaggagttacggccctatcagagtcttttttagagcctcttgtagctggcgatcagaaggcctctttggccagtctttctcagtagttctgcccgttcagggacttagagggatcccttgcctggggtccttctctgtagatcagagcatcaggcacttaaaggggcactctgggtggggtcctactctgtagttcagtgcgtcaggcatttgatgggccagcctctctattgttcagctgcgatgctagcttgtggcaagagagagaggtgatggctccaccctctacaccccgtgactctacagtattgccttacttccatggctgcctggctttccccacaaggcatttctcaccacgatctcctctctcacatcctctcaatctgtcactctgcagtcaattgcagctcttgccctgtgtttgctccac

SEQ ID NO: 3742 - DNA, 203 bp, Bos taurus
  Clone ID: 16-LIB34-078-Q1-E1-D11
agcggccgcccttttttttttttttttttttttttttttttttttttttttttttttttttttttttttttttttttttttttttttttttgttaggtttgtgaaaaggaacaaaaaccggtttaaggaccagggccttttggcgctgcccgggaaaaatcccacagaaaaaccgagggggcccaaggggccttgaagccaac

SEQ ID NO: 3743 - DNA, 375 bp, Bos taurus
  unsure (277): unsure at all n locations; Clone ID: 16-LIB34-078-Q1-E1-D7
cctaaatttcctaatattacagtactgagtacaacctgttcataactcttgatctaatgtcttcatatgactagcatgtataatagctttcatagtaaaaataggactatatggcctccacctttgactacctaaagctcacgtagaagcccccatcgcaggctccatagtccttgcagcagttctactaaaactaggggggtacggtatgctacgaatcacactaattctaaaccctatgaccgactttatagcatacccattcattatactctcnctatgaggcataattataaacagctcaatctgcctccgtcaaacggacctaaaatcactcatcgcatactcctctgtaagccacatagcactcgttat

SEQ ID NO: 3744 - DNA, 415 bp, Bos taurus
  Clone ID: 16-LIB34-079-Q1-E1-D11
aggcagaaccaacaagaccctaaacatctaccttctggactccaatctgttctggttgtatgcggagaggctgggtgctccgagcgccgcacgggtgaaggagtttgctacaattgttgacgtgaaggaagagtctcactatatcttggatccaaaacaggctcttatgaagttcaccctagagtctttcattcaaaacttcagcgttctctacagtcccctgaaaaggcatcttattggaagtgactctacccagttcacttctcagcgtttaatcactgaagtgacgactgatactttctgggaagtagtccttcagaaacaggacgtgttgctactttactacgcacagtggtgcggcttctgtccagccctcaatcacgtcttcatccagctagctcggctcctgccctca

SEQ ID NO: 3745 - DNA, 372 bp, Bos taurus
  Clone ID: 16-LIB34-079-Q1-E1-D7
acacaggtgttggacggagcagcttgactcttcatttgtctaccttcttacctacccacctatgactttttttttttccctctgttttagctgactctccatgtctgtaagtgttttgagtatggcggtaaatgttctaatctcagaaccgtttgtgagttgcgtagtgtggtagaattaaaggttgacgtggccctgcttctgtcacctccaagcataatgggactgctgctgtagtatcaccaggtcctttcagtcttcacggtggagaactcttggccaaaggttttgggggggaggaggaggcagtcagctgtctggttaaagttaataccagatagtgcccctcatcagtgtcctttttaaaaaata

SEQ ID NO: 3746 - DNA, 421 bp, Bos taurus
  Clone ID: 16-LIB34-080-Q1-E1-D7
agtcttcagggattaccggtcttcttatctagcaagaatgaacgcttcccgagaagtaaaatcggtagaacttcctaactgtaaattaataaaaggaatagaaactggtgctgaagacctggagatacttcctaatggactcgctttcattagttccggattacgatatcctggagtaaaaagctttgaacctgataagcctggaaaaatactgctgatggacctgaacaaagaggatcctacagtgttggaattgaagatgactggaagtaactttgatgcgtcttcatttaaccctcacggcattagcacattcacagatgaagataatactgtgtacctgctggtggtgagccatccagacgttaagtccacggttgagttgtttaaatttcaagaagaagaaagtcacttttgcatc

SEQ ID NO: 3747 - DNA, 399 bp, Bos taurus
  Clone ID: 16-LIB34-082-Q1-E1-D7
ggagaaagcctgaaatttcaaaatgctcatcaaaacttaattagtgcaataaagactgccagcagcttactgtatatgcactttatgatttaagatcctccagtgtctaattctgagaataatgtccctttcatgtagctccgttgctcatagtcgaggcaacatctttggcagcactttctacaaagtctacttaatcacagagatgtcacttacctaggatgtgcatgcatgatcagtcatgtctgattcactgtgaccacatggacagtagcgcaccatgctcatcttcctcatgatgttttccaagcatgactacgatcgtggcttgccatttcttactccatcggatttttttctgacccaggaactgaatgtgcatttcccaggcttcctgca

SEQ ID NO: 3748 - DNA, 404 bp, Bos taurus
  Clone ID: 16-LIB34-083-Q1-E1-D11
agtgacagggcagatcttgccaagtacatatgtgataatcaagatacaatctccagtaaactgaaggaatgctgtgataagcctttgttggaaaaatcccactgcattgctgaggtagaaaaagatgccatacctgaaaacctgcccccattaactgctgactttgctgaagataaggatgtttgcaaaaactatcaagaagcaaaagatgccttcctgggctcgtttttgtatgaatattcaagaaggcatcctgaatatgctgtctcagtgctattgagacttgccaaggaatatgaagccacactggaggaatgctgtgccaaagatgatccacatgcatgctattccacagtgtttgacaaacttaagcatcttgtggatgagcctcagaatttaatcaa

SEQ ID NO: 3749 - DNA, 381 bp, Bos taurus
  Clone ID: 16-LIB34-083-Q1-E1-D7
actgcctcgagcagggagctggtggctcttccatccccagaccagccatgcctgtgagtgacaccccagacagaggaatcagagcgatgctgagtcccagcggactgctgttgttacggactgcctgcctggcggtaaacgccagctccgtgcccacattgcccgatgacattcaggtgcaggagaacttcgacctgtctaggatggatgggaagtggttcaatgtggccgtgggctccacctgcacatggctgaagaggttcaatgatatgatgaccatgagcacagtggtgttgaaagcggggccgacgagcactgagatcagcgtcaccaacactcacaggcagaaacgtgtctgtgaatcgatctctggctactatg

SEQ ID NO: 3750 - DNA, 423 bp, Bos taurus
  Clone ID: 16-LIB34-084-Q1-E1-D7
aatcccacccactaataaaaattgtaaacaatgcattcatcgaccttccagccccatcaaacatttcatcatgatgaaatttcggttccctcctgggaatctgcctaatcctacaaatcctcacaggcctattcctagcaatacactacacatccgacacaacaacagcattctcctctgttacccatatctgccgagacgtgaactacggctgaatcatccgatacatacacgcaaacggagcttcaatgttttttatctgcttatatatgcacgtaggacgaggcttatattacgggtcttacacttttctagaaacatgaaatattggagtaatccttctgctcacagtaatagccacagcatttataggatacgtccttacatgaggaacaatatcattctgaagagcaacagtcatca

SEQ ID NO: 3751 - DNA, 395 bp, Bos taurus
  unsure (342): unsure at all n locations; Clone ID: 16-LIB34-085-Q1-E1-D11
agcacacgcccctggaggaaaacttctgccggaacccagacggggatagtcacgggccctggtgctacaccacggacccagggactccattcgactactgtgcgctgcggcgctgtgatgatgaccaacagccgtccatcctggagactgcacaccaggtgctgtttgataaatgtggcaagagagtgacacgagtggacccgttgcactccaagctgcgtgtggtcgggggccagcctgggaactcaccctggacagtcagcttgcgcaaccggcagggccagcacttctgcggaggctccctagtgaaggagcagtgggttctgactgcccggcagtgtntctcctcctgccatatgtctctcgtgggctatgaggtgtggctgggcaccctg

SEQ ID NO: 3752 - DNA, 327 bp, Bos taurus
  Clone ID: 16-LIB34-085-Q1-E1-D7
agccatgaagaaaaccaccatgaagataatcccacttaacagacttgccatcggagaaggacagcagcaccaactggggggagccaaacaggctggagacgtataaaagaccatttcaaaagtgatttacttttttaaagaactttatctgaaaagaaaaagataatatttttcctatgggacaatggacttgcaaagcctcacttcactttaaaagtaaaaagaacccatgttgagaactccactaacagttttatgccggtgataatttatctacataccatttcaataaatattttgtttcctaagactaaaataaaaataaaa

SEQ ID NO: 3753 - DNA, 458 bp, Bos taurus
  Clone ID: 16-LIB34-086-Q1-E1-D7
cccaaatctgccgagacgtgaactacggctgaatcatccgatacatacacgcaaacggagcttcaatgttttttatctgcttatatatgcacgtaggacgaggcttatattacgggtcttacacttttctagaaacatgaaatattggagtaatccttctgctcacagtaatagccacagcatttataggatacgtcctaccatgaggacaaatatcattctgaggagcaacagtcatcaccaacctcttatcagcaatcccatacatcggcacaaatttagtcgaatgaatctgaggcggattctcagtagacaaagcaacccttacccgattcttcgctttccattttatccttccatttatcatcatagcaattgccatagtccacctactattcctccacgaaacaggctccaacaacccaacaggaatttcctcagacgtagacaaaatccca

SEQ ID NO: 3754 - DNA, 446 bp, Bos taurus
  Clone ID: 17-BOVMS1-002-Q1-E1-E1
gggtcgaccccaaaaaactagattagggtgatggttcacgtagtgggccatcgccctgatagacggtttttcgccctttgacgttggagtccacgttcttaatagtggactcttgttccaaactggaacaacactcaaccctatctcggtctattcttttgatttataagggattttgccgatttcggcctattggttaaaaaatgagctgatttaacaaaaatttaacgcgaattttaacaaaatattaacgcttacaatttaggtggcacttttcggggaaatgtgcgcggaacccctatttgtttatttttctaaatacattcaaatatgtatccgctcatgagacaataaccctgataaatgcttcaataatattgaaaaaggaagagtatgagtattcaacatttccgtgtcgcccttattcccttttttgcgggattttg

SEQ ID NO: 3755 - DNA, 403 bp, Bos taurus
  Clone ID: 17-BOVMS1-003-Q1-E1-E9
gtcggaatcacgggtcgacgacgcgtccgttctagatcgcgagcggccgcccttttttttttttttttattttatatgacataatcatttttattatacatttatttaaatcactttggaccaagcatgtccttcggttttacccactcatcaaactgctctgcagtgagatagccaagttcaatagcagttgcctttaaggttgatccatttttgtgtgcagtcttggcgatcttggcggctttgtcataccctatgtgaggattaagagctgtcaccaacattagggactcattcatcagcttgctaatcctttctgtgttggcctggattcccacaacgcagttttctgtgaaggaaaccgatgcatcccccagcagtcgggctgagtgtaacacatttt

SEQ ID NO: 3756 - DNA, 376 bp, Bos taurus
  Clone ID: 17-BOVMS1-005-Q1-E1-E1
atgaagatgtgtctaatagcaaagggttggttgaaccccagagtttaaatatctctggcctgagtattcacccagtaaaagaaccatccagaaagtactgtttttagcattatgtatctgtgtgttcctgctttgttatttacactgttttgtattgtacaatatagatgctcagcactgccccccttctccgattgcttatgacaaacaaaaatgatgcacattactgtgaatttttataccactcattttttaaagggctgcctaaaaattctgctccataacgtggtggtgtacacaacatacgacacacttttttttaaaacaatctgtcacctcaattcactgctgatcaaataagtctaacagattcatc

SEQ ID NO: 3757 - DNA, 434 bp, Bos taurus
  unsure (329),(410): unsure at all n locations; Clone ID: 17-BOVMS1-006-Q1-E1-E1
cgtccgtcgaaacgatcactgaagtcgccaggagcctgggacgcgtgcgtgactcttaacagtcaccgtttgaagatgtgcaaagctcatggtgtctgtaatgtgctccacaatggccagtccagttgctatctatttttttatctagaggtgtaattgatgtgacagaatgacgtatgagaattaagacaatgaaatactttatttctgggtggaaagaatatatcagatttatctgtttcaaaaaaaaaaaaagacaagttatcaccaaaaccccctttcccatcttgcactgtttgttttgaattgattttgggggaagagatgtntttctcaactgtctactttgtttgaacacttcttttgtggttcaagtgctggtttgtgttgtggggacaaacagttgtccntaaaactttaaaagcaagcatcac

SEQ ID NO: 3758 - DNA, 316 bp, Bos taurus
  unsure (215): unsure at all n locations; Clone ID: 17-BOVMS1-007-Q1-E1-E9
atgcgacgtcatagctcttctatagtgtcacctaaattcaattcactggccgtcgttttacaacgtcgtgactgggaaaaccctggcgttacccaacttaatcgccttgcagcacatccccctttcgccagctggcgtaatagcgaagaggcccgcaccgatcgcccttcccaacagttgcgcagcctgaatggcgaatgggacgcgccctgtancggcgcattaagcgcggcgggtgtggtggttacgcgcagcgtgaccgctacacttgccagcgccctaagcgcccgctcctttcgcttttctcccttccttt

SEQ ID NO: 3759 - DNA, 467 bp, Bos taurus
  Clone ID: 17-BOVMS1-008-Q1-E1-E1
ggtcgaccgacccgtccgattaattcacaccaacaatacaactatcactaaacctacgcatagccatccccctgtgatcacgagccgtcattacaggattccgcaatacaactaaagcatcacttgcccatttcttaccacaaggaacacccaccccactaatcccaatactactaattattgaaactatcagcctttttattcaacctatagccctcaccgtgcggttaacagctaacatcactgcacgacacctattaattcacctaatcggatgagctacacttgcactaataagcattatcactacaatagctctaattacattcaccattctaatcctactaccaattctaaagtttgcagtaactataaaccaagcctaagtattcactctcctagtcaacctatagctgcatgacaacacataatgacacaccaaactcatgcttatcatatagtaaacc

SEQ ID NO: 3760 - DNA, 139 bp, Bos taurus
  Clone ID: 17-BOVMS1-009-Q1-E1-E1
cagttcaaaatgagcaacactgagggctctgttaaaagattttccaagagagctgccccaattttaaaagtaaacaataatgcaccttcagaggaaataactttcagggtcctcctccaaaatgaaaagtaatgcctcc

SEQ ID NO: 3761 - DNA, 246 bp, Bos taurus
  Clone ID: 17-BOVMS1-009-Q1-E1-E9
cgcgtccgacataaactctgtttaaagatcatcagatttgtcaaagacagatctcactttctttaactgtgcactgacatcataatctcaaccatttggcaccctttattatgtcacacctattatcttaatgaaacagcgtaaagggtcggacccttctttcgattcaaacttatcttctacactgtaatgtcccaagtaccctctgtcatggtacccaaaatgctttcatcggtcttccttttt

SEQ ID NO: 3762 - DNA, 404 bp, Bos taurus
  Clone ID: 17-BOVMS1-010-Q1-E1-E1
ctgaaaaccataccaccgacaggccgctcttcatcctatcagcatgtgatctgggatcctgccaaagtggggtcagacgccaccaatgttccatctggcccagtaccactgaaagtgaataaattctggagggtcagcctggaaaaaaatgcgaaaaatcaacctttcgccaactggcgtaaaaacaaaaaaagcccacatcgatcgcccttcccaaaaagtatgcacaacctgaatgagcaaatgggacacacacaaatgggcgggcactaaacggggtcaaagttaagtttcacgcgcagcgtaatccatacacctgcaaacgggccaccaaaatgaaattaacgggccgtcgtttaaaattctcgcaacgggaaaaaccttgcggtatccaactttaatcc

SEQ ID NO: 3763 - DNA, 369 bp, Bos taurus
  Clone ID: 17-BOVMS1-012-Q1-E1-E1
cgccgagcatcagagtcgtttccactgagtcagctcatcccacgaggtggtcaacgtactggagtttcagctttagcatcattccttccgaagaactcccagggctgatctccttcagagtggactggctggtctctgaatagtcttctccaacaccacagttcaaaagcagcaaatcctcggtgctcaattgtaagatttagcaactgtacaattacatgtgtatgagcactgtgctttaacaatgcaatgtacgtaccttagctaatagattcttgctaaagtatcctaaccatcatcgaaaccttcagcaggttataatctcaaaatcactgatgaccatagcaactattataagtttgaaatgtt

SEQ ID NO: 3764 - DNA, 477 bp, Bos taurus
  Clone ID: 17-BOVMS1-013-Q1-E1-E1
agcaaagcaagtctcttgaaaaaccaaaacagaaaaagaatcgctgtttcatgtgcagaaagaaagtgggacttactgggtttgaatgccggtgtggaaatgtttactgtggtgtacaccgttactcagatgtacacaattgctcttacaattacaaagctgatgctgctgagaaaatcagacaagaaaatccagtacttgttggtgaaaagatccagaagatttgaactcctgatggaatacaaaatcctttgaccatctgcaaactaaaaactgacttgaggttttcttttcctagtcattgggaatgtagagcaatgtatcttgcatagacctgtaatcatacatgtcatcagaagaatagatttttgtttttgttttgaaaatgactctgaacatttatttccattgcagtttctgtggctgaaaaaagtaaactttacgagtattatccttttaagatcatttaaattttag

SEQ ID NO: 3765 - DNA, 331 bp, Bos taurus
  Clone ID: 17-BOVMS1-013-Q1-E1-E9
caaacctgatggctctttccacagggcaaggagtggacctcttcatgcttgacccagctcttggtgaatttgtcttggtggaaaaagatgtcaagattaaaacgaaaggaaagatttacagcctcaacgagggctatgccaagtattttgatgctgccaccacagaatatgtgcagaaaaagaagtttcctgaggactgcagtgctccctatggggccaggtacgtgggctccatggtggctgatgtgcaccgcagccttgtctatggagggatcttcctgtgcccatcagaccataaaagtctgaagggcaagctcaggctcctgtatga

SEQ ID NO: 3766 - DNA, 437 bp, Bos taurus
  Clone ID: 17-BOVMS1-014-Q1-E1-E1
ttattactatgctgatctcactacaactattcctaattataacctttaccgccatggaactaatcttattttatattctatttgaagcaacactagtcccaacactcattattattacccgatgaggaaaccaaacagaacgcctaaacgccggactctatttcctattctatacactagctggctccctacccctattagtcgcactaatttatatccaaaacacagtaggatccctaaatttcctaatattacagtactgagtacaacctgttcataactcttgatctaatgtcttcatatgactagcatgtataatagctttcatagtaaaaataccactatatggcctccacctttgactacctaaagctcacgtagaagcccccatcgcaggctccataatccttgcagcagttctactaaaactaaggggg

SEQ ID NO: 3767 - DNA, 359 bp, Bos taurus
  Clone ID: 17-BOVMS1-015-Q1-E1-E9
atgcgacgtcatagctcttctatagtgtcacctaaattcaattcactggccgtcgttttacaacgtcgtgactgggaaaaccctggcgttacccaacttaatcgccttgcagcacatccccctttcgccagctggcgtaatagcgaagaggcccgcaccgatcgcccttcccaacagttgcgcagcctgaatggcgaatgggacgcgccctgtagcggcgcattaagcgcggcgggtgtggtggttacgcgcagcgtgaccgctacacttgccagcgccctagcgcccgctcctttcgctttcttcccttcctttctcgccacgttcgccggctttccccgtcaagctctaaatcgggg

SEQ ID NO: 3768 - DNA, 445 bp, Bos taurus
  Clone ID: 17-BOVMS1-016-Q1-E1-E9
gagccttatcagtattaaatttatcaaaaatcccaataactcaacacagaatttgcaccctaaccaaatattacaaacaccactagctaacataacacgcccatacacagaccacagaatgaattacctacgcaaggggtaatgtacataacattaatgtaataaagacataatatgtatatagtacattaaattatatgccccatgcatataagcaagtacatgacctctatagcagtacataatacatataattattgactgtacatagtacattatgtcaaattcattcttgatagtatatctattatatattccttaccattagattacgagcttaatttacatgccgcgtgaaaccagcaacccgctaagcaaggattcctcttcccgctccgggcccataaaacgtgggggtcgccatccaatgaatttttacaggcat

SEQ ID NO: 3769 - DNA, 438 bp, Bos taurus
  Clone ID: 17-BOVMS1-017-Q1-E1-E1
gtaatcaccgaggagctgaggtatttggagcccttaaaatgcctgattacctcggtgctgatcagaggaaaactaaagaagatgagaaggacgacaagcccatccgagcgctggatgaaggggatattgccttgctgaaaacttatggtcagagcacttattctaggcagatcaaacaggttgaagatgacattcaacaacttctcaagaaaattaatgagctcactggtattaaagagtctgacactggcctggccccaccagcactctgggatttggctgcggataagcaaacactccagagtgaacagcctttgcaggttgcgagatgcacaaagataatcaatgctgactcagaggacccgaagtacattatcaatgtgaagcagtttgcgaagtttgtggtggacctcagtgatcaggtagcacctaccgata

SEQ ID NO: 3770 - DNA, 359 bp, Bos taurus
  unsure (309): unsure at all n locations; Clone ID: 17-BOVMS1-018-Q1-E1-E1
tcatgcgaagtcatagctcttccaaagtgtcacctaaattcaattcactggccgtcgttttacaacgtcgtgactgggaaaaccctggcgttacccaacttaatcgccttgcagcacatccccctttcgccagctggcgtaatagcgaagaggcccgcaccgatcgcccttcccaacagttgcgcagcctgaatggcgaatgggacgcgccctgtagcggcgcattaagcgcggcgggtgtggtggttacgcgcagcgtgaccgctacacttgccagcgccctagcgcccgctcctttcgctttcttcncttcctttctcgccacgttcgccggctttccccgtcaagctctaaatcgg

SEQ ID NO: 3771 - DNA, 381 bp, Bos taurus
  Clone ID: 17-BOVMS1-019-Q1-E1-E1
cttggagccaatcttggatgccacatacgtcacgcagcgccacagaagcacatttgtcttccagaacaccgtgccttaggaatgctttagaatttgaactttataagacagacttaatgatacggaatattttctagatatcacttttattagattgaactgaaaatgtttgtgtaaattttttggccaaatttttttttaaacatagttaactttggactagggtacattgttacaaaataaataaacagtttttaaaattgtttaaacatggatatttggaatagctatcttagtgccaactgctttttatttttttacttcatcaatgtaggtgattcacctttaaagttttttgtttgtttggtttaatatcaccag

SEQ ID NO: 3772 - DNA, 148 bp, Bos taurus
  Clone ID: 17-BOVMS1-019-Q1-E1-E9
cacacccaggcacgcgcccaggcagcgggcagtgaactctcccgccgtttgcatcaaccgatagagggctctttccgggatcacaaacattaaccaaaacgttaatttatgtgacttggcagttattctataccatttcctgcccatt

SEQ ID NO: 3773 - DNA, 454 bp, Bos taurus
  unsure (436): unsure at all n locations; Clone ID: 17-BOVMS1-021-Q1-E1-E1
cagcgagctcctgcccgtctctccagacccagccgcagaaagcacccagccgccatgtcggacgaggaagtcgagcacgtggaggaagagtacgaggaggaagaagaggcccaggaggaagaggaagtccaagaagaggagaagccgagacccagactcactgctcctaagatcccggaaggggagaaagtcgacttcgatgacatccagaagaagcgccagaacaaagacctcatggagctccaggctctcatcgacagccactttgaggctcggaagaaggaggaggaggagctggttgccctcaaggagagaatcgagaaacgccgagcagagagagccgagcagcagaggatccgggcggagaaggagcgggaacgccagaacagactggcggaggagaaagccggcgggaggaggaagacgccaagagganggctgaggacgacctgaa

SEQ ID NO: 3774 - DNA, 438 bp, Bos taurus
  Clone ID: 17-LIB188-001-Q1-E1-E1
actttgcagaggccctggggccactggagagctttgaagcctggcctgatgacttgctcatcagcacctaccccaagtcgggcaccacctgggtaagcgagatcctggacctgatctaccaggagggtgacctggagaagtgtcagagagcccctgtcttcttgcgggtgcccttccttgagttcagcgcccctggggttcccacaggtgttgagcttctgaaagatacaccagccccacggctcctcaagacacacttgcctctggccctgcttccgaagaccctgctggatcagaaagtcaaggtgatctacatcgcccgcaacgccaaggatgtggccgtctcctattaccacttctatcgcatggccaaggtgcaccctgaccctggcacctgcgacagcttcctggagaagttcatggccgggggaagtgtgc

SEQ ID NO: 3775 - DNA, 439 bp, Bos taurus
  unsure (135),(156): unsure at all n locations; Clone ID: 17-LIB188-002-Q1-E1-E1
tggccgcgggataccaaaaaaccttcctcctgatactgcgctgctggacctgcaaaacaacaaaataactgagatcaaagatggagactttaagaacctgaagaaccttcatacactgattctcatcaacaacanaattagcaaaatcagccctgnggcatttgctcctttggtgaaattggaacgactttatctttccaagaatcaactgaaggaattgccagagaaaatgcccaaaactcttcaggagctgcgtgtccatgagaacgagatcaccaaagtgcgaaagtctgtgttcaatggattgaaccagatgatcgtcgtagaacttggcaccaacccgctgaagagctcaagcattgaaaatggagcctttcaaggaatgaagaagctctcctacatccgcattgctgacacaaatataactaccatccctcaa

SEQ ID NO: 3776 - DNA, 451 bp, Bos taurus
  Clone ID: 17-LIB188-003-Q1-E1-E1
ccatggccgccggataccaaatcaaatatgaggagctgcagacactggctgggaagcacggggatgaccttcgtcgcacgaagacggagatttctgagatgaaccggaacatcaaccgtctccaggctgagatcgagggtctcaaaggccacagggcttccctggaggctgccatcgctgacgctgagcagcgtggtgagatggctgttaaggatgctcaggccaagctggccgagctggaggccgctctgaggaacgccaagcaggacatggcgcggcagctgcgcgagtacatattctgacggagagatgaaaaacaatggacggcacatcctgaattctagggtagactcttgctggtgaaggacaccttcggtttactccattttttccaagcaacacctgaatgagaactctaacacctaattccttgtgggaaaatgaccaacga

SEQ ID NO: 3777 - DNA, 410 bp, Bos taurus
  unsure (164): unsure at all n locations; Clone ID: 17-LIB188-003-Q1-E1-E9
gatacagacacaatcagatgcagctgcagaaagaggggtccagtgatctgaagtcacataacgggatgcagcattactcagtccccacaaggcagctgtctcaaactttatgaaacgttagagacacatcagagtcctggtcactgtcaccacttgcagcctgngtgtaggtctgtctttttttcacgtgagcgcttcttcctctagatcacagctccagccaccacagctactactatgagagacaggccagcagtgatgcccatggtgaggaacgatgtctgacgatgttcccatctcatggtgaagggctcctgaagcccttcgtgctgcacatggtacgtgtatctctgctcctctccagaaggcacgaccagggccgcccacttctggaagtttccgtcacctga

SEQ ID NO: 3778 - DNA, 395 bp, Bos taurus
  Clone ID: 17-LIB188-006-Q1-E1-E1
tgggcccgggctacctgaatactcagtcgtcgacgaagcaatgtgcggcagatatcatccagctgggggagatgagagaggccccgcacaagtggccgtggccctgggcatggaggctcacctgccagggccactcgccttggtctgaattctcacctccgacgacccgggactgcctggtgaacgaccgccgcccacagtcacagtccttctcatccgagccatcagtgcagtcctcgttcccgtcacactgggggttgctcttgtccacacagagcccgttgaggcagcggtgggtgtgttcagtgcaggggacggctttcccgtcttggcacttggcctcatcggacccgtcgccacagtcgtccttcctgtcacactgctggctctgaagg

SEQ ID NO: 3779 - DNA, 248 bp, Bos taurus
  Clone ID: 17-LIB188-007-Q1-E1-E1
ccgcgggatcctttgcaaaggccatggggccactggagagctttgaagcctggcctgatgacttgctcatcagcacctaccccaagtcgggcaacacctgcgtaagcgagatcctggacctgatctaccaagaaggtgacctggagaaatgtcagagaaccccctgtcttcttgcgggtgcccttccctgagttcaacgcccctggggttcccaaaggtgttgagcctctgaaagatacacaacccca

SEQ ID NO: 3780 - DNA, 389 bp, Bos taurus
  Clone ID: 17-LIB188-007-Q1-E1-E9
gggatactcggtgaggataggaggctccatcctggcctccctgtccaccttccagcagatgtggatcagcaagcaggagtatgacgagtctggcccctccattgtccaccgcaaatgcttctaaatggactgcgagcagatgcgtagcatttgctgcatgagttaattcagaagtataaatttgccgtggcaaatgtatacacctcatgctagcctcatgaaactggaataagcctttgaaaagaaatttgtccttgaagcttgtatctgatatcagcactggattgtagaacttgttgctgattttgaccttgtattcaagttaactcttaccttggtatatgtttaataccctgtgcatatctttgatttaaacccctagttatatg

SEQ ID NO: 3781 - DNA, 433 bp, Bos taurus
  Clone ID: 17-LIB188-008-Q1-E1-E1
gccatggcggcgggatacctagggcatctcatcagaagggccacacccccaaaacatgcatatggacacgtcactttaaaataaagacctgtcaatattaagcaatcctatataccttatcaactaaagtatttgtaatcacaagaaatgtttcctacagatatagtttgcatatttattgcaagccattgactaaccacagacagggcatatgctatgatctgtgttcttgttattgttgtttttcatctggaagtgaaggatggcatctctaaatcattgggctaaaaacagaacacagccattccaagaagtcttcttcagtcttcagcttccaaagacggctgtgtgtggttggctgattggtctgcaggaaaagtccatttcctgtggaggatgtaattttctgcatgtagcaagcagtcaacagccc

SEQ ID NO: 3782 - DNA, 423 bp, Bos taurus
  Clone ID: 17-LIB188-009-Q1-E1-E1
acagagacatgtcaccatcaagcagctgcatgaacaagccatgcagtttggtcagcttctgacacacttggataccacgcagcaaatgattgcttgttccctcaaggacaatgccaccctcttgactcaggtgcagacgacgatgtgtgaaaacctgtccacaattgaggggaactttgccaacattgatgaaaggatgaagaaactgggaaagtgagcacctttgggtgatggaggacaggggtaatccctacccctttgaactccattaataccttacacagagtttccccttaattgtaactcttgcatcccatttgacactgggggcaagggcttcttgcatgtggggcttacaccccctcctctgaagagtagtggaagctggggatattaaatgatggtctccccttaaggcaaaag

SEQ ID NO: 3783 - DNA, 298 bp, Bos taurus
  Clone ID: 17-LIB188-010-Q1-E1-E1
atggccgccggataatcctccaaaaaaaaagttctccaggggcctaatccccaagaacaaaaccggtttctcaaagccaatcgggaaggtcacaacaacccggaaacaggcattggaacctgttgccttggaaggccccttcaaaatcgtcaacaacaatttcctgccgtggagcggagtcatggattggcaggacccaagccctgagcccacacccggtcaaagcggtggctgccctcgcacatctatgtgaaccaaggggagatcctgaggaccgagcaatggccgaggaaactgt

SEQ ID NO: 3784 - DNA, 315 bp, Bos taurus
  Clone ID: 17-LIB188-011-Q1-E1-E1
gccatgggcgcgggatacacgcgcagcaaccactgggctgtcggacacttaatgggaaaaaagagtgtggcagagtccccacaacttcatgaggaggagagcctgaaggagcagctgacggagtatgcccagtgggaagaagcgacaaggaacttgctaagcctcctacaagcaaatggggcccgaggccaccagatgcctccatgggagcccctgagcattcaccaacctgcctgggattccgaggacgtcagcaacttcaaagacacaggtcctcaccatgaatgaaggaacccccagctgaactgacaatga

SEQ ID NO: 3785 - DNA, 346 bp, Bos taurus
  Clone ID: 17-LIB188-011-Q1-E1-E9
acttatgatcggacagcccaccgggcactttgacaagcttgttgttgttcacatgaagttccctcaaatgaggactgttggccaaagagccattgtcaaccgcagagatgctgttgaaactcagtcccaacttagccaaattattcaatcctttcaggctagctgcagcaactttggtgacatttgttgccatcgacatgtaattcagtaagggaaggaggaagaccttgagggatggtagttatatttgtgtcagcaatgcggatgtaagagagcttcttcaatccctgaaacgctccattttcagtgcctgagctcttcagcgggttggagccaagttctacga

SEQ ID NO: 3786 - DNA, 295 bp, Bos taurus
  Clone ID: 17-LIB188-012-Q1-E1-E1
gccaagggcgcgggatacacgcgtaagttaaatcgcatggagtgtatatacggatgtgctgcagtcgaagaggtcgactcataagccggcatgcaggagtgagctcacattcacagatcactgacacccattggaggacgacacagatccacaagccaatgtccttgcctgccaaagcacatggactgctggggtcagagcgttaccgtctatggggtaagacagaatcggacgtaactgaaaggacttgtcaaaggcgatatcaacagtcacagcaccatgagcactgcataga

SEQ ID NO: 3787 - DNA, 286 bp, Bos taurus
  Clone ID: 17-LIB188-013-Q1-E1-E1
acctgcgtggtggggatgactgaagccccgcgacagcccaagcatcgaggacggctgctccgtgctccagctaacagttctccgcagtcagcccgcggctaacagcccctgtgcccgtccccgggaggatgacattagcgctgcccgccccacccgctcttttgttagtttagtttcctacgcattacctggctttcccggctagtccctctttatagccaaagaaatgaacattccaaggatttggaagtggaatctatgatgtgaaacactttgcctctcgagt

SEQ ID NO: 3788 - DNA, 223 bp, Bos taurus
  Clone ID: 17-LIB188-013-Q1-E1-E9
actttggaagtccactgtttcgattcccttggatcatggacgcatggttcccagcgtcacattaaatcgcacaacctggcatcatcttacccagagtgagcagggtcaagtcattggccacaaagcacgaggagaacaagagtgcagcatctattccatggaggtcacccaactcctgctccaggtccacgtggaatttactagttccagaaatatttctagt

SEQ ID NO: 3789 - DNA, 378 bp, Bos taurus
  Clone ID: 17-LIB188-014-Q1-E1-E1
gccatggcggcgggatactctgttaccctgaatgtcgttctctacactggattgacttgttctccttgtgtcttcagtgtggctttcttcttcaccattgtctgttgagcgagtgccaccgcacagcatgagactcccgtcccacgggctggtactcctgcacacgcagtcactgtatcgggagcaatcataaaactgttatttccttaccagatctcttcctttcagtagcctcgcctgcctaacttactgaacgagtagcaataatttgacaggcgtttttaggtgtctcttttggatcattcatttgcaaaaatattcacggggaaaggggcacacttttacttttttttctttttataaatgccctctgggggg

SEQ ID NO: 3790 - DNA, 405 bp, Bos taurus
  Clone ID: 17-LIB188-015-Q1-E1-E1
gccaaggccgcgggatacggaacagttttaaaaatacagaataaaatagctttatctctactattattcacaacatctggtccaaatattacatattaaaatacgtaaacgtttaatgaaggtatgttagaaaaacaatatgaaaattctttttaaaaacgccatagaagaattagacataaaaaacaaccccaccccaaataccctcaatatgcagaataaaaattaaaaccaaacaaaatcccagaaaggtatatagccaaagtcagtcacaaaaacttaaggaaaatataggcatccctactgttttaagaacagtcagaaactgactaacatgacaaaggttgctatgaatgaacaaaaagtgttttaacttgaccgtcagtaagatggtatcactagtgc

SEQ ID NO: 3791 - DNA, 392 bp, Bos taurus
  Clone ID: 17-LIB188-016-Q1-E1-E1
ccatagccgccggatactactcccccttcagatcgttcccgagggggtcactcttcttcaatcccaagccccgctttgcccggaacgggatgctggggtcggagttgtgggaattcaccgtgaagacctgcaggtagtgctggtcgtcgctctgcgtgaggttggccagctgggacacccaggtgaactgctcgttcagctgcttgagcagggccgacgtgttgagcatcttctgctggtaggactggagcagctggtcgtacaagcttttttttttttttttttttttatttttttttctaagatcaaggctttattttccatagctccagtgtcacaactgtagcagcacatcagaaacatccccacacagaatcacacatttctcccct

SEQ ID NO: 3792 - DNA, 425 bp, Bos taurus
  unsure (107),(417): unsure at all n locations; Clone ID: 17-LIB188-017-Q1-E1-E1
acagctttggtgcctgtgacactgcagatccctctgggatagtcgtctgctggagtcctggctgctctgccatccagggatgctgagagctgctgctgggaaggcanggtatcgggtatgcagccagcattgtggctcccagatgccagctggacagtgtgtacctgcccgggcggccgctcgaactaccacgctaagaacggccgcgcgttcgtggaatccccagcccgaaagctctcgcagtcttttgccctgcctgtcacaggaggcactgtggtaacgcccaagcagagcctgctgacagccatccacatggtgctgacagagcacgaccctttcaagcgcagtgcagactcggagctgaaagccttggtgtgcatggcgctgaacgagcagcgtctcgtgtcctggatgaanctcatctg

SEQ ID NO: 3793 - DNA, 258 bp, Bos taurus
  Clone ID: 17-LIB188-017-Q1-E1-E9
ccatcaagcaccaggactggactggaggaaaggatttcaattgcaaggtcaacaacaaaggcctctcggcccccatcgtgaggataatctcaaggagcaaagggccggcccgggagccgcaggtgtatgtcctggacccacccaaggaagagctcagcaaaagcacgctcagcgtcacctgcatggtcaccggcttctacccagaagatgtagccgtggagtggcagagaaaccggcagactgagtcggaggacaagt

SEQ ID NO: 3794 - DNA, 418 bp, Bos taurus
  unsure (381): unsure at all n locations; Clone ID: 17-LIB188-019-Q1-E1-E1
cgccatgggcgcgggatacggccagaacgccttggggatggaccccatgatggaacatgagatgggcggccaccaccctggtgctgactatccagttgacgggctgccagatctggggcatgcccaggacctcatggatgggctgcccccgggcgacagcaatcagctggcctggtttgatactgacctgtaaatcatcctttaggagttgcaatacaaatggattttgggagtgactcaagaagtgaagaatgcacaagaatggatcacaagatggaatttatcaaactctagccttgcttgttaaattttttttttttaatatctgtaatggtaccgagactgctgcgttcggcggcggaaccacactgaccgtcctgngtcagccaaagtccccaccctcggtcaccctgttccc

SEQ ID NO: 3795 - DNA, 289 bp, Bos taurus
  Clone ID: 17-LIB188-019-Q1-E1-E9
gccgcgggataccgcgtggtcagcgccctgcccatccagcaccaggactggactggaggaaaggagttcaagtgcaaggtcaacaacaaaggcctctcggcccccatcgtgaggatcatctccaggagcaaagggccggcccgggagccgcaggtgtatgtcctggacccacccaaggaagagctcagcaaaagcacgctcagcgtcacctgcatggtcaccggcttctacccagaagatgtagccgtggagtggcagagaaaccggcagactgagtcggaggacaagt

SEQ ID NO: 3796 - DNA, 391 bp, Bos taurus
  Clone ID: 17-LIB188-020-Q1-E1-E1
gtatatactgatggagaaagatgcactcaaggtggcccaagagatgaaggctgagtattgggcagtctcatctctcactggtgaaaatgtccgggagttctccttcgtgtggcgcgcctaacttttgaggtcaacgtgctggctgagctggagaaatcgggatcccggcgcataggggatgttgtccgcatcaacagtgatgacagcaacctctacctaactgccagcaagaagaatcccacgtgttgcccatgatgggtagaggactgtccagatactgcccgccctggggcattgtgccaccttgactcccccagaactcaatccctggacatttgcactgactgtttttccagaccaaagagctgcctctcggtggcagtatccctgg

SEQ ID NO: 3797 - DNA, 440 bp, Bos taurus
  Clone ID: 17-LIB188-021-Q1-E1-E1
ttgtgccgtgccgcaggctcccgtacgccaaggcggcgggatacaaaaaaaaccaaaatcactagatcagaaaaggtcaaaatctagtttttcttaatatctggcctcttacttttgggaacaaggaatacattgccatcgcttgtttgctgcaaggagtattcactcggagagtaaggcttttcattttcatcacgtagcatgctgaagacttcaagatacaaggtgctgagttgttttttcagtagatggaggcttttgtcattttctcctctttctttgagcaatttttctttttcatcttttaaatgatctaaatcttgctccagttccactatattttccagttttctttttctgcaattctgagcagccactttattcttacccctcctacgtatgtctccaattaatgcaagttgagcctcgttgaattgctc

SEQ ID NO: 3798 - DNA, 415 bp, Bos taurus
  Clone ID: 17-LIB188-021-Q1-E1-E9
tggcggcgggatacctttttaatcttgtcttaactctttcgaggagaaggctatggaggaccattccacgacactgggtagagtttggagggagggacgggccccagactgctatggatggagctgggctagcccagagctgagaggacaagcgtgttacaatctaatgcccatggccactggtgaaaacctcttgttcaggcagaatgttctccaggatgtcttggtcatctgaacatctccttttccattttgcttccatctcatgctctctgcctgcccagactctctggcctaattgagctgtctacaactggaaaagagctgggtggccagggggcagccaggccagtgaccacagccccccagcccccacatgctgctgccgcagacctgccaagcctggcgccatctg

SEQ ID NO: 3799 - DNA, 243 bp, Bos taurus
  Clone ID: 17-LIB188-022-Q1-E1-E1
ccgaggcgcatgcgcccgtacgccatgtacgccggatagactggtcagccatctcagttcggaacacagcctaaacaactttacctaaaacgagtagtgaagggtgatgtgcgaaaactttccaaattcaagatccgcattgaagaaccgccccgcaggaagcacatggttttcctgggaagggcaattctagcggccatcatgaatgacaaagacaacttctggatgacccgacacggatac

SEQ ID NO: 3800 - DNA, 439 bp, Bos taurus
  Clone ID: 17-LIB188-023-Q1-E1-E1
catggcagcgcgatacgtgccccggatcacgcgagggtcctctccgggctcgggggtcgcatcctcaggagtagtgtagcgagcaaattctggaaagtagtcctcaatcttcgattttccagcaaggactttctcagccagcagatcttgcttgttgaggaacagaatcacagagatggtgcgcagccatctgttattccagatgctcttgaagaggttcagagcctcctgcaggcggttggtctggttgtcctcccgaatgaccatgttgtagctgctgctggcaaccacgaagatgatggcagtcacatcattgaagcattggatccatttgcggcgttcatcgcgctggccgcccacgtcaaacatgtggaagttgactttgtccacctggaacttggtctcaaagattccagaagtcaggacacggcagcggagc

SEQ ID NO: 3801 - DNA, 423 bp, Bos taurus
  Clone ID: 17-LIB188-024-Q1-E1-E1
ttgtgccgaggcgcatgcgtccgtacgccatggacgccggataccttgaccattgtcctcagtctagacagaaggtctagtccctaccatagggaagctgaggggtagcaggagacccactgagacccaatcccaacactgaaacctgccaggctcccctttactcctccccaggtccttccagcgggaggacctgcgagggcaagcccaccttggcttgattgcctggcaactgagaccctgctctggggaagggaagaggtcagaggaagccctgcagagggctggggaggtggggcccatctctgagcaatcagagtaggaggaaagaatgtatgtgcctgatggagaaagggatcggcatgctgggaggtgagggacttatctggggtgctccttcctcctccgtttgtggtcacagac

SEQ ID NO: 3802 - DNA, 248 bp, Bos taurus
  Clone ID: 17-LIB188-025-Q1-E1-E9
gggatacgtccgaccaggaggcgggttcgagcccaactttatgctcttcgaaaagtgcgaggtgaatggcgagaaggcgcatccgctcttcgccttccttcgggaggttctgcccacgccaagtgacgacgccactgctctcatgaccgaccctaagttcatcacctggtccccggtgtgccgcaacgacgtctcctggaacttcgagaagttcctggtgggcccagacggtgtgcccgtgcgcaggt

SEQ ID NO: 3803 - DNA, 362 bp, Bos taurus
  unsure (282): unsure at all n locations; Clone ID: 17-LIB188-027-Q1-E1-E1
aaatgccctcaaggaagtgaaacaaattaagacccaaattgaacaaaccaatgaagaacgcaaatttacggtcaactccctaaaaggaaccaagaagaaaaaaagaggacccctgaatgacaccaaggattcctaaaacaaactgaaggcgtccaaggggtgtgcaatgagaccatgacagccctttgggaggaatgtaagccctgcctcaagcagaactgcatgaagttctacgcgcgggtgtgcaaaaacggatcgggactggttggccaccagcttgangagttcctaaaccagaactcccccttctacttctggatcaacggtgaacgcatcgattccctgatggagaatgaccggga

SEQ ID NO: 3804 - DNA, 419 bp, Bos taurus
  Clone ID: 17-LIB188-028-Q1-E1-E1
gccgagcctgcatgctgccgagccgccatgagcccgggatagcgggaagcgctggaaaagggtgatgttacagctcagatagctctgcagcctgcgttgaagttcaacggtgggggccatatcaatcacagcatcttctggacaaatctgagccctaacggtggtggagaaccccaaggggaattgctggaagccatcaaacgtgactttggttcctttgccaaatttaaggaaaagttgactgctgtatctgttggtgtccaaggctccggttggggttggctcggcttcaataaggagcagggacgcttacagattgctgcttgttctaaccaggatcccctgcaaggaacaacaggtcttatccccctgctggggattgacgtgtgggagcatgcttattaccttcagtataaaaa

SEQ ID NO: 3805 - DNA, 392 bp, Bos taurus
  Clone ID: 17-LIB188-028-Q1-E1-E9
ttgacaattgtcatcattcaaaacaaaaggtcaattcccaacaatagggaagctaaggggtagcaggagacccactgagacccattcccaacactgaaacctgcaaggctcccctttactcctccccaggtccttccagcgggaggacctgcaagggcaagcccaccttggcttgattgcctggcaactgagaccctgctctggggaagggaagaggtcagaggaagccctgcagagggctggggaggtggggcccatctctgagcaatcagagtaggaggaaagaatgtatgtgcctgatggagaaagggatcggcatgctgggaggtgagggacttatctggggtgctccttcctcctccgtttgtggtcacagacaggaagtcacagga

SEQ ID NO: 3806 - DNA, 377 bp, Bos taurus
  unsure (54): unsure at all n locations; Clone ID: 17-LIB2809-002-Q1-E1-E1
atggccgcgggatacagcagaaaggcctgaatgggcatatctctctggggatanggcactgctttctggggaacaggcaggactttggactgagaaagggacagcacggactgaggaggaaacatgacagttggaggaagaggctggtgaggctggtgcatccaagactggagcagaggcagaggaaggtgcagattttcaacatcagtgagagtcaggctctggctttcagtaaagggctcaactggatatttagggaagggcatttctttgtgcttaggagccatagcctccttcactttggagactcccattacttcaggctgaaggaaaggcggcaccaccacaggggtttgagtaagaggaaggatgttttg

SEQ ID NO: 3807 - DNA, 266 bp, Bos taurus
  Clone ID: 17-LIB2809-003-Q1-E1-E1
ggcagccatgaccgcgggatactccttggccaaggcggacagcgacatctccctgctggacgcccagagtgcccccctgagagtgtatgtggaggagctgaagcccacccctgagggcggcctggagatcctgctgcagaaatgggagaacggtgagtgtgctcagaagaagatcattgcagaaaaaaccaagatccctgcggtgttcaagatcgatgccttgaatgagaacaaagtccttgtgctggacaccgactacaaaaagt

SEQ ID NO: 3808 - DNA, 388 bp, Bos taurus
  Clone ID: 17-LIB2809-004-Q1-E1-E1
acaccagaaaagcctgaatgggcatatctctctggggatagggcactgctttctggggaacacgcaggactttggactgagaaagggacagcactgactgaggaggaaacatgacagttggaggaagaggctggtgaggctggtgcatccaagactggagcagaggcagaggaaggtgcagattttcaacatcagtgagagtcaggctctggctttcagtaaagggctcaactggatatttagggaagggcatttctttgtgcttaggagccatagcctccttcactttggagactcccattacttcaggctgaaggaaacgcggcaccaccacaggggtttgagtaagacgagggatgttttgtgggaggctgttagggatgggccc

SEQ ID NO: 3809 - DNA, 449 bp, Bos taurus
  unsure (441): unsure at all n locations; Clone ID: 17-LIB2809-005-Q1-E1-E9
ccgaggcctatgctcgccgtagccatggctagccgataccggcctgatcctaattgtaaagctcctgggctctgtgctcagggggcaggtggctgctgtcatcaagaagacaatcaacactggtaagcttgctgcctctcattctggaccttttaggggtggcatcactgtgcccctcccccatagggaagctcctgttgattctcttctagcaacagcttctacatggagtttctgtcttggctctgagaagctgtgaaagttacaatgccacttgccttcgaaatcctccttagtgttttgagtggagcctggggagcacttgtttgcaaggtcttgagaaagagccagcttaagttcaaattgctatgagttagaccttccttcctaccaggttccctgtttgcccaggactttactgagtctgtcaggattccttangtaataaa

SEQ ID NO: 3810 - DNA, 397 bp, Bos taurus
  Clone ID: 17-LIB2809-007-Q1-E1-E9
ccgccatgggcccgggacacctgggagttggaaagaagcaggtgctgaacctcagtttttccttgaacaagaaaaatggggtgcaatcaaaactgtgggctcattgctggtgctgtcattggtgcagtcctggctgtgtttggagggattctaatgccagttggagacatgcttattgagaagacaattaaaaaggaagttgtccttgaagaaggcacaattgcttttaaaaattgggttaaaacaggcacagatgtttacagacagttttggatatttgatgtgcagaatccagatgaagtgacagttaacagcagcaaaattaaagttaagcaaagaggtccttacacatacagagttcgttatctagccaaggaaaatataacccaggaccctg

SEQ ID NO: 3811 - DNA, 294 bp, Bos taurus
  Clone ID: 17-LIB2809-008-Q1-E1-E1
ctaagaaccaacttcacattataaaaaaggaaaccaatgcccaccaaaaagaacctatgatagaagtgagacgaggaactggccaacttcaaccctgaccttttgagacaattcaaccagctggatgccaaccaacctggtgcggggaagggtgttcaaataggcacacaatacactgatcccacatcattctcagatatccataatcacattggctctgaaaacattgaaaacactactaccccagtgtggagaagactcatgtaatctcagagagactccacttttaggctc

SEQ ID NO: 3812 - DNA, 151 bp, Bos taurus
  Clone ID: 17-LIB2809-008-Q1-E1-E9
cggcatactgttgagttaaaagcgccatcagggacatcgagcaagggtcaaacatccacatcgccattcatgcacccctgtagattattccttacatgtccattgtcactacagggcccaaggctcacagatgagttagcttcaaggaggt

SEQ ID NO: 3813 - DNA, 388 bp, Bos taurus
  Clone ID: 17-LIB2809-009-Q1-E1-E1
ccaaggattaaaaaagaatcgttactgcctgtagcaaagaatgtatcatactcaggggaaaatacagaagcgtggtatcctccgggtcatggagatatttatgccagtttctacaactctggtttgctcgacacctttataggagaaggcaaagagtatatttttgtgtccaacatagataatctgggtgccacagtggatctttatattcttaatcatctcatgaacccacccaatggaaaaccttgtgaatttgtcatggaagtcacaaataaaacccgtgcggatgtaaagggtgggacactcactcagtatgaaggcaaactgagactggtggagattgctcaagtgccagaagcgcatgttgatgagttcaaatctgtatcaa

SEQ ID NO: 3814 - DNA, 409 bp, Bos taurus
  unsure (17): unsure at all n locations; Clone ID: 17-LIB2809-012-Q1-E1-E1
agaaaggcctgaatggncatatctctctggggatagggcactgctttctggggaacacgcatgactttggactgagaaagggacagcacggactgaggaggaaacatgacagttggacgaataggctggtgaggctggtgcatccaagactggagcatacgcagaggaaggtgcagattttcaacatcagtgagagtcaggctctggctttcagtaaagggctcaactggatatttagggaacggcatttctttgtgcttaggagccatagcctccttcactttgcggactcccattacttcaggctgaatgaaatgcggcaccaccacaggggtttgagtaaggggatggatgttttgtgggaggctgttacggatgggcccagggaagggatacactagagactgtg

SEQ ID NO: 3815 - DNA, 252 bp, Bos taurus
  Clone ID: 17-LIB2809-013-Q1-E1-E9
gatacaaccctgaagaacctggccaccctggagcgctatgtggagacacaagccaaagaaaatgcctatgatctggaagccaacctgcctgcctgaaactgtaccagttcaacccggccttcttccagaccacggtcaccgcccagatcctgctgaaggccctcaccaacctgccccacaccgacttcacgctgtgcaagtgcatgatcgaccaggcccaccaagaagaacggcccatccggcagattttgt

SEQ ID NO: 3816 - DNA, 423 bp, Bos taurus
  Clone ID: 17-LIB2809-014-Q1-E1-E1
ctttattttattttttttttttttttttttttttttttttttttttttttttttttctttcatctttttttttattattttttttttatatttttttttaaacttttaaaaacctttttttaagggccaaaaaaggccccattttgaaatttaaaaaaggcccccccttgaaaataaacccccccaattttttaaaccgatccccatccaaagattttgggactaaaaggaaaatccttggaaaaatttccctaaaaaaatttcccccttgttaaaaaaaatcctttcccaagattttaaacgaagaaagcaaaacccacagacttttccttaacctgggttgcctcccaaggcccaccccttagggcaagttgcccggtaaaaccattgtaattttccaagggaaggaaaacaacctgcccc

SEQ ID NO: 3817 - DNA, 170 bp, Bos taurus
  Clone ID: 17-LIB2809-015-Q1-E1-E1
tggtgagattgaggaaagcctttcaagcagtgaggaatctattagacgcatcaggacgaaaattgagaagtttcagagtgaggaacaggagcagacagaggatgaactccacgatcgggtggagtcctttgcccagacacagtctctagtctatcccttccctgggctca

SEQ ID NO: 3818 - DNA, 379 bp, Bos taurus
  unsure (52): unsure at all n locations; Clone ID: 17-LIB2809-016-Q1-E1-E1
gggcccgggctacagcagaaaggactgaatgggcatatctctctggggatanggcactgctttctggggaacaggcaggactttggactgagaaagggacagcacggactgaggaggaaacatgacagttggaggaagaggctggtgaggctggtgcatccaagactggagcagaggcagaggaaggtgcagattttcaacatcagtgagagtcaggctctggctttcagtaaagggctcaactggatatttagggaagggcatttctttgtgcttaggagccatagcctccttcactttggagactcccattacttcaggctgaaggaaaggcggcaccaccacaggggtttgagtaagaggagggatgttttgtggg

SEQ ID NO: 3819 - DNA, 360 bp, Bos taurus
  Clone ID: 17-LIB2809-016-Q1-E1-E9
gccatgtagccgggatgaccacaaaggcctgaatgggcatatctctctggggatagggcactgctttctggggaacaggcaggactttggactgagaaagggacagcacggactgaggaggaaacatgacagttggaggaagaggctggtgaggctggtgcatccaagactggagcagaggcagaggaaggtgcagattttcaacatcagtgagagtcaggctctggctttcagtaaagggctcaactggatatttagggaagggcatttctttgtgcttaggagccatagcctccttcactttggagactcccattacttcaggcttaaggaaaggcggcaccaccacaggggtttgag

SEQ ID NO: 3820 - DNA, 341 bp, Bos taurus
  Clone ID: 17-LIB2809-019-Q1-E1-E1
ctggtaagaaagtggaaagcctttcaagcagtgaggaatctcctacacgcatcaataagaaaattgagaagtttcagagtgaggaacagcagcaaacagaggatgaactccaggagaaaatccacccctttgcccagacacagtctctagtctatcccttccctgggcccatccctaacagcctcccacaaaacatccctcctcttactcaaacccctgtggtggtgccgcctttccttcagcctgaagtaatgggagtctccaaagtgaaggacgctatggctcctaagcacaaagaaatgcccttccctaaatatccagttgagccctttactgaaagc

SEQ ID NO: 3821 - DNA, 440 bp, Bos taurus
  unsure (427)...(428): unsure at all n locations; Clone ID: 17-LIB2809-020-Q1-E1-E9
cgccaagggcccgggatacctcttatacaagctctgcccctgctccttcccctcactgacatagcccctcttccctgaagctatgaacatgtgagatacttgtagacacgcaagcacctggcaagtttgctttcaagagcctgctaatgaatgaggaaagtcagtccaggccaggtgtcagagcccccaccatgagaaaaagaggaatacaaaggactgagagtattaaacaaggcaaagctcttctttttctccaaaactagtcaggcctggagactacgtgatttgtttgaagacagaaccagcagagctgcagggtgactggaagccatcgccagagggaagaacacaagcttcaaggccagatgcccagctgagctctcagaacagcccagccaggaggacaggcaggagaaacaggggccanngccacaggaacc

SEQ ID NO: 3822 - DNA, 346 bp, Bos taurus
  Clone ID: 17-LIB2809-021-Q1-E1-E1
gccatgtacccgggatagacaacaatgacagcaaagaatatggactcttccagataaataataaaatttggtgcaaagacgaccagaaccctcactcaagcaacatctgtaacatctcctgtgacaagttcctggatgatgatcttactgatgacattatgtgtgtcaagaagattctggataaagtaggaattaactactggttggcccataaagcactctgttctgagaagctggatcagtggctctgtgagaagttgtgaacacctgctgtctttgctgcttctgtcctctttctgttcctggaactcctctgccccgtggctacctcgttttgcttctttgt

SEQ ID NO: 3823 - DNA, 271 bp, Bos taurus
  Clone ID: 17-LIB2809-022-Q1-E1-E9
ctccgaccgacatgggggcgggctactccttgaccatggcggccagcgacatctccctgctggacgcccagagtgcccccctgagagtgtatgtggaggagctgaagcccacccctgagggcgacctggagatcctgctgcagaaatgggagaacggtgagtgtgctcagaagaagatcattgcagaaaaaaccaaagatccctgcggtgttcaagatcgatgccttgaatgagaacaaagtccttgtgctggacaccgactacaaaaagt

SEQ ID NO: 3824 - DNA, 430 bp, Bos taurus
  Clone ID: 17-LIB2809-025-Q1-E1-E9
gggacactcaaaaaggcatataacagatactaatcgggcttcccaggtggtgctagtggtaaagaacctgcctgccaatgcaggagacgtaagagatgcaggtcaattcctaggccctggaggagatgacaacccactcctgtattcttgcctggagaatcccatagacagaggaacctggcaggttacagtccatagggtcatacagagttggaaagggctgaagcaactttgcatgcatacatgtctctcaatcatcctgttctctccttaggacaacaaatgatctctaatattttcatctggttctaaaagaataatagtcattgaaaatatataataataaccacgcatgaacttgttaatcattcttagttccctggttatgtttaggcttctaatgaattataagaaatacataccctcctat

SEQ ID NO: 3825 - DNA, 438 bp, Bos taurus
  unsure (353),(395): unsure at all n locations; Clone ID: 17-LIB2809-029-Q1-E1-E1
atacagcaggaaggcctgaatgggcatatctctctggggatagggcactgctttctggggaacaggcaggactttggactgagaaagggacagcacggactgaggaggaaacatgacagttggaggaagaggctggtgaggctggtgcatccaagactggagcagaggcagacgaaggtgcagattttcaacatcagtgagagtcaggctctggctttcaataaagggctcaactggatatttagggaagggcatttcgttgtgcttaggagccatagcctccttcactttggagactcccattacttcaggctgaaggaaaggccgcaccaccacaggggtttgagtaagangaaggatgttttgcggggacgctgttagggatgggcccaagngaaggatagactagagactgtgtctgggcaaaagggtggattt

SEQ ID NO: 3826 - DNA, 146 bp, Bos taurus
  Clone ID: 17-LIB2809-030-Q1-E1-E9
actgttgacattaaaagcgccatcagggacatcgagcaagggtcaaaagtccagagcgccattcatgcacccctggagattagtccttacatgtccattgtcactacagggcccagggctcagagatgagttagcttcaagggggt

SEQ ID NO: 3827 - DNA, 414 bp, Bos taurus
  Clone ID: 17-LIB2809-031-Q1-E1-E1
cgccaaggccgcgggataccggttggagggcacccctcaatgtagtctgagatactgcacagaccctgccaccgcggaggacaagtgtgacaggacctgccgccccgaggaggagtgtcgcctcgtcagtggcacctggggctgcttctgcagacaggacctcaacgtctccgatgtgcacagtttgcagcctcagctggactgtggggacacagagatcaaagtgtcactggacaagtgtctgctgggaagtctgggtttcggagatgaggcccatgcctacctgcgggacgggaactggaactgcagcagcctcaggcagagtgaagaggagaactggatatctgtgaccaatcccacccaggctggtgcctgcggaaacattctggagagaaaccagacccatgccatcta

SEQ ID NO: 3828 - DNA, 433 bp, Bos taurus
  Clone ID: 17-LIB2809-032-Q1-E1-E1
cgccaagggcgcgggatacaagcttattttttattttttttttttttttttttttttttttttttttttttttagtgccttaaaatgtaatttattgaaaagaagaaagacaaaatctcagttaatgcacacaattatttgatatgatggcacttacaggagaagtgattcaaaggcttttaaaacattttccatacagaaatttaatgaagactttaattccctttgactcagtggcctttataccagcatgatactactggaatttaggtaacaagctgttaggacaatttcacttaaggatgttacactatctaaaatacagtagagaactcaagaagaaagagtgccttcaatttgagattgccctattctaaaacagcagttgaagcctttggatagaatggtttgacatgatagatgaaaagacatg

SEQ ID NO: 3829 - DNA, 249 bp, Bos taurus
  Clone ID: 17-LIB3057-001-Q1-K1-E1
tcggtgtacgcccatgacaagatcgaactgttttgactgacgccctatctacagccaggagccaatggctagggacaaagccaaaccctgtgagctggaccaggagaaatacgatgctgatgacaatgtgaaaatcatctgcctgggagacagcgctgtgggcaagtccaaactcatggagaggttcctcatggatggatttcagccccagcagctgtccacatacgccttgaccctgtacaagcacac

SEQ ID NO: 3830 - DNA, 361 bp, Bos taurus
  unsure (336): unsure at all n locations; Clone ID: 17-LIB3057-003-Q1-K1-E1
gtttcttgaaatcatcaccaccatggacagcaaaggttcgtcgcagaaagggtcccgcctgctcctgctgctggtggtgtcaaatctactcttgtgccagggtgtggtctccacccccgtctgtcccaatgggcctggcaactgccaggtatcccttcgagacctgtttgaccgggcagtcatggtgtcccactacatccatgacctctcctcggaaatgttcaacagctgccatacctcctcccttcctacccctgaagataaagaacaagcccaacagacccaccatgaagtccttatgagcttgattcttgggttgctgcgctcctggaatgnaccctctctattcacctagtcaccg

SEQ ID NO: 3831 - DNA, 368 bp, Bos taurus
  Clone ID: 17-LIB3057-004-Q1-K1-E1
gataaacggtatgcccagggcaaagggttcattaccatggccctcaacagctgccatacctcctcccttcctacccctgaagataaagaacaagcccaacagacccaccatgaagtccttatgagcttgattcttgggttgctgcgctcctggaatgaccctctctatcacctagtcaccgaggtgcggggtatgaaaggagccccagatgctatcctatcgagggccatagagattgaggaagaaaacaaacgacttctggaaggcatggagatgatatttggccaggttattcctggagccaaagagactgagccctaccctgtgtggtcaggactcccgtccctgcaaactaaggatgaagatgc

SEQ ID NO: 3832 - DNA, 176 bp, Bos taurus
  Clone ID: 17-LIB3057-004-Q1-K1-E9
ttctggctgtcgcagtgatcttgctgaagtgaactcatgaaggggatgcttaaggagatatagccattgtgcaggatgatagcacacagatgatctgcaagattatctgctgcatctgctggttgatagccagatcccaggcttagaacggacctagctaagaaaggagcgaaggt

SEQ ID NO: 3833 - DNA, 443 bp, Bos taurus
  Clone ID: 17-LIB3057-006-Q1-K1-E1
aacgtcggtaccggcgcaacttcaattaccgacgcagacgcccagaaaaccctaaaccggaagatggcaaagagacaaaagcagccgatccaccagctgagaattcgtccgctcccgaggctgagcagggcggggctgagtaaatgccggcttaccatctctaccatcatccggtttagtcatccaacaagaagaaatgaatatgaaattccagcaataagaaatgaacaaaagattggagctgaagaccttaagtgcttgctttgtgcctgttgaccagataactagaactatctgcattatctatgcagcatggggtttttattatttttacctaaagacgtctctatatggtaatgacaaacgtgttttttaaaaaactaaaaaaaacctgtattatctcaatacacctataaaggtttttaaattgcttcatatctggt

SEQ ID NO: 3834 - DNA, 430 bp, Bos taurus
  Clone ID: 17-LIB3057-006-Q1-K1-E9
acgcccacgcaaacatgcatccgaactatttcctgctgttgtgaagaatgtggtcggtaaagatattgagatcaagaagttagtgtatgtttacctggtccgatatgctgaacagcagcaggatcatggccctattgagcataagcacttttcagcgagctctgaaggacccaaatcaactaattcgtgcaagtgctctgagagctctgccaagtattacagtgccaattattgtacctattatgatgcttgccattaaggaagcttctgctgacttatcaccatacgttaggaacaatgcagcccacgcaatacacaaactgtacagccttgatccagagcagacagaaatgttcatcgacattatcgaaaaacttctgaacgataaaagcacattggtggctggcagcgttgacatggcttttgaaga

SEQ ID NO: 3835 - DNA, 432 bp, Bos taurus
  Clone ID: 17-LIB3057-010-Q1-K1-E1
ggattttacaaatacaagtgagcagcttccctggctcgaggacgaagccccgtaagcaggtaccagcagctccccaagtgcccgcgggaatggtctttggtcagatgttccctcccacagcacgatctgttcgatgtacgttttgattgtaatctatctgaattaatcatttacaagagttagagtaatggcagattcctccactgagaagctaattccctttccctttttcagtctgttcatttctgtgtatcttctaaaaagctttacacccttggtgccttggagcagacatttcttttgaacctgttgttttcatgaagagttgccagaaccctgaattcgtttacttataacgagagcattctgtgtccattgttagcgcacgggaaagtctccagccactgacactgtgttgtgtctgtggaggct

SEQ ID NO: 3836 - DNA, 250 bp, Bos taurus
  Clone ID: 17-LIB3057-010-Q1-K1-E9
cgagactcaaatctgcaaggaaaacgcactgaagtttcgagaggccttgatcatcctgcgcggctgagtacaaccagagcgaggccggacttcacacccatcagcggatgtactgttgcaacattttaagccgaaactcgccttcttagagagagcacatcaaatgtcatacggcagcagaaaaaacattagatattactcgaatgaacgttggtggatctatttacacacgcaggctgaaatccttgag

SEQ ID NO: 3837 - DNA, 270 bp, Bos taurus
  Clone ID: 17-LIB3057-011-Q1-K1-E1
aggagatgaagtttcaatgcattatgaccccatgattgcaaagctggttgtgtgggctgctgatcgccaggcagccttgacgaaacttaagtacagccttcgacagtacaatattgttggactgcacaccaacattgacttcctccttagcctgtctggccacccggaatttgaagctgggaacgtgcacactgatttcatcgctcaacaccgcaaagaactgttgcccgaccggaagaccacagccaaggagtttttatgtcatgcagc

SEQ ID NO: 3838 - DNA, 437 bp, Bos taurus
  Clone ID: 17-LIB3057-012-Q1-K1-E1
cttaaaaacattatcctgagaggaatttacaggccaaatcatgctgccaaaggagcagcgtcacacaagaattaagaattgccaactgatcttgtatatttataaagaagtttattataataaaaatgtatcagaatgtattcatctatttgtgcatagtcacaaccccatggactgtgtttatatatacataataatattgaaactggatttcaatttgatcactcaccattttaaccttggaaactctcttaaaggtccaaatatatgaaaaactttgcagaaataactatattatataaaatattgtggtatgtaaattatgatatgaatatggatacaaaccaaaattaatagtgcaaaaggtaaatgtaacttttaagttaaaagtacatcactcaacaaagagtatttaatatttgatattataatcattt

SEQ ID NO: 3839 - DNA, 440 bp, Bos taurus
  unsure (61),(421): unsure at all n locations; Clone ID: 17-LIB3057-013-Q1-K1-E1
cggacgcgtgggtctagatcgcgagcgttcgccctttttttttttctttttttttggggangaaattttattttagcattctaaagcagtaatgctttagatgttacttaagtgccccagacaggattaacaaaattaaatgtttctaaattacaaatttggctccttttgggagtctcagaagaaaaacaaaagaaaataatcccccctcccaaaagaagaatgacacacacattttgaagaaaccccaatgtttcatgcagtggtaggcaagatgtaaaaagccacccaaattcacacatttctacaccaatcatcatcagaaaaaagtactccgtagtcaatctgtacatccaaatgcatttgggaatctacacctacattacattatttaatgttatatacatttattacccacccncccttgtttttaataattt

SEQ ID NO: 3840 - DNA, 349 bp, Bos taurus
  unsure (296): unsure at all n locations; Clone ID: 17-LIB3057-014-Q1-K1-E1
gccagcggaggccacttcatgagcacggccgagtggatccggctgcctgacgactgtgccattggctacatcgtggaggcgctgctgggcgtgcccctcgtgcgctgcgggctcttccactcccacctggagaacctgcagcaggtgcccgcctccgagctccatgagcaggtgaccctgagctacggcatgtttgaaaacaagcgcaactccgtccacattaaggggcccttctcggtggaggctgacccgtcaaggttccgttccgtccactggcacctgtacccggacacgtnctggtgcccccgctctggcatcttctaacggcgtggcttgaaaccccgtcccg

SEQ ID NO: 3841 - DNA, 112 bp, Bos taurus
  Clone ID: 17-LIB3057-015-Q1-K1-E1
ggatcattaagaaccattccctggcaaacttctctgagctttatagctttgtaatgcagtctggtctctaatgggtttcatcttaaataaaaacagactctgtagcgatgtc

SEQ ID NO: 3842 - DNA, 376 bp, Bos taurus
  Clone ID: 17-LIB3057-015-Q1-K1-E9
gtgatggcttttcgcgggcggagacctgagctccgcgggcccccggagctgtattacggcaaggatgaagcccggaaatacgtgcgcaactcacggatgattgacgtccaaatcaagatgactggacgggcactggagcttctttgtgtgcccgaggacaagccctgttacgtgttggatattggctgcggtactggcctgagcggtgattatctctcagatgaggggcactactgggtgggcattgacatcagccctgccatgctggatgaggccttggaccgtgagacgcatggagatgtgattctgggggacatgggtcagggcattcccttcaaaccgggcacctttgatgcttgtatcagcatttctgcag

SEQ ID NO: 3843 - DNA, 204 bp, Bos taurus
  Clone ID: 17-LIB3057-016-Q1-K1-E1
gcaagattgacacttaccttaagctcctgaattgcagaatcatctacaacaacaacttgtaaggccacattcatcctatcgatttctgagatggttcttaatgatccattccctggcaaacttctctgagctttatagctttgtaatgcatgcttggctctaatgggtttcatcttaaataaaaacagactctgtagcgatgtc

SEQ ID NO: 3844 - DNA, 407 bp, Bos taurus
  Clone ID: 17-LIB3057-017-Q1-K1-E1
ggttatactctcaacgatacatgcgccaagacccacttctcagttatatttgcaggcggcaatataaccctcttcggacatcactatctaggactatctggcatgcctcgactatactactactacccagatgcatacacaatgtgaaacactatctcatcaataggctcattcatatccctaacagccgtcatactaatagcccacatcatctgagaagcattcgcatctaaacgagaagtctcgactgtagacttaaccacgacaaacctagaatgattaaactgattccctgcaccatatcacacatttcaagaacccacctatgttaacctaaaatttgaaaggaaggaatcgaaccccctactattggtttcaagccaacatcataacctctatgtctctct

SEQ ID NO: 3845 - DNA, 403 bp, Bos taurus
  unsure (141): unsure at all n locations; Clone ID: 17-LIB3057-017-Q1-K1-E9
tgctcaaggactccaaggctggccgggcgcctgggctcctactaccgaccgagcagagccggtggacactcctgggggcccagagcagggccggtcaagggaagggcccccgctgcggggcgtatctggggaggaggtctngcgccctgctgctggccttgctgcttcatgcctccatggaagtgcgtcgttgatgcctggagagcagccagtgtcaggacctcaccacggaaagtaacctgctggcgtgcatccggtcctgcaagcccgacctctccgcctagactccggtgttccccggcaacggcgatgagcagcctctgactgagaacccccggaagtacttcatgggccatttccgctgggaccgcttctgccgtcggaatggtaacatcaacatcgg

SEQ ID NO: 3846 - DNA, 327 bp, Bos taurus
  Clone ID: 17-LIB3057-019-Q1-K1-E1
cggacgcgtgggcggacgcgtggggcgctggcagcagctggacatcagctcactgttggctaagccgactcttctgagaacaagctcatagaaaaggattgaacgtgtggctcctgcagtggaagtgcagagtcttaaccaccggaccaccaggaggttgcacacataatatagagaggtcctatgtatggatctgagagttggactgtgaagaaagctgagctccgaagaactaatgcttttgaactgtggtattggagaagactcttgagagtcccttggactgcaaggagatccaaccagtccattctgaagatcagccctggg

SEQ ID NO: 3847 - DNA, 367 bp, Bos taurus
  Clone ID: 17-LIB3057-021-Q1-K1-E1
attcgtactgaaaatcaagatcaagcgagctggcgcccttgtgcttcacgggaggattctgtcctacctgagcttgccttaggacacctgcggtaccgattgacaggtgtacagtctcagtcaaactactgacctggtactgtaacaatagctagtcgagctcggtcagctcgcaaacgctcacttgtctccagagaccagagcagcgttccactggagtccatatctcaccgacacagccagatcacgatcatagtacacctcttctaacggaacctggactggccgacggaccaaccgaagcatgatctgtataaacagaggggctcccattgccattgacttattctacactaataatacttgt

SEQ ID NO: 3848 - DNA, 414 bp, Bos taurus
  Clone ID: 17-LIB3057-021-Q1-K1-E9
cgactcagggtcctgtggacagctcaccagctatgatggctgcaggcccccggacctccctgctcctggctttcgccctgctctgcctgccctggactcaggtggtgggcgccttcccagccatgtccttgtccggcctgtttgccaacgctgtgctccgggctcagcacctgcatcagctggctgctgacaccttcaaagagtttgagcgcacctacatcccggagggacagagatactccatccagaacacccaggttgccttctgcttctctgaaaccatcccggcccccacgggcaagaatgaggcccagcagaaatcagacttggagctgcttcgcatctcactgctcctcatccagtcgtggcttgggcccctgcagttcctcagcagagtcttcaccaacagcttgg

SEQ ID NO: 3849 - DNA, 431 bp, Bos taurus
  Clone ID: 17-LIB3057-022-Q1-K1-E1
gccgtcaacagctgccatacctcctgccttcctacccctgaagataaagaacaagcccgacagacgcaccatgaagtccttatgagcttgattcttgggttgctgcgctcctggaatgaccctctctatcacctagtcaccgaggtgcggggtatgaaaggagccccagatgctatcctatcgagggccatagagattgaggaagaaaagaaacgacttctggaaggcatggagatgatatttggccaggttattcctggagccaaagagactgagccctaccctgtgtggtcaggactcccgtccctgcaaactaaggatgaagatgcacgttattccgctttttataacctgctccactgcctgcgcagggattcaagcaagattgacacttaccttaagctcctgaattgcagaatcatctacaacaa

SEQ ID NO: 3850 - DNA, 419 bp, Bos taurus
  Clone ID: 17-LIB3057-022-Q1-K1-E9
ccagggcaggcatgggattcagggtgacattgtgtggttccatgagctgatgatgggggtctatggacacctcttcagttcagttcagttcagttgctcagtcgtgtctgactctggagtgcttcattccttgcgatcttaacttttaatttaactttgttattggtcaactgtctgtctacttcttccactttaacttctttctttctatgcattttttgttttttttttatggttccactccctgtcatgctttctttagcttttttgcattttactgctttctttgttcttatggggttctttttatattcttttagactttttttctttgtttttaattttttttttttattttatttagtatttttttttcttttatttttttatcttatttttccttttttttcttttttttt

SEQ ID NO: 3851 - DNA, 361 bp, Bos taurus
  Clone ID: 17-LIB3057-024-Q1-K1-E1
ggagtcgttaagatgaacaagaggactgtacaacccatgatccatatttacttggacaggtaaacaggaaagcccaaaggcgatgctacggtgtcttacgaagacccagcaactgccaaagctgctgtcgagtggtttgatgggaaagatttccaagggagcaaacttaaagtgtctcttgctcggaagaagccgcccatgaacagcatgcggggagggatgccgccgcgcgagggcagggggatgccgccgccgctccgaggaggtccagggggcccaggaggtcctggaggacccatggggcgcatgggaggccgcggaggagacagaagctgctttccaccaatgagggccttgcggt

SEQ ID NO: 3852 - DNA, 420 bp, Bos taurus
  Clone ID: 17-LIB3057-025-Q1-K1-E1
gcggctgaaaggaaacatccgggtgattgcccgtgtccggccagtcaccaaagaggacggggaaggacctgaggcgaccaatgctgtgacctttgatcccgacgacgactccatcattcacttgctgcacaaaggaaagcctgtctccttcgagctggacaaggtcttctcctcacaggcctcacagcaggacgtgttccaggaggtgcaggccctcatcacctcctgcattgatggcttcaatgtctgcatcttcgcctacggccagacgggtgctggcaagacatacacaatggaggggacccctgagaacccaggcatcaaccagcgggccctgcggctgctcttttctgaggtgcaggagaaagcgtccgactgggaatacaccatcaccgtcagtgccgcagagatctacaatga

SEQ ID NO: 3853 - DNA, 442 bp, Bos taurus
  unsure (382): unsure at all n locations; Clone ID: 17-LIB3058-002-Q1-K1-E1
gccctaacgtgggtcggggcgggcggcgagcagaggcgccggttgctagcttggattctgacttagaggcgttcagtcataatccggcacacggtagcttcgcgccactggcttttcaaccaagcgcgatgaccaattgtgtgaatcaacggttcctctcgtactaggttgaattactatcgcggcgcggtcatcagtagggtaaaactaacctgtctcacgacggtctaatcccagctcacgttccctattggtgggtgaacaatccaacacttggtgaattctgcttcacaatgataggaagagccgacatcgaaagatcaaaaagcaacgtcgctatgaacgcttggctgccacaagccagttattcctgtggtaactnttctgacacctctagcttcaaactccgaaggtctaaaggatcgataggccacgctttcac

SEQ ID NO: 3854 - DNA, 434 bp, Bos taurus
  Clone ID: 17-LIB3058-002-Q1-K1-E9
gacgactttggcattattgagggcttgatgacaactgttcatgccatcactgccacccagaagactgttgatggaccctcagccaaggactggagaggtggcagggctgccagctttaacatcattcccagcagcaccggtgctgccaaggctgtcggtaaggttcttcctgaattgaatggcaagctcactggcatgtccttccgggttcccaccgtggatgtgtcagttgtagacctcactgtcagaatcgagaagggggcctcctacgaggaaatcaagaaagctattaaggccgcttctgagggcccactcaagggtatcatgggctacgtggaggaggatctggtttccaccgacttcaccggtgacagcaggtcgagcatcttcgacgccaaggccgggattgccctgaacgaccacttcatcaagct

SEQ ID NO: 3855 - DNA, 432 bp, Bos taurus
  Clone ID: 17-LIB3058-003-Q1-K1-E1
atcccgatccagggatcaaacccaagtgtcttgtctttgtaggcggattctttaccactgagccaccagggcagccttacaaaaggttctaaagttttttaaaatctttactccctttcaactaaatgtctagcatcattgggttttcttctaactttaaatagggaaattggtgatagctggtgggctgcagtctatggggttgcacagagttggacatgactgaagtgacttagcagcagcagcagcagtacatagtgggtgctcttatgaaaagtatttttattgtttgtttcctcacccttctaagtaatatagactattcatattggttattaattcatatatattagactgaagaaaccctcagaatcttaactgcatgttgaaatcacctgaatctattaaatgacccaatgatcaggtagcatc

SEQ ID NO: 3856 - DNA, 425 bp, Bos taurus
  Clone ID: 17-LIB3058-004-Q1-K1-E9
gagaaactagttcatatgaaaaatagactggcctaaggagcagcagtcgctagtggctaacagtgtaaactgggccagccctctggtagacacaggatagataactttttggatagcatgtttttttctgttaattagttgtgtactttggcctctgtcatatcttcacaatggtgctcttttcatggggtattagccattcagtcatagcaggtaatttgaagatcttgatttgtttcagaatgatgcacattttgtattttccagcttgtctatcacttgtttggggttgtaccagaaaggtctggagaatgattctttgattatgattctctaacaaatgaaaattggacattaaacaacacaaatgatatgtaaaattggctagttcttgcatctgttgggatttttgaccaatgattccg

SEQ ID NO: 3857 - DNA, 232 bp, Bos taurus
  Clone ID: 17-LIB3058-005-Q1-K1-E1
tcgcggacacgtgggatcgtaagcggccgatttcgatctagaaccttcatgacaacaatgaggagcctaatgccctccgcaaggtcacaataccaaaccactttggtcgaatgatccggaataattaccgccgtactactactactgtagatccctgtattatcagccgcaatcacaacgctatcaacagaccgcaacctcaatacaaccttgttttacccggtcagaggag

SEQ ID NO: 3858 - DNA, 377 bp, Bos taurus
  Clone ID: 17-LIB3058-006-Q1-K1-E1
gccaggaggagcgcgcgggcagcggttaccgaggcgtgctgggattccagaagtggagaaggaggcacgatgaagactctactgctgttgatggggctgctgctcagctgggagagtggctgggcaatctcggacaaagagctccaggaaatgtccaccgaggggagtaagtacgtgaataaagaaattaaaaatgccctcaaggaggtgaaacagataaagacccaaatagaacagaccaatgaagagcgcaaattactgctcagcttcctagaggaagccatgaagaagaaagaggacgccctgaatgacaccagggattctgaaaacaagcagaaggcgtccaacggagtgtgcattgagaccatgacagccct

SEQ ID NO: 3859 - DNA, 418 bp, Bos taurus
  unsure (361): unsure at all n locations; Clone ID: 17-LIB3058-006-Q1-K1-E9
ggactccttccaccgcccccttggaactgcagcctggggcaccctggagtctgggcctctacagccctagggtacaatcccccaccggcctctgctcccaaggcggccttccctgccagccacccacacactcaacccacagagccaggcttagctgcaggcctgaccggtcccctgaccttgcacctctcacagagccaatgcggcgcagtgtgtctgaagcagccctgacccggccggagggcccactgggaaccgactccctcaaaagcctgaagctgcatgacctgggcctcaggaacagcagtgacacaacagacacgccagagctgtcactgtccgcggagacactcggcccctncgcaccctcaaccatcaacttcttaccttggatctgaggatggatcttgaatgtctg

SEQ ID NO: 3860 - DNA, 293 bp, Bos taurus
  Clone ID: 17-LIB3058-007-Q1-K1-E9
cggacgcgtgggctctgagccgaggcggtgcggtgtgctcctcgccctgctggcatcgctgctcctctccggggctgaggcggccgacgaagaacgtggcgtccacgatttttgccaccttcccaagaaagtgggaagatgccgggccttcttccctcggtggtggtacaatgtcactgacggatcctgccagcagtttgtgtatggaggctgcgacaggaatgacaataattacatgaccaaggaggagtgtcttgcaaagtgtgctggcgtcacagagaacaccatcgatg

SEQ ID NO: 3861 - DNA, 415 bp, Bos taurus
  Clone ID: 17-LIB3058-008-Q1-K1-E1
attctacatatatgtatattaaacccgcactgccatgtgtaccctttttctgtggtgtctagcattaacttattgtcaaggcccgggcgggggtggaaggagaatgccacagtgaagggagtggcagagtcaaattgctatatagtcgaaaaagaaaacttttttaaactttaatttcacatgcaatctcaagagactatttagagagtttaagtgaggtggggagcttttgggatgttgggaacaaaacttcagtgggagggaagggctggctgttggagagggaagaagccagactggctggagagcaccctctaccagcccagcccagcccagcccgtcccctctggccactgctgcggacacctgccttaaaacatacacctcgagtactccacagtttttgcctaaagga

SEQ ID NO: 3862 - DNA, 431 bp, Bos taurus
  unsure (399): unsure at all n locations; Clone ID: 17-LIB3058-009-Q1-K1-E1
aaagaatcagcaatttcacaaagagcgagagcagccacccagatttgcacagcctggctgctttgagtatgagtatgccatgcgctggaaggcacttattgagatggaaaagcagcagcaggaccaagtggaccgaaacatcaaggaagctcgtgagaagctggagatggagatggaggctgctcgccatgagcaccaggtcatgctaatgaggcaggatttgatgaggcgtcaagaagaacttcggaggatggaagagctgcacaatcaagaagtgcaaaaacgaaagcagctggagctcaggcaggaggaggagcgcaggcgccgtgaggaagagatgcggcggcaacaagaagaaatgatgcgacgacagcaggaaggattcaagggaaccttccntgatgcgagagagcaagagatacggatgggtc

SEQ ID NO: 3863 - DNA, 278 bp, Bos taurus
  Clone ID: 17-LIB3058-010-Q1-K1-E1
cggacgcgtgggctgtaagaggatcatcttctatgatcctttcagttgcttgtcgtcggttcggatggtcagccattgtgctcatcttcaaggctctcatctcctttgcaaaacttcttgaaccaccactgtactatacattcattagcagttcctgtgccagatgcattgctgacgttgcaagtggacttcactgctttaccacccattttgaactattgattagaaaattcctcgaatttttttcatttgtataacattatttttccttactaaaa

SEQ ID NO: 3864 - DNA, 424 bp, Bos taurus
  Clone ID: 17-LIB3058-013-Q1-K1-E1
aatcatcacaggtcgatctcggtgctgacttggagccaggtgtgctcatgagcgcgcagaccatgacatgtgaaaccaccagcaccacgaccaccagccacatgacccaaactgtgaaaggaggcatttcagagacgaggattgagaagcgaatcgtcatcactggagactcggacattgaccatgaccaggcgctggctcacgcaattaaagaggccaaagagcagcatcctgacatgtcagtgaccaaagtagtggtccatacagagacagagatcagcccggaggatggagaagactgaacccaggaataacctaggctgtacacgaagccagtcatgcaaaccattatgaaaaaccacaatctatatggcgttccctcttctaacccactgactcggatctggctgtggacaatttaatc

SEQ ID NO: 3865 - DNA, 410 bp, Bos taurus
  Clone ID: 17-LIB3058-015-Q1-K1-E1
ctgggatcagtccatgggataaaaaggaaagtgttttctcacgggaaaacatgtcaggaaaaataaagaacactttctacctctgtttcagatttttgaaacgcttattttaaaccaaattttaatttctgtgtccaaaataagttttaaggacatctgttcttccatacgaaataggttaggctgcctgtttcttactgaactcatggaatggttctgcttgtgatcctctgcacgctgccttttaatgagtgaggatgttgggatattctttatctgtattcatgtgtatatatgtctgtttgattaatgtttttttgggagtatgtctttctttatattcttttttatttttttgtttgtgttttctgtattgttgttttttattattttatgtttttttttttttt

SEQ ID NO: 3866 - DNA, 485 bp, Bos taurus
  Clone ID: 17-LIB3058-017-Q1-K1-E1
aaatgtgtctaaataatgattttacaaaaaccatcatttacataatttgtataaaaagcttaatacaattttaatcaaaattttaagtaatttaaaaaatgctttaagattctatatttctggagtacctatgaagtggtatgactacatcatgtgaaatatttattttcttctttaacttaggagtaacagtttttattttaattaaataaaattccaattttttcaacaaattcagggaagatttggtcacattgaagatacagtatttttgtagtatctataagctgtcctatgagatagacttttataaagcatgttatttatatgaaggtaaaccagtccattatatagcttgttcagactctgtgaacattacacctactagggttcgatttatcacgtggcacagaatcttcctttgcactgaataccttttcattctcatttcctctgccttagtcacagtggcagcagtgcagaaa

SEQ ID NO: 3867 - DNA, 433 bp, Bos taurus
  unsure (394): unsure at all n locations; Clone ID: 17-LIB3058-018-Q1-K1-E1
ggaaaccaatctggattcactccctctggttgacactcactcaaaaaggacacttctgattaagacggtggaaaccagagatggacaggttatcaacgaaacttcccagcatcacgatgatctggaataaaaactgcacatacttcgtgcagcaaaatactaccagcaagaaggaaaaaaaaaaatccatatcttaaagaaacagctttcaagtgcctttctgcagttttttcaggagcgcaagatagatttggaataggaataagccctagttcttgaaccaacacccgtaaaagatttagaaaaaagtttacaacataatctagtttaccgaagacgccttgtgctagaatactttttaaaaagtatttttgaataccattaaaactgcttntttccatcaagtatctgaccaacttgtttctgcttcaat

SEQ ID NO: 3868 - DNA, 440 bp, Bos taurus
  Clone ID: 17-LIB3058-018-Q1-K1-E9
cggacgcgtgggtgcgggtgcgggggcggcgagccgaggaccgagcgaccgcggcctgagcgcgccggccaccgcccgcaccccccttccgcccgccctccggtcggccgcagccctgcgggtctacgctccagacccacccccgacccaccccgcgcgcctctgccgcctcttcctgagccccagcttgccgagcggccgccgctgccgctgtcgccgacgccgccgtcaccgagccaggttacggccgaggccagcctctgccgtccagggcccttccgtccaggccccgggaccccgactcctcggcagccccggccccggccccggcaccatgtcggagaagagcgtggaggcagcggtcgagttaagcgccaaggaccttgaggagaagaaagagaaggtggaagataaggcaggccggaaagagctaaagaaag

SEQ ID NO: 3869 - DNA, 471 bp, Bos taurus
  Clone ID: 17-LIB3058-019-Q1-K1-E1
ggtcctagtacagggaactatactcagtctcctgtaataacctagagtggaaaagaatatgaaaagggtgtgtatacgtgtgtgtgtgtatatgctaatcccaaactgctaatttattcctcaccaatcccttttccctttgtaaccataaatttgttttgtaccagacacatttgggggggggcggggcgctgtgctatgaggcttaagggatcttagttccccgaccagggattgaacccaggccccctgcagtggaagcgcagagtcctaatcgctggactgccagagaattccctaccagacacattatttaatgctttttccttgccttatacaactcaccctaattcataaattcatagagtcagactgaaaattttccaacctatatgttaattgtgttgtatgctgttttgatttatgtatcctaaaatttcaattcgggtgatactttccttggttatctgg

SEQ ID NO: 3870 - DNA, 460 bp, Bos taurus
  Clone ID: 17-LIB3058-021-Q1-K1-E9
cgatgttccaggcattgtgccagcaacattacaaagataattcagttatatcacaacaaccaaacaagtcaggtatttttatccccattttacagatgaggaaaatcacatgggggaatgaactatcctgttcaaggttataaagccaagtccagagaccctaacaggctgaaaacttacgtagacacacaacacatcttgctatatatgcgtttgcaaattttatataatgtatatatatatatatatatacatgtatatataatgtatatatgtatatatacatacatctatatttaaactttactccctaaatgttgtgatttttataaatgccttatttataatttgtttatttaggaaatcttaatatcagaagcatttgtttgaggtcacacgtgctccttatgaatcagaggtggaaataacaaggccttagtgtgaagcaatcacgctggct

SEQ ID NO: 3871 - DNA, 403 bp, Bos taurus
  Clone ID: 17-LIB3058-022-Q1-K1-E1
tcggagaaactgggtttgaatttccactccaccacttcctaaccatgtgaccatggacaatttagtaaatttgttgaagccagtgacagattctcaatgatgactatactttagagtcacatgggaactttaaaacaaatgctgatttcctgtccctagtcctagagattttagtttagttgcttttagtgtagagatttctgtttctgagaaagattgagggcaggaggcgaagggatggttggatggcatcatcgactaaatggacatgagtttgagcaaactctggaagatagtgaaaggacaggaagcctggtgtgcctttgtgtccatggcgtcacaaagaattagacatgactgagcaactgaacaacaagtgtagaaattgcatttaaatcagaac

SEQ ID NO: 3872 - DNA, 297 bp, Bos taurus
  Clone ID: 17-LIB3058-023-Q1-K1-E1
gacctactcgtccgattaaatgtaaaggaaatcaccttctttttatgcaagtgtataatctttaaagtgaaagggctttcatgatgaagccagattttctgtaaaaaaacttttaaaacattattttaaaagaaatatgtatataaatataaatatatatatattctttgcatagatacttaattctctggtctaagaccataccttttataaagtgtgagataccatggcattgtctaataatggaataaattattatgccttttatttaaagtggcccacataattaactgttaa

SEQ ID NO: 3873 - DNA, 242 bp, Bos taurus
  Clone ID: 17-LIB3058-026-Q1-K1-E1
gttctagatcgcgatctgtcgccctttttttttttttttttttttttttttttttttgtttttttttttttttttttttttttttttttttttttttttttttttttttttttttttttttttttttttttttttttttttttttttttttttttttttttttttttttttttttttttttttttttttttttttttttttttttttttttctttactaatttattattaatatttttatta

SEQ ID NO: 3874 - DNA, 423 bp, Bos taurus
  Clone ID: 17-LIB3058-027-Q1-K1-E9
ctgagattgagaagttcgataagtcgaaattgaagaaaacggaaacgcaagagaaaaggccactgccttcgaaagaaacgattgaacaggagaagcaagcaggcgagtcgtaatgaagcgtgcgccgccagtatgcactgtacattccacaagcattgccttcttattttacttcttttagctgtttaactttgtaagatgcaaagaggttggatcgagtttaaatgactgtgctaccccttttcacatcaaagaatggagaactactgacaacgtatgccgcgcctgcctctcccatctgcttgtgtggctggcagggaaggaaaagaacttgcatgttggtgaaggaggaagctgtgtgggacgacagtgaaatctagagtaaaaagctggtccaaggtgttctgcgggctgtaaaatgca

SEQ ID NO: 3875 - DNA, 230 bp, Bos taurus
  Clone ID: 17-LIB3058-028-Q1-K1-E1
ccttccggccaagcggccgccatggcggggtcttagagccagctcaagaaaatggtttccaaggccaagtccagaaacctggctgtacgtgaaactgttaacgttattagtttatacaaagatctcaaacctgtattggattcatatgtttttaaagatggcaattccagggaactaatgaaccctactggaacaattcctgtgccttatagaagtaatacatacaatat

SEQ ID NO: 3876 - DNA, 421 bp, Bos taurus
  Clone ID: 17-LIB3058-029-Q1-K1-E9
gcgttcgattatatttcatttctcttaatacagccacagctatttccacctaaatagatctttggaataagcatgcacaggtattgactattatctacaaatatttattgtaacacttgaatagaactacaggaagcccttggcactgatagaaaatattgattcactgttaggttacaaaaatttatacatagcaaaatttaatgctctttacataaaaaatattagactacttaaacaaaactttcaaaaattcctggtaagagctaccagaattagaaaagtaaaattaggctttagacactgcctcttctagaacactggactcaaacagcacctacactgctggaaaaaatatttaggtctgtcatgcaacaggaaaacaaaacaccaagctattctggaacaactgttctacaca

SEQ ID NO: 3877 - DNA, 347 bp, Bos taurus
  Clone ID: 17-LIB3058-031-Q1-K1-E1
atcaaaaacaacctgaaagaggccattgaaaccatcgtggccgccatgagcaacctggtgccccctgtggagctggccaacccagagaaccagttcagagtggattacattctgagcgtgatgaacgtgccggactttgatttccctcccgaattctacgagcatgccaaggctctctgggaggatgaaggggtgcgtgcctgctatgagcgctccaacgagtaccagctgattgactgcgcccagtactttcctggtggacaagattgatgtcatcaagcaggatgactacgtgcccagcgaccaggatctgctccgctgccgtgtcctgacttctggaatctttg

SEQ ID NO: 3878 - DNA, 259 bp, Bos taurus
  Clone ID: 17-LIB3058-031-Q1-K1-E9
gccaggtgagctgaagccactgagcaaggaagatgtagggctgcacgcctacaagtgtgaggactgcggcaagtgcaagtgcaaggagtgcacctacccgaggcctctgccgtcagactggatctgctacaagcagtgcctttgctcggcccagaacgtgatcgactactgtacctgcgtgtgctgtgtgaagggtcttttttatcactgtttcaacttctactaggtcaactttgcgtacaactcttgcttttttttc

SEQ ID NO: 3879 - DNA, 418 bp, Bos taurus
  Clone ID: 17-LIB3058-032-Q1-K1-E1
ttggttgttggctgctgcaatatgtggactttctgctcctggccgctgagaacaagggggagtgctgttaaggaaccaaggcctcgcttatactgctgatggaggctggttaccgggtctcgaaatagaaggcttgtatctgcaatgaggtatttttcttattttatttctttattattttatgttttatatttttatttttaaatatttttattatttttattaattttttttatattttttattttttatttttaatttattatttatttttttatttatttttattatttatcattttattatttttttattttttttttttatttttaattttctatatttttttattttttttgtttatattttattttttaatttattttattctattttttaattttttttttatttattt

SEQ ID NO: 3880 - DNA, 410 bp, Bos taurus
  Clone ID: 17-LIB3058-034-Q1-K1-E9
ctgagatttagtcactacttttgttttttttgtttggggagagtggttggctttacgagtcagacatatgagctctgaggcacttgttgaattctggattagagagaggaacttggtctcagtgtgacttctgtccatgaagccctgcggtggcgcccttggagcgtggatcgaaggcagcgtcagcgcctggctggagcgctgctacaccacgccacctggctttcaaggagtcactaaacctttccgtgcctagacctccccatctgtagaatgggtccataccacctacctcacaggggtgttgtgaagacttggaagaacgatgtcaaatgtttttaacactttggtaagagagaggacaaaaccagtaccgcgtgagttacacaaaactggacgtcggatttatt

SEQ ID NO: 3881 - DNA, 317 bp, Bos taurus
  Clone ID: 17-LIB3058-035-Q1-K1-E1
taggattctattttgcactgctatagcaatttcattatagaccaagggagataaaagaaaaagggtaaaaccaccacactgagtaaattactaaagcttttctacatttaacaggattttccatctggtagatttattgtcatatccccttcaaaacagacaagatgcttaccatattttaaagattataggttgccacttaaagaaaaattttacacagttcactgtacatcaaggttgaaaaactgtcctgcatgaaaaattgaaatcatgtgaattaaaggaaaagaaaacattattgttgaaagaaagaataa

SEQ ID NO: 3882 - DNA, 266 bp, Bos taurus
  Clone ID: 17-LIB3058-036-Q1-K1-E1
tttattttttccttccccacccgggccccccccgcccccaaaaaaaccacacccccccccacaaaaaccccccccacaaccccccccgcccccccacacccccccgggccccccccaaaaaaccgcctcccccccaaaccccccccccaacaacccccccccccccccacccccaaccaccccccccaccccccccaccccccccccccccaccccccccacccaacaacacccccccccccccacccgcccccccaaaccccccc

SEQ ID NO: 3883 - DNA, 395 bp, Bos taurus
  Clone ID: 17-LIB3058-037-Q1-K1-E1
gggcaaatcgcatccttccttgtctattaccatccaacagatgtcacccgtcattcagtcaggatcaacagctgtattatagtcaagatgactccaacagaaagaactttgatgcatacagattgtatttgcagtctcctcatagctatgaagatccttattttgatgaccgagttcactttccagcttctactgattattcgacacagtatggactgaaatcaaccacgaattacgtggacttttattccactaaacgaccttcttacagagcagaacagtacccagggtccccagactcatgggtgtagcatcctgatgcttgggagaggaactctttctttctaactctgtttggattgagatgagaagtccgtcttgctgatttgctgatg

SEQ ID NO: 3884 - DNA, 435 bp, Bos taurus
  Clone ID: 17-LIB3058-038-Q1-K1-E1
cttccgaaagggagcaccagttatctttaagaactttcagtttaagggctggagcaaaagatgagggacatgttggtgaaacagaagcgataaatatgaaggcagtccaattaaagtaacactggcaactctgaaaatgtctgtacagccaacggtttctcttgggggctttgaaattacaccacctgtggtcttacggttgaagtgtggttcagggcctgtgcatatcagtggacagcacttagtagccgtggaggaagatgcagagtcagaagaggaggaggaggaagaggtgaaactcctgagtatatctggaaagcgttctgcccctggaagtggtagcaaggttccccagaaaaaagtgaagcttgctgctgatgaagatgaagatgatgatgacgatgacgatgatgatgatgatgaagatgatgatga

SEQ ID NO: 3885 - DNA, 425 bp, Bos taurus
  unsure (32): unsure at all n locations; Clone ID: 17-LIB3058-041-Q1-K1-E1
ccggaagacacggcgtctaagggagaattcgnctctgcaggacaagccgggcagaagagatccgaggtccaagctaaaggcgccaagaaaaagcacctgcatagccccaggctaggactcgccttcagaaaattctttaggcataagggcgaggaaaagtcagccgccccttcagccaacctcaagtcagacaaagccaacgttacgctccaggagccccagggggccgccaagaattctacacccactgaaacagccaaggaaaaagggggccccagctctctgcctctgggcaaactgttctggaaaaagacctcggaccccacggagaaggtggtcgctccgccacagccggaagcggcagctgcagctgcaggccagaaaggcaaagagggcccgtccaaggacaaaaaggcagccacgga

SEQ ID NO: 3886 - DNA, 453 bp, Bos taurus
  unsure (389): unsure at all n locations; Clone ID: 17-LIB3058-043-Q1-K1-E1
cggacgcgtgggtttacttccgtctcgtgtcacatgaccgtcgtgcgcatggtgtagaaggatgatgctgagaagtcaaggaactgagcacgcggacgaacagtggccgcgtcaggcgcctttcccccaacccaccctctcccctcagtttggtttttagtctcacccagtctccttgtgaagttggagggaggctgacacaacagcgcgacactaccctgtgccccgcccggccatcacgagcctccgtcctcaagagcggtgccgtcctgtgcgtggagagtcagtcagttatttgtgtatgaaacaatgtacaaatcaatgttttgaaaataatgatctcaaactttctaagttaaattttaaaaaacctgatcgtttgccatatngggtgggtttgctcttagacccgcatgctgtagaaatgctcacagtgcatataggactcagtcc

SEQ ID NO: 3887 - DNA, 419 bp, Bos taurus
  Clone ID: 17-LIB3058-043-Q1-K1-E9
ccagaacttaaattttcacagtagacattaggtgaattgtaggaagagcatttttcagttgagttggataaagctcctttctctgttttagtgcactgaagagtataacttaaacttcctatagaaccatttttctttctgcttgtactgaagttgagtatttttctttgcttaacgtggatgtttttatggcgatatctgctgtcagtttttaaaaggaattaaccttggaagttgttttgcagaattattctcataatttctctaacctatcccaagcttaaatagctatgtgggattaaaatgacacctagaacgtgataggaattgtgttactgttcccgtttcaagtagaaagtcatttctctgcaagtctcggaaatcagcactgatgttctgtaaagaccccactgatgcgt

SEQ ID NO: 3888 - DNA, 445 bp, Bos taurus
  Clone ID: 17-LIB3058-045-Q1-K1-E9
gtgcagttctaactgttgcttcctgacttgcatacagatttctcaagaggcaggtcaggtggtctggtattcccatctctttcagaattttccacagtttattttgatccacacagtcaaaggctttggcatagtcaataaagcagaaatagatgtttttctggaactctcttgctttttccatgatccagcggatgttggcaatttgacctctggttcctctgccttttctaaattcagcttaaacatctggaatttcacagttcacatactgttgaagcctggcttggagaattttgagcattactttgctaccgtgtgagatgagtgcaattgtgtggtagtttgagcattctttggcattgcctttctttgggattggaatgaaaactgaccttttccagtcctgtggccactgctgagttttccagatttcctggcatat

SEQ ID NO: 3889 - DNA, 423 bp, Bos taurus
  Clone ID: 17-LIB3058-046-Q1-K1-E1
tggaatcttgttgcttgtcggcctgtgcgctcgtgcgcggacatggcctcaaacgactatacccaacaagcaacccaaagctacggggcctacccaactcagcctgggcagggctactcccagcagagcaatcaaccctacgggcaacagagttacggtggctacggccagtctacggacacttcgggctatggccagagcagctacagtggttcttatggacagacccagaacagctacagcacacagtcagctccccagggatatagctcagctggtggctatggcagtagccagagttctcagtcatcttatgggcaacagtcctcgtaccctggctatggccagcagccagctcctagcggcacctcaggaagttactgtagcagttctcaaagcaacggctatgggcagccccaaggt

SEQ ID NO: 3890 - DNA, 371 bp, Bos taurus
  Clone ID: 17-LIB3058-047-Q1-K1-E1
gcggccttcaagatgttgaagctaggttttggtgggggctatggtgcgaaactacggggttcggtgggtgttccggatggagccgtaactaactgggctgacatcacaggagccaaagatgtatatataagatgtgtgaaggggatcagggtacgatcagactgacgttctgatgatggtgtgggtgacatggtgatggccacacgtcaagataggcaagccagaactcagaatgaaggtacatgcatcggtggcaattcgacaacgaaaggaagacgggagaaaagacggtgtgttgttttacttgaaagataatgtaggtgtcatagtggactctgcaggtgagacgaaaggttgagacgtctcaggac

SEQ ID NO: 3891 - DNA, 392 bp, Bos taurus
  unsure (335),(338): unsure at all n locations; Clone ID: 17-LIB3058-048-Q1-K1-E1
ggaagacagtgcggccgctcccggggcgttggacgcaatggcggcccagaagagaccctgccagagatccaagtacctggcctcggcgagcaccatggaccacgccaggcacggcttcctccccagacacagagacactggcatcctcgactccctcggccgcttctttggctcggacaggggtgcgcccaagcggggctcaggcaaggatggacaccatgcggccagaaccacccactatggctccctgccccagaaagcgcagcacggccggccccaagacgaaaaccccgtagtgcacttcttcaagaacatcgtgacaccccgcacacctnctncatcgcaaggaaaggggcgaggactgtccctcagcagatttagctggggggctg

SEQ ID NO: 3892 - DNA, 403 bp, Bos taurus
  unsure (89),(343): unsure at all n locations; Clone ID: 17-LIB3058-049-Q1-K1-E1
ctacatatatgtatattaaacccggaattggtatgtgtaccctttttctgtggtgtctagcattaacttattgtcaaggcccgggcggnggtggaaggagaatgccacaatggaagggagtggcagagtcaaattgctatatagtcgaaaaagaaaacttttttaaactttaatttcacatgcaatctcaagagactatttagagagtttaagtgaggtggggagcttttgggatgttgggaacaaaacttcagtgggagggaagggctggctgttggagagggaagaagccagactggctggagagcaccctctaccagcccagcccagcccagcccgtccnctctggccactgctgcggacacctgccttaaaacatacacctcgagtactccacagtttt

SEQ ID NO: 3893 - DNA, 404 bp, Bos taurus
  Clone ID: 17-LIB3058-051-Q1-K1-E1
atttaagcataaaccaagcagaaggaaggaaaaaatataaataagagttataaacacttgacactgaaaacaaactaatatctcttttgaacaaagatgcaaaaattctcagcaaaatattaggaagtcatagccaacaaattatactccaagactaagggagaagagttatactaattgtacaaagctagttgactattaaaaaaacaaacaatataattcaccaataaataggcagaaggaaggaaaaaatataaataagagttataaacacttgacactgaaaacaaactaatatctcttttgaacaaaaatgaaaaataaagaatgaaaatggagaataaatatatataaataaaaaataaaatatataattaaaaaaaggggcggccgttttaaaggat

SEQ ID NO: 3894 - DNA, 268 bp, Bos taurus
  Clone ID: 17-LIB3058-052-Q1-K1-E1
gcagatctcagctactacaaaagattttacttacgggacagtcaaagggcaatgtttttctgtaacatattggaaaaagaaatcgcagttatgttccttttttgttctttcttttagtttggcttggttcagcagtcagccgttaactaggtaacatggcccggaaggacagtgaacccactcgcgttgcagaataatcccgaaaatggcaaactactactactgctattcagttttttaaaagttttgaaatgctgcacttacattt

SEQ ID NO: 3895 - DNA, 418 bp, Bos taurus
  Clone ID: 17-LIB3058-053-Q1-K1-E1
ctcgcccggcccggtcgactgttggcctgtaccgctcggaccctggccctggctctggcccagcgatgggagctgctccccggaggctgagctggtcagcatcgtcaaccggcgctcacccctgaagtcagagaagagtccctgcctacccacatccttcttgcccagttttggggtcgcctccgtctatcgggtcctcagccctactggccacccagtccagttcaaaggaacagaacgatgatactggcttcggtgctggggagcggaccccggggcgggccacccctccggcctctcttggggcccgcactctcgcttcgggcccgctccacatcagccactgatacccaccatgtggaaatggcacgggagcgctctaagaccgtcaccttcttttacaaccagtcagccattg

SEQ ID NO: 3896 - DNA, 421 bp, Bos taurus
  Clone ID: 17-LIB3058-053-Q1-K1-E9
tcgcttcactaaaaataacccccccgtacacttatttcgagactgaatatgaagcctgtaaaagaccaactgactttttagttgtaatgaaccgtcagtgattttgcacggttgacacacctgtgtgtactgcatgccaggactcggcagaggacatattctaggtttactggtatatatagaaacaggagtttgcttgtttatatgttccacactcaaaaaggcataatcaaaatgtttctaaataatgattttacaaaaaccatcatttacataatttgtataaaaagcttaatacaattttaatcaaaattttaagtaattttaaaaatgctttaagattctatatttctggagtacctatgaagtggtatgactacatcatgtgaaatatttattttcttctttaactttggagtag

SEQ ID NO: 3897 - DNA, 333 bp, Bos taurus
  Clone ID: 17-LIB3058-056-Q1-K1-E1
aacagtgggaactcacctcccccggccttgacacctcagtgctgcctgacagcgtggagatcggcctgcatacctgctgtcacattttcctcaacctcgtggtcactgcaccagggctgatcaagcgggatgcctgcttcacttctctgatgaacaccctgatggcgtcgctgccttcactggttcagcagcaggggaggctgcttctggctgccaacgtggctaccctgggccttctcatggcccggctcctgagcacctctccagctctgcaggggacgcccggattccgaggtttcttcgcagctgccatcctcttcctgtcgcaatccc

SEQ ID NO: 3898 - DNA, 450 bp, Bos taurus
  Clone ID: 17-LIB3058-057-Q1-K1-E1
cattgtgtctgggatcccctcttaaacataaaattaattaatatatctatttgttaactatactcaaagttgttttttaagacaaattaaaaatctcttcttttttccctaaaatttaaagtcagatattaaataaaatctcagatagatttacttattaaataaaatggcttatggcattttgtgataagggaatgtatcttcactaggagaaaattgtataataattactaataatgtttattaaactcaaatacagcatcttgattttagccttatttcaacattctaagaagcatttatacaataactatattttagaacagaatcagtacgattttagagtaagcaaattgtagtagttcacaattttgtaacatagaactgttatatttcacaaggttattttgaaattgtttaaaagttcttttataaatgtataaaattata

SEQ ID NO: 3899 - DNA, 413 bp, Bos taurus
  Clone ID: 17-LIB3058-057-Q1-K1-E9
cgcgagcggccgccctttttttttttttttaaaaaacacgtttgtcattaccaaaaagagacgtctttaggtaaaaataataaaaaccccatgctgcatagataatgcagatagttctagttatctggtcaacaggcaaaaagcaagcacttaaggtcttcagctccaatcttttgttcatttcttattgctggaatttcatattcatttcttcttgttggatgactaaaccggatgatggtagagatggtaagccggcatttactcagccccgccctgctcagcctcgggagcggacgaattctcagctggtggatcggctgcttttgtctctttgccatcttgtggtttagggttttctgggcgtctgcgtcggtaattgaagttgcggcggtaccgactttgaggtggct

SEQ ID NO: 3900 - DNA, 407 bp, Bos taurus
  Clone ID: 17-LIB3058-058-Q1-K1-E1
ggcggcgcttggccgggagctaaggggctcttcggtggcaaggagtgagcgatgacccggctgctgggcgtggtgcacagagtggctttggcctttgtgggatgccgcagtcttgccatgttctatgccgtgaggaggggccgcaaggccggggtcttcctgacctgggatgaatgcagagcacaggtggaccgctttcctgcagccagatttaagaagttcgccacagaggaggaagcctgggcctttgtcagaaggtctgaaagccccagtgattcagaagggcaaaaaactaaacacgtagaagaaccacaagcgaaagcgagcaagcgactccgtgagcccttggatgaagatgaagatgcaaaggcgtgtgcgaagcacgtgcgggagagcgcagagccact

SEQ ID NO: 3901 - DNA, 400 bp, Bos taurus
  unsure (334): unsure at all n locations; Clone ID: 17-LIB34-001-Q1-E1-E1
cggacgcatgggagaaaggggagcccatcagtactgaggatctgggagtgagtggagcattgacggtccttatgaaggacgccatcaagcccaatctcatgcagacgttagagggcactccagtgtttgttcacgctgggccgtttgccaacatcgcacacgggaattcctccatcattgcagacaggattgcactcaagcttgtcggtcccgaagggtttgtagtgactgaagcaggattcggagcagacattggaatggaaaagttctttaacatcaaatgccggtattctggtctccgcccgcacgtggtggtgcttgtcgccactgtcanggctctgaaaatgcacggaggtggccccacggttactgctggacttccgctttccaaggcctacat

SEQ ID NO: 3902 - DNA, 401 bp, Bos taurus
  Clone ID: 17-LIB34-001-Q1-E1-E9
cgcgtcaggatgaacagttggcttttgacccaagcaacatgccgcccggcatcgagcccagccctgacagaatgctccagggccgcctttttgcctatcctgacactcaccgccaccgcctgggacccaactatctccagatacctgtgaactgtccctaccgtgctcgagtggccaactaccagcgtgacggccccatgtgcatgatggacaatcagggtggggctccaaattactaccccaatagctttagtgctctcgagcatcagccttctgccctggaacacaggacccacttctctggggatgtacagcgcttcaacagtgccaacgatgacaatgtcactcacgtgcggactttctatttgaaattgctgaatgatgaacagaggaaacccctg

SEQ ID NO: 3903 - DNA, 415 bp, Bos taurus
  Clone ID: 17-LIB34-002-Q1-E1-E1
aaccgccgggttgagaggagcgtggccttctcctctccccgccatggcgtgtgctcgtccactgatatcagtgtactccgaaaagggggagtcctctggcaaaaatgtcactttgcctgctgtgttcaaggctcccattcgacccgatattgttaactttgttcacaccaacttgcgcaaaaacaacagacagccctatgctgtcagtgaattagcaggtcatcaaaccagtgctgagtcttggggtaccggcagagctgtggctcgaattcgcagggttcgaggtggcgggactcaccgttccggtcagggcgcttttggaaacatgtgtcgtgggggccgcatgtttgcgccaactaagacctggcgacgttggcacgcagagtgaatacgacgcagaagcgatacgccatct

SEQ ID NO: 3904 - DNA, 275 bp, Bos taurus
  Clone ID: 17-LIB34-003-Q1-E1-E1
tgggaagtggttcaatgtggccgtgggctccacctgcccatggctgaagaggttcaaggagaagatgaccatgagcacagtggtgttgaaagcggggccgacgagcaaggagatcagcgtcaccaacactcacaggcggaaaggtgtctgtgaatcgatctctggtacttatgagaaaacaagcactgatgggaagtttctctatcacaaagccaagtggaatatcaccatggagtcctatgtgggcaacacaaactacaattagtacccaattt

SEQ ID NO: 3905 - DNA, 378 bp, Bos taurus
  Clone ID: 17-LIB34-004-Q1-E1-E1
gggaggtcttcttcactctacggattcaaattttaatcttccagagataccctcacagatatgtatggaaataatattttaccatctatctgggcatccccattcaagttgatttgtaaaattaagcatctcacacagctagtgaacagttgagctgaggttggattccagtttttctcttcccttccttcttttcctcctcctgtttcattcttgcacacaaaaaaactattaaattgaattttaggagaacttgacagaaagaagtagaggtgagcttgaagttaatgacctttaggtaaatatttcttcgagtgtataatgaggataataatgtacctttcttgtagctccgttgcacagaatccataagacatg

SEQ ID NO: 3906 - DNA, 404 bp, Bos taurus
  unsure (330),(337),(373),(384): unsure at all n locations; Clone ID: 17-LIB34-005-Q1-E1-E1
gaagagcttcctggagaataatcagcagcattgaacagaaagaagaaaacaagggaggagaagacaaactaaaaatgattcgggaatatcggcaaatggttgagactgagctaaagttaatctgttgtgacattctggatgtactggacaaacacctcattccagcagctaacactggcgagtccaaggttttctattataaaatgaaaggggactaccacaggtatctggctgaatttgccacagggaatgacaggaaggaggctgcggagaacagcctagtggcttataaagctgctagtgatattgcaatgacagaactttccacancacatcncattcgcttaagtcttgctctcaactttttctgtantctactatganattcttaattcccctgaccg

SEQ ID NO: 3907 - DNA, 414 bp, Bos taurus
  Clone ID: 17-LIB34-006-Q1-E1-E1
ggcgctggccagcgtgttggagaggccgctatcggtgaaccggcgcgggttttttggactcgggggtcgtgcggatctgctggacctgggtccaggcagtcccagcgatgggctgagcctggccgcgcccagctggggtgtcccagaggagccaagaattgaaatacttcatggaaccaccaccctggccttcaagtttcgccatggagtcattgttgcagcagattcccgggccacagccggtgcctacatcgcctcccagacagtaaagaaggtgatagagatcaacccctacctgctgggcaccatggctgggggtgcagcggattgcagcttctgggagaggctgttggctcggcaatgtcgaatctatgagcttcgaaacaaggaacgcatctccgtagcagctgcctc

SEQ ID NO: 3908 - DNA, 362 bp, Bos taurus
  Clone ID: 17-LIB34-007-Q1-E1-E1
gtaccgtgcccgagtggagaaagtcgagtctcctgccaaagtacacgtcttctacatcgactacggcaacagggagatcctgccgtccacccgcctgggcactttgccacctgccttcagcacccgcgtactaccagctcaagccacggagtatgcctttgccttcatccaggtgccccaagatgaggatgctcggactgacgcggtggacagcgtggtgcgggacatccagaacacgcagtgcctgctcaacgtggagcacctgagcgccggctgcccgcacgtcaccctgcagttcgctgactccaagggggacgtggggctgggcctggtgaacgacgggctggtcatggtggaagtgc

SEQ ID NO: 3909 - DNA, 133 bp, Bos taurus
  Clone ID: 17-LIB34-008-Q1-E1-E1
ctgactgcctgcctgactgtagtcgccacctccgtgcccacattgccagatgacattcacgtgcaggataacatcgacctgtctaggatctatgggaagtggttcatatgtggccgttggctccatctgccca

SEQ ID NO: 3910 - DNA, 380 bp, Bos taurus
  Clone ID: 17-LIB34-008-Q1-E1-E9
ggaatactgccgcaccccgtgtactgttacttgcaatattcctgtggtgtctggcaaagaatgtgaggaaatcatcaggaatggaggtgaaacatctgaaatgtacctcattcagcctgaggattctagcaaaccatatagagtatactgtgatatgaaaacggaaaaaggaggatggacagtaattcagaaccgtcaagatggtagtgttgactttggcaggaaatgggatccatataaacaaggatttggaaatattgcaaccaatgcagaagggaagaaatactgtggtgtaccaggtgagtattggctcggaaatgacagaattagccagcttaccaatatgggacccacaaagcttttgattgaaatggaggact

SEQ ID NO: 3911 - DNA, 377 bp, Bos taurus
  Clone ID: 17-LIB34-009-Q1-E1-E1
aagacgcgtgggcatgtctctcatgcctgataaacttttggaaaataataaatgaataacacagaccagaatgtgaatagcaaaagaagtattgagcattgtcatttaatagcagttgtattcctacactattagttagttcagtcgctcagtcgtgtccgactctgcgatgccatggacttccctgtatatcaccaactcccggagcttgctcaaactcatgtccatcgagtcggtgatgccatccaaccatctcatcctctgttgtccccttctcctcgtgccttcagcctatcgtagcatcagggtccttcccaaaaagtcagttcttcacatcaagtggccaaagtattggagtttcagttttcagcatcagt

SEQ ID NO: 3912 - DNA, 400 bp, Bos taurus
  Clone ID: 17-LIB34-009-Q1-E1-E9
gcaaaaagggttagatcaaggtttaaggcaagaggagctttcggttaggataattcctcacctcggcaaagaaccaattaatattgatcccgacattgttgcagagcacttaggggttatttctataaaaacacagtctcttgagaagctgcagaccgagtgtttagctagaactggacacagcattgaaacattgagaagagcatcaataaatgggaagagttactcaactgagatacctgctgcgggaaacagaaagaaagaaaaacgcatttatttggatcagatgggacgactgaacgtaaagcctttagagacttctagtagaaattcatttcagagtttaataaagcccgacatcaccaaagtggagcttttaaaagatgttcaaagcacaaaa

SEQ ID NO: 3913 - DNA, 356 bp, Bos taurus
  Clone ID: 17-LIB34-010-Q1-E2-E1
cagcatcagtccttccaatgaacacccaggactggtctcctttaggatggactggttggatctccttgcaatccaagggactctcaagagtcttctccaacaccacagatcaaaagcatcaattcttcagcactcagctttcttcacagttcaactctcacatccatacatgaccactggaaaaaccatagccttgattagacagacctttgttggcaaagtaatgtttctgcttttgaatatgctgtctaggttggttataactttccttccaaggagtaagagtcttttaatttcatggctgcaatcaccatctgcagtgattttgaagccccccaaaataaagtctgacactg

SEQ ID NO: 3914 - DNA, 459 bp, Bos taurus
  unsure (28): unsure at all n locations; Clone ID: 17-LIB34-010-Q1-E2-E9
acgcctgccggtactggtccgagcatcncgggacaagagtttggcttacacaatgagaacttggaacagagactagaaattaaacgtatcatggaaaatgtgttccaacacaagttaccagattgttctctgagattatatgggtcatcctgtagcagattgggtttcaaaaattcggatataaacattgacattcaatttccagccattatgtctcagccagatgttctcttacttgtccaagaatgtttaaagaacaatgactcttttattgatgttgatgcagatttccatgctcgggtgccagtggtggtgtgcagagaaaagcaaagtggtcttctttgtaaagtgagtgcaggaaatgaaaatgcttgtctgacaacaaatcatttaactgcccttggaaaactagaatcaaagctggttcctctggtgattgcatttaggtactgggcaaag

SEQ ID NO: 3915 - DNA, 365 bp, Bos taurus
  Clone ID: 17-LIB34-011-Q1-E1-E1
aggacgcgtgggtactgacttcatctgccagacagagactcaggtgtgccagtattcaaaaatttggagaaagagctttaaaagcatggtcagtagctcgcctgagccagaaatttcccaaggctgagtttgtagaagttaccaggctagtgacagatctcacaaaagtccacaaggaatgctgccatggtgacctacttgaatgcgcagatgacagggcagatcttgccaagtacatatgtgataatcaagatacaatctccagtaaactgaatgaatgctgtgataagcctttgttggaaaaatcccactgcattgctgaggtagaaaaagatgccatacctgaaaacctgcccccattaact

SEQ ID NO: 3916 - DNA, 391 bp, Bos taurus
  Clone ID: 17-LIB34-011-Q1-E1-E9
atggcccggctcaccaagggcctcatacgagacgcactgcaggacgtggaccccgcgacgcagatgctgctcctcaactgcctctacttcaaagggtcctgggtgaacaaattcccggtggaaatgacgcacaaccacaacttccggctgaacgagcgggaggtggtcaaggtccccatgatgcagaccaagggcgcgttcctggcggccagcgaccaggagctggactgcgacgtgctgcggctggagtacgtggggggcatcagcatgctggtggtggtcccacacaagctgtccgggatgaagaccctggagagccagctgacaccccaggcggtggagcggtggcagaggagcatgacaaacaggacgcgggaagtgctcctgccca

SEQ ID NO: 3917 - DNA, 388 bp, Bos taurus
  Clone ID: 17-LIB34-012-Q1-E1-E1
agcggcggctctggatccactgcccacaccccgctctcgcaggcagacatgaggacagagagaacttccttcctcctggctctggggctcctggtgtctggttctgctccagggtccactgcctcccagagaatgtgaccccagaagaacagcacaaagggacgtctgtggatggccactcattagcctccagcaacactgacttcgccttcagcctctacaagcagttggctttgaaggaccccaataagaatgtcatcttctcccctctgagcatctccatagccttggccttcctgtccctgggggctcatgaccacactgtgacagagatcctggaaggtctcaagttcaacctcacagagaaccccgagacagaaatccacca

SEQ ID NO: 3918 - DNA, 386 bp, Bos taurus
  Clone ID: 17-LIB34-013-Q1-E1-E1
accccacaaaactttggcacaatgaagtgggtgacttttatttctcttctccttctcttcagctctgcttattccaggggtgtgtttcgtcgagatacacacaagagtgagattgctcatcggtttaaagatttgggagaagaacattttaaaggcctggtactgattgccttttctcagtatctccagcagtgtccatttgatgagcatgtaaaattagtgaacgaactaactgagtttgcaaaaacatgtgttgctgatgagtcccatgccggctgtgaaaagtcacttcacactctctttggagatgaattgtgtaaagttgcatcccttcgtgaaacctatggtgacatggctgactgctgtgagaaacaagagcctgaaag

SEQ ID NO: 3919 - DNA, 313 bp, Bos taurus
  Clone ID: 17-LIB34-013-Q1-E1-E9
gtcagacatcctcatcatgagtactaccgggaaagttatcaggtgcacagcagccatattctggaaacctgtcggatcagtttccagtgaggacgtacacatggctccagcaacggcacaaggagttcgcatccagatggtgggcatggtgctctgtgggacatacatgtgcatgttgatcgacaatgttcgtcaacattaaccctcctgtagcagtaccggacaagttagacctgcaatactctaaactgttcgagaaacgttgagcatattgattccaggatatactcatagctcattccatcaaccaaat

SEQ ID NO: 3920 - DNA, 424 bp, Bos taurus
  unsure (362),(416): unsure at all n locations; Clone ID: 17-LIB34-014-Q1-E1-E1
aagtacatgtactggacaatgctgcagcagctcacccaccactctgtcaatggctgcaacctgcagccgggcgacctcttggcttctggaaccatcagcgggccggagccagagagcttcggctgcatgctggagctgtcgtggaagggcacaagggccgtagagctggggaatggccagaccaggaagttcctgctggacggggatgaagtcatcatgacagggcactgccagggggatgggtaccgcattggcttcggccagtgtgcgggaaaagtgctgcctgccctgtcgttcgcctgagattctctctgctctcccagaaacaccagactggcacgccaacctctccaactccctgnggggaacaagggcccccactgtggctgtgggcctagttcctcattcaataatanagctgcta

SEQ ID NO: 3921 - DNA, 181 bp, Bos taurus
  unsure (68): unsure at all n locations; Clone ID: 17-LIB34-015-Q1-E1-E1
caccagtaaactgaaggaatgctgtgataagcctttgttggaaaaatcccactgcattgctgaggtanaaaaagatgccatacctgaaaacctggccccaataactgctgactttgctgaagataaagatgtttgcaaaaactatcaagaagcaaaagatgccttcctggggccccttttt

SEQ ID NO: 3922 - DNA, 413 bp, Bos taurus
  Clone ID: 17-LIB34-016-Q1-E1-E1
cggagagccggagccagagggacggccaagcccaggagccagggaaccgacgaccgagctgatcaaagggtgagaactcagaattcacatggacaagtgaaagccctgggatgattcaacacagaaaagggaaagtagggcatttataacccagcggaaagtgacaaccgtgctcttgacctctctgtgctgaagtcaggagtcatgtggctggaaatactccttgcctcagtgctgggctttgtcatctactggttcgtctccaaggacaaggaggagactttgccccttgaagatggatggtgggggcctggggtgaggcccacagctggggaggataagagcatccgcccattcaaggtgggaacatcagatgaggagatcaatgacttacatcagaggattgacagggt

SEQ ID NO: 3923 - DNA, 392 bp, Bos taurus
  Clone ID: 17-LIB34-017-Q1-E1-E1
gcctcttcgcaggatacatcatttccaacaatattcctccaacaacaattccccaaataactatgccctactacctaaaaacaacagccctaattgttacaatcctaggcttcatcttagccctagaaatcagtaatataactaaaaatctaaaatatcactacccctcaaacgccttcaagttctcaaccttgctagggtatttccccacaattatacatcgcctagctccatacataaatttatcaataagccaaaaatcagcatcctcccttctagacctaatctgactagaagccatcctaccaaaaaccatctcactcgcccaaataaaagcatctaccctggtcacaaaccaaaaaggcctgatcaaactatatttcctctccttc

SEQ ID NO: 3924 - DNA, 441 bp, Bos taurus
  Clone ID: 17-LIB34-018-Q1-E1-E1
ttccaggccgacccacgcgtccaccggtgtatgtgcggcaataacatgtcggctccgctgcccgccatcgtgcctgccgcccgtaaggccaccgccgcggtgatcttccttcatggattgggagacacagggcatggatgggcagaagcctttgccggaatcagaagcgcccacatcaaatacatctgcccgcatgcgccggttatgcctgtaacattaaatatgaacatggccatgccatcatggtttgacattattgggctttcgccagattcactggaggatgaaactggaattaaacaggcagcagaaaatgttaaagctttgatagatcaagaggtgaagaacggcattccttctaacagaattattttgggaggattttctcagggaggagctttatctctgtacacggctctgaccacacagcagaaactgggc

SEQ ID NO: 3925 - DNA, 346 bp, Bos taurus
  Clone ID: 17-LIB34-018-Q1-E1-E9
actagttctagatcgcgagcggccgccctttttttttttttttttaatataatctacatttatttggtaattatcacatatttgctgtatggaaagtacctgaagtaagaaaagtgagaaagaaaagtagtgcacataacaattgccatcatcatacatgtgaatattcagatttgctacatttttcaaatcacttaaaccaagataaactgcagaactgaaactccagcagggacaattaaacaatatttggaatgaaatcatttggcctaattttcataaccacagatttcaaggaataccaccatccatgccaggtgtgccagacaatcccattgtccgtttt

SEQ ID NO: 3926 - DNA, 437 bp, Bos taurus
  Clone ID: 17-LIB34-019-Q1-E1-E1
acatttactatgctaataaatataatggagtttttcaagaatgctgccaagctgaagataaaggtgcctgcctgctaccaaagattggaactatgagagaaaaagtactgacgtcatctgccagacagagactcaggtgtgccagtattcaaaaatttggagaaagagctttaagagcatggtcagtagctcgcctgagccagaaatttcccaaggctgaatttggtaaagttaccaagctaatgacagatttcacaaaagtccacaagggatgctgccatggtgacctacttgaatgcgcagatgacagggcaaatcttgccaagtacatatgtgataatcaagatacaatctccaataaactgaaggaatgctgtgataagccttttgttggaaaatcccactgcaatgctgaggtagaaaaagatgccaaacct

SEQ ID NO: 3927 - DNA, 389 bp, Bos taurus
  Clone ID: 17-LIB34-020-Q1-E1-E9
taaaatggcatatcacacttaaaataaacataattctttaatattatccaatatcaattattactcccctgctactgctgctgctgggtcacttcagtcgtgtccgactctgtgtgaccccgtggacggcagccaccaggctcccccatccctgggattctccgggcgggaacgctggggtgggttgccatttccttctccagtgcatgaaagtgaaaagtgaaagtaaagtcactcagtcgtgtccaactcttaggctcctccatccatgggaatttccaggcaaagtactggagtggggtgccattgccttctccgattattcccctacgtggtgcctaaacttagaaatttttttctgaattaggatgcattgttgacacaatgtc

SEQ ID NO: 3928 - DNA, 409 bp, Bos taurus
  Clone ID: 17-LIB34-020-Q1-E2-E1
ctggtgctgggtgggggcagtggtgggatcagcatggccgcccgcatgaagaggaaagtaggcgcggagaacgtggccatcgttgagcccagcgagacacatttctaccagcccatctggaccctggtgggtgctggtgccaaaccattatcctcatctggccgtcccacagcaaatgtgattccatctggtgtggagtggatcaaagctagggtggttgatctgaatccagacaagaactgcatccacacagatgatgacaagaagatctcctacaaatatcttatcattgctcttggaatccagctggactatgagaagatcaaaggcctccctgaaggttttgcccatcccaaaatagggtccaattactcagtgaggacagtggagaagacatggaaagctctgc

SEQ ID NO: 3929 - DNA, 397 bp, Bos taurus
  Clone ID: 17-LIB34-020-Q1-E2-E9
taaaatggcatatcacacttaaaataaacataattctttaatatgatccaagagcaattattactcccctgctactgctgctgctgggtcacttcagtcgtgtccgactctgtgtgaccccgtggacggcagccaccaggctcccccatcgctgggattctccgggcgggaacgctggggtcggttgccatttccttctccagtgcatgaaagtgacaagtgaaagtcgagtcacccagtcgtctccaactcgtatgctccgccatcgttgggaatttccaggcgtagtactcgattggggtgccatttccttctccgattactcccctacgtggtgcctaaacttaggaccttttttccgaagtaggatgccttgttcacccaatgtctgtgcatg

SEQ ID NO: 3930 - DNA, 436 bp, Bos taurus
  Clone ID: 17-LIB34-021-Q1-E1-E1
aacatatgtacccaaagcctttgatgagaaattgttcaccttccatgcagatatatgcacacttcccgatactgagaaacaaatcaagaaacaaactgcacttgttgagctgttgaaacacaagcccaaggcaacagaggaacaactgaaaaccgtcatggagaattttgtggcttttgtagacaagtgctgtgcagctgatgacaaagaagcctgctttgctgtggagggtccaaaacttgttgtttcaactcaaacagccttagcctaaacacgacacaaccacaggcatctcagcctaccctgagagtaagaggaaaaaagagaaatgaaaactcagagcttattcatctgttttccttttctgttggtgttaaaccaacactctcactaaagaacgtagatttctttaaatattttgcttcttttgtttgtg

SEQ ID NO: 3931 - DNA, 439 bp, Bos taurus
  Clone ID: 17-LIB34-021-Q1-E1-E9
gtccacgcttcgagtgaaagttcaagccaactgtggcttgaaaacacaagtgtgtgaaacactatgacggcatccacgcacactaagtattacacatctcagagccctgtaagggtacaacccatacagactgagaacaacttctgcgtcggcctgtccacgtgtcaagaggacacctgcgatggctacgctggcagagccttcgtcattcactacgatgaatacgacacctggtatgctgccgggatcctgacctgtgacaatagctgtgcagtggctgagtacggtgtgtacatcaacgttacatcaattctggactgggttcggaaatccatcgctaacaactaatgctgggctagctaggatcaactgcctgaaatgacgacgtgaaagctgcacacgactggaagggatacgagtgcaatgtgccgctggtggg

SEQ ID NO: 3932 - DNA, 382 bp, Bos taurus
  unsure (227): unsure at all n locations; Clone ID: 17-LIB34-022-Q1-E1-E1
tatctttggcacttttgttgatgtttctttcagagtgttgtgggaatcatttcaaccaacaggatggctgtattttgttgtgttaaaagtactttgtgtaatctttgaatgtatttgtttcagcattttattggattttcctaacctgtgttaacaccattgaatgtgtatttcttcagaaaataccatcttcttgtgcccttaaaaagcattactttaactgatanggaacatgacaaggttttcagtacattaagtagttaattgaagatgtgtataaatgtcacaaagaataaaaaaaaaatattggtgtctgtttagtatggtttccagtgcaattaaatcaagaaatgtcttttttttttttaaaataatatttaaa

SEQ ID NO: 3933 - DNA, 162 bp, Bos taurus
  Clone ID: 17-LIB34-023-Q1-E1-E1
cggcctacaagtacgacgcccctgaccactggtacccccaggacctgcaggcccgagcccgcgtggacgagtacctgtcgtgagagcacacggccctccggacgagctgcacccggaccatgtggcagaagatgacgtcccccatattcctgggccaaagcg

SEQ ID NO: 3934 - DNA, 291 bp, Bos taurus
  Clone ID: 17-LIB34-024-Q1-E1-E1
gcaagactctacactgagtcgtattatcctcaggcatcaaagcagagaccacgggaacctagttcaccaggctcgaggctggaggccccgccatgacatccctaaggccccttctgatgctggccctgctggcgtgggttgttgtggctgaccaagagtcctgcaagggccgctgcaccgatggcttcaacaccaccaggaagtgtcagtgtgacgagctctgttcttacgaccagagctgctgtgcggacttcatggctgagtgcccgccccaagtgacccgtggggatc

SEQ ID NO: 3935 - DNA, 412 bp, Bos taurus
  unsure (44): unsure at all n locations; Clone ID: 17-LIB34-025-Q1-E1-E1
cgggtcgaccaagcgtccggttctgacagtcaaggattcaacanagccatttctccctgatgagatgagttaaagccaaaattaccaaaaggtcaaaaagggcaatagagctttgaagtgaaagtgttagtcgttcagtcatgtccaactcatcgtgaccccatgtgctccaggcaagaatactggagtgggtagccattgccttctccaggggatcttcctgacccaggaattgaacccaggtctcctgcattgcaggcagattctttaccacttgagccaccagaacccgtagagctttgatgcagaccaaatcctgctgctactgcaacacctaccccgtgcaccacaccctggctccccaggatgtagcccaggcagagtgcaagcctaggggccttttcttattcct

SEQ ID NO: 3936 - DNA, 274 bp, Bos taurus
  unsure (273): unsure at all n locations; Clone ID: 17-LIB34-025-Q1-E1-E9
caaatattatcataataaatatctttacagcaattttattcctaggaacatcccacaatccacacataccagaactctacacaatcaattttaccattaaatccctactgctcacaatatccttcctatgaatccgagcatcctaccctcgatttcgctatgaccaactaatacacttactatgaaaaaattttctacctctgacactagccctgtgcatgtgacacgtatccctacccatccttacatcaggcatcccaccacaaacataana

SEQ ID NO: 3937 - DNA, 421 bp, Bos taurus
  Clone ID: 17-LIB34-026-Q1-E1-E1
cctgaatgaccatcacgtttacttggagggcaccctgttgaagcccaacatggtgactgctggacatgcctgcaccaagaagtatactccagagcaggtggcaatggccacagttacagctctccaccgtactgttcctgcagctgttcctggcatctgctttttgtctggtggcatgagtgaagaggatgctactctcaacctcaatgctatcaacctttgccctctaccaaagccctggaaactaagtttctcttatggacgggccctgcaggccagtgcactggctgcgtggggtggcaaggctgaaaacaagaagacaacccaggaggcctttatgaagcgggccctggctaacagccaggcagccaaaggacagtatgttcacatgggctcttctggctctgcttccacccaatcg

SEQ ID NO: 3938 - DNA, 399 bp, Bos taurus
  Clone ID: 17-LIB34-026-Q1-E1-E9
acagaatggagactggaccttccagaccatggtgatgcttgaaacagttcctcagagtggagaggtctacacctgccaagtggagcaccccagccagacaagccctatcacagtagaatggagggcacggtctgactctgctcagagcaagatgatgagtggagtcgggggcttcgttctgggtctgctcttccttgcggtggggctcttcatctacttcaggaatcagaaaggacgccctacacttcagccaacagggctcctgagctgaagtgaagatggtcacactcaaggaagaaccttctgtcccagcttcttcacagcatggaaaggtttcctgcttagtgctaactcttccacaatgaagtactttctcaggatctcatttgctcctggctc

SEQ ID NO: 3939 - DNA, 347 bp, Bos taurus
  Clone ID: 17-LIB34-027-Q1-E1-E1
attctgagcagttgaggagagtgggaaattccatctcacagagcaaacaccttcttgggggcgaaagcaacctctgggctcctgggtgcccacgcctccgccatcacggcctacgccctgtcgctgaccgaggcccccgacgacctgcggagagctgcccacaccaacctgatggtcatggccaaggacatcggtgataagctgtactggggctcagtcaccacttctccaagcaacgtcctgtcacccactctggctccacacagcccagcataccccattccccaggctccggccctctggattgaaaccacggcctatggcctgctacacctgctgctatggga

SEQ ID NO: 3940 - DNA, 331 bp, Bos taurus
  Clone ID: 17-LIB34-027-Q1-E1-E9
agctgatgctgcggctgggcttccagaaattctatattcaaggcggggactggggggccctgatctgcaccaacatggcccagctggtgcccatccacatcaagggcctgcacttgaacatggctttgattttaagagatttctacaccctgacccttcctctgggacggtgtttctgggggcttttcgggtataccgatgagagacatggagctgatatacccctttaagaagatcttcttcagcttactgagggagagcggctacttgcacatccagagcaccatgccggacaccctgggctgtgctctgaatgactctcgcgtgggac

SEQ ID NO: 3941 - DNA, 322 bp, Bos taurus
  Clone ID: 17-LIB34-029-Q1-E1-E1
gaattaccccgaataaataatataagcttctgactcctccctccctcattcctactactcctcgcatcctctatagttgaagctgggggacgaacacgctgaaccgtgtatcctcccttagcaggcaacctagcccatgcaggagcttcagtagatctaaccactttctctttacacttagcacgagtttcctcaattttaggagccatcaacttcattacaacaattatcaacataaagccccccgcaatgtcacaataacaaagccctctgttcctatgatccgtaagaattagcgccgtactactactactctcgctcc

SEQ ID NO: 3942 - DNA, 388 bp, Bos taurus
  Clone ID: 17-LIB34-029-Q1-E1-E9
atgatttcttgcaacttcgaaaaatttaaaaccatgaaacatctattactgctacttttctgtgcttttatagttcaggcccaatttcctactgactatgacgagggacaagatgacagacctaaggtaggtttgggtgcccgcggtcatcggccctatgacaagaagaaggaagaggcccccagcctgagacctgtgccccctcccatcagcggaggtggctatcgggctcgtcccgccacagcaactgtgggccagaagaaagtggagagaaagccccctgacgctgatggctgcctgcacgcggacccggatctgggtgtgttgtgtcctacaggatgtaagttgcaagatactttggtaagacaggagagaccaatccgaaaga

SEQ ID NO: 3943 - DNA, 402 bp, Bos taurus
  Clone ID: 17-LIB34-030-Q1-E1-E1
aagacacccaccagaagatggaaagccaaattacctgaactgctatgtgtatgggttccatccaccccagattgaaatcgatttgctgaagaatggggagaagattaaatcggagcagtcagacctgtctttcagcaaggactggtctttctacctgctgtcccacgctgagttcactcccaacagcaaggatcagtacagctgccgagtgaaacacgttactttggaacaaccccggatagttaagtgggatcgagacctgtaagcagcaccatcgagatttgaacattcttcatttggtataatatctggaaaattctgtttccctgctctttaatactgatatgcttttatgctttatgcacataatcagaagtcatattcatgttaccataaatacct

SEQ ID NO: 3944 - DNA, 359 bp, Bos taurus
  Clone ID: 17-LIB34-031-Q1-E1-E9
atcaccatggcggctgggaccctgtacacatatcctgaaaactggagggccttcaaggccctcattgccgctcagtacagcggggctcatgtccgcgtgctctccgcaccagcccacgtccattttggccaaaccaaccgcacccccgagtttctccgtaaatttcctgctggcaaggttccagcctttgagggtgacgatggattctgtgtgttcgagagcaatgccattgcctactatgtgagcaacgaggaattgcggggaagtactcccgaggcagcagcacaggtggtgcaatgggtgagctttgctgatacccacatagtgccaccggccagcacctgggtgttccctacctt

SEQ ID NO: 3945 - DNA, 383 bp, Bos taurus
  Clone ID: 17-LIB34-032-Q1-E1-E1
acctacttgaatgcgcagatgacagggcagatcttgccaagtacatatgtgataatcaagatacaatctccagtaaactgaaggaatgctgtgataagcctttgttggaaaaatcccactgcattgctgaggtataaaaagatgccatacctgaaaacctgcccccattaactgctgactttgctgaagataaggatgtttgcaaaaactatcaggaagcaaaagatgccttcctgggctcgtttttgtatgaatattcaagaatgcatcctgaatatgctgtctcagtgctattgagacttgccaaggaatatgaagccacactggatgaatgcctgtccaaacatgattcacatgcatgctattccacagtgtttgacaaa

SEQ ID NO: 3946 - DNA, 207 bp, Bos taurus
  Clone ID: 17-LIB34-035-Q1-E1-E1
cccacgcgtccggatctagatcgcgagcggccgcccttttttttttttttttttttttttttttttttttttttttttttttttttttttttttttttttttttttttttttttttttttttttttttttggtttttttttttttttttttttttttttttttgtttttttttttttttttttttttttttgtgttttgtttttttt

SEQ ID NO: 3947 - DNA, 397 bp, Bos taurus
  Clone ID: 17-LIB34-035-Q1-E1-E9
acagacacttgggctacgccacgggggccggacggtggagaacatgatgatcatcagttggttcgtccggtccttcaagtacgcatatggcctccgctttgaggtcaaaggccgtgagacgctggacgaggaccggccctgcgtcatcatctccaaccaccagagcatcctggacatgatgggcctcatggaggtcctccccgaccgctgcgtgcagatcgccaagcgagagctgctcttcctggggcccgtgggcctgatcatgtacctggggggcgtcctcttcatcaaccggcagcactcccagacggccatgagcgtgatgaccgatgtgggcgagcgcatggtcagggagaagctcaaagtgtggatctacccggagggcacgcggaatgac

SEQ ID NO: 3948 - DNA, 403 bp, Bos taurus
  Clone ID: 17-LIB34-036-Q1-E1-E1
agttcccaccattccacggggagccctgtaaagtgtgtgtcaacgtgcacagctttaagccggaggagctgatggtaaagaccaatgacggatacgtggaggtgtctggtaaacacgatgaaaatcagcaagaggggggcatcgtctccaagaacttcacaaagaaaatccagcttcctgcagaggtggatcctgtgacagtgtttgcctccctttccccagaatgcctgctgatcatcgaagctccccaggttcccccttactcaccgtttggagagagcagtttcaacaatgagcttcctcaggacggtcaggaagtcacttgtacctgagaccccaatcttggcccttccttgttcccgccccaacccctgtgcttctctgattccaggatacattacta

SEQ ID NO: 3949 - DNA, 284 bp, Bos taurus
  unsure (137): unsure at all n locations; Clone ID: 17-LIB34-037-Q1-E1-E1
cgggtccacacacgcgtccgcaatattttaatctatcctgagtagtaggtcacgatatgagagattattccaaacccaggtaagattaaaatatagacttcggggtgtccaaagaatcagaataagtgttgatatanaataaggtctcctcctcaggaaaaaaagaacccatgttgagaactccactaacagttttatgccgggtgaaatttatctacataccatttcaataaataatttggttcctaaagaccaaaaagaaaaaaaaaaaaaaggcgggccgc

SEQ ID NO: 3950 - DNA, 328 bp, Bos taurus
  Clone ID: 17-LIB34-038-Q1-E1-E1
gggtcgagcccgcgtccgccagagctgactactccatgcggctctgcagagtacatggcccccgaggtggtggaggtcctcacggacgatgccactttttacgacaagctctgtgatctgtggatcctgagcctggttctctacatcatgctgagcggctcagctcgctttgtcggtcactctgcagcctacagtagcagggaacgatgatatgtctgcacagtgagtttgagtaaactgttcgagagcatccccagcagttaatctcagttacgtgacaaggactgcgcacacatctcgatccaggattcagatatcatcgctaaac

SEQ ID NO: 3951 - DNA, 428 bp, Bos taurus
  Clone ID: 17-LIB34-039-Q1-E1-E1
gttctgaaaccctagaggacgcaactgtgagtgtctctgtcctagcctctcaacttgctttcctgtgtccaatagcactgcagactccagtactagcctgtccagagcagcaagtgagaggaaacaagccagcattgtaagaggacatgcttctcctccctctctccgtgctgctcctgctcacacagccctggagatccctgggagcagaaatgacaaccttttctcagaaaatactggccaatgcctgtaccctggttatgtgtagccccctggagagtggcttgcctggtcatgatggacaagatgggaaagaatgtccccatggagaagaaggggatccaggttcaccaggacctgcagggcgagcaggaaggcctggatgggttggccctattgggccgaaaggagacaatggctttgttgga

SEQ ID NO: 3952 - DNA, 393 bp, Bos taurus
  Clone ID: 17-LIB34-039-Q1-E1-E9
acaacagcaaaaagatgaacctgggagttggtgcctaccgggatgataatggaaagccttacgtgcttccaagtgtccggaaggcggaggcccagattgctgcaaaaaatttggataaagaatacctgcccattgcggggctggctgaattttgtaaggcatctgcagaactagccctgggtgagaacaatgaagtgttgaaaagtggccggtatgtcaccgtgcagaccatttctggaaccggggccttaaggatcggagccagttttctgcaaagattttttaagttcagccgggatgtcttcctgcccaaaccaacctgggggaatcatacacccatcttcagggatgctggcatgcagctccatagttatcggtactatgaccccaaaa

SEQ ID NO: 3953 - DNA, 367 bp, Bos taurus
  Clone ID: 17-LIB34-041-Q1-E1-E9
aaagcaacctctgggctcctgggtgcccacgcctccgccatcacggcctacgccctgtcgctgaccgaggcccctgaggacctgcggatagctgcccacaacaacctgatggccatggccaaggacatcggtgataagctgtactggggctcagtcaccacttctccaagcaacgtcctgtcacccactctggctccacacagcccagcagaccccattccccaggctccggccctgtggattgaaaccacggcctacggcctgctacacctgctgctatgggagggcaaggctgagttggccgaccaggctgcatcctggctgacccgccagggcaacttccaaagcggattccgcagcacccagg

SEQ ID NO: 3954 - DNA, 395 bp, Bos taurus
  Clone ID: 17-LIB34-043-Q1-E1-E9
acaagcctctacagtgagtcgtcttagactttatacatccaggtcatgacatttagtgaggcagaaatttttccatttaatccatttgatcttaccaaggtttggcctcacggcgactatccccttattccagttggtaaattggtcttaaaccggaacccagttaattactttgctgaggttgaacagttggcttttgacccaagcaacatgccgcccggcatcgagcccagccctgacaaaatgctccagggccgcctttttgcctatcctgacactcaccgccaccgcctgggacccaactatctccagatacctgtgaactgtccctaccgtgctcgagtggccaactaccagcgtgacggccccatgtgcatgaaggacaatcagggtgg

SEQ ID NO: 3955 - DNA, 410 bp, Bos taurus
  Clone ID: 17-LIB34-044-Q1-E1-E1
ctggcccaagacctctgcctctttttggaaacgttctatcctaccgaaagggtgtttgtgagtttgatgaagaatgttttaaaaagtatgggaaaatgtgggggatttttgaaggtaaacatcctctgttggttatcacggatccagacatgatcaaaacagtactagtgaaagaatgttattctgtcttcacaaaccggagggtttttggtccaatgggagttatgaaaaatgctgtttctgtggctgatgatgaacaatggaagataatacggacattgctgtctccaaccttcaacagtgggaaactcaaggagatgttccctatcattgggaagtatggagatgtgttggtgaggaacctgaggaaggaagcagacaaaggcacgtccgtcgacatgaaagaggtc

SEQ ID NO: 3956 - DNA, 332 bp, Bos taurus
  Clone ID: 17-LIB34-045-Q1-E1-E1
cgagtcaagcgacggattcgagtcactgggctgatgaacatgcgacaacacgtcatgctacgcgcaatctccagatgtaatcttccatattccttcattgaattcatcagcatgtctgacatatgtcgtcacactagatatctgatgccacttatcatcatttgatttggagttatggccaagctagctgtatgattgtacatttcctcgaaatctatcaagacactggtagtaatgcatgacgaactttggaatgcatcttatatcacgttgaaaataaagcatcatacgccatacatctggtcaaagcactcgatctcaactataacact

SEQ ID NO: 3957 - DNA, 455 bp, Bos taurus
  Clone ID: 17-LIB34-045-Q1-E1-E9
cacactaataaaaattgtaaacaatgcattcatcgaccttccagccccatcaaacatttcatcatgatgaaatttcggttccctcctgggaatctgcctaatcctacaaatcctcacaggcctattcctagcaatacactacacatccgacacaacaacagcattctcctctgttacccatatctgccgagacgtgaactacggctgaatcatccgatacatacacgcaaacggagcttcaatgttttttatctgcttatatatgcacgtaggacgaggcttatattacgggtcttacacttttctagaaacatgaaatattggagtaatccttctgctcacagtaatagccacagcatttatacgatacgtcctaccatgaggacaaatatcattctgaggagcaacagtcatcaacaacctcttatcagcaatcccatacattcgcacaaatt

SEQ ID NO: 3958 - DNA, 368 bp, Bos taurus
  Clone ID: 17-LIB34-048-Q1-E1-E1
tgatgtcttctggtgcctgtcagacacaggctggattctggctgccttggggtccctgcttgaaccatggacagcggggtctacagtctttgctcatcatctgcctcagtttgaccctaaggtcattatagagacatttttcaaatacccaattacccaatgccttgctgcaccttctgtatatcgaatgattttgcagcagaattacaccagtcttaggttccccactctggaacactgctgtactggtggggaagccctgctgcccgaggagcaagaacagtgggaaagacagacaggtgttctgctctaccaggccctatggacagtcagaagcgggaataagctgtggcactctcggggggatg

SEQ ID NO: 3959 - DNA, 354 bp, Bos taurus
  Clone ID: 17-LIB34-049-Q1-E1-E1
actagatcgcgagcggtcgcccttttatttttctgtttttcctcagagggatcctttattcaatcactttctacttacaaggtggaatttcaacctgtcaaagttctttcgtccaatttagccagtgacttggaacactactttgtcaactccacacagtaatgggtcacagggcacgttggtacgctgtggattcaccggactgggagagatgggttccggagctccactacgcaggtttcaccatgaccccactctctattcctgtccgaagtcagcaaggcaatggattgtatttcgagtcactttttcgcagatcagatctacttcatttacatgtccagaagaatttct

SEQ ID NO: 3960 - DNA, 424 bp, Bos taurus
  Clone ID: 17-LIB34-050-Q1-E1-E1
ggaagcccccaggggctggttggtgatcagcgtgctggccatttccctggcctcctccgtgactgaggacgtgtgccgagccccggacgggactcacgggagcgcaggaatacctggccgaccgggacggccaggcctcaagggggagcgaggggagccgggggcgcctgccatccagacaggcatccgaggccttaaaggagaccagggcgaccctggaccccctggaaacccaggcagaatgggctacccaggaccctctggtcccatggggcccgctggcctcccaggattgaaaggcaccaaaggcagccccgggaacatcaaggaccagccacggccagccttctcggccgttggaccgaattctgtctcaagagacaacgtggtcgtcttcggaaaggtcatcaccaaccaagagaac

SEQ ID NO: 3961 - DNA, 322 bp, Bos taurus
  Clone ID: 17-LIB34-050-Q1-E1-E9
gctctttccatttttatataagcgttctctatttctataccactggtcaatgggatgttatcactgaaaatgattggtaaaaatgaatcagcgtgtcttttgatgccgtaatgatttgttctggacatcatgtgtaacccaacatacctaaagagtcctttccaggaataaaactttttaaaggcaaatgcttccacagccgggactataaagaaccaggaatcttcaaggggaagcgaatcctggtgattggtctggggaaatcacgctgtgacatcgcctcagaactcagccacatagctgaaaaagtcatcagcagctc

SEQ ID NO: 3962 - DNA, 235 bp, Bos taurus
  Clone ID: 17-LIB34-051-Q1-E1-E1
gtttattagcacagtaacaaatgcagacttgagtagtccacaacatagagccaatccactcaacacaccccctcacatcaaacccgagtgatacttcttatttgcatacgcaatcttacgatcaatccccaacaaactaggaggagtactagccctagccttctctatcctaattcttgctctaatccccctactacacacctccaaacaacgaagcataatattccgaccactc

SEQ ID NO: 3963 - DNA, 246 bp, Bos taurus
  Clone ID: 17-LIB34-051-Q1-E1-E9
agtgaatcgataatggcactctccatcacgcggggccttctgctgctggcagccctgtgctgcctggcccccatctccctggctggagttctccaaggacacgctgtccaagagacagatgatacatcccaccaggaagcagcatgccacaagattgcccccaacctggccaactttgccttcagcatataccaccatttggctcatcagtccaacaccagcaacatcttcttctcccccgtgagc

SEQ ID NO: 3964 - DNA, 240 bp, Bos taurus
  Clone ID: 17-LIB34-052-Q1-E1-D8
gaagattctagcaaaccatatagagtatactgtgatatgaaaacggaaaaaggaggatggacagtaattcagaaccgtcaagatggtagtgttgactttggcaggaaatgggatccatataaacaaggatttggaaatattgcaaccaatgcagaagggaagaaatactgtggtgtaccaggtgagtattggctcggaaatgacagaattagccagcttaccaatatgggacccacaaag

SEQ ID NO: 3965 - DNA, 348 bp, Bos taurus
  Clone ID: 17-LIB34-055-Q1-E1-E9
agcaactggacctcgcctaagctgtgtctctgactcatttctgactttagttcttccaatgggaaaaatggcgaagatgtttagtttcatccttgtcaccactgctctggtaatgggcaggggaagctcggctctggagaactgcctccaggagcaggcgcggctcagagcccaagtgtacctggagacccgggtcaagcagcaacaagtcaagatctcgcagcttttgcatgagaaacaagtccagctccttgataaaggagaggagaatagtgtcattgaccttggaggaaagaggcaatacgcagattgttcagagattttcaatgacgggtacaagcagagtgg

SEQ ID NO: 3966 - DNA, 374 bp, Bos taurus
  unsure (260): unsure at all n locations; Clone ID: 17-LIB34-056-Q1-E1-E1
aggacccaaagatagagggtaactgttgtcatcagctgccgtttctgatgggtctgccacatttgtaacatctgtccttccccgacctttcccaggaattgataatcacgcagcctcctcaggcagtggtgtggggcaggtcctaccgagcacctctgtgatgaccgtgtctagggtggcatgtgagattgaagtgttgatttggctcagtggagccgggtttttaggggtacttgtggttctgtcatccttggacctcncctggctgcagcttgggtttcctggttgctgctgcacacagtgatgggcatcattgccggaggggtcttcaggggctaccggggtcagttgctgcagagtgtttgggtgggggg

SEQ ID NO: 3967 - DNA, 225 bp, Bos taurus
  Clone ID: 17-LIB34-057-Q1-E1-E1
acgctgtcagggaaagacatacctcttcaagggtagtcagtactggcgctttcaggacggtgtcctggagcctgacttcccccgaaacatctcggacggcttcgggggtattccggatgatgtggatgcagccttggccctccccgctcacaacttcaacggcagggagcgggtctacttcttcaagggcaaccactactgggaatatgtgttccagcagcagcc

SEQ ID NO: 3968 - DNA, 228 bp, Bos taurus
  Clone ID: 17-LIB34-058-Q1-E1-E1
cacaggtgtcgtgaaaaccaccgttaaacctaagccaaaatgggaaaggagaagacccacatcaacatcgttgtcattgggcacgtagattcagggaagtctaccacgactggccatctgatctataaatgtggcgggatcgacaagagaacaattgaaaagttcgagaaggaggctgccgagatgggaaagggctccttcaaatatgcctgggtcttggacaaactt

SEQ ID NO: 3969 - DNA, 204 bp, Bos taurus
  Clone ID: 17-LIB34-059-Q1-E1-E1
ctagctgctactcccggaacctggactacgctcggctgcgcaagatcgctgatgacaacggggcgtacctcatggccgacatggcacatgtcagtgggctggtggcggccggcgtggtgccttcgcccttcgagcactgccacgtggtgtccaccaccacccacaagaccctgcggggctgccgcgccggcatgatcttctaca

SEQ ID NO: 3970 - DNA, 239 bp, Bos taurus
  Clone ID: 17-LIB34-060-Q1-E1-E1
ggcttttaggttctgtagctggtcgcaatggcaagcaaaggagggtacatcgtgcttgggctcctgttcctggctgtcctctgccaactcggtcacagcctgcagtgctacagctgtattaaccaagttaactgcacttcaatcgtcaattgttcacataatcaagatgcttgtctcttcgttaaggctgtgccgctaaaattttaccaccagtgttggaagtacgaagaatgcagttt

SEQ ID NO: 3971 - DNA, 314 bp, Bos taurus
  Clone ID: 17-LIB34-060-Q1-E1-E9
ccgagatccagacaccgaagcagctggcacccgggtagcccggagaggggcgagcaacatgagcagcaaatgcgacgtggtcgtggtggggggcggcatctcaggtatggcagcagccaaacttctacatgactctggcttgaatgtgattgttctggaagcccgggaccgcgtgggaggcaggacttacacccttaggaaccaaaaagttaaatatgtggaccttggaggatcttatgttgggccaactcagaatcatatcttaagattatccaaggagctaggattagaaacctacaaggtgaatgaagtag

SEQ ID NO: 3972 - DNA, 347 bp, Bos taurus
  Clone ID: 17-LIB34-061-Q1-E1-E1
agatatgagaagcagaattgagatcctgaggcgcaaagtcatacaacaagtacaacgtatcaacgttctgcagaaaaatgtcagggatcaactggtaaatatgaaacgattggaggtggacattgatattaagatccgatcttgcaaaaggtcatgcagtagagctttagaacacaaggtacatctggaggactatagcaatcaccagaagcaacttgaacaggttattgccataaacctacttccctctacagacattcaagacttaccagtgataaaagtgagtacacttacaggccctgttcccagatagttcaagagccagctccaatatgcccctcgagaat

SEQ ID NO: 3973 - DNA, 402 bp, Bos taurus
  Clone ID: 17-LIB34-061-Q1-E1-E9
ccacgcgcccggcattgttgggatcctgtgtcgtcttggaggtgactcggcgtgattgaatttgcggcatcttcgcattcactcacaggtcaaaatgcagatcttcgtgaaaaccctgaccggcaagaccatcaccctggaggtggagcccagtgacaccatcgagaacgtgaaggccaagatccaggataaggaaggcattccccctgaccagcagaggctcatctttgccggcaagcaactggaaaatgggcgcactccttccgattacaacatccagaaagagtcgaccctgcacctggtcctccgtctgaagggtggtatgcagattttcgtgaagaccctgaccggcaagaccatcaccctggaagtggagcccagtgacaccatcgagaacgtgaa

SEQ ID NO: 3974 - DNA, 189 bp, Bos taurus
  Clone ID: 17-LIB34-062-Q1-E1-E1
gatgagtataggtcagaaggccaatcagacattttacataaccacattactcatcattccagtcatcgttgcagccgcagtcattgtccttctgctgtatttgaaaaggctcaagatcattatattccctccaattcctgatcctggcaagatttttaaagaaatgtttggagaccagaatgatgatac

SEQ ID NO: 3975 - DNA, 379 bp, Bos taurus
  Clone ID: 17-LIB34-063-Q1-E1-E1
tgtctatgaaaaggctctcgcttctgctgctgctacagctgacttgctactttagcggtgggagttgtggaaaggtgctggtatggccagtggaatttagtccctggctgaatataaagacaattctggaggaactcgtcacgaggggtcatgaggtgactgttctgatatcttcagcttccactattcctaattccagcaaaccatctactatgaaatttgagacttttcctgtatctttaacaaaaagtgattatgagaattttatggaacgtattcttgaggaactgacatatgtggcaaaagattccttttggtcctatctttcaacagtgaaaaatgtattttgggaattttttgatattgctttacatatgtg

SEQ ID NO: 3976 - DNA, 429 bp, Bos taurus
  unsure (45),(82): unsure at all n locations; Clone ID: 17-LIB34-064-Q1-E1-E1
gccttttgacacatgccacgcctttgatcaaagaacaagacatanaaacaaagtcatcatgacattccatagcaaatttggnatcaagactccatttacaacttcaagatccctggagaacaactaaggggcaccaggccctctgaggttttactttaaggtccagcgaattccgccttggacaagaagatctgctaccacttgcctgtccagtaatacactttacaaggccaatatgagatctaccataaggcagatgctagttataaggcattaagtaagcaaatagtgccccgagctactagagaagaaaaatcccactaaagatgaaaaggcttatgattttcaaggtcaaatcaagcaggttttacctgttaaacccatcagaaccatactaagaatgtcaatgatagtttttatagtttttgg

SEQ ID NO: 3977 - DNA, 218 bp, Bos taurus
  Clone ID: 17-LIB34-065-Q1-E1-E1
gaaagctcgcatggaaggggcccaaattctgtgtggtgagggagtggataagttgaaccttccccccaggaatcaggcagggtacttcatgcttcccacggtgataacagatgttaaggatgagtcctgctgcatgaaggaagagatatttggtccagtgacgtgtgtcgtcccctttgatagtgaagaggaagtgattcaaagagccaataatgtta

SEQ ID NO: 3978 - DNA, 256 bp, Bos taurus
  Clone ID: 17-LIB34-066-Q1-E1-E1
gtggagtaaccacattcatgccggaatggaaactacttacaccactgccatgtgaccgaccacattcatgccggaatggaaactacttacaccgttctaccaaacgaagagatcaagtctggatgaaagaaataaattggtgataagtggaaaaaaaagaaaaaacaatgatttgtaacaatgtatgtgaaagtgttgaatagaaggcttactttggaatggctatacccgtttaaaaaaaagactgaaaatacac

SEQ ID NO: 3979 - DNA, 201 bp, Bos taurus
  Clone ID: 17-LIB34-066-Q1-E1-E9
agcagtcgtccgtgatacagcagtgcggccatggcagaaccacagcccgcgtccggcggcctcaccgacgaggctgccctcagctgttgctccgacccggaccccagcaccaaggattttctcttgcagcagaccatgttgcgaattaagggttctaagaagtcactggatttttaaacgaaaattcctgggatggcacca

SEQ ID NO: 3980 - DNA, 193 bp, Bos taurus
  Clone ID: 17-LIB34-068-Q1-E1-E9
agaacccagagtctcaatttcacttggaaaacttagcaacctgtggatcaaatctgttttcagcaggagtagagacaaccactgccaccctgagttacgggttcctgctcctaatgaaataccctgaggttcaagccaaagttcatgaagaaattgaccgtgtgattggacgcacccgaagtccctgcatgaa

SEQ ID NO: 3981 - DNA, 210 bp, Bos taurus
  Clone ID: 17-LIB34-069-Q1-E1-E1
aatagttctagatcgcgagctgccgccctttttttttttttttttttttttttttttttttttttttttttttttttttttttttttttttttttttttttttttttttttttttaaagcttaaagtaaggatacattcaagcttggttacaaaaataaaacatgcatcatttttcattgccaaccaagcacaaagttattttaaacgga

SEQ ID NO: 3982 - DNA, 232 bp, Bos taurus
  Clone ID: 17-LIB34-070-Q1-E1-E1
gggctcagcagccggccggccacctggaagaagagcacagcccgcggttagaggcggcgcagcgcatgtcccgccgcgacgcgagcgccggctgggccccagcgagccggccccgtcccgaggagcgcggcggcggccggaggcgagcaagtgcagccctgcgcgagcgcgctctgccaactcgcgggctcgggtctccaactttaagtaccgctctcccgagctcaaaggc

SEQ ID NO: 3983 - DNA, 228 bp, Bos taurus
  Clone ID: 17-LIB34-070-Q1-E1-E9
caaaaaaaaaaaacccttcagtatacgtaaaaaacatacatggggatcagtgaatctgcttgtactcaaatgtatgtcttctctggagttttctaaggaatcatttgaggcttaggattccagactttgacttattaaaatatgtatagttacccgtttccaaaaaaaaaaaaaaagaaaagaaaaaagaaaaaaaacagaaattttgaaaaagcaaaatgacaaaaa

SEQ ID NO: 3984 - DNA, 397 bp, Bos taurus
  Clone ID: 17-LIB34-071-Q1-E1-E1
gagaaattgttcaccttccatgcagatatatgcacacttcccgatactgagaaacaaatcaagaaacaaactgcacttgttgagctgttgaaacacaagcccaaggcaacagaggaacaactgaaaaccgtcatggagaattttgtggcttttgtagacaagtgctgtgcagctgatgacaaagaagcctgctttgctgtggagggtccaaaacttgttgtttcaactcaaacagccttagcctaaacacgacacaaccacaggcatctcagcctaccctgagagtaagaggaaaaaagagaaatgaaaactcagagcttattcatctgttttccttttctgttggtgttaaaccaacactctcactaaagaacgtaaatttctttaaatattttgc

SEQ ID NO: 3985 - DNA, 422 bp, Bos taurus
  Clone ID: 17-LIB34-072-Q1-E1-E1
tcgacccgcgcgtccgagttgaataagataaattctcaggggatcagagaaggaagaagcttccatcctacaaggaggtcacttatgccacctccttctgtcatcagctcaaatggatttccaggcgttcattcaaaaatttactgggtaatccccaggcttctatagctcagctaattgtgacagtcttcctgggactggttataggtgccattttctatgatctaaaaaatgatcctgcaggaatccagaacagagccggggtgctcttcttcctgacgaccaaccagtgtttcagcagtgtgtcagccgtggagctcctggtggtggagaagaagctgtttatacatgaatatatcagtggatactatagagtgtcatcttacttctttggaaaactgttatctgatttactccccatg

SEQ ID NO: 3986 - DNA, 420 bp, Bos taurus
  Clone ID: 17-LIB34-072-Q1-E1-E9
gggccgagccacgcgtccagtaccactcccttagcaggcaacctagcccatgcaggagcttcagtagatctaaccattttctctttacacttagcaggagtttcctcaattttaggagccatcaacttcattacaacaattatcaacataaagccccccgcaatgtcacaataccaaacccctctgttcgtatgatccgtaataattaccgccgtactactactactctcgctccctgtattagcagccggcatcacaatgctattaacagaccggaacctaaatacaaccttcttcgacccggcaggaggaggagaccctattctatatcaacacttattctgattctttggacaccccgaagtctatattttaatcttaactgggtttggaataatctctcatatcgtgacctactac

SEQ ID NO: 3987 - DNA, 422 bp, Bos taurus
  unsure (277),(353),(410): unsure at all n locations; Clone ID: 17-LIB34-073-Q1-E1-E1
ggcgaggtgggcaaaatgtgggctggccgcgtcctgcatgctgcgctctcccgggccccccgcgagagccgggcgcagtcagcgctggctcagctgcgtggcatcctggaggaggagctggaaagcatccgcggagctggcacctggaagagcgagcgggtcatcacgtcccgtcaggggccgcacatccacgtggacggcgccccgggaggaattattaacttctgtgccaacaactacctgggcctgagcagccaccctgaggtcattcaggcangtctgcggaccctaaaagagtttggagccggccttagctcagtccgcttcatctgtggcacccagagcatccacanagacctagaagcaaagatagcccgcttccaccaaagggaggatgccatcctctatcncagctgttttga

SEQ ID NO: 3988 - DNA, 415 bp, Bos taurus
  Clone ID: 17-LIB34-075-Q1-E1-E9
ccgacccacgcgtcaacggacactcgggtaagtgtgacttggaagatgaaagagttgtaggaaaggaacaaggtcaaaatctagcacgacagtggaacaactgtgcattcttagaatcctctgcaaagtcaaaaataaatgttaatgagatcttttatgacctagtgcgacaaattaacagaaaaactccagtgcctgggaaggcccgcaaaaagtcgtcatgtcagctgctttaatatactaaatgcattgtagctctgagccaggtctgaagaactgttgcccaattcaacagtgccagcattccaactttgttaaacctaccaacatcttaaatggactttctgtggtggtaccctttaagagggggatgaaaactactacatcagtttgcacattcaaatcactttccagt

SEQ ID NO: 3989 - DNA, 317 bp, Bos taurus
  Clone ID: 17-LIB34-076-Q1-E1-E1
cacgcgtccggtcagcttgggcagccctcctgctgctctggggtctgtccctgagcccagtgactgagcaggcgacgttctttgaccccaggccatccctgtgggccgaggccggctcaccgctggcaccctgcgccgatgtgacgctgacctgccagagcccgctgccgacccaggagtttcagctcctcaaggatggcgtgggccacgaaccggtgcacctggagtcccctgcccatgagcacaggttcccgctgggaccagtgaccagcaccatccggggcctctaccgctgcagctacaacgggcaacaacga

SEQ ID NO: 3990 - DNA, 278 bp, Bos taurus
  Clone ID: 17-LIB34-077-Q1-E1-E1
ttcgtcttaaggacttacagcgatatatgagagaagcctgaaagaggccgattcctccactttcactctgtgaccttctgggttggcaatgccaagcacgctgcgtcatattactgcagtaagctgggctttgagcccctagcctataaaggcctggagaccggttcccgggaagtggtgagccatgtggtcaagcaagggcagatcgtgttcgtcttctcctctgccctcaacccctggaacaaatagatgggcgatcacctggtgaaacacggcga

SEQ ID NO: 3991 - DNA, 371 bp, Bos taurus
  unsure (339): unsure at all n locations; Clone ID: 17-LIB34-079-Q1-E1-E1
cggactgcttggctgctgcgtacggcggcaaggcggcccccgcggcgcccccggcggccagacccgggccgcgcccccccgccggcgagctgggtagcatcggagagcacgagcgcgccatcgacttcagcccctacctggagccgctgggcgcgccgcaggccccggcacccaccacggcctcggacaccttcgaggcggctccgcccgcgcccgcccccgcgcccgcctcctccgggcagcaccacgacttcctctccgacctcttctccgacgactacgggggcaagaactgcaagaaggcggccgagtacggctacgtgagcctgggccgcctgngggccgccaagggagcgctgcacccgggctgc

SEQ ID NO: 3992 - DNA, 381 bp, Bos taurus
  Clone ID: 17-LIB34-080-Q1-E1-E1
aggaacatcctcatgagtccgcatataccccaagggcaccatggccgccctgtgcatcacggtcgccctgctggtgtggattgccaacttgctgttcatcgccatctggaatcacatctagagcagctggaaactgcaccctggtgctttcacagtgcccatcatctggaatctttgacagctggatattatcaacgttctcagatccttcagcaagctgtgcggataggtaccggccggtgttcaccctgtacctgcgctctcaacatgacgtggtcctgcatggcgtctagcccgtgaacgacgtcctgcgtgatcaccatcaccagttttctggcacaggagagtatccttggttccatatccactagatcagtggga

SEQ ID NO: 3993 - DNA, 217 bp, Bos taurus
  Clone ID: 17-LIB34-080-Q1-E1-E9
ggaggtctgcgtccatgagtgaggagcctgcagaagaacatgatctctgctctgggggctcctgacgcgaagccgctcctgcctgtcaaacctgtgatgaacgttctctcctgtgagcacgactggatcccttggatatgcggctaatgggagggcaggcccagtataagctgcgcccgactttccgtcctcaagctggacagccaggagccaagtg

SEQ ID NO: 3994 - DNA, 366 bp, Bos taurus
  Clone ID: 17-LIB34-081-Q1-E1-E1
gtcgacgacgcgtccgacctggagccgctgggcgcgccgcaggccccggcacccaccacggcctcggacaccttcgaggcggctccgcccgcgcccgcccccgcgcccgcctcctccgggcagcaccacgacttcctctccgacctcttctccgacgactacgggggcaagaactgcaagaaggcggccgagtacggctacgtgagcctgggccgcctgggggccgccaagggagcgctgcacccgggctgcttcgcgcccctgcacccgccgccgccgccgccgccgccgccggccgagctcaaagcggagccgggcttccagcccgcggattgcaagcgcgaagatgacgccggagctcccggc

SEQ ID NO: 3995 - DNA, 417 bp, Bos taurus
  Clone ID: 17-LIB34-082-Q1-E1-E1
acgcgtccgcagtaattgaatatggtggtaaacgggtcagaggaagtgacctcttcagccccaaagatgctgtggctattaccaagcagttcctcaaaggattaaagggagtagaaaatgtatatactcagcatcaacctttcttacatgagaccctggaccatctcatcaaaggaaagcttaaagaaaacctgtatccttatctaggccccagcacactcagagacagacctcaggatatcattgtgtttatcattggaggagccacctatgaagaggctctaacagtttataacctgaaccgtaccactcctggagtgaggattgtcctaagaggaaccacggtgcacaacacaaaaagtttcctagaggaagttctggcttctggactgcacagccgaagcaaggaaagctctc

SEQ ID NO: 3996 - DNA, 388 bp, Bos taurus
  Clone ID: 17-LIB34-083-Q1-E1-E1
agccaataaatcctctgagttggtatcagccaaccgtctttttggagacaaatccattacattcaatgagacctaccaggacatcagtgaggtggtatatggggccaagctccagcccctggacttcaagggaaatgcagagcagtccagattgactatcaaccaatggatatccaataagactgaagggcgtatcactgatgtcattcccccacaagccatcaatgagttcactgtcctggtgctagtcaacaccatttacttcaagggcctgtggaagtcaaagttcagtcccgagaacacaaggaaggaactgttctacaaggctgatggggagtcatgttcagtactcatgatgtaccaggaaagcaagttctgctactctccg

SEQ ID NO: 3997 - DNA, 427 bp, Bos taurus
  Clone ID: 17-LIB34-084-Q1-E1-E1
acttggagtttctggctgtgcttcttcccccgcggctccgagaagcgggatcgggtgcctctgaaccagcacaatggcagctccagtcaacaaggcacccagagatgccaatttgtggtccttgcacgagaagatgctggcacagcccctgaaggacaacgatgtcgaggtttacaacatcattaagaaggagagtaaccggcagagggttggactggagctgatcgcctccgagaactttgccagccgggctgttctggaggccctaggctcttgcctgaacaacaagtactctgaggggtacccaggccagaggtactatggtgggacggagttcatcgacgagctagaggtcctctgtcaaaagcgagcgctgcaggtctatggcctggactcccagtgctgggggggtttacgtccagcctta

SEQ ID NO: 3998 - DNA, 331 bp, Bos taurus
  Clone ID: 17-LIB34-084-Q1-E1-E9
cacgcggccgatcagactcgaaagatacttcttaattgcatacgcaatcttacgatcaatccccaacaaactaggaggagtactagccctagccttctctatcctaattcttgctctaatccccctactacacacctccaaacaacgaagcataatattccgaccactcagccaatgcctattctgagccctagtagcagacctactgacactcacatgaattggaggacaaccagtcgaacacccatatatcaccatcggacaactagcatctgtcctatactttctcctcatcctagtgctaataccaacgggcggcacaatcgacaac

SEQ ID NO: 3999 - DNA, 435 bp, Bos taurus
  unsure (421): unsure at all n locations; Clone ID: 17-LIB34-085-Q1-E1-E1
ttccaaggccgacccgcgcgtccagaagtaaacatatgtcaggcggtatttgtggagatgctggagatgcatttgatggctacgattttggcgatgattctagtgacaagtttttcacatcccataatggcatgcagttcagtacttgggacagtgacaatgataagtatgatggcaactgtgctgaacaggatggatctggttggtggatgaacaaatgtcacgctggccacctcaatggagtttattatcaaggtggcacttactcaaaaacatctactcctaatggttatgataatggcattatttgggccacatggaaatcccggtggtattccatgaagaaaaccaccatgaagataatcccacttaacagacttgccatcggagaaggacagcagcaccaactggggggagccanacaggctggagacg

SEQ ID NO: 4000 - DNA, 387 bp, Bos taurus
  Clone ID: 17-LIB34-086-Q1-E1-E1
ccgggtagaccacgcgtcccaagatgccgaagggaaagaaggccaaggggaagaaggtggccccggccccggccgtggtgaagaagcaggaggccaagaaggtggtcaaccccctgttcgagaagaggcccaagaattttggcattggacaggacatccaacccaagagggacctcacccgctttgtcaaatggccccgctacatccggctgcagcggcaaagggctattctctataagcggctgaaagtgcctcctgcaattaaccagttcacgcaggccttggaccgacaaacagctactcaactgcttaagctggcccacaagtacagaccagagacaaagcaagagaagaagcagaggctgctggcccgagctgagaagaaag

SEQ ID NO: 4001 - DNA, 401 bp, Bos taurus
  Clone ID: 17-LIB34-086-Q1-E1-E9
agcacgcgtccgcagacactgattgtctccaacatgaagcttggtcatgtcatcctcttacttttgtgcttctacttaagtttttgtgaggataattttagaaaacgaggaaagtcaaaggcagtgaagaaatcagaggctcaccatgcccctgaagcaagtctgagcaaggagacagaagcttcatctgaagtgaagcccacttcaacacaagacacatctcaaaaagatttcgtggataaaaagtgcttaactgaaaaacacacacatctctcctgcaacaaagtcttctgccaaccgtggcagaaatgcatcgatgggacgtgtccttgtaaacttccttatcagtgcccgaagaatggtaccagggtgtgttcaactaatgggaaaagctactcaac

SEQ ID NO: 4002 - DNA, 355 bp, Bos taurus
  Clone ID: 18-BOVMS1-001-Q1-E1-E5
atgcgacgtcatatctcatcgatactgtcacctaaagtcaattcactggccgtcgttttacaacgtcatgactgggaaaaccctggcgttacccaacttaatcgccttgcagcacatccccctttcgccagctggcgtacatatcgaagaggccctcatcgatcgcccttcacaatagttgcgcagcctgaatggcgaatgggacgcgccctgtatcggcgcattaagcgcggcaggtgtcgtggttacgcgcagcgtgaccgctacacttgccagcgccctagctcacgctcctttcgctttcttcccgtcctttctcgccatgttcgctggctttccccgtcaagctctaaat

SEQ ID NO: 4003 - DNA, 250 bp, Bos taurus
  Clone ID: 18-BOVMS1-002-Q1-E1-E5
acaaaaaatgtggatgtcagacaccatgggacaaaatattcgacggacgctcgacaggatatcacctttcatatgcttgcttgcaacatcataactcttcgattatgttaaggaaattcaattcactggcggtcgttttacaacatgatccatgggaaaatactcgtgttacccagtctaatctccttgctgcacatcccccattctccatcaggcgtaatcgctataaagcctccacaaattgaacatc

SEQ ID NO: 4004 - DNA, 402 bp, Bos taurus
  Clone ID: 18-BOVMS1-003-Q1-E1-E5
caacaacaacacaactatcaataaacctatgcatagccatccccctgtgagcaggagccgtaattacaggattccgcaataaaactaaagcatcacttgcccatttcttaccacaaggaacacccaccccactaatcccaatactagtaattattgaaactatcaacctttttattcaacctatagccctcgccgtgcggttaacagctaacatcactgcatgacacctattaattcacctaatcggaggagctacacttgcactaataagcattagcactacaacagctctaattacattcaccattctaatcctactaacaattctagagtttgcagtagctataatccaagcctatgtattcactctcctagtcagcctatatctgcatgacaacacat

SEQ ID NO: 4005 - DNA, 174 bp, Bos taurus
  Clone ID: 18-BOVMS1-004-Q1-E1-E5
ttcgtggatgggaagtcataactctacaattgtgacacctagagtcaattcactggccgtcgatttacaagatcgtgactgggaaagggcagacgttaacctgcttaaacgccttgcagcacaccacgcgttcgacagctggcgtaatatcaacaatgctcgcaccgctagtcc

SEQ ID NO: 4006 - DNA, 421 bp, Bos taurus
  Clone ID: 18-BOVMS1-004-Q1-E1-E9
acaaaagacgcacaaaaaagataaaaacttaaataaacgataaataaaacatcaaaaatcttcaaaaaatgtcaactaaattcaattaaaaaaaaggtcggctgcccaagaggttccaagctaacttcctcgtgtatcccaatttaaaccccttcaaacatatcacccaatctcaattcactggcctaccttttacaccttcagcactgggaaatccctgcagttacccaacttaaacgccttgcggcacatccccctttcccaagcagtattagtagcgaatatgctggcaacgatcacccttcccactatttgtgcaacctgaatggcgactggtcctttccctttcttcgcatattaacccccaacgttctgcgggttacccgcacattcacggcttcacttgcaacctttaaagctc

SEQ ID NO: 4007 - DNA, 423 bp, Bos taurus
  Clone ID: 18-BOVMS1-005-Q1-E1-E5
ctgatctgtaaatacttaaaaaaaagagtagttttgtatcaacctaaatgagtcgaagttcaaaaataatacatttcagtcttttcataattgttgacctaagaagattacacattttctagtgacatgtacatactgtatatagccggattaacggttataaagttttgtaccatttattttatgacattttacactgtaactattgaaactaacggttggtaggagaaagtttcttatggaacgaataccctgctcaacacttaatcaatctttgtgcctcaacatactgttgatgtctaagtatgcctcagtgggtcgaggaattccccattgaagatgtcctatccaccgaaaaatgctgtgcacatcacctgatatgcaccgatacttatggaatcagaaatgtaaggcattggtgat

SEQ ID NO: 4008 - DNA, 293 bp, Bos taurus
  Clone ID: 18-BOVMS1-006-Q1-E1-E5
cgcgtcgcaacaacaggaactctgtgtgagagagaagacgcccagcccaggcctgggtggagggggaggggagaggcctggaagacaggggagaccacccccgagcttgcctgaaggccaagccagcctaacccagccactccggcccccattccaggggtcacccacggcctcagaggatggtgtcggcaggcccagaggagtgggaaggctgtcgggcagcccccaacctgctctcagcttgtgccatgtaaataaatgtacacgttggtaaaacttcccaaaaaccaaac

SEQ ID NO: 4009 - DNA, 349 bp, Bos taurus
  Clone ID: 18-BOVMS1-006-Q1-E1-E9
tagctaccaaacggccgcccctatttcctattcttatatatctattctggctccctacccctattattctcactaatttatatctaaaacacactaggatccctaaatttcctaatattacagtgcggactacaacctgttcataactcttgatccaatgtcatcagatgactagcatgtacaataactttcatactaaaaataccactatatggcctccacctttgactacctaaagctcacgtagaatcccccatcgcaagctccatagtccttgcagcaattctcctagacctatgggggtatggtctgctactactcacactaactcgataccctatgacggact

SEQ ID NO: 4010 - DNA, 425 bp, Bos taurus
  Clone ID: 18-BOVMS1-007-Q1-E1-E5
ggtgatgtgtgttttgttttttttttttttgttttattgtttatttttgggttttttgttttgttcccctttttgttcttttgttttgtttgggtgttgttgatttttctgttttgttttttttttttattcttatttgttttgtttttattctttttttatttgttttttctttttttttttttctttttgttttgttttattcttttctttttgtcttcttttttttattttttttattgtttgtttttttgtttttttttttttttttttttattgttttttctttttttttttttttttttttttttttgttttttttttttttttttttttttttctttttttcttttctttttcttttttttttttttttttttatttttttttttttttgtttttttttttgtttttttttttttttt

SEQ ID NO: 4011 - DNA, 445 bp, Bos taurus
  Clone ID: 18-BOVMS1-008-Q1-E1-E5
atgatcgctcgcgccgaggaacaagtcggtcaagaagccacgccgcagccatggactttaaagacaccgggaagactcccgtggagccagaggtgggcattcaccggattacgatcaccctcaccagccgcaacgtgaagtctctggagaaggagtgtgctgacctgatcagaggcgcgatcgaaaatcatctcaaagtgaaaggaccagttcggatgcctaccaagactctgagaataactactacgaaaactccttgtggtgaaagttcgaagacatgggatcgattccaaatgacgatccacaagcgactcattgagctgcacagtccttctgaaattgtcaagcagatcacttccagcaatattgagccgggagtcgaagtggaagtcaccagtgctgatgcctagatcaacctttgtaataaatcgataatcagttgtta

SEQ ID NO: 4012 - DNA, 117 bp, Bos taurus
  Clone ID: 18-BOVMS1-009-Q1-E1-E5
aacacgcgtccggtgtacatacattgtttacctcattttgttatttttaaaacgaagccctgtggaaggaaatggaaaacttgaagcattaaactcagccgttctgttttgctgcgt

SEQ ID NO: 4013 - DNA, 385 bp, Bos taurus
  Clone ID: 18-BOVMS1-010-Q1-E1-E5
cgaactgagtggttgtgtgattgcgtcccggagaccggtagcgcttgcagcatggctgaccaactgactgaagagcagattgcagaattcaaagaagctttttcactatttgacaaggatggtgatggaactataacaacaaaggaattgggaactgtaatgagatctcttgggcagaatcccacagaagcagagttacaggacatgattaatgaagtggatgctgatggtaatggcacaattgacttcccggaatttctgacaatgatggcaagaaaaatgaaagatacagacagtgaagaagaaattagagaagcattccgtgtgtttgataaagatggtaatggctatattagtgcagcagagcttcgccatgtgatgacaa

SEQ ID NO: 4014 - DNA, 447 bp, Bos taurus
  Clone ID: 18-BOVMS1-010-Q1-E1-E9
tcctcacaggcctattcctagcaatacactacacatccgacacaacaacagcattctcctctgttacccatatctgccgagacgtgaactacggctgaatcatccgatacatacacgcaaacggagcttcaatgttttttatctgcttatatatgcacgtaggacgaggcttatattacgggtcttacacttttctagaaacatgaaatattggagtaatccttctgctcacagtaatagccacagcatttataggatacgtcctaccatgaggacaaatatcattctgaggagcaacagtcatcaccaacctcttatcagcaatcccatacatcggcacaaatttagtcgaatgaatctgaggcggattctcagtagacaaagcaacccttacccgattcttcgctttccattttatccttccatttatcatcatagcaattgcca

SEQ ID NO: 4015 - DNA, 90 bp, Bos taurus
  Clone ID: 18-BOVMS1-012-Q1-E1-E5
aaaaaaaaaaaaaaaaaaaaaaaaaaaaaaaaaaaaaaaaaaaaaaaaaaaaaaaaaaaaaaaaaaaaaaaaaaaaaaaaaaaaaaaaaa

SEQ ID NO: 4016 - DNA, 354 bp, Bos taurus
  Clone ID: 18-BOVMS1-012-Q1-E1-E9
atgcgacgtcatagctcttctatagtgtcacctaaattcaattcactggccgtcgttttacaacgtcgtgactgggaaaaccctggcgttacccaacttaatcgccttgcagcacatccccctttcgccagctggcgtaatagcgaagaggcccgcaccgatcgcccttcccaacagttgcgcagcctgaatggcgaatgggacgcgccctgtagcggcgcattaagcgcggcgggtgtggtggttacgcgcagcgtgaccgctacacttgccagcgccctagcgcccgctcctttcgctttcttcccttcctttctcgccacgttcgccggctttccccgtcaagctctaaat

SEQ ID NO: 4017 - DNA, 416 bp, Bos taurus
  Clone ID: 18-BOVMS1-013-Q1-E1-E5
ctggattaaagtacttttctttttcctacttagaacttttcaggcatggctcagagcttgaagattgggacaaatacattcttatcaaatcttcacaagttttgtttgaaggaatcattccagatgctggaaaatttagccctttgaaatgtattagagccttttatatgcacaacatcaatatgtgtgttactctacagaataaatttaatattgctgattttaaatgcagagaagttctcaaagttaattcaactatgttatcttgtgtgtgagttgtgactgttgaccacactttactccgaaatattgtgccatgtccgtcagttaattttaccaatagcaattttactctgtgtttacataagatagtattgtaatataaccttttagccagaagattttattttcaagtt

SEQ ID NO: 4018 - DNA, 465 bp, Bos taurus
  Clone ID: 18-BOVMS1-014-Q1-E1-E5
gggtcgacgcatgcgtccgcctaactgatatttcatctaagagattatttctgtcttgtacttaaaaattaatcctgtattctgcattcttattgtttctctttaccttcaagtaatattggtgctattaaataacatttagaataatggctatttctgatacttaagtacaatttcagctacagtaattcatgtattaacttcagcaaagttgttaacttattgggtccgtgctactgagctatgtatatataaattttcaagtaatagctacaaactttcaacatattatctaatataagttttactgcacaatataaaattattcttaatatttttggactgtacaatcctaattcagtgttatgagtcactgttgttttaaaaatctctattctaaaataatatgcctacataaaagctgtctataatgtgagtggttaactataatttacacaccctaaa

SEQ ID NO: 4019 - DNA, 374 bp, Bos taurus
  Clone ID: 18-BOVMS1-014-Q1-E1-E9
aatttctcttacatgggagcacgcctctgtaactacctgtcccatcatctgacaattagcccacagagtggcaactttcgccaattgctacttcaaagatgtcggactgaatatgaagttaaagatcaagctgcaaaaggggatgaagtgactcgaaaacgattccatgcatttgtactctttctgggagaactctatcttaacctggagattaaagggacaaatggacaggttacaagggcagacattcttcagaccggtcttcgggagttgctgaatgcgctcttctctaatcctatggatgacaacttaatctgtgcagtaaaattactgaagttgacagggtcagttttagaagatgcctgaaaggaaaa

SEQ ID NO: 4020 - DNA, 305 bp, Bos taurus
  Clone ID: 18-BOVMS1-016-Q1-E1-E5
aaaaacaaaaaagaaaaaaaagtaattaaaaaaaaaaaaaaaaaaaaaataaaaaagagaaaataaaaaaaaaaaataaaaaaaataaaaaaagaaaaaaaaaaaaataaaaaaaatgaaggaaaagggatattgccttgctgaaaaaaaaaaagtggggggggttcttccatgtttataaaaaaagttttttgcccccattcaacaaattttcattttccttaatgacctcaggggtatttcagggggggttttccccttttcccaaacaggggtctggggatttttccgttgatccgctttgg

SEQ ID NO: 4021 - DNA, 365 bp, Bos taurus
  Clone ID: 18-BOVMS1-017-Q1-E1-E5
atgcgacgtcatagctcttctatagtgtcacctaaattcaattcactggccgtcgttttacaacgtcgtgactgggaaaaccctggcgttacccaacttaatcgccttgcagcacatccccctttcgccagctggcgtaatagcgaagaggcccgcaccgatcgcccttcccaacagttgcgcagcctgaatggcgaatgggacgcgccctgtagcggcgcattaagcgcggcgggtgtggtggttacgcgcagcgtgaccgctacacttgccagcgccctagcgcccgctcctttcgctttcttcccttcctttctcgccacgttcgccggctttccccgtcaagctctaaatccggggctccc

SEQ ID NO: 4022 - DNA, 377 bp, Bos taurus
  Clone ID: 18-BOVMS1-017-Q1-E1-E9
ggaaaaaaaaaatccatatcttaaagaaacagctttcaagtgcctttctgcagttttttcaggagcgcaagatagatttggaataggaagtaaaccctagttcttgaaccaacacccgtcaaagatttacaaaacagtttatcgcaaaatcgagtttaccgaaaaaggcttgtgccaatagactttctaaaaagtagctttgactaccaggaaaacggcattcttccagcaagtgcctgataaacgtggttcgtcttcaggatacccttggcgagatcgatacacttgacagcaggctagcgcgcgctcctttcgctctcttctcgtcctttctcgccatgttcgccggctttccccgtcaagctctaaatcggggg

SEQ ID NO: 4023 - DNA, 401 bp, Bos taurus
  Clone ID: 18-BOVMS1-018-Q1-E1-E5
cttacccaaatgattcacatggactaatctttctatctttctgatctgtaaatacttaaaaaaaagagtagttttgtatcaacctaaatgagtcgaagttcaaaaataatacatttcagtcttttcataattgttgacctaagaagattacacattttctagtgacatgtacatactgtatatagccggattaacggttataaagttttgtaccatttattttatgacattttacactgtaactattgaaactaacggttggtaggagaaagtttcttatggaacgaataccctgctcaacacttaatcaatctttgtgcctcaacatactgttgatgtctaagtatgcctcagtgggtcgaggaattccccattgaagatgtcctatcaaccgaaaaatg

SEQ ID NO: 4024 - DNA, 326 bp, Bos taurus
  Clone ID: 18-BOVMS1-018-Q1-E1-E9
aatacttaaaaaaaagagtagttttgtatcaacctaaatgagtcgaagttcaaaaataatacatttcagtcttttcataattgttgacctaagaagattacacattttctagtgacatgtacatactgtatatagccggattaacggttataaagttttgtaccatttattttatgacattttacactgtaactattgaaactaacggttggtaggagaaagtttcttatggaacgaataccctgctcaacacttaatcaatctttgtgcctcaacatactgttgatgtctaagtatgcctcagtgggtcgaggaattccccattg

SEQ ID NO: 4025 - DNA, 362 bp, Bos taurus
  Clone ID: 18-BOVMS1-019-Q1-E1-E5
atgcgacgtcatagctcttctatagtgtcacctaaattcaattcactggccgtcgttttacaacgtcgtgactgggaaaaccctggcgttacccaacttaatcgccttgcagcacatccccctttcgccagctggcgtaatagcgaagaggcccgcaccgatcgcccttcccaacagttgcgcagcctgaatggcgaatgggacgcgccctgtagcggcgcattaagcgcggcgggtgtggtggttacgcgcagcgtgaccgctacacttgccagcgccctagcgcccgctcctttcgctttcttcccttcctttctcgccacgttcgccggctttccccgtcaagctctaaatcgggggct

SEQ ID NO: 4026 - DNA, 437 bp, Bos taurus
  Clone ID: 18-BOVMS1-021-Q1-E1-E5
aaagaagggacagcagaaaactgcttagagagctgtcgtaaccagccctcttcctccctgtcactgtactgtaacgggacagaagaaataatggggttatgtggaatttttaaaacagttaaatggaaaaccatagacaattactgtagacatgataaaagaaacatttgtacgttcttagaatcgaagtttgataaaagtaccttttcatgtggcaacagttgtgttgattggctaggtttctcccttgtgttttatacaaaaatggaattgataaaccattttttaaaaaaaataacttgtctcaaaactgtttgtgctgtgttggaaatactttgctcatcctttgaaatttttaatatttcaaattggttatatattcagaaaaatcagaaattgggaatctgcttctatcattgataccatattacattgga

SEQ ID NO: 4027 - DNA, 317 bp, Bos taurus
  Clone ID: 18-BOVMS1-022-Q1-E1-E9
atccgtaggacaagaatgatctatgttgtctatcatgcagccaataacgaactggtccgtaccaagaccctgatgaacaactgtattgggcttatcgacagcacaccgtaccgacagtggtacgaatcccactatgcactgcccctgggccgcaagaagggggccaagctgactcctgaagatgaagagattttaaacaagaaacgatcaaagaaaattcacaagagatacgatgagaggaaatagaacgcgaaaatcagcagtcttctagaggagcagttccagcatggcaagcttcttgcatgcatcgcttcaag

SEQ ID NO: 4028 - DNA, 209 bp, Bos taurus
  Clone ID: 18-BOVMS1-023-Q1-E1-E5
cacgcgaccgcaaattctgccttggccaaggcagcggtagagctggtcttctggtctccttggagaaagactctgttgccctgattatgaactctataatagagtatttagcttttgtaccttttttgcaggaaggtgactttctgtaaccatgcgatgtatattaaactttttataaaagttaacattttgcataataaacggttttt

SEQ ID NO: 4029 - DNA, 433 bp, Bos taurus
  Clone ID: 18-BOVMS1-023-Q1-E1-E9
taattactatgctgatctcactacaactattcctaattataacctttaccgccatggaactaatcttattttatattctatttgaagcaacactagtcccaacactcattattattacccgatgaggaaaccaaacagaacgcctaaacgccggactctatttcctattctatacactagctggctccctacccctattagtcgcactaatttatatccaaaacacagtaggatccctaaatttcctaatattacagtactgagtacaacctgttcataactcttgatctaatgtcttcatatgactagcatgtataatagctttcatagtaaaaataccactatatggcctccacctttgactacctaaagctcacgtagaagcccccatcgcaggctccatagtccttgcagcagttctactaaaactagg

SEQ ID NO: 4030 - DNA, 441 bp, Bos taurus
  Clone ID: 18-LIB188-001-Q1-E1-E5
acttatgttattaggactaaagtctggatcatttatattttcctgtaagaggcagactgctttcaccctttttaaaaagcttcatttatattaaattgataaccatattaccttaatcggaaccttagccttgaaattgtgaactcctagaagtgttattaatcaagtttgctaccaagttaaaccaaaaaaaattataatggttgtaatcaaaagattaatgaataataaacatatctgtcttcctgaatttctcatgggtgtatgtctagaaaacttacttgatttacgtattgaacaagaatatatttttttcaggctaatcagttgacagtgttatcagttgacaactgaattgtcaaaagttattaaaagttgacttttggttgaaaagcatgaaataacaacactgcagaatgaatttcctgtgcgtaagggatg

SEQ ID NO: 4031 - DNA, 327 bp, Bos taurus
  Clone ID: 18-LIB188-001-Q1-E1-E9
accttcacagtgtaggagatggagagactgtggagtttgatgttgttgaaggagaaaagggtgcggaggcagcaaatgttacaggccctggtggagttccagtgcaaggcagtaaatacgtagcagaccgtaaccattacagacgctatccacgtcgcaggggtcctccacgcaattaccagcagaactaccagaatagtgagagtggggaaaagaatgagggatcggagagcgctcccgaaggccaggcccaacagcgccggccctaccgcaggcggaggttcccaccttactacatgcggagaccctatgggcgtcgaccacagt

SEQ ID NO: 4032 - DNA, 227 bp, Bos taurus
  Clone ID: 18-LIB188-002-Q1-E1-E5
acggtcgttgttttctgtgaattccatcgtggggaagtggtagggagtcctctgcatgtgggcgtccatggcctgctgggcctggtggatcatgtcgtagaagggctgaaacacatcgtggaagttgaagggttccaacaaggggaaaggcatcacgttccgggcaaagcgggacttgggattgaagaagagtgaccccctcgggaacgagctgaagggggagtagt

SEQ ID NO: 4033 - DNA, 414 bp, Bos taurus
  Clone ID: 18-LIB188-002-Q1-E1-E9
acttctcggacaaccaactgcaggagggcaagaatgtgattggcttacagatggggaccaaccgcggggcttctcaggcaggcatgaccggctacgggatgccgcgccagatcctctgatctgctgtgcagccctgcccctgccctccgtgaatggttaatatatatgttgtttttttttttttttagcattgacattccctgagagcccctgggagctctcgcactcccttctgccagggttggggcctggcctgtctcttccgggggtgcccgacggtggcctcccccttgtgcttactaatacattcccttctccaaacccacaaaactggaccaactggcctcttttcccctgggaccaagactgggggggaccttaccccctctccgcaccatacctcttctttttcct

SEQ ID NO: 4034 - DNA, 439 bp, Bos taurus
  Clone ID: 18-LIB188-003-Q1-E1-E5
acatttctgattatatttaaacaacaaagaaaaaagcatctacacacttaaaaaattaattcgatattcctaaatctattttaactcagtttaaaatactacatacagaagccataatgcagagttaagaatggagtaaggtggggagaagaaggggaccacgatgaaaaacacttagacaattacttgtctgttgtgggtaaagcaacaggaatcctgggagatacaagaaatcagtaacaactttgctcataactgatattttcacctcatgtttgtttttaataacgtccatatgggtgctctctgtatgctcctttcaacggcctagctggaggggccttcagcgacggcctggtcccattccagtcagcctggtcatatgcttcataagaatcttgaacctctccatgtccatagtcataatattctgagtccc

SEQ ID NO: 4035 - DNA, 402 bp, Bos taurus
  Clone ID: 18-LIB188-004-Q1-E1-E5
catgcaaccgtacgccatggcggcgggatacccagtttaaatataatgttgaaggagtaaccaccaaggaaatggctacccaacttgccttcatgcgtctgctggccaaccatgcctctcagaacatcacctaccattgcaagaacagcattgcatacatggatgaggaaactggcaacctgaaaaaggctgtcattctgcaaggatccaatgatgtcgaacttgttgccgagggcaacagcagattcacttacactgttcttgtagatggctgctctaaaaagacaaatgaatggcagaagacaatcattgaatataaaacaaacaagccatctcgcctgcctatccttgatattgcacctttggacatcggtggcgctgaccaagaaatcagattgaaca

SEQ ID NO: 4036 - DNA, 260 bp, Bos taurus
  Clone ID: 18-LIB188-004-Q1-E1-E9
acaaagctaacgcacaacctgattgcttccaaaagttaggggggcaacagtgtagatgggaaacaatccctcttggacactgtgtcccacggtgcgcttcttagccaggggcagagccgcatcccctatccccattaaacccaaggcatgtgtcgacaaagttgatgagcctggaaccatcggtgatgagggtggattttacgcccagtcactgcaccaattttacctgcatctccggcactgccacactttatatctct

SEQ ID NO: 4037 - DNA, 449 bp, Bos taurus
  Clone ID: 18-LIB188-005-Q1-E1-E5
accaaaaccatccctatggccccaccaacataagcccccagggctgggtctgtgcccacaaagggttggcctgttttgactgaactaacctgtggatttagtccaacaaatgcatttgcctgatttcagggctgaatttctgcttgacccaagtgtcaggcagagctgggtggcctcagctgactggcggtggacaggctgcaggatgggccgaaagtgcattactagagatgaccgcggttgaggacacctatttcccaggacccatggctatgtgaccacactggccgtgagtgactggttgttgaggatgactactctttagcaaacctattgtgtgtctgtagaggctgtttgatgattaaaacaatggctacttcctgttttggcaaatgcttgactgcattttcatttgaatgaacaattattcaggactcacaaggactgaa

SEQ ID NO: 4038 - DNA, 392 bp, Bos taurus
  Clone ID: 18-LIB188-006-Q1-E1-E5
gccatgggcccgggatactttgtattttttcagtctgagaagctgttccagataacccaggtaacgctcagagggcacatctttgtgcttaggagccatagcctccttcactttggagactcccattacttcaggctgaaggaaaggcggcaccaccacaggggtttgagtaagaggagggatgttttgtgggaggctgttagggatgggcccagggaagggatagactagagactgtgtctgggcaaaggggtggattttatcctggagttcatcctctgtttgctgctgttcctcactctgaaacttctcaattttctggttaaaaaaaaaatacataaagaaatgctgtttataaaaatcaaacatgaaattaaaaaaaatgtatcact

SEQ ID NO: 4039 - DNA, 250 bp, Bos taurus
  Clone ID: 18-LIB188-006-Q1-E1-E9
ggatacgaccagatgctccagtcctaccagcagaagatgctcaacacgtcggccctgctcaagcagctgaacgagcagttcacctgggtgtcccagctggccaacctcacgcagagcgacgaccagcactacctgcaggtcttcacggtgaattcccacaactccgaccccagcatcccgttccgggcaaagcgggacttgggattgatgaagagtgaccccctcgggaacgagctgaagggggagtagt

SEQ ID NO: 4040 - DNA, 259 bp, Bos taurus
  Clone ID: 18-LIB188-009-Q1-E1-E5
acaagcttattttcttccttgatattgctctgctggacatgccagttttcatatatgtcaaattcattattggtacgttacgaatttgacaatccttcaaaattgattcacatcaacgtcactgttagcatgctctaccctgaggcatatgcacctttggttaaattggaaccaatttatcattccactgtccaactgtttgaattgcaactcatgttgacctcaactcttcatgagctgagtgtccatgagaacgata

SEQ ID NO: 4041 - DNA, 429 bp, Bos taurus
  Clone ID: 18-LIB188-010-Q1-E1-E9
acttgctgttgctctgtttggaggcccgggtggtctccacgttgcgggtgatggtgctgccgtctgccttccagaccacggtcacgctacccgggtagaagtcgctgatgagacacaccagggtggccttgttgccgttgagctcctccgtggagggcgggaacagggtgaccgagggtggggacttgggctgacccaggacggtcagtgtggtccccctggcgaaaacagcgacatcaccctcctgcaccgatccacagaaataatctgcctcgtcctcaggctggagagagctgatggtcagggtggctgtgttcccagacctggagccggaaaatcgatcggggactcccgaggttcgagtggtcgcctcatagatgatgtttctgggggccgatcctgggatctgttggaaccagctcacataat

SEQ ID NO: 4042 - DNA, 426 bp, Bos taurus
  Clone ID: 18-LIB188-012-Q1-E1-E5
actccctaacctcaccttcctttgctaacaccctttcagcgagtgttttcttcctctgcaaaggaaaaacaaattggatttgaaaaatattctcaagtttcatagctgaaatttggggcaaatgtgtccagaccagctagcattctctataaatatcaacaaaagcaggcttggggattctgtgctttgggtccaaggatcctggcaagaaacacatgttgagattcctctagttcagaatttccagggggtggaggtagagccacctcaactgtcttcagcctcagctggctcaattgccaggcttagtggcaactgcccctgccatctcgaagcccatttttcacatttgccctctgctgtgccctcttgccagcttctgtctttggctacagcactttaggcactattctaagtcctggaata

SEQ ID NO: 4043 - DNA, 424 bp, Bos taurus
  Clone ID: 18-LIB188-012-Q1-E1-E9
cgccatggcggcgggatacttggtgagaagggccggcggatccgggaattgactgctgtggttcagaagagatttggcttccctgaaggcagtgtagagctttatgctgaaaaggtagccacaagaggactgtgtgccattgcccaggcagagtctctgcgttacaaactcctaggaggccttgctgtgcggagggcctgctatggtgtgctgcggttcatcatggagagtggggccaaaggctgcgaggtcgtggtgtctgggaaacttcgaggacagagggctaaatccatgaagtttgtggatggcctcatgatccacagtggggaccctgttaactactatgtggacaccgccgtgcgccatgtgctgctcagacagggtgtgctgggcatcaaggtaaagatcatgctgccttgggaac

SEQ ID NO: 4044 - DNA, 279 bp, Bos taurus
  Clone ID: 18-LIB188-013-Q1-E1-E5
acagggtttgcagcctaacggtgaggagatgaccctcaaacagttcctcgactacttcaagacagaacataagttggagatcactatgctgtcccagggcgtgtctatgctctactctttcttcatgccagccgccaagctcaaggaacgattggatcagccgatgaccgagattgtaagccgtgtgtcgaaacgaaagcttggccgccatgtgcgagcactggtgcttgagctgtgctgtaacgatgagagcggcgaggatgttgaggtcccctatgt

SEQ ID NO: 4045 - DNA, 371 bp, Bos taurus
  Clone ID: 18-LIB188-014-Q1-E1-E5
acactttgatgaagatgagctctggactgaggggacctaccggggggtgaacctgcgcatcatcgcagcccatgaaattggccatgccctggggctggggcactcccgatacacccaggccctcatggctcctgtctacgctggctaccggccctacttcaagctgcaccctgatgatgtggctgggatccaggctctctatggcaagaagagcccagagatagaggaggaggaggaggaagaagacacggcactcccgactatacccctagtgcccacagaacccagtcccatgccagacccctgcagcagtgacctggatgccgtgatgctagggccccgaggaaagacctacgccttcaagggaaact

SEQ ID NO: 4046 - DNA, 385 bp, Bos taurus; identical to SEQ ID NO: 722
  Clone ID: 18-LIB188-016-Q1-E1-E5

SEQ ID NO: 4047 - DNA, 434 bp, Bos taurus
  Clone ID: 18-LIB188-016-Q1-E1-E9
actatcatgtggcagagtttgagctgcccaaaaccaagaccaactcagctgaaaataacactgctaattcctccatggcctatcctagcatcgttgctatggcatctcacagacaggctaaaatagagagatacaagcagaagaaggaggtggagcataggttgtctgcactgaaatctgctgtggaaagtggtcaagcagatgatgagcatgttcgtgaatattacctccttcaccttcgaaggtggattggtatcagcttagaagagattgagagcattgaccaggagataaagatcttgagagaaaaagactccgcaaaagaggcatcaacttctcagtcatctcgtcaggacaggcctccaatgaaaccgtttgttctcactcgggacatggcccaagccaaagtttaaaagaacagctcagcaacaaga

SEQ ID NO: 4048 - DNA, 463 bp, Bos taurus
  Clone ID: 18-LIB188-017-Q1-E1-E5
gccatggcggcgggatactgagtgtactggggcctccggaggaagaaccggtcctggaagagctcgtccatgatgctggacgcccgggtgaagctgtcctccatgacgtccatcacgtggctctgctcccggtcattctccatcagggaatcgatgcggtcaccgttgatccagaagtagaagggggagctctggtttaggaactcctcaagctggtggccaaccagtcccgatccgcttctgcacacccgcgcgtagaacttcatgcaggtctgcttgaggcagggcttacattcctcccaaaggactgtcatggtctcattgcacaccccctgggacgccttcagcttgttttcagaatccctggtgtcattcagggcgtcctctttcttcgtcttggcttcctctacggagctgaacagtaatttgcgctcttcaatggtttgttccaattgggtcctta

SEQ ID NO: 4049 - DNA, 429 bp, Bos taurus
  Clone ID: 18-LIB188-018-Q1-E1-E5
actttgcccatccctgtccatcccagacctactcagctcccaccgtgcctaagaaaacgggatggcttgaggactgggtgccagagacccctgggcgggggcgaggaagaggagggagggagaggtgactgggagggagacactgcctgcccccaggtcagctacaatcaggagggcgggcggaggaggcagcaggtccacagaaaggagcagctgccccagggcccctccggtcacttcggccaggcctaccactaacagcccagcagctccactcgcagggtgatacggttgtgccaggccacgggctggatccgcacgaagcgagcctggaacggcgtctcaaatatgttcttcttgtgggaattattgtccatgttaccagggaaaatcttgctttctgaggcccccgggtccttgtatcactag

SEQ ID NO: 4050 - DNA, 360 bp, Bos taurus
  Clone ID: 18-LIB188-019-Q1-E1-E5
accggctgaggcatggcaggcggctctggcttcccacccttctgttcagagatgggggtggtgggcagtatttcatctttgggttccacaatgctcacgtgatcaggcagaggcttcttagggccaatcttaccagtcgggtcccaaggcagcatgatctttaccttgatgcccagcacaccctgtctgagcagcacatggcgcacggcggtgtccacatagtagttaacagggtccccactgtggatcatgaggccatccacaaacttcatggatttagccctctgtcctcgaagtttcccagacaccacgacctcgcagcctttggccccactctccatgatgaaccgcagcacacca

SEQ ID NO: 4051 - DNA, 270 bp, Bos taurus
  Clone ID: 18-LIB188-020-Q1-E1-E9
acttctcaatagagttgggcacacacttgtccgggccctggtcatcgccagcacacaaggcacagagtctggatttcgggtcagccccaggggcacagctctgactaaagaattcatcaaatgggcaggagcctgtctggttgacgatcaggcccatggggatgttccagcctgcagtcctgtccacggcggtgtggcacgacttcttgtctttcagagaattccatgtgagcccctcatttgctttcttgacaactgccacggcaaggt

SEQ ID NO: 4052 - DNA, 428 bp, Bos taurus
  Clone ID: 18-LIB188-021-Q1-E1-E5
accaagggaggccgggggccaggactgcttgttctgaagtctggtctggtatttccgcagcctcctcctccccgtgtgcctctccccccacctctccgtgttcctacccatcatgaaccctgtacattattgaggaggacaagggtgatggatggacaagagctcggagacagaacggtgaagaaggctacgttcccacatcatacatagatgtaactctagagaaaaacagtaaaggttcctgaagagggtttctgaggaaatgggcaagatgttgaaggaggttacatgcagctgcttttggggggggaggtgttagagttgtcaggctcagagagagtgagagaagcaagttgcatgagtgcatgcagacatgattattttttactaacttcattagcatttccatgtgttgttttaaaaaatca

SEQ ID NO: 4053 - DNA, 419 bp, Bos taurus
  Clone ID: 18-LIB188-022-Q1-E1-E5
accgtgccttgtttttgacactctcctggtcgtcatacgccacccactggttgcccttggtggcataggggacctgctggtcacggaatctgtgggtggtggctccgtggaggaagtcacagatctcataataggcaaggatccctttctccttggtgaactggcctggaattcctggccctgagatgggggctcccacatctgtcttggaagaggccagagtgtagctcctcccaaaagtggggatacccatcaccagcttattggctggagcccccagcctcagcatgtagctcacagcgtagtcagcgttactgaatctgtcagaacttgcatcttcctggcctcgaaacagggggctgtggtgtccgactgtctggcgccaggctccgtgaaagtcataggtcaaaaagctgatg

SEQ ID NO: 4054 - DNA, 376 bp, Bos taurus
  Clone ID: 18-LIB188-022-Q1-E1-E9
acctggtgagattgtggtaagccgttcacgcagtggggaatctattacgacgcatcagtaggaaaattgagaagtttcagagtgaggaagagcagcatgcataggatgaactccaggataaaatccacccctttgcccagacacagtctctattcgatcccttccctgggcccatccctaacaggctcccagacaacatccctcctcttactcaaacccctgtggtggtgccgcctttccgtcagcctgaagtagtgggagtctccagagtgaaggacgctatggctcctaagcacacataaatgcccttccctaaatatccagttgagccctttactgaaagccagagcctgactctcaatgatgttgaaaatct

SEQ ID NO: 4055 - DNA, 303 bp, Bos taurus
  Clone ID: 18-LIB188-024-Q1-E1-E5
tcccgcacgccatggcggccggataccgcgtggacagcgccctgcccatccagcaccaggactggactggaggaaaggagttcaagtgcaaggtcaacaacaaaggcctctcggcccccatcgtgaggatcatctccaggagcaaagggccggcccgggagccgcaggtgtatgtcctggacccacccaaggaagagctcagcaaaagcacgctcagcgtcacctgcatggtcaccggcttctacccagaagatgtagccgtggagtggcagagaaaccggcagactgagtcggaggacaagt

SEQ ID NO: 4056 - DNA, 436 bp, Bos taurus
  Clone ID: 18-LIB188-025-Q1-E1-E5
ggatacaacgccatggaccagtgggtcggctgcttcggcatcaatgagaaggacatccacaatgacctcgtgatctaaagccagtgcctcctcctgcataaccagattctctctctttgaccttccccctcctgttttccccaatgtttaaaatgtttggatggtttgttgttctgcctggggtcaaggtgctaatatagacttaaacgaatacattaacggtgctgaacacagacattttaacccaagtcacgacattcttagctgtaactcagctctcacggcgtcttgctcatccatgaatggtcccgttttcctcttgacgagtgcacctccacccattgtcttggaggtacatgggtggaacaattgatttgcacgagtccgccttcaacaaacattgcatcctcagattttccaattttccgttcaaaac

SEQ ID NO: 4057 - DNA, 411 bp, Bos taurus
  unsure (313),(326): unsure at all n locations; Clone ID: 18-LIB188-026-Q1-E1-E5
acacgagcggcaaccactgggctgtcggacacttaatgggaaaaaagagtgtggcagagtccccacaacttcatgaggaggagagcctgaaggagcagctgagggagtatgcccagtgggaagaagcgacaaggaacttgctaagcctcctacaagcaaagggggcccgaggccaccagatgcctccatgggagcccctgagcattcaccagcctgcctgggattccgaggacgtcagcaacttcaaagacacaggtcctcagcatgaaggaaggaacccccagctgaactgacaatgacgatggccgcctcnctcaaagaagcanaacaaaatccttaagaaactgcgttctatgggcatcagttctactggatcatcaacaaatttcctttgtgcaaaatacttaacta

SEQ ID NO: 4058 - DNA, 440 bp, Bos taurus
  Clone ID: 18-LIB188-027-Q1-E1-E5
gcatgatcccgaacgccatggggccgggataccgtgccatgtttttgacactctcctggtcgtcatacgccacccactggttgcccttggtggcataggggacctgctggtcacggaatctgtgggtggcggctccgtggaggaagtcacagatctcataataggcaaggatccctttctccttggtgaactggcctggaattcctggccctgagatgggggctcccacatctgtcttggaagaggccagagtgtagctcctcccaaaagtggggatacccatcaccagcttattggctggagcccccagcctcagcatgtagctcacagcgtagtcagcgttactgaatctgtcagaacttgcatcttcctggcctcgaaacagggggctgtggtgtccgactgtctggcgccaggctccgtgaaagtcataggtcaaa

SEQ ID NO: 4059 - DNA, 394 bp, Bos taurus
  Clone ID: 18-LIB188-027-Q1-E1-E9
accaggatttacaagagcagcttaaggaagcatgtgaaaattatgaacacagcaatgtcaagggctcagaagaaaccaaggacttggaagaaaagttgaaaaggaatgttgaagaaaataagatctcaaagacagaactagattggttccttgaagatttgaacaaggaaattaaaaaatgggaacaggagaaaaaagaaatccaagaaagactaaaggcactgaagaagaaaatgaaaaaggtgttaaatgccagcaaaatgtatacgcaggaaaatgatggaaaggaaaaggcacttgaattacttctggatcagtcccttgaaatcagtaatacatttacaaatgagaaaatgaaaatagaagagagtataaagaaagggaaagagcatta

SEQ ID NO: 4060 - DNA, 357 bp, Bos taurus
  Clone ID: 18-LIB188-028-Q1-E1-E5
acttgcagttgctctgtttggaggcccgggtggtctccacgttgcgggtgatggtgctgccgtctgccttccagaccacggtcacgctacccgggtagaagtcgctgatgagacacaccagggtggccttgttgccgttgagctcctccgtggagggcgggaacagggtgaccgagggtggggacttgggctgacccaggacggtcagtgtggtgccgctgccgaaaacaccattacgtctactagtgtcataaactacacagaaataatccgcctcgtcctcagcctggagggagctgatggtcagggtggctgtgttgccagacttggagccggagaatcggtcggggacccccg

SEQ ID NO: 4061 - DNA, 501 bp, Bos taurus
  Clone ID: 18-LIB2809-003-Q1-E1-E5
catgcactcggaagccatggccgggcgatactaaacaagatacagttttagaatcaactacatttgtgtgtccatcacagtaataagtccctaactgttatatttagaatgtaaatctttaataaactccaaaatctcattttgcaatctattgatcgtgaactgcaaacggaggctggggcccccgtggtgtgatctgcaggctgcgtgtcacctcagtgcccagcgatcacagatcacggaggggagaaggcactcgtcttccaggaggtcgcgtcaggacaggtcaggcccgaccacacggtggcgccgtccactctcgtgccacaggcggggcctacgaggaaccggtcccgctcccttcacttgccagaggtgcccgaagttacctacagcaccacaaaactcagaatatattccaggagtttttgccggttgcattgaggtagaaaagtgttgctgagttctaaaacagacactctcttttgtttggtctctttg

SEQ ID NO: 4062 - DNA, 413 bp, Bos taurus
  Clone ID: 18-LIB2809-004-Q1-E1-E5
ccatggccgccggatacctggtgaaattgtggaaagcctttcaagcagtgaggaatctattacacgcatcaataagaaaattgagaagtttcagagtgaggaacagcagcaaacagaggatgaactccacgataaaatccacccctttgcccagacagagtctctagtcgatcgcttcgctgggcccatccataacagcctcccacaaaacatccctcctcttactcaaacccctgtggtggtgccgcctttccttcagcctgaagtaatgggagtctccaaagtgaaggaggctatggctcctaagcacaaagaaatgcccttccctaaatatccagttgagccctttactgaaagccagagcctgactctcactgatgttgaaaatctgcaccttcctctggctctgctcc

SEQ ID NO: 4063 - DNA, 424 bp, Bos taurus
  unsure (403): unsure at all n locations; Clone ID: 18-LIB2809-004-Q1-E1-E9
ctcccggaagccatggccgcggcatacagcagaaaggactgaatgggcatatctctctggggatagggcactgctttctggggaacaggcaggactttggactgagaaagggacagcacggactgaggaggaaacatgacagttggaggaagaggctggtgaggctggtgcatccaagactggagcagaggcagaggaaggtgcagattttcaacatcagtgagagtcaggctctggctttcagtaaagggctcaactggatatttagggaagggcatttctttgtgcttaggagccatagcctccttcactttggagactcccattacttcaggctgaaggaaaggcggcaccaccacaggggtttgagtaagaggagggatgttttgtgggacgctgttanggatgggcccagggaagggat

SEQ ID NO: 4064 - DNA, 449 bp, Bos taurus
  Clone ID: 18-LIB2809-005-Q1-E1-E5
acaactagctatggagttgatattaatagaaattattccaaaattattcttaggtcacaaataactactatcccacataaaaagggaaaaatcccacccaattaaggaaaaggtatcctgtgtatgtttccatggcaatgagtttatgcattctcagattttgtccggctagttatccaccctttatctgatgcatttattccatctctcagagagaaccatatagattcctgacggcatccaggacacgtggctcgtggtggacacacttcatggtggatactgctactataaaaatactcagaacttaagagaattccaagatgctttataaaaagcattagtcatgcctcaaaactgccctttgaggtaggtcagtattattatcccattttaacagaaggaaaactgaggcacattatagttaaatgacttgcccagggtcacat

SEQ ID NO: 4065 - DNA, 390 bp, Bos taurus
  Clone ID: 18-LIB2809-006-Q1-E1-E5
acagtatactttaaaattttctttttaaattgaaagccaacaactctgcctttatgatgctaagctcatgttcttatttcttctcctatcttctttctcttctgttcccattatccttccctttgttttgtccctgtcaccttcctttctccttctcctcattgccccccaggcaagcaggtggtcagtcattggtgggtttccagcttccaaagcctagacaaccctgctgtagtctcaaactagtggtctttgccccggctgaccctttccttgagctgtctgagctttaaggtggatggctcaagctagagatatgacagaatcttctgggaagggccttgatgatcttcagcccagacttttgctaaatgaaatggaaaaataact

SEQ ID NO: 4066 - DNA, 446 bp, Bos taurus
  Clone ID: 18-LIB2809-006-Q1-E1-E9
acagcagaaagagcctgaatgggcatatctctctggggatagggcactgctttctggggaacaggcaggactttggactgagaaagggacagcacggactgaggaggaaacatgacagttggaggaagaggctggtgaggctggtgcatccaagactggagcagaggcagaggaaggtgcagattttcaacatcagtgagagtcaggctctggctttcagtaaagggctcaactggatatttagggaagggcatttctttgtgcttaggagccatagcctccttcactttggagactcccattacttcaggctgaaggaaaggcggcaccaccacaggggtttgagtaagaggagggatgttttgtgggaggctgttagggatgggcccagggaagggatagactagagactgtgtctgggcaaaggggtggattttatcctggag

SEQ ID NO: 4067 - DNA, 373 bp, Bos taurus
  Clone ID: 18-LIB2809-007-Q1-E1-E5
catggccggtcgatacttccaaagaaaaaattttcaatggtattaccagaagtggaagcagcattagcagagattcctggagtcaggagtgttgtgttgtttggagtagaaacccacgtgtgcatccagcaaacagctctggagctcgttggccgaggtatcgaggtccacatagtctcggatccaacgtcatcgataatcctccaggtgttgatgtaagacggtgtgtatggggacctctgcgtcaggaccccacggctggtatttcgcatccatgcgggacccagtggagggaacctccatgtggccataccggatggcaccggtgacgaccttggaaattcggggatcctcagagttattatagccttgg

SEQ ID NO: 4068 - DNA, 404 bp, Bos taurus
  unsure (196),(210),(212),(214): unsure at all n locations; Clone ID: 18-LIB2809-008-Q1-E1-E5
gccatgggcccgggatacagcagaaaggcctgaatgggcatatctctctggggatagggcactgctttctggggaacaggcaggactttggactgagaaagggacagcacggactgaggaggaaacatgacagttggaggaagaggctggtgaggctggtgcatccaggactggagcagaggcaggggggggccanattttcaacagcantnanagtcaggctcgggctttcagtagagggctcaactggagtgttggggaagggcgtggcgttgtgcttaggagcgggagggtccttcactttggagactcccattacttcaggctgaaggaaaggcggcaccaccacaggggtttgagtaagaggagggatgttttgtgggaggctgttacggatgggccca

SEQ ID NO: 4069 - DNA, 382 bp, Bos taurus
  Clone ID: 18-LIB2809-009-Q1-E1-E5
actgtcccagtgggtcgtgtggagactggtgttctcaaacctggcatggtggtcacctttgctccagtcaatgtaacaactgaagtgaagtctgtagaaatgcaccatgaagcattgagtgaagcccttcctggggacaatgtgggctttaatgtcaaaaacgtgtctgtcaaagatgtccgtcgtggcaatgtggctggtgacagcaaaaatgatccacccatggaagctgctggcttcacagctcaggtgattattttgaaccatccaggccaaatcagtgctggatatgcacctgtgctggattgtcacgcagctcacattgcttgcaagtttgctgagctgaacgagaagagtgatcgtcgttcccggaaaaagctgg

SEQ ID NO: 4070 - DNA, 370 bp, Bos taurus
  Clone ID: 18-LIB2809-010-Q1-E1-E9
acttgtgtaggtgggggttgtctactgagtaaggaatactgtttttaaggttctaaagctaaattcaaatgatgcattaatgacccaaaaactcagatctgatggtgtctgaatttctaacagtccttgctttgtgggtatgctgacaacttatctggatgccttacatcttttctaaacagtgttgcctctgaacgtgctctgctccctccctgctccctctttggagcccctttgcaccccagagcctgcagaagtggctggtataaaagggggcctggctagagaatgatcagtgtagctgtttgcaggattcctttctgggcttcattttggaaactttgcttagggctatttttcttaattgccc

SEQ ID NO: 4071 - DNA, 424 bp, Bos taurus
  unsure (380): unsure at all n locations; Clone ID: 18-LIB2809-012-Q1-E1-E9
acagcagaaaggcctgaatgggcatatctctctggggatagggcactgctttctggggaacaggcaggactttggactgagaaagggacagcacggactgaggaggaaacatgacagttggaggaagaggctggtgaggctggtgcatccaagactggagcagaggcagaggaaggtgcagattttcaacatcagtgagagtcaggctctggctttcagtaaagggctcaactggatatttagggaagggcatttctttgtgcttaggagccatagcctccttcactttggagactcccattaacttcaggctgaaggaaaggcggcaccaccacaggggttttgagtaagaagaaggatgttttgtgggacgctgttanggatgggcccagggaagggatagactagagactgtgtctgggca

SEQ ID NO: 4072 - DNA, 421 bp, Bos taurus
  unsure (378),(390),(406): unsure at all n locations; Clone ID: 18-LIB2809-014-Q1-E1-E5
acagcagaaaggcctgaatgggcatatctctctggggatagggcactgctttctggggaacaggcaggactttggactgagaaagggacagcacggactgaggaggaaacatgacagttggaggaagaggctggtgaggctggtgcatccaagactggagcagaggcagaggaaggtgcagattttcaacatcagtgagagtcaggctctggctttcagtaaagggctcaactggatatttagggaagggcatttctttgtgcttaggagccatagcctccttcactttggagactcccattacttcaggctgaaggaaaggcggcaccaccacaggggtttgagtaagaggagggatgttttgtgggaggctgttanggatgggcccanggaagggatagactanagactgtgtctgggc

SEQ ID NO: 4073 - DNA, 414 bp, Bos taurus
  Clone ID: 18-LIB2809-015-Q1-E1-E9
cgccatggccccgggatactgtccatgtgggtcgtgtggagactggtgttctcaaacctggcatggtggtcacctttgctccagtcaatgtaacaactgaagtgaagtctgtagaaatgcaccatgaagcattgagtgaagcccttcctggggacaatgtgggctttaatgtcaaaaacgtgtctgtcaaagatgtccgtcgtggcaatgtggctggtgacagcaaaaatgatccacccatggaagctgctggcttcacagctcaggtgattattttgaaccatccaggccaaatcagtgctggatatgcacctgtgctggattgtcacacagctcacattgcttgcaagtttgctgagctgaaggagaagattgatcgtcgttctgggaaaaagctggaagatggccctaaat

SEQ ID NO: 4074 - DNA, 403 bp, Bos taurus
  Clone ID: 18-LIB2809-016-Q1-E1-E5
actatgcactctaatcctctttttcttgattgcatcatctttctttttatacaacagccttattcagaagagtggaacataaacgttcagccataaaataatgatattatcaaatgagctgtccatattaatctattaaatttcttcattttctgatttatgttgacaaataagaattttttttaaagctagacctgattttatttttatttttccaaaggaatctattacacgcatcaataagaaaattgagaagtttcagagtgaggaacagcagcaaacagaggatgaactccaggataaaatccacccctttgcccagacacagtctctagtctatcccttccctgggcccatccctaacagcctcccacaaaacatccctcctcttaatcaaacccct

SEQ ID NO: 4075 - DNA, 402 bp, Bos taurus
  Clone ID: 18-LIB2809-017-Q1-E1-E5
gccatgggcgcgggatactcataaagcatcttcccaagttgatccctgtgttagtgaatggcatgaagtattcagatatagatattatcctacttaagggtgatgttgaagaagatgaaacaattcctgatagtgagcaagatataaggccacggtttcatcgatcaaggacagtggctcagcagcatgatgaagatggaattgaagaggaggaggacgacgacgatgaaattgatgatgatgacacgatttctgactggaatctaagaaaatgttctgcagccgccctagatgttcttgctaatgtatatcgtgatgaacttttgccacatattttgccccttttgaaagaattactttttcatcatgaatgggttgttaaagaatcaggcatcttggttt

SEQ ID NO: 4076 - DNA, 433 bp, Bos taurus
  Clone ID: 18-LIB2809-018-Q1-E1-E5
gccatggatcaggatacgtcgacagttcatcttaactaaattacccaggaatttgtggctaaaatcagtttaccacagataagctatgatgtgtctggttaattagcatttttatcttgaatgtaaattaatgtcataaaactaacaatacatgttttttattttttaaggaaattgttcccaatagtgttgaggtgagatatatctactatatttaaaatatattaacatcatccaggatatcttaaaatttaattaaactttttattttttgaattttttagcagaagcacattcaaaaggaagatgtgccctctgagcgttacctgggttatctggtaaaattttattaaaagttaatcaaagaccaatgtatcacggaatgagcaagaatgttgtagtgataaattatctctccttttcaatatctgct

SEQ ID NO: 4077 - DNA, 426 bp, Bos taurus
  Clone ID: 18-LIB2809-018-Q1-E1-E9
gcatgttcctacccgccatgggcccgggatacagtattctttaaaattttctttttaaattgatagccaacaactctgcctttatgatgctaagctcatgttcttatttcttctcctatcttctttctcttctgttcccattatccttccctttgttttgtccctgtcaccttcctttctccttctcctcattgccccccaggcaagcaggtggtcagtcattggtgggtttccagcttccaaagcctatacaaccctgctgtagtctcaaactagtggtctttgccccggctgaccctttccttgagctgtctgagctttaaggtggatggctcaagctagagatatgacagaatcttctgggaagggccttgatgatcttcagcccagacttttgctaaatgaaatggaaaaataactttattt

SEQ ID NO: 4078 - DNA, 375 bp, Bos taurus
  Clone ID: 18-LIB2809-019-Q1-E1-E5
ccgccctggccgcgggataaaagcattttttttttttttttttttttttttagccttaaaatgtaatttattgaaaagaagaaagacaaaatctcagttaatgcacacaattatttgatatgatggcacttacaggagaagtgattcaaaggcttttaaaacattttccatacagaaatttaatgaagactttaattccctttgactcagtggcctttataccagcatgatactactggaatttaggtaacaagctgttaggacaatttcacttaaggatgttacactatctaaaatacagtagagaactcaagaagaaagagtgccttcaatttgagattgccctattctaaaacagcagttgaagcctttgga

SEQ ID NO: 4079 - DNA, 415 bp, Bos taurus
  Clone ID: 18-LIB2809-019-Q1-E1-E9
accttcaaacctggcggcaataccagtgcgtatcaccattgctcagagccataaaaaccttactgtgctcaatgacatccatcccaccagactcaatgttatacagcaaccgagccgagccaagcttcttagagtaaaaccagccatcttgctacaaagaaaaatttctggctcttggcccaactgtttccataccaatcagctaagtcaaccccctctctgcttctttccatttcaaatgcctgggcttcggcctttgaggcaattagaaccagatcagtttaattttacttgtcttccttttaggaaacgaggacaaagtaaacatgaagttcttcatctttacctgccttttggctgttgcccttgcaaagaatacgatggaacatgtctcctccagtgaggaatctatcat

SEQ ID NO: 4080 - DNA, 295 bp, Bos taurus
  Clone ID: 18-LIB2809-021-Q1-E1-E5
actgagaaggattaccatggcaacaacacatcatcagtagggtaaaactaacctgtctcacgacggtctaaacccagctcacgttccctattagtgggtgaacaatccaacgcttggtgaattctgcttcacaatgataggaagagccgacatcgaaggatcaaaaagcgacgtcgctatgaacgcttggccgccacaagccagttatccctgtggtaacttttctgacacctcctgcttaaaaccccaaaggtcagaaggatcgtgaggccccgctttcacggtctgtattcgt

SEQ ID NO: 4081 - DNA, 370 bp, Bos taurus
  Clone ID: 18-LIB2809-021-Q1-E1-E9
gaaacctcacatagggaataacctttgtcttaggttgaatccatggcttcatagctttctgatgctgataaacagtcttgagatactggggcaaggcgaatttctggtaacgctggctgatttttttcagaaaatttaagcgattcttttcttcttcagtcagtttagatttctcagagaaaacatctgtttagtccatatcaacagtcttctctgaaatttccccacagggggagagatgtgctctctgtacagtgtgagttttgggaaaacaatatctctcaaacagagtatcccatgggttcaaaacaattggcccttgatacaaatactggagatactgggggaacttctgataaaactgattgat

SEQ ID NO: 4082 - DNA, 426 bp, Bos taurus
  Clone ID: 18-LIB2809-023-Q1-E1-E9
gggatacttcatcatcaggaacagctgcccaaatcaacgtgattccaccatctccgtggaagagaatggggtgtcagcagaaagccggttctcagttcagatgttcaagtttgctggaaattatgacctagttttcctgcattgtgaggtttctctctgtgatttcattaaagaagagtgccaaccgtcttgctcaagaagtcaactccgcagtgaaggggtggctattgatccagcccgagttctagatctgggacccatcactcgcaaaggtgcccagtctcttggtgtcatgagtggaacacccaacactgcacggttcctggtggtctggcccctggttctcctgcctgtcctcctggctgggctgttctgacagctcagctgggcatctggccttgaagcttgtgttcttccctctgggga

SEQ ID NO: 4083 - DNA, 428 bp, Bos taurus
  Clone ID: 18-LIB2809-024-Q1-E1-E5
cgcatgctactaaccgccgtcgccgcgggatactatgtattttttcagtctgagaagctgttccagataacccaggtaacgctcagagggcacatcttccttttgaatgtgcttctgctcaacactattgggaacaatttcctcacttgacgaaatgctttcagcttccatttgcttaatatcttccatggcttgatcctcagttgattcactcccaatatccttgctcagttcattgaccttctcctttccaaacacttctggaaaaggtgccacaaaaaacctgagtaaattttcattgaggacttcttgagggagtccttggtgcttgataggatgtttaggcctggcaagagcaacagccacaagacaggtaaggatgagaagtttcatggttgtcaagatcttgaaaccaagactggacctgc

SEQ ID NO: 4084 - DNA, 412 bp, Bos taurus
  Clone ID: 18-LIB2809-026-Q1-E1-E9
acagcaaaaaggcctgaatgggcatatctctctggggatagggcactactttctggggaacaggcatgactttggactgagaaagggacagcacggactgaggaggaaacatgacagttggaggaagatgctggtgaggctggtgcatccaagactggagcagaggcagaggaaggtgcagattttcaacatcagtgagagtcaggctctggctttcagtaaagggctcaactggatatttagggaagggcatttctttgtgcttaggagccatagcctccttcactttggagactcccattacttcaagctgaatgaaaggcggcaccaccacaggggtttgagtaagatgagggatgttttgtgggaggctgttatggatgggcccaatgaatggatagactagagactg

SEQ ID NO: 4085 - DNA, 380 bp, Bos taurus
  Clone ID: 18-LIB2809-027-Q1-E1-E5
ggataatgtcaatgtgggtcgtgtggagactggtgttctcaaacctggcatggtggtcacctttgctccagtcaatgtaacaactgaagtgaagtctgtagaaatgcaccatgaagcattgagtgaagcccttcctggggacaatgtgggctttaatgtcaaaaacgtgtctgtcaaagatgtccgtcgtggcaatgtggctggtgacagcaaaaatgatccacccatggaagctgctggcttcacagctcaggtgattattttgaaccatccaggccaaatcagtgctggatatgcacctgtgctggattgtcacacagctcacattgcttgcaagtttgctgagctgaaggagaagattgatcgtcgttctgggaaaa

SEQ ID NO: 4086 - DNA, 437 bp, Bos taurus
  unsure (24): unsure at all n locations; Clone ID: 18-LIB2809-028-Q1-E1-E9
gccctgggcccgggatacagcagnaaggcctgaatgggcatatctctctggggatagggcactgctttctggggaacaggcaggactttggactgagaaagggacagcacggactgaggaggaaacatgacagttggaggaagaggctggtgaggctggtgcatccaagactggagcagaggcagaggaaggtgcagattttcaacatcagtgagagtcaggctctggctttcagtaaagggctcaactggatatttagggaagggcatttctttgtgcttaggagccatagcctccttcactttggagactcccattacttcaggctgaaggaaaggcggcaccaccacaggggtttgagtaagacgagggatgttttgtgggaggctgttagggatgggcccagggaatggatagactagagactgtgtctgggc

SEQ ID NO: 4087 - DNA, 436 bp, Bos taurus
  Clone ID: 18-LIB2809-030-Q1-E1-E5
acttcatcatcaggaacagctgcccaaatcaacgtgattccaccatctccgtggaagagaatggggtgtcagcagaaagccggttctcagttcagatgttcaagtttgctggaaattatgacctagttttcctgcattgtgaggtttctctctgtgatttcattaaagaagagtgctaaccgtcttgctcaagaagtcaactccgcagtgaaggggtggctattgatccagcccgagttctagatctgggacccatcactcgcaaaggtgcccagtctcttggtgtcatgagtggaacacccaacactgcagggttcctggtggcctggcccctggttctcctgcctgtcctcctggctgggctgttctgagagctcagctgggcaaccgggccttaaagccttgtgttcttccctctggcgatggcttccagtca

SEQ ID NO: 4088 - DNA, 403 bp, Bos taurus
  Clone ID: 18-LIB2809-031-Q1-E1-E5
catggcccgggatacagcagaaaggcctgaatgggcatatctctctggggatagggcactgctttctggggaacaggcaggactttggactgagaaagggacagcacggactgaggaggaaacatgacagttggaggaagaggctggtgaggctggtgcatccaagactggagcagaggcagaggaaggtgcagattttcaacatcagtgagagtcaggctctggctttcagtaaagggctcaactggatatttagggaagggcatttctttgtgcttaggagccatagcctccttcactttggagactcccattacttcaggctgaaggaaaggcggcaccaccacaggggtttgagtaagaggagggatgttttgtgggacgctgttagggatgggcccaa

SEQ ID NO: 4089 - DNA, 360 bp, Bos taurus
  Clone ID: 18-LIB2809-031-Q1-E1-E9
acctggaagttagtggacagcaagaatttcgatgactacatgaagtcactcggtgtcggttttgctaccaggcaggtgggcaatatgaccaagcctaccacaatcatcgaagtgaatggggacacagtcatcataaaaacacaaagcaccttcaagaacacagagatcagcttcaagctgggagtcgagttcgatgagaccacagcagatgacaggaaagtcaagtccatcgtgacgctggatggcggcaaacttgtccacgtgcagaagtggaatggacaagagacatcacttgtgcgggaaatggttgacgggaaactcattctgacactcacccatggcactacactttgcactcgt

SEQ ID NO: 4090 - DNA, 162 bp, Bos taurus
  Clone ID: 18-LIB2809-032-Q1-E1-E5
cgccatgggcccgggatactgttgcattaaaagcgccatcagggacatcgagcaagggtcaaaagtccagagcgccattcatgcacccctggagattagtccttacatgtccattgtcactacagggcccagggctcagagacgagttagcttcaagggggt

SEQ ID NO: 4091 - DNA, 270 bp, Bos taurus
  Clone ID: 18-LIB3057-001-Q1-K1-E5
gccgggttgagaggagcgtggccttctcctctccccgccatggcgtgtgctcgtgcactgatatcagtgtactccgaaaagggggagtcctctggcaaaaatgtcactttgcctgctgtgttcaaggctcccattcgacccgatattgttaactttgttcacaccaacttgcgcaaaaacaacagacagccctatgctgtcagtgaattagcaagtcatcaaaccagtgctgagtcttggggtaccggcagagctgtggctcgaattccc

SEQ ID NO: 4092 - DNA, 390 bp, Bos taurus
  Clone ID: 18-LIB3057-001-Q1-K1-E9
gaagaagccagttggcgcatgtccgtctttgccaataatatggtgcgagcgcagaagatccaggccctggaccgtggcacagctcggtatggggtcaccaagttcagtgacctgacagaggaggagttccgcaccatctacctgaatcccctcctgaaagatgcgcctggcaggaacatgcgcccggcccagcctgtcaccgacgttcctccgcctcagtgggactggaggaataagggggctgtcaccaatgtcaaggaccagggtatgtgcggctcctgctgggccttctcagtcacaggcaacgtggagggccagtggttcctcaaacggtggaccctgctctccctgtctgagcatgagctcttggactgtgacaagactgacaag

SEQ ID NO: 4093 - DNA, 409 bp, Bos taurus
  Clone ID: 18-LIB3057-002-Q1-K1-E5
atcatcttctccgtcatctccctcgtggtcttcgtgttccagctcttcaccatggagagaggcaaccgcttcttcctctccggggccaccatgctggtgtgctggctgtgcgtcatggtgggggcctccatctacactcatcactatgccaacggctctataaacaactacgagccgagtcaccacggctattccttcatcctgacctggatctgcttctgcttcagcttcatcatcggcatcctttatctggtcctgagatagatataaggctgaacacatttactgtggacctggacattggagtggaatatacctcacaatttgtcaggtgtgagtaactaacctgttcattgaatctcacatggataaatatggggtccaggcacccaatgtgacttttattcat

SEQ ID NO: 4094 - DNA, 333 bp, Bos taurus
  Clone ID: 18-LIB3057-003-Q1-K1-E5
gacaatacatggctagatatacaacgcactgaagctcttcatggagatgaaccaaggactgtttgatgactgcacccagcagtttaaagcagagaaactgaaagagaagctaaaaatgaaagaacgagaagaagcgtgggttaaaatagaaaacctagccaaagcaaaccgccaggtactaaaaaagagagtgacgtgaaaacgtctagggtgtgacttgagtatttttgtgagataggagtgtggcttcatcgtgggagggagacagatccacttaactaacattgtgtatgaaactgtctgcaataaatatacttttcaactttaaaagaa

SEQ ID NO: 4095 - DNA, 455 bp, Bos taurus
  Clone ID: 18-LIB3057-005-Q1-K1-E5
cttgctctacaggtcagtcaaatttgcatccaggtcagcaaacacatgggaggggccaaagtgatggcaaccacaggaggaaccaatttacgggatgacataatgaggcttgatgacacagtgcatgtggtgatagctacccctggaagaatcctggatcttatcaagaaaggcgtagcaaaagttgatcatgtccagatgatagtattggatgaggcagataagttgctgtcacaggattttgtgcagataatggaggatattattctcacgctacctaaaaacagacagattttattatattctgctactttccctcttagtgtacagaagttcatgaattcccatttgcagaaaccctatgagattaacctgatggaggaactaactttgaagggagtaacccagtactacgcatatgtaactgagcgccaaaaagtacactacctcaacac

SEQ ID NO: 4096 - DNA, 399 bp, Bos taurus
  Clone ID: 18-LIB3057-007-Q1-K1-E9
cataatcaaacatggcggctaggcaaagagccgtgtctgcacttccaactcttctacgcactctccgcaaagaacctttgaagcctcgcaaccacgcacacgtcaatgccttgccctctcttcgacgcgctttctctttgtacgatcagatcaacctcatcgatcaagtccccgaagaccagctccgatttcaagggtataatgatacggggtttactgtaaatggggttgaatacgaaggaagcttgctttgtgttggaaatttgctcatgtcttggaaacctaagaagttttcagagatcactgccgatagcttgtcaatcttccaaatagttcgccctattccagagattttgattattggctgtggaaagaacattcaacatgtagatcctgaac

SEQ ID NO: 4097 - DNA, 425 bp, Bos taurus
  Clone ID: 18-LIB3057-008-Q1-K1-E5
gctacagtaaggagtatatatcatgtgagaaatattgaagtctacaaattaaaacagctgaagcagcctatggacatattcttatctcatgattggccaagaagtatctatcattatggaaacaagaagcaacttcttaagactaaatcttttttccgacaagaagtggaaaataacacactaggaagtcctgctgcctccgagcttttagagcacttaaaacctacttactggttttctgcccacctacatgtaaagtttgcagccttgatgcagcaccagaccatggataaaggacagtcaaccaaagcaaccaaatttctagccttggacaagtgcttaccacacagagactttcttcaggtaatagaagtagaacatgaccccagtgctcctgattacttggaatatgatgctgaatggct

SEQ ID NO: 4098 - DNA, 413 bp, Bos taurus
  unsure (390),(395): unsure at all n locations; Clone ID: 18-LIB3057-009-Q1-K1-E5
ttgaaattcagcatgtttattaatcattaaaataaacatgaacattgccaggaatatccattgattcactaaaaaaataatgcctataaaacattatttctgtttttcatattctgaatcaccaacatatgcacggcatgtactatgcccaggaactttagaagtacccagcttactttagaaagcacactgtttatcaaaaaaacaaacaacccaatcaaaaaaataggcagaatacctaaatagacatttctccgaagaagacatacagatgaccaacaaatacatgataagatgctcagcatcactaattattagagaaatgcaaatcaaaactccaacaaatacgtgataagatgctcaacatcattaattattagagaaatgcanatcanaactacaatgtggtatca

SEQ ID NO: 4099 - DNA, 407 bp, Bos taurus
  unsure (393): unsure at all n locations; Clone ID: 18-LIB3057-009-Q1-K1-E9
cagatgttgaaaatagacagatggcatatgagaacctgaatgacaaggatcaagagtgtaggagagtacttggccaggatgctggttaaataccctgagatcatgaatgccaacccagcgaagcgagttcccagtcaaggctcaactgaagatgatcgacaggatgagaaccaaattgagcaggccctcaaagagcatttgagtcaacacagctctcaggagactgacaaactggcctcggtaagcaaaaggctccctgtagggaccccgaagagtgatgatactcccaacagaccgtacttggatgaagatctgttagtgaaagtgctggaatacctcaaccaagaaaaggcaggaaagggaagggagcacattgctaagagagcaatgganaatatgtaagcagc

SEQ ID NO: 4100 - DNA, 372 bp, Bos taurus
  Clone ID: 18-LIB3057-011-Q1-K1-E5
agagaacgaagggaagaaaagtgaccgagaggccgctgaacatcctcgccccggcgcagcgggagccgcccgaggcagcttccccgtgacagagcctcagcctgcctggaagatgccgagactgtgcagcagtcgttcgggcgccctgctgctggccttgctgcttcaggcctccatggaagtgcgtggttggtgcctggagagcagccagtgtcaggacctcaccacggaaagtaacctgctggcgtgcatccgggcctgcaagcccgacctcttcgtcgagacgccggtgttccccggcaacggcgacgagcagccgctgactgagaacccccggtaggacgtcatgggccatttaacgttggaccggtt

SEQ ID NO: 4101 - DNA, 416 bp, Bos taurus
  Clone ID: 18-LIB3057-012-Q1-K1-E5
ctgaagcaggcgctcttggctcggctcggcccgctgcaatccgtggaggaacgcgccgccgagccaccatcatgcctgggcacttacaggaaggcttcggctgcgtggtcaccaaccgattcgaccagttatttgacgacgaatcggaccccttcgaggtgttgaaggcagcagagaacaagaaaaaagaagccggcgggggcggcgttgggggccctggggctaagagcgcagctcaggccgcagctcagaccaactccaatgcggcgggcaaacagctgcgtaaagagtcccagaaagaccgcaagaatccgctgccccccagcgtcggcgtggttgacaagaaggaggagacgcatccgcctgtggcgctgaagaaagaaggaattagacgtgttggaagaagacctgatcaa

SEQ ID NO: 4102 - DNA, 274 bp, Bos taurus
  Clone ID: 18-LIB3057-015-Q1-K1-E5
tcagtcctatacatatttctgtcacttcattattttactgcacagtaaaactttttacaagtaaggttaacaagcctttttactcatttaaaaatcattcacactatctttatcatgttatctgttcacccactcacccatccctgtttgcctgtgtatataacatgtttattctttatttgttgaatctcaataatgattcatatgtaccaacttcaatcatttctttataatgtatatccttctcttaattttataatatctacccattctt

SEQ ID NO: 4103 - DNA, 432 bp, Bos taurus
  Clone ID: 18-LIB3057-016-Q1-K1-E5
gccgcggtttcctgcttcaacagtgcttgaacggaacccggctgctcgtcccgcgctggcccttccggccactcagagccagccctcgtcaccacttgacagcgccctccgaccggcccaaggtccccgccaccgctccagtgccgctcggccgtcgccgccaccaccaccaccaccgcccgttttcagccgcccaccatgacgaccgcatccccctcgcaggtgcgccagaactaccaccaggactcggaggccgccatcaaccgccagatcaacctggagctctacgcctcctatgtctacctgtccatgtcgtactattttgaccgtgatgatgtggctttgaagaactttgccaaatactttcttcaccaatctcatgaggagagggaacatgctgagagactgatgaagctgcataaccagcgaggc

SEQ ID NO: 4104 - DNA, 404 bp, Bos taurus
  Clone ID: 18-LIB3057-016-Q1-K1-E9
cttgaaatcatcaccaccatggacagcataggttcgtcgcagaaagcagggtcgcgccggctcctgctgctggtggtgtcaaatctactcttgtgccagggtgtggtctccacccccgtctgtcccaatgggcctggcaactgccaggtatcccttcgagacctgtttgaccgggcagtcatggtgtcccactacatccatgacctctcctcggaaatgttcaacgaatttgataaacggtatgcccagggcaaagggttcattaccatggccctcaacagctgccataccttcttccttcctacccctgaagattaagaacaagcccaacagacccaccatgaagtccttatgagcttgattcttgggttgctgcgctcctggaatgaccctctctatcacct

SEQ ID NO: 4105 - DNA, 289 bp, Bos taurus
  unsure (32): unsure at all n locations; Clone ID: 18-LIB3057-017-Q1-K1-E5
ggccgcatacggtgttgaagcccaggattcangagggttggaccatggccaacagcgagcgcaccttcattgcgagcaagcccgatggagtccagcgaggcctcatgggagaaataatcaagcgttttgagcaaaagggattccgtcttgttgccatgaaattcatgcgggcttctgaagaccttctcaaggagcactatattgacctgaaggaccgtccattctttgctggcctggtgaaatacatgcactcagggccagttgttgccatggtctgggagggactgaa

SEQ ID NO: 4106 - DNA, 309 bp, Bos taurus
  Clone ID: 18-LIB3057-019-Q1-K1-E5
gagcgcggcatcggcgcgagatccggtctcggcccacgctgccgcgtgcgcaagcgggcggacaacccaacagccgacgctgccgcagccatgggagtgcaagtggagaccaccttgctgaacgggccagacctgcgtggagcactacacggggatgcttggcgatggaaagagagtggactacttccgctgcaggaaccagccctgtaagatagagctgaccgagcacgaagtcatccgaggctgcaaagaccgggttgaccaaattaggtgaagacgaaatgccgagcatgctatctgaacagacta

SEQ ID NO: 4107 - DNA, 383 bp, Bos taurus
  Clone ID: 18-LIB3057-019-Q1-K1-E9
ctcaagatgccgaagggaaagaaggccaaggggaagaaggtggccccggccccggccgtggtgaagaagcaggaggccaagaaagtggtcaaccccctgttcgagaagaggcccaagaattttggcattggacaggacatccaacccaagagggacctcacccgctttgtcaaatggccccgctacatccggctgcagcggcaaagggctattctctataagcggctgaaagtgccttctgcaattaaccagttcacgcaagccttggaccgacaaacagctactcaactgcttaagctggcccacaagtacagaccagagacaaagcaagagaagaagcagaggcttgtggcccgagctgagaagaaagccgcgggcaaagg

SEQ ID NO: 4108 - DNA, 401 bp, Bos taurus
  Clone ID: 18-LIB3057-020-Q1-K1-E5
atcagcctttgggtctttagttcgggggacttggggctgagggggtataagtaaccctgggttgtccagccttaataaactgctcttattacatttttgtcctgtagcacgctgccttgctgaagtagtcctggcagccgggccatctctgtataggattgcaaaaaaaaagaaacaaacaaatacaaaagaaatgataaataaagagggaaaaacagagctggcggtttgatcctttctgccatgatgtttacaagatggcgaccaccaaagccaaatgattaacctagctatgaacaacagtagtttctcagggtcactgtccttgaacccaacagtcccttaggagcgtcactgcccaccaaaggtcaacgtcgagagaggaaagaggaggaagggta

SEQ ID NO: 4109 - DNA, 414 bp, Bos taurus
  Clone ID: 18-LIB3057-020-Q1-K1-E9
agagaacgaagggaagaaaagtgaccgagaggccgctgaacatcctcgccccggcgcagcgggagccgcccgaggcagcttccccgtgacagagcctcagcctgcctggaagatgccgagactgtgcagcagtcgttcgggcgccctgctgctggccttgctgcttcaggcctccatggaagtgcgtggttggtgcctggagagcagccagtgtcaggacctcaccacggaaagtaacctgctggcgtgcatccgggcctgcaagcccgacctctccgccgagacgccggtgttccccggcaacggcgatgagcagccgctgactgagaacccccggaagtacgtcatgggccatttccgctgggaccgcttcggccgtcggaatggtagcagcagcagcggagttgggggcgc

SEQ ID NO: 4110 - DNA, 391 bp, Bos taurus
  Clone ID: 18-LIB3057-021-Q1-K1-E5
gtgggcgccttcccagccatgtccttgttcggcctgtttgccaacgctgtgctccgggctcagcacctgcatcagctggctgctgacaccttcaaagagtttgagcgcacctacatcccggagggacagagatactccatccagaacacccaggttgccttctgcttctctgaaaccataccggcccccacgggcaagaatgaggcccagcagaaatcagacttggagctgcttcgcatctcactgctcctcatccagtcgtggcttgggcccctgcagttcctcagcagagtcttcaccaacagcttggtgtttggcacctcggaccgtgtctatgagaagctgaaggacctggaggaaggcatcctggccctgatgcgggagctggaag

SEQ ID NO: 4111 - DNA, 403 bp, Bos taurus
  Clone ID: 18-LIB3057-023-Q1-K1-E5
gtgaaaaacactctgagaaatgctgctccaagaatttttcatcatgtgacagcacagtgtctcaaactttttcatctaaggacttccttacttgttaaaattgagaaacccaaagacctcttatttattttgggttatatctgttaatatttattaatttacttaattggttaataatttagtaataaaaataaccacttataaatttttaaatacttatttttaagtaataatttaattgttatattatatattttatatgtcaatatatatactatatagttatgaagaataactatatcttttaaatgtaataataatatcatcatctctatatagttttacaaatccctttaatatctagcttaataattgcttttgtatcataacctttgcaatatgc

SEQ ID NO: 4112 - DNA, 397 bp, Bos taurus
  Clone ID: 18-LIB3057-023-Q1-K1-E9
tctagatcgcgagcggccgccctttttttttttttttttgtgagaaaacacattttatgtgtttgaatgatacgcatgcttttcttctgtaaatagacaataaatttttgtagatagtcttggtgtgttatcttaatttcgtatttcactgtgtaaaatcagtgaatatagctcaagtgttagtggactggatgaaaagaaactggttactaggcaagaacaggaggctgtagttacccatgactacttttagctatgcagactaatacattctgcaggtttacagctcagcaccttcaccttttttcactggtatttcatgtaaggcatcaaccactgtaatttttgctgatgctgaagcctgtccttgggaattggatgcatggcactcatattc

SEQ ID NO: 4113 - DNA, 427 bp, Bos taurus
  Clone ID: 18-LIB3057-025-Q1-K1-E5
cgcaaggtgagggactggggtggagtgccctcggttggctcccgcgtgtagaggccgggacggacggtctggcggcagaataataaggctgtctgcaaagatttgaaaaatggcaacaaatgaaagtatcagcgtctttagttcagcatccttggctgtggaatatgtagattcacttttgcctgacaatcctctgcaggaaccatttaaaaatgcttggaactatatgttgaataattatacaaagttccagattgcaacgtggggatctctcatagttcatgaggtcctttatttcttgttctgtttacctggatttttgtttcaatttataccttacatgaaaaagtacaaaattcaaaaggataaaccagaaacatgggaaaaccaatggaaatgttttaaagtgcttctctttaatcacttt

SEQ ID NO: 4114 - DNA, 259 bp, Bos taurus
  Clone ID: 18-LIB3057-025-Q1-K1-E9
cgcgagcggccgcccttttttttttttttggtgcgcctccactgccccgcatgggccggggacactgtgcgagacaggggaagtacttttttatttttagtacaggcggtccctgtcctccatgagcttacaatctaaccgggtagacacaactaatgcacacttattcaatcattacaattagcaattacaattagcaattaccactattaaaccacatctgtcttcaaaaactaacaacggtataatacaaaataaa

SEQ ID NO: 4115 - DNA, 377 bp, Bos taurus
  Clone ID: 18-LIB3058-001-Q1-K1-E5
tcgcaaaaagctgatgctgtctggaataaaatgcatgaagaaaatattattcctcgtgagaagacattaaggttattagcagaaatccttaggaacaataatcaagacgttccatttgatgtacccgagttgtggtatgaagaagaaaaagattccccaacttcattaccctcacctgtagaagttaatctccagaaagagctattgaatgcctgccgcacgaggagaaacaaagatgcatttaatattttcctgacagcaaaaaagcaaaacattgtgtttgacaatgaagcttatgccaggcttataaacttacttttgatgaaggataattctacgcaagcaatgcaagtgaaagatttcgctgagacccacat

SEQ ID NO: 4116 - DNA, 370 bp, Bos taurus
  Clone ID: 18-LIB3058-001-Q1-K1-E9
ggcgaagataagagcctatgcagagcttctgccctctaatttatacagaaactggacgcactaatcctctgggattggctggctagggagctgcagataaggctatttgctgctgagaagccatggacaatggaaaccatgcagagctaaagaatggaggaaggcggttgccaacgctgaatccgtactctagggccgatgcctgagtgagaactggattcttaactccttaacacatacagacagatcgagctcaaatcttgatcagtctctattctaggtttcttgctgttatccagattactaataagtatcaaccacgcatataaacgatggatggaaaccagtaaatgagaaagacctattaaaa

SEQ ID NO: 4117 - DNA, 325 bp, Bos taurus
  Clone ID: 18-LIB3058-002-Q1-K1-E5
gtcgtcttcccttgcctacattgttccattggccagaggctgttcacctttagaggtggggcggatatgagttcgagcggtcgttgactgaattctgtcctccggattttcaagggcctgtcagggcgcatctgacacctagcgatgtgcgtagcttttccggccgttggacccttacctttggctgaaccgattccatggttttctgtccgtttagcaaataatataactttttccgaggccccctcctgttttttctgactttttaacgttatacgtttgccgtcacttttcgtttcgggtaattttatcctctatttccttt

SEQ ID NO: 4118 - DNA, 438 bp, Bos taurus
  Clone ID: 18-LIB3058-004-Q1-K1-E5
cggacgcgtgggtggcggagcgctggaccggtcccgagcggatcgcggtctcgggctgcgggcgcagggcgggctgggcgcggagcctgcgagcggagcccaggcggtgccgcgcggcgccatgaatggcaaggaggagaaggagggcggagcacggctgggcgccggcggcgccagccccgagaagagcccgagcgcacaggagctcaaggagcatggcaaccggctcttcgtgggccgcaagtacccggaggcggcggcctgctactgccgagccatcacgcggaaccccttggtggcagtgtattacaccaaccgggcactgagctacctgaagatgcagcagcacgagcaagccctggctgactgtcggagcgctctgtagctggacaggcaatctgtgaatgcacacttgttacatgggcaatgccagctgga

SEQ ID NO: 4119 - DNA, 421 bp, Bos taurus
  Clone ID: 18-LIB3058-005-Q1-K1-E5
atatctctccaccatgagccatccatcttgggtggccccacacggcatggcttagtttcattgagttagacaaggctgtcgtccgagtgatcagattggctagttttctgtgattatggtttcagtatgtctgccgtctgatgctctcttgcaacacctaccatcttgcttgggtttctcttaccttggatgtggggtatctcttcatggctgctccagcaaagtgcagccattgctccttaccttggatgaggggtatctcctcacaggcacccctcccgaccttgaacgtggagtagctcctcttggtcctcctgcacctgcacagctgctgctccctggacgtagtattgcttctctctggcgccacccctgagttcaggcatagggtagctccttttggccaccacctcagatgtgg

SEQ ID NO: 4120 - DNA, 371 bp, Bos taurus
  unsure (304): unsure at all n locations; Clone ID: 18-LIB3058-005-Q1-K1-E9
ctagtttgtgtttttattctcattttttatgtggtggggaatacagcagtaataaggaaaacctaattgggaagggacagatttggtcttttacttcaaacatacaaagtgtttacataaaaaagttatgatcaccatttgtaccaacatggttggacctagagactgtcatattgagtgaaatcagacagagaaagacaagtgtcatatgctattacttacatgtagaatctgaaaaatggtacaaatgaacttatatccaaagcagaagtagagtcacggatggagaaaacatggttacggnggaaaaagggaggggagggagaaaatggggaggttgggattgacacatgcactatatataaaactaa

SEQ ID NO: 4121 - DNA, 378 bp, Bos taurus
  Clone ID: 18-LIB3058-006-Q1-K1-E5
cctgcccttccggaagccgttaatcatcttcaccccaaagtccctgctgcggcatccggaagccaggtccaactttgacgagatgcttccaggaacccacttccagcgggtgatcccagaagatggccctgcagcacagaacccaggaaacgtcaagagacttctcttctgtactggcaaggtgtactatgacctcacccgagagcgcaaagcgcgggacatggtggagcaggtggccatcaccaggatcgagcagctgtcgcctttccccttcgacctcctgctgcaggaggtccagaagtaccccagcgctgagctggcctggtgccaggaggagcacaagaaccaaggctactacgactacgtgaagcccaggct

SEQ ID NO: 4122 - DNA, 297 bp, Bos taurus
  Clone ID: 18-LIB3058-011-Q1-K1-E5
gaacttctacagtttaataacttgtatttttagtgtcatattacctgacaagaacaaagtcttgatagtttgagatatttatcaactgaaccaatcatttaccagctatatgacatcagatgagttattgcctagatcaagtctcatataaaatctgtagagtaagaatgacaatttgtatgttattcactcagccatgtccaactctttgagaccccattgactgtagcctgcaagctcctctgtccatggaattctccaggcaacaatagtcaagtacatagccatttccacttt

SEQ ID NO: 4123 - DNA, 398 bp, Bos taurus
  Clone ID: 18-LIB3058-011-Q1-K1-E9
tcggagcaggcagtttagagactttcccagggagggctgagggcagaggtcactgatgactgactggggtcacaggggggacaactctgtggcggtccccagggaggcctgagaaagtgcccacgggcgccagggcaggcaggctccctgctgttgccctggacaggccagccccgacctcggcagccctgaccctcctgctggagcgggggcagggatgggctggggcagcagcggggctgtggtagccgcacccacctcattcctgcagcccgaggggggaccctgctgtaccttcagatagtagaagatgaagaagagcgtctctgtggacaggcgctggtagaactccacggtgtccgagtgtgggggtggcatctggtggtggtaggggggcg

SEQ ID NO: 4124 - DNA, 422 bp, Bos taurus
  Clone ID: 18-LIB3058-012-Q1-K1-E9
gaagtgaatatatgttcactaaagaaattaaaagcatgtgtagaagtagccagattattctcttacatcacagttccatttcccaaagcagctaggaggcacgtgagatactgctacatggaagctgtagctggggctttctctggggctgctttgttttcagatgttctggctcactgctgtccaataggaagatcctgtgagccacgtgtcacttaaaaatttttatagccacgtttaaaaaggtaaaaagaaacaaatgaagttaattttggtaatttatgtaatatatctaaaataatataaaaattgggattttacattctttttttcatcctaagtttccaaaatcaggtaagttttccatttatagcacatctcagtttgaaccagccacattctaagtgctcaataaccacatg

SEQ ID NO: 4125 - DNA, 428 bp, Bos taurus
  Clone ID: 18-LIB3058-013-Q1-K1-E5
cccacgcgtccggtttgttgttctgcctggggtcaaggtgctaatatagacttaaacgaatacattaacggtgctaaacacagacattttaacccaagtcacgacattcttagctgtaactcagctctcacggcctcttgctcacccatgaatggtcccgttttcctcttgccgcgtgcacctccacccattgtcttggtggcacatgggtggaacacttgatctgctcgagtctgccttcaacacacattgcatcttcagattttctacttttctgttcaaaactaatattcaccaagtcagactttgtgttaattttatatcagggtattggctgccagggggtcatccctaagtggcctgaagatggacaaagggaagtaacaggcacgtgatgttggcaaggatgcttctagggctagaggatc

SEQ ID NO: 4126 - DNA, 426 bp, Bos taurus
  Clone ID: 18-LIB3058-015-Q1-K1-E5
cacgaattgttcaagggtaagccacaacatctaaaaatcactcctagatacgaacaataaaggaaaaaaaatggtaccgatttaggaggaaacaaagccgctgtcgctgggttttctgtgcagcctgcagtgacttccgacacacgaggagaagctgtcactgtaaaccaagtcatccttgttgggagagcgccacagcctgctacttagttgagttaccagacatcctccacttccgaagcagcgaacgtcgaatctcagggatggtcctcaactggatccaagtgtaacgagccctgtttgaataatgagggaaggggagagtgatccatccacaatccggaagcagatttgcagaggtttcctgcactgttgtttgacactgccctgttgatgccctttcttcctggttcctgtgttttctct

SEQ ID NO: 4127 - DNA, 390 bp, Bos taurus
  Clone ID: 18-LIB3058-016-Q1-K1-E5
ggagggtggcagagacaaggcaccgctgcagccccagcagcccccagcgacgtctcccggcagcggggacgagaagccgagcggcaaggagcggcgggatgccggggacaaggacaaagagcaggagctgtctgaggaggacaaacaacttcaggatgaactggagatgctcgtggaacgattgggggagaaggacacttgcctgtaccgaccagccctggaggaactgcggaggcagattcgttcttctacaacttccatgacttcagtacccaaacctctcaaatttctgcgtccgcactatggcaaactgaaagagatctatgagaacatggcccctggggagaataagcggtttgctgctgacatcatctctgttttgggcatgac

SEQ ID NO: 4128 - DNA, 433 bp, Bos taurus
  Clone ID: 18-LIB3058-016-Q1-K1-E9
cggacgcgtggggaaggcctcctgcagaaggacaggacaaagaggctgggtgccaaggatgactttatggagattaagaatcatgtcttcttctccctaattaactgggaagatctcattaataagaagattactcccccttttaacccaaatgtgagcggacccagcgacctgcgacactttgatcctgagttcactgaagagccggtccccaactccatcggccggtccccggacagcctccttctcacagccagcgtcaaggaagcggctgaggccttcctgggcttttcctatgcaccttccaatggactctttcctctgaacggtcttaaggttggttgcaaaggattttttagttaaccttttggcagagctgccagctgacaggacatcttaaaagagaatttgcacatccctggaagcttgcaca

SEQ ID NO: 4129 - DNA, 453 bp, Bos taurus
  unsure (444): unsure at all n locations; Clone ID: 18-LIB3058-018-Q1-K1-E5
ccgcatcaccacgcggagcgagaagccgcttcggagcatcaagcgtatcttccacaccgtcaccaccacggacgaccccgtcatccggaagctggcgaagactcagggcaatgtgtttgccaccgacgccattctggccacactgatgagctgcacccgctctgtgtattcctgggacatcgttgtccagagggtcggatccaagctcttctttgacaagagggacaactctgactttgaccttctgacagtgagtgagacagccaacgaaccccctcaagatgaaggtaactccttcaactcaccccgcaacctggccatggaagcaacctacatcaaccacaacttctcccagcaatgcttgaggatggggaaggaaagatacaacttccccaaccccaacccatttgtggaggacgacatggataagaacgagattgcctntgtggcgta

SEQ ID NO: 4130 - DNA, 399 bp, Bos taurus
  Clone ID: 18-LIB3058-019-Q1-K1-E5
tcgacctacgacgtacgcttctacataccttcttaatttctacattcccttcttttctcttcttcagagatttcctttcagggagcagcttttccatcctctgaatgtattcctttttagtaggaatccataagtattatattaaatggaaaagcattcaacatttagtggctggtggaatcacatattaaatgccttctgtatcatatgtgatggaggtcttgtgtatctgttacatcagggagtttccttattcactcttcatttgctgctgaataagttgacaacttaccttcccaataaaatcacacttacacctcctgtctttgtatttctggtattcactttactatgtaatagaattatctttttgcttccataatacaaccattttctttt

SEQ ID NO: 4131 - DNA, 460 bp, Bos taurus
  Clone ID: 18-LIB3058-021-Q1-K1-E5
gaggaatattttgtgactttaattggtaaatatgttaacagaaccgagtacttaatcttgtacatcatgtcttcagctatttgtattttaattcagtaacttcaatggtctgaaacatgattctgagcttcacgtgaattctgtcttactgtggaattcaaacgttcgtccctgaatctgacagttgttattacctaggtgccctgtagttatccaggtgtcaggtacacattcctgacttcagagctgctttcggacttttacgttgaaatactagaaaagtaacaacgatggcagcaattaaggtcacagaaatcatcagataaagggaaaaacgacgaggggtcctgcataattctcttttaataaatagagaggtggtaggaagaaggaactagatgccctacttaccaccatgtacgtgtgcgtgtttgtgtgggcactcacgtgtgtgtgtgtg

SEQ ID NO: 4132 - DNA, 405 bp, Bos taurus
  unsure (372): unsure at all n locations; Clone ID: 18-LIB3058-023-Q1-K1-E5
attaaatgtaaaggaaatcaccttcttccatgcaggtgtataatcttgaaaaggaaaatgcttccatgttgaagccagattttctgtagtaaaacttttaaaacattattttaaaagaaatatgtatataaatataaatatatatatattctttgcagtgatactgaagtctctggtctaggaccataccttttataaggtgtgagagaccatggcagtgtctaagaatggaataaatgatgatgcctttgatttaaagtggcccacataattaactgtagatgctctatcctttgaatgctccatctctccaatacatttccataatgtgttgaaaataagctaacatttgtatgatttttataacattcnttgggcccccaaatatacttagatgactaatct

SEQ ID NO: 4133 - DNA, 410 bp, Bos taurus
  Clone ID: 18-LIB3058-024-Q1-K1-E9
gcatatatctcttgtattcctacttttgcatcccagtccactataatgaaaaggacatattttgggggtgttgtttctagaaggtcttgtaggtcttcatagaaccattcaccatcagcttcttcagcattactggtcggggcatagacttggattgctgtggtattgaatggtttgccttggaatgaatagaaatcattctgtcgtttttgagattgcatccaagttgcatgtcagactcttacgttgactatgatggctactccatttcttctaagggattcttgcccacagtagtagatattaatggtcatctgcgttatattcacccattccagttcattttatttcagtgatccctaaaatgttgatgttcattcttgccatctcctgtttgaccctttccaatt

SEQ ID NO: 4134 - DNA, 457 bp, Bos taurus
  Clone ID: 18-LIB3058-025-Q1-K1-E5
ccgtccggccggaattcggtcgcccacgcgtccggtcttcgatcatgtctggtggctccgggatataacagagaacatggcggcccagagggaatggaccccgatggtgtcatcgatgcaactggaatgagattgttgataactttgatgatatgaacttaaaggagtctcttcttcggggcatctatgcttatggttttgagaagccatcagctattcatcagagagctattattccatgtattaaagggtatgatgtgattgctcaagctcagtcaggtactggcaagacagccacatttgctatttccatcctgcaacagttggagattgagttcaaggagacccaagcactagtattggcccccaccagagaactggctcaacagatccaaaaggtaattctggcacttggagattatatgggagcaacttgtcatgcctgcattggtggaac

SEQ ID NO: 4135 - DNA, 428 bp, Bos taurus
  Clone ID: 18-LIB3058-026-Q1-K1-E9
ctcagagttgtccacactgagcctccagaaattcatcaatggcagttcaggtagctgtatgccagtgctagctttccattaacatttcagcttgtggatttctgctcaggtaagttacgattctctggattcgcccatctgtctctccaatgcatggggggacactttcgcttacttttcttacggtcctaagtgttgttgatttttcaagttatcttttacttgctgtaggacagagtgacaatttccaagctttttaaatggcttatgggagactgttagtcccagtttttagctttggaggtgctcctatggtctgttacttcattgttgttgttttatagttataaataagttaaagtaatgcattatcactgaaaaacaaaacaaaatcaaaaggctgtctttttaaatactgttttttctct

SEQ ID NO: 4136 - DNA, 423 bp, Bos taurus
  unsure (259),(310): unsure at all n locations; Clone ID: 18-LIB3058-027-Q1-K1-E5
cggacgcccagcgacacgtcggcgcggccccccgggctggcagaggaggggccggccggcggggcaccctccgcgcctcgggctcgggctcggggccgaggcccgggcctcccagagcccacggacgctggcgggcccccgcgcagtgcgcccgaggccgcctccatgctggccggcgagctgcgcgacaagactcgcagcctgggtcgcgccgaggggcccgcgggcatgcaaggcccccgagagaagccggcgcctncgcaaaaggccaagcgctccgcgcctgcctactctcccgaccgcgcgcacnacgcacctgaggcccctgggccggaaaaggcggcagccggcgcgcccggatccgacacccctcgaaagaaaaccctcatccagaagccgccccgcaagaagagccggggagct

SEQ ID NO: 4137 - DNA, 334 bp, Bos taurus
  Clone ID: 18-LIB3058-028-Q1-K1-E9
gttctagatcgcgagcggccgccctttttttttttttttgaggaatgtgttcattctgttattgtccattgtttgaacctgactgaatacaagatcaacaagagcactgtactcctggcaattatgacatatgttagaacatggattttgcactgtagacaacagtcaacatcagtctatggggtactacgttgctttttataaagtccaaaataaagatttattttcaaacaagtgactttggtttatttcatacattacactttttcttgcagaaaaaaataaaattgtacaactgcataaatataaaattctcccaccacaaacatataat

SEQ ID NO: 4138 - DNA, 420 bp, Bos taurus
  Clone ID: 18-LIB3058-030-Q1-K1-E9
gcggttctagatcgcgagcgggcgccctttactcttttttttccttgcgggttccagtacgggttggtctcctgattcgacagcatgaaggagactgccactgtcaaactgctagcgccggtttctactccgcgccattgaagagaagaagcggctggatggcagacaaacctatgattataggaacatcaagatttcatttggaacagattatgggtgctgaattgtggagcttgggaaaacaagagttcttggacaggtttcctgtgaacttgtttctccaaaactcaatagggcaacagaaggtattctttttactaaccttgaactctatcagaaggctgacccagcttttgaacctggcaggcaatcagatctcttggtgaagttgaatcgactgttggaaagatgtttaagaaa

SEQ ID NO: 4139 - DNA, 429 bp, Bos taurus
  Clone ID: 18-LIB3058-034-Q1-K1-E5
gttgtagatcgcgagcggccgccctttttattttttcttttttgtagcacaattgaagtttattccatttgttcttgcaacacaaaacttaaacacagtattatttagcattctgatgtacatgaactaggataatgagaaccccaactgtgtcaaatgtattacactgtggaaaaaatgaactcaaatatatcaaaatgcacaaagcactagtcttcctccattactgcttagaaagatatgattgtttctccatttacaaaatagaatcaggacaatttaaattttttagaattttgcatgcaaacactgcaattgcttatgtaggagggcacttcaccagcttcttctatacacaatcgagtatacaatattgcatggaagaaaacagcagctcagttgaagttttaggggaaaaaaaatcaaata

SEQ ID NO: 4140 - DNA, 219 bp, Bos taurus
  unsure (28): unsure at all n locations; Clone ID: 18-LIB3058-035-Q1-K1-E5
agactttttaccataaagcatactactntcaaaatgacatacaaatagttaaaagtttcgttacgttgtctatctaacttttaaatatgaggacttccagaattaggcctcaacatgtgttatcagtaaaggaaactacgcactgtttctgttactaggaatctgtatcttaccatatcttcatagcttttatagactaattcatttagaactactctt

SEQ ID NO: 4141 - DNA, 439 bp, Bos taurus
  unsure (371),(395): unsure at all n locations; Clone ID: 18-LIB3058-039-Q1-K1-E5
agggacttccctagtcatccagttgtttttactccctgctcccaatgcagggggcccaggtttgatcccagatcaggggactagatcccacatgccatggatcccacatgctgcaactaaagatcccaagtgcgtcagctaagacctggtgcagccaaatatataaaaataaattttttaatatataattgttttttaaaaatggattaatggcttaaatgtaagggctaaagttataaaactctttggagaaaatataggtataaatcttttattatgttggattaggaaatggccttttagataaaacatgaaaagtagaagcaacaaaagaaaaagatgacacattggacttcatcaaaattgaactntttcgattcagatgacactagaanaaaagacctatattcaattgggagaaatatttgcaaaattatca

SEQ ID NO: 4142 - DNA, 417 bp, Bos taurus
  Clone ID: 18-LIB3058-039-Q1-K1-E9
atagattcagttcttgttcttcatacctactggcggcaggatgctagcatctgggtagtcctcatcctgttgttccctgttaacctgtgtgtgcgttttcacggctgacctaagctcagaccctgctggggcctggccggagtaggttttccctactggtatgtcatcatatttgatgccaactctatattcttgcagtgtgtttcctttgtgactcaaggttgaataatgcctgtgaactgcaaacttgcttataattgacttggtgcaataaagttcctttctaaccatttctggtttagaaaactttcagccatcctagaactagcaatatttatttatgcctcatttattttaccttagtctttcacttatgggtactaagcaaggtccattttagtgtagctgaaaagaatg

SEQ ID NO: 4143 - DNA, 380 bp, Bos taurus
  Clone ID: 18-LIB3058-040-Q1-K1-E5
gcgctgttgctcgcacccagctggattgctctgccccctcagagatgcgcctggagaaggacagattctctgtcaacctggacctgacgcacttctccccagaggaactcaaggccaaggtgctgggagatgtgattgaggtgcatggcaaacatgaagagcgccaggatgaacatggttttatctcccgggagttccacaggaaataccggatcccagctgacgtggaccctctcgccattacttcatccctgtcctctgatggggacctcactgtgaatggaccaaggaaacaggcctccggccctgagcgcaccattcccataacccgtgaagagaagccggatgtcactgcagaccccaagaagtagatgcccctt

SEQ ID NO: 4144 - DNA, 404 bp, Bos taurus
  unsure (155): unsure at all n locations; Clone ID: 18-LIB3058-042-Q1-K1-E9
gccttcagatggggcagcttttttagcatctttcctgagccaggaggtttgcttgaaaggcctttgatagtttcagatcaggacacatggccttcagatggcttattctcagcgaagcttcttgtgaactgtgacattgtatatatgtgactcanacaactttaacatgtttctggtgtattttaatcataattgttactaaacagtgcaaatgtagcttcttcatgcaaatgcagctttatactaaaaatactatttatttgtactgcaatccattataaatttgttatttatattctaaaaaaaaaaaaaaaaaaaaaaaaaaaaaaaaaaaaaaaaaaaaaaaaaaaaaaaaaaaaaaaaaaaaaaaaaaaaaaaaaaaaaaaaaaaggggcggccctttt

SEQ ID NO: 4145 - DNA, 437 bp, Bos taurus
  Clone ID: 18-LIB3058-046-Q1-K1-E9
ggcgacagcgccggttcagtatcccatttctcagaggaatatttcatctcgacagccagggagagagcctggatgctcaagttggggaatggcggtcaatgtgtattctacctcgataacccaagagactatgagcagacatgacatcatcgcttgggttaatgacatagtatctttaaactacacaaagtggaacagctttgttcaggagcagcctactgccagttcatggacatgctcttcccaggctgcattagtttgaagaaggtaaaatttcaggcgaagttggagcatgaatacattcacaattttaagcttctgcaagcatcgttcaagcgaatgaatgttgataaggtaattcccgtggagaagctggtgaaagggcgtttccaggacaacctggattttatccagtggtttaagaagttctacgatgc

SEQ ID NO: 4146 - DNA, 209 bp, Bos taurus
  Clone ID: 18-LIB3058-047-Q1-K1-E5
gcctcaatgatgagaggataagattattataagaaaatttcagaaacaaaatctgcaggttgctcgacacacacactgcgtcattgagctggttgtgactgagtgacctccattcgtggccacacccaacagtgagagctgtgaccacgggtctcaaggaaagtatgcactgttcttgagtattgaaataaagtaatacacttttaatg

SEQ ID NO: 4147 - DNA, 417 bp, Bos taurus
  Clone ID: 18-LIB3058-047-Q1-K1-E9
cttgatgccatgctcaggactgacgggtgcaaatcttaaggagcaatcagatttctgtgcttggtacattggattaccatttattccatatctggataatttgccaaacttcaatagatcagttgatggaccaatcaggctgccaattgtggataagtacaaggatatgggcactgtggtcctgggaaagctggaatcaggatctatttgtaaaggccagcagcttgtgatgatgccaaacaagcacaatgtggaagttcttggaatcctttctgatgatgtggaaaccgattctgtagccccaggtgaaaacctcaaaatcagactgaaaggaattgaagaggaggagattcttccagggttcatactttgtgatcctaataatctttgtcattctggtcgcacatttgatgccca

SEQ ID NO: 4148 - DNA, 399 bp, Bos taurus
  Clone ID: 18-LIB3058-048-Q1-K1-E5
gcttcattgaatatgagaaagcccaattgtcccaggatgctgtgtcttccatgaacctgtttgacctggggggccagtacttgcgggtgggcaaggctgtcacaccccctatgcccctgcttacaccggccacacctggaggcctcccgccggctgctgccgtggccgcagctgcagccacagccaagattacagctcaggaagcagtggctggagcagcagtactgggtaccctagccactcctggactggtgtcccctgcactgactctggcccagcccctgggggctctaccccaggccgtcatggctgcccaggccccaggagtcatcacaggtgtgacaccggctcggcctcccattccggtcaccatcccctctgttggtgtggtgaatccca

SEQ ID NO: 4149 - DNA, 438 bp, Bos taurus
  unsure (400): unsure at all n locations; Clone ID: 18-LIB3058-048-Q1-K1-E9
cggacgcgtgggcttagcttgtcgggttcgtaaccgggacccgtgtctactcctgttgcctgcgcctgctgacccgtagccaccatgcgtgagtgcatctccatccacgttggccaggctggtgtccagatcggcaatgcctgctgggagctctactgcctggaacacggcattcagcccgatggccagatgccaagtgacaagactattgggggaggagacgactccttcaacaccttcttcagtgagacaggggctggcaagcatgtgcccagggcagtgtttgtagacctggaacccacagtcattgatgaggttcgcactggcacctaccgccagctcttccaccctgagcagctcatcacaggcaaagaagatgctgccaataactatgcccggngtcactacaccattggcaaggagatcattgacctcgtc

SEQ ID NO: 4150 - DNA, 439 bp, Bos taurus
  Clone ID: 18-LIB3058-051-Q1-K1-E5
caaaaagaaagctataaaaagtcaaaactttgataaattttaaaaataggctgctttagcattacattagaactgatatcaagattagatattggagccaggcctgagtccccatgtgaaagcatgggaacctagcgttaaagctgttcacttagctccaatcatagcagtcctgtggttccttcacatttactttgtgtcattgtccacaaatgaaatatttgtaacttcagtgttagtttcatgaaaagatagataaatttgctcattatttgaaataagaaacatttaaaatgagtgtcacatataagtaggttattgaatgtgaatggcgatattttctctttaatttaaaaaagtaatatttattaagaggagccttggtagaatgttgtttggggtatgttctttagtaaaccttgcaaatatatgtagtaat

SEQ ID NO: 4151 - DNA, 435 bp, Bos taurus
  Clone ID: 18-LIB3058-052-Q1-K1-E5
agtacaaaccaaaccaccagttcaacctattacaaacctaccagaagggaaacgtggcagcagaagctaatggagaagaacccaaggcaagctggcccagacatttagccatgcaccattctgttaccttgcgagtctgataataaacttgctgctgacctgctgtgctcacagtagattctaaactggactaattattgtggggttttaatgagaagcctaagtttggaaatccttaagcagtgatgttgaaaaaaaaaatgaagctctgaacagtttaaaggtaacaatcctgtctctagaaagagaaagctgatggcaaaggcacattccaagtgacccgaatccaggtgcccccatcctgcaataggcagtccttagtggggggaatcctatggaagttttgagtctctgacaggcagttttctggaaaca

SEQ ID NO: 4152 - DNA, 414 bp, Bos taurus
  Clone ID: 18-LIB3058-053-Q1-K1-E5
cggacgcgtgggtcgcgagcgtgtcgcttttttttttttttttttaatttagattcttggtctcttttctttcttttttttttttttttttttagaatatagcagtaatgctattgctgaaaggaatgattttctttttctgaaatataatcattgatgcttgaatgatagaattttagtactgtaaacaggctttagtaattaatgtgagagacttagaagaaatgcttagagtggactctgaagtgtgcctaaatgaattttgcagtaactggtattcttggatttgtcctacttaatacacattcattcagaatttgtattctattttgagtttgacagtcttttggagtaaccagcaactttgatgtttgcactaagaatttatctggaatgcaagataggttgaaagag

SEQ ID NO: 4153 - DNA, 198 bp, Bos taurus
  Clone ID: 18-LIB3058-056-Q1-K1-E5
ggaagaggggcaaatatattgaggcggagccgctgtgccagctggcactggagattcgttgaaaggtcctgggaaccaaccacccggatgtggcatagcatgtaagcaacctggccctgttatgccaaaaccagggcaagtacgaggcatacggaacgctattaccggcgggcactggccatctatgaggtgcagctg

SEQ ID NO: 4154 - DNA, 434 bp, Bos taurus
  Clone ID: 18-LIB3058-056-Q1-K1-E9
gcgggagccccggcagggctgcctccgggcactcctcagctcattgtctctgtggtctgtccccggctgctctagtaccttcacttccactacccaggaaggccgtgcggggagcgagcgctgctttcacttgcccttctacgtgcccactcatcgctcctcgtgcggcgtaggcccctaccgcggccatggccacgctcagggtcctgcccgaagcccaagccaaggtggatgtgtttcgtgaagacctatgtactaagacagagaacctgctcgggagctattttcccaagaagatttctgagttggatgcatttttaaaggagccagatctcaatgaagccaacctgagcaatctgaaggccccattggacatcccagtgcctgatccagtcaaggagaaagagaaagaagagcggaggaaacagcaagag

SEQ ID NO: 4155 - DNA, 131 bp, Bos taurus
  Clone ID: 18-LIB3058-058-Q1-K1-E5
aaaaactcaaaatcgattaaagatctaaacgtaagaccagaaactataaaactcctagaggagaacataggcaaaacactctccgacatacatcacaacaggatcctctatgacccacctcaccaattctt

SEQ ID NO: 4156 - DNA, 283 bp, Bos taurus
  Clone ID: 18-LIB3058-058-Q1-K1-E9
ttctaacagaaaatatttattttcacacagggaaacactgacttatgttgctgaagaacgtgaagctagtaaaagcttctcagtctctgagcgtgaacctaagtgacataaagaccaaccattcaggaaacacctactgtgctagccagggccggtgcccgaggcagatagacccgcctcgtaagactgctatacagcaggggagggccagttttcctcccttccactcctcaagtctgggttgaaaaggtgggggctggatactatactgccacaggttttt

SEQ ID NO: 4157 - DNA, 452 bp, Bos taurus
  Clone ID: 18-LIB34-001-Q1-E1-E5
cgatcgccatggaagaagaaattgccgccctcgtcatcgacaatggttctggcatgtgcaaagctggctttgctggggatgacgccccccgggccgtgttcccgtccatcgttgggcgtccccgacaccagggcgtcatggtgggcatggggcagaaggacagctacgtgggcgacgaggcccagagcaagcgtggcatcctgacccttaagtaccccatcgagcacggcatcgtcaccaactgggacgacatggagaagatctggcaccacaccttttacaacgagctgcgtgtggcccccgaggagcaccccgtgctgctgacggaggcccctctgaaccccaagggcaaccgtgagaagatgacccagatcatgttcgagacgttcaacactcctgccatgtatggtgggcatccaggctgtgctgtctctgtacgcctctgggcgcac

SEQ ID NO: 4158 - DNA, 414 bp, Bos taurus
  Clone ID: 18-LIB34-002-Q1-E1-E5
attccaggctcggagccccgggcccgccgacaccatgagttggtcctcgcaccctccgagtgtaatcttctacattctttcattgctttcttcagcatgcctggcatatgttgctacccgagacaactgctgcatcttagatgaaagatttggtagttattgcccaactacctgtggaattgcagatttcctgaataattaccaaaccagtgtagacaaagatctacgaactttgggaggcatcttatatcaggttgagaacaaaacatcagaagccagagagctggtcaaagcaatccagatcagctataaccctgatcaaccatcaaagccaaataacatagagagtgctaccaagaattccaagagtatgatggaagaaattatgaaatatgagacactgatatcaacaca

SEQ ID NO: 4159 - DNA, 400 bp, Bos taurus
  Clone ID: 18-LIB34-003-Q1-E1-E5
ctaccaaagattgaaactatgagagaaaaagtactgacttcatctgccagacagagactcaggtgtgccagtattcaaaaatttggagaaagagctttaaaagcatggtcagtagctcgcctgagccagaaatttcccaaggctgagtttgtagaagttaccaagctagtgacagatctcacaaaagtccacaaggaatgctgccatggtgacctacttgaatgcgcagatgacagggcagatcttgccaagtacatatgtgataatcaagatacaatctccagtaaactgaaggaatgctgtgataagcctttgttggaaaaatcccactgcattgctgaggtagaaaaagatgccatacctgaaaacctgcccccattaactgctgactttgctgaag

SEQ ID NO: 4160 - DNA, 412 bp, Bos taurus
  unsure (374): unsure at all n locations; Clone ID: 18-LIB34-004-Q1-E1-E5
gcgagcggccgccctttttttttttttttttttttcactctgtaactttcctttaatggaattattttagacctcaggcagagctttgttgttatatttttttcttagaaagatgttcaaatggctatgggcttccctggtggctcaactggtaaagaatccgcctgcaatgtgggagacctgggctcaatccctaagttgggaagatccctggagaagggaacagttacccactccagtatcctggccaggagaactccatggactatatagtccatgggatcgcaaagagtcggactcaactgagagactttcacttcacatggctaagctagttcctaaattttaaaagttggttgcggtgggggaggtanaattgctaacttgtgcaaataaacacaagcaactcata

SEQ ID NO: 4161 - DNA, 400 bp, Bos taurus
  Clone ID: 18-LIB34-004-Q1-E1-E9
tgtaactcctaaccggacaatgtctgacttcactgtttttgaaaggatctctcttgcctggagcccgattacatctttgatgtgggcttgtggtcgtcatttgtatgaatgtgcagaagaagaaaatgataattctttagaaaaagatatagcaacgaagatgcgccttcgggctttatcaaggtatgggcttgatacagagcaggtgtggagaaaccatattttagctggaaatgaggatccccagctcaagtcactctggtacactctgcactttatgaagcagtatacggaagatatggaccagaaatctccaggcaacaaaggatcattggtttatgcaggaattaaatcaattgtaaaatcatctttgggaatggtggaaagcagcagacataat

SEQ ID NO: 4162 - DNA, 414 bp, Bos taurus
  Clone ID: 18-LIB34-005-Q1-E1-E9
cttctcccgactcgacgtcgtcgttacagggaagaagaagcgggtgagaaaaacttctgtttccaccgttttgcccatttctgcagatttgttccgaggccgaggcatctccaaggcagtgatggctctccagaggacccaggcctttcttctgctcttgctgctgaccctgctggggctagggctggtacagccctcctatggccaggatcgcatgtaccaacgattcctgaggcaacatgtggaccctgatgagacaggaggcaatgacagctactgcaatttgatgatgcaaagacggaagatgacttcacatcagtgcaagcgcttcaacactttcattcatgaagatctttggaacatccgtagtatctgcagcaccaccaacattcagtgcaagaatggccagatgaa

SEQ ID NO: 4163 - DNA, 346 bp, Bos taurus
  Clone ID: 18-LIB34-006-Q1-E1-E5
gaactgtgcacattgtatctgagctgtcagcccctacaaggaaaaagcctcttctggtggatgctgatcttcctctgagctgcttaagtctccactggtctggcaaacacacctttctgccttgctatcacaataggaatgtggatttgtgtgtgttcccttcccagtcccttatctgatcctcacggaatctgcctgctttccttccatggggatgggacgatttcagtacacatggaaattcttgtcaggcatttatgaaaggctgattatgtatggcaagatatggaaaattcccaaactgtcccagtgtattttatttcttctgatcacagacgtaattact

SEQ ID NO: 4164 - DNA, 396 bp, Bos taurus
  Clone ID: 18-LIB34-007-Q1-E1-E5
caaaactttggcacaatgaagtgggtgacttttatttctcttctccttctcttcagctctgcttattccaggggtgtgtttcgtcgagatacacacaagagtgagattgctcatcggtttaaagatttgggagaagaacattttaaaggcctggtactgattgccttttctcagtatctccagcagtgtccatttgatgagcatgtaaaattagtgaacgaactaactgagtttgcaaaaacatgtgttgctgatgagtcccatgccggctgtgaaaagtcacttcacactctctttggagatgaattgtgtaaagttgcatcccttcgtgaaacctatggtgacatggctgactgctgtgagaaacaagagcctgaaagaaatgaatgcttcctg

SEQ ID NO: 4165 - DNA, 418 bp, Bos taurus
  Clone ID: 18-LIB34-007-Q1-E1-E9
gaatagtttgggctataatgtcaatcggatttctaggtttcatcgtatgagcccaccatatattcactgtcggaatagacgtcgacacacgagcctacttcacatcagccactataattattgctattccaaccggggtaaaagtcttcagctgattggcaacacttcatggaggtaatatcaaatggtctcctgctataatgtgagccctaggctttattttcttatttacagtagggggtttaactggaattgtcttagccaactcttccctcgatattgttcttcacgacacatactacgttgtcgcacatttccactatgttttatcaataggagctgtatttgctattatagggggatttgttcattgattcccactattctcaggttatactctcaacgatacatgagccaa

SEQ ID NO: 4166 - DNA, 392 bp, Bos taurus
  Clone ID: 18-LIB34-008-Q1-E1-E5
cgacgcaagcctctagagagcgtccgaccattttttttttttttttttttcactctgtaactttcctttaatggaattattttagacctcaggcagagctttgttgttatatttttttcttagaaagatgttcaaatggctatgggcttccctggtggctcaactggtaaagaatccgcctgcaatgtgggagacctgggctcaatccctaagttgggaagatccctggagaagggaacagttacccactccagtatcctggccaggagaactccatggactatatagtccatgggatcgcaaagagtcggactcaactgagagactttcacttcacagtgctaagctagttcctaagttttaaaagttggttgcggtgggggaggtaaaat

SEQ ID NO: 4167 - DNA, 401 bp, Bos taurus
  unsure (359): unsure at all n locations; Clone ID: 18-LIB34-009-Q1-E1-E5
aggacgcgtgggcgaagtcaactgcagcctgaggccgagggccactaggaaacatgggtctcccacagctcatgttcatgagccctgcaccacaccccctgaacctaactctcgctcctcaaggaaccaaacacatggggcaatgaaggcagccaagccccttagcaccatttctgagcctgcctttgcccagctccctgaggcaccgcctcacactccccagatgccaaaggaggaggcagctgatgggtcaggcttcaccccagagccccagcctagggcctctcaaaaccgcaagaggccttcagctactgcacattcacctccacttcaaaaacggctccagagagggagagtcnctcagaaggcagcatcccttaaggaagaagaaaatccagcag

SEQ ID NO: 4168 - DNA, 423 bp, Bos taurus
  Clone ID: 18-LIB34-010-Q1-E1-E9
acaggagtttggcttacacaatgagaacttggaacagagactagaaattaaacgtatcatggaaaatgtgttccaacacaagttaccagattgttctctgagattatatgggtcatcctgtagcagattgggtttcaaaaattcggatataaacattgacattcaatttccagccattatgtctcagccagatgttctcttacttgtccaagaatgtttaaagaacaatgactcttttattgatgttgatgcagatttccatgctcgggtgccagtggtggtgtgcagagaaaagcaaagtggtcttctttgtaaagtgagtgcaggaaatgaaaatgcttgtctgacaacaaatcatttaactgcccttggaaaactagaatcaaagctggttcctctggtgattgcatttaggtactgggc

SEQ ID NO: 4169 - DNA, 407 bp, Bos taurus
  Clone ID: 18-LIB34-010-Q1-E2-E5
cagcgcctgtgggaagaccaacctggccatgatgaaccctactctcccgggatggaaagtagagtgtgtgggtgatgatatcgcctggatgaaatttgaccaacaaggtaacttgcgggccatcaatccagagaatgggttttttggcgtcgctccgggaacctctgtgaggacaaatcccaacgccatcaagaccatccagaagaataccatcttcaccaacgtggccgagaccagtgacgggggcgtttactgggaaggcattgatcagccgctggcctcaggcatcaagctcatttcctggaagggcaaggagtgggaccccaaggatggggagccttgtgcccaccccaactcacggttctgcactccggccagccagtgccgcatcattgaccctgactggg

SEQ ID NO: 4170 - DNA, 401 bp, Bos taurus
  unsure (356): unsure at all n locations; Clone ID: 18-LIB34-012-Q1-E1-E5
atccggcaaaggctccgtggttctggcctacagtgggggcctggacacctcctgcatcctcgtgtggctgaaggagcaaggctatgacgtcattgcctacctggccaacatcggccagaaagaagactttgaggaagccaggaagaaggcgctgaagcttggggccaaaaaggtgttcattgaggacatcagcaaggagtttgtggaggagttcatctggccggccatccagtccagcgcactgtacgaggaccgatacctcctgggcacctctctcgccaggccctgcatcgcccgcaagcaggtggagatcgcccagcgagaaggagccaagtatgtgtctcacggcgccacangaaaggggaacgaccagatccggtttgagctcacctgctactcgc

SEQ ID NO: 4171 - DNA, 427 bp, Bos taurus
  Clone ID: 18-LIB34-012-Q1-E1-E9
aaccggcagctgagcgtgggcaacgccatatttgtgccagaggagctgaagctgctggacaaattcaggaaagatgccgaggctttttacgcctctgaggttttatccatcaacttcaaggattctgaagctgccgtaaagcttatcaatgaatatgtgaagaataaaacgcatggaaaaattgagaagctcttaaatgatcttgacgtgctcacaaatttaatcttgttgaattatatcttctttaaagcccagtggaagacgccatttaatcctaaccatacttacgaatcagagttccacgtgagcaagaacgagagggtgaaggtacccatgatgacccttcgcctggaaaccccttacttccgggacgaggagctgggctgcacgctggtggagctcacgtacaccagcaatgacagcgccc

SEQ ID NO: 4172 - DNA, 380 bp, Bos taurus
  Clone ID: 18-LIB34-013-Q1-E1-E5
ttcggcggtcgacccacgcgaccgaccaaccgcccgccgtctgggccgggccgacgatgcggcgcagcgcctcggcggccaggctctctcccgtccggccaccttgctaacttcctcggctccgtccttgtccacgagcgggggccaccgcgtgtcaccgcatcctccgagtcgggtcctccatgcgcgccgggcgctgaccctgtgtgtcacccgctgccagcccgcgcaccgtccccgttcggtcatgctgtcccactgcctcatggccgcgctgctgctggccgccgggcactggcctagcctgtgcgacaaagccatccactgcacgccctgctcagaggagaagctggcacgctgccgcaccaccgatggctgtg

SEQ ID NO: 4173 - DNA, 402 bp, Bos taurus
  Clone ID: 18-LIB34-014-Q1-E1-E5
atggtttcctgtggtctcaccagagtcttctctttttcagagtcggacagagaacactttgttgacctgctgctcagcaagcacttcaggaccttcatgcttgctgcctcctggaatggcacaaagaacgtgggggtgtccttctatggtagatgtcccaaacccccactccacccaagcctcatcccaggaccaccactccccgggctaggtccccagaaccccagcccttcctggcctccctcttaggcctcccacatccccacctggccccttgctccctcttgtagctgacaagccggaggtgacccaggagcagaagaaagagttcttagatgtcatcaagtgcataggcatccaggaatcagaaatcatatacactgacgagaagaatgtgagtgc

SEQ ID NO: 4174 - DNA, 408 bp, Bos taurus
  Clone ID: 18-LIB34-014-Q1-E1-E9
aatcactcgagagcaaagagatacggtgcccatccccaaaaacggcctcagccagctgggccgctggatgtccgaggaggattttgaaaaagcattcaacatccgatttccggggtgcatgaagggtcgcaccatgtatgtcatcccgttcagcatggggcccctgggctctcctctgtccaagattggcatcgagctgacagactcgccctacgtggtgaccagcatgcgcatcatgacgaggatgggcaccagcgtcctggaagcgctgggggacggcgagttcgtcaagtgcctccactccgtggggtgccctttgcctttaaaaaagcctttggttaacaactgggcctgtaaccccgagctcacactcatcgcccacctgcccgaccgccgaaaaatcatctc

SEQ ID NO: 4175 - DNA, 417 bp, Bos taurus
  Clone ID: 18-LIB34-016-Q1-E1-E5
ccaggctcggagccccgggcccgccgacaccatgagttggtcctcgcaccctccgagtgtaatcttctacattctttcattgctttcttcagcatgcctggcatatgttgctacccgagacaactgctgcatcttagatgaaagatttggtagttattgcccaactacctgtggaattgcagatttcctgaataattaccaaaccagtgtagacaaagatctacgaactttggaaggcatcttatatcacgttgagaacacaacatcagatgccagagagctggtcaaagcaatccaaatcagctataaccctgatcaaccatcaaagccaaataacatacagagtgctaccaagaattccaagagtatgatggaagaaattatgaaatatgaaacactgatatcaacacatgaatc

SEQ ID NO: 4176 - DNA, 411 bp, Bos taurus
  Clone ID: 18-LIB34-016-Q1-E1-E9
cagaagcttcacactgagaggcaggcagagaacatcacacacagctgaaaggaaactcagaggagggaatcgccaagaaaagtggccatggagctaatcccaaacttttccgtggaaacctgggttctcctggctatcagcctggtgctcctctatctatatggaacttattcacatggactgtttaagaagctgggggttcctggcccaagacctctgcctctttttggaaacgttctatcctaccgaaagggtgtttgtgagtttgatgaagaatgttttaaaaagtatgggaaaatgtgaggaacctgacgaaggaagcagagaaaggcacgtccgtcgacatgaaagacgtctttggggcctacagcatggatgtgattactagcacatcatttggagtgaatattg

SEQ ID NO: 4177 - DNA, 403 bp, Bos taurus
  Clone ID: 18-LIB34-017-Q1-E1-E5
gtgagggaatttttggtgaggccaacttcagggtgttcttgtaaactcttatctgaggaggaactaatgctatttcagatcaaagcagtcttcctccctaagaaactacccaaggaacaatgatagagtcttcttcctcggctgtctgcagcagaaaagtgtcaatgaagcatcagcgagttccagttatgatccttcatagcaaggggacaatggcatcctggcccttctctaggctgtggagtatctctgatccaattctgttccaagtgaccttggttgctactctgttggccactgttcttggcagttgtggtattccaccctatttagactttgcttttccaataaatgagttgaatgagacgaagtttgaaactggaactactctgagatacacctg

SEQ ID NO: 4178 - DNA, 402 bp, Bos taurus
  unsure (321): unsure at all n locations; Clone ID: 18-LIB34-017-Q1-E1-E9
gagaagacaccagtgagtgaaaaagtcaccaagtgctgcacagagtcattggtgaacagacggccatgtttctctgctctgacacctgatgaaacatatgtacccaaagcctttgatgagaaattgttcaccttccatgcagatatatgcacacttcccgatactgagaaacaaatcaagaaacaaactgcacttgttgagctgttgaaacacaagcccaaggcaacagaggaacaactgaaaaccgtcatggagaattttgtggcttttgtagacaagtgctgtgcagctgatgacaaagaagcctgctttgctgtgganggtccaaaacttgttgtttcaactcaaacagccttagcctaaacacgacacaaccacaggcatctcagcctaccctgagag

SEQ ID NO: 4179 - DNA, 404 bp, Bos taurus
  Clone ID: 18-LIB34-019-Q1-E1-E9
agatacgaaattgctagaagacatccctacttttatgcaccagaactcctttactatgctaataaatataatggagtttttcaagaatgctgccaagctgaagataaaggtgcctgcctgctaccaaagattgaaactatgagagaaaaagtactgacttcatctgccagacagagactcaggtgtgccagtattcaaaaatttggagaaagagctttaaaagcatggtcagtagctcgcctgagccagaaatttcccaaggctgagtttgtagaagttaccaagctagtgacagatctcacaaaagtccacaaggaatgctgccatggtgacctacttgaatgcgcagatgacagggcagatcttgccaagtacatatgtgataatcaagatacaatctccag

SEQ ID NO: 4180 - DNA, 400 bp, Bos taurus
  Clone ID: 18-LIB34-020-Q1-E2-E5
ggaatatcgtgcggctcaagcccagctgagtgaggcaagggagcgttaccagcagggaaacggtggagtaactgaaatgaccagaatcctgtctgaggttacagaagagctagaacaggtgaaacaacaaatggaagaataatgcagcagtatgaccgacggtgctcctctggtgaatacttcacagatcttatcaatgctgaatcaagaaactgttcagatggacattagaatccgtgttctggaacatacattactccagtctacattgaacgatcagtccaacatgacatagagacatacatgccagaatcattcctagaactgcaatatgctcgtattactacataccatttatcatgcttctgatcactggtgttttagagaaaatcatatttca

SEQ ID NO: 4181 - DNA, 299 bp, Bos taurus
  Clone ID: 18-LIB34-021-Q1-E1-E5
ggccgccttacgtgccctgctgccccgcgtccgcgccccgctgcggccctggctcttctgcccggtgcagcgctccttcgcctcgagcgcagcctttgagtacatcatcacagcatagaagggaaggaacagcaacgtggggttgatccagctgaaccgccccaaggccctcaatgcgctctgcaacggcctgatcgtggagctcaaccaggcactgcatgccttcgacgaagacccatccgtgggggctattgtcctcacaggcggagagaatgtatatgcagctggagccgacatca

SEQ ID NO: 4182 - DNA, 393 bp, Bos taurus
  Clone ID: 18-LIB34-022-Q1-E1-E5
agataactgtgatacaccagtaggaagtgaaagtttacaaccttctcttccacaaaagaagctctgacgaaagagatgcataaatcagttactctgacagtttcccaaagattcagaatctgctttgagtagctgctgttgccactgtcgacatctggtatttgaaaaaacagggtctgcaatcacctgacagtgtacagaaaagctcccctctttgtgtagctgacagggccttttggcggaggagaatgtcattgaatcttgacagtgacgtttgcctccagctgcctgacaggcagcaggtcagcagctcaaccccacagaagccagcaccaagtgaagctgaaaaaataaggccaaaaatgtgaaaatgaccttcaaattaaatatatg

SEQ ID NO: 4183 - DNA, 435 bp, Bos taurus
  unsure (267),(330),(410): unsure at all n locations; Clone ID: 18-LIB34-022-Q1-E1-E9
accccacaaaactttggcacaatgaagtgggtgacttttatttctcttctccttctcttcagctctgcttattccaggggtgtgtttcgtcgagatacacacaagagtgagattgctcatcggtttaaagatttgggagaagaacattttaaaggcctggtactgattgccttttctcagtatctccagcagtgtccatttgatgagcatgtaaaattagtgaacgaactaactgagtttgcaaaaacatgtgttgctgatgagtcncatgccggctgtgaaaagtcacttcacactctctttggagatgaattgtgtaaagttgcatcncttcgtgaaacctatggtgacatggctgactgctgtgagaaacaagagcctgaaagaaatgaatgcttcctgagccacanagatgatagcccagacctccctaaa

SEQ ID NO: 4184 - DNA, 341 bp, Bos taurus
  Clone ID: 18-LIB34-023-Q1-E1-E5
ggcacggcatcgagtccacgctggagcgcagcgccatcacgcgggagcacatgggccggctgctgcaccagctgctctgtgctgggcacctctccactgctcagtactaccaagggctatatgaaattctagagttggctgaagacatggaaattgacatccctcatgtgtggctctacctagcagaattgataacgcccattctgcaggaaggtggggtgccaatgggggagctgttcagggaaataacaaaacctctgagacccctgggcaaggctgcctccctgttgctggagatcctggggctcctgtgcaaaagcatgggtcctaaaaaggtgggg

SEQ ID NO: 4185 - DNA, 335 bp, Bos taurus
  Clone ID: 18-LIB34-024-Q1-E1-E5
cgggagtactgaagcaggaagtcaagccagaggcctttgccttctccactgtggaaatgtcatccacctgaaaaccccaccctggtacccttttccctcccggaccagtacagaaaatgttagaaatattcagaagaaagaacttacggctttagaaaagattggggtgtctgatctgatttgttttggccccacggatgttccaagacagatcaggccttttggttaacacagatagggagagtgggagccatgggttttcctaagagggcatgtagaattggccagtcgcaagcctcagatgtccgaagtcagtgctcatatttagctggccg

SEQ ID NO: 4186 - DNA, 249 bp, Bos taurus
  Clone ID: 18-LIB34-024-Q1-E1-E9
tatattgactcctattagatggcattggagtccattctccgaggttccgggagttagtggctgaattctcccgcatggccatggacccccaacgctttgtggtcatccaggagcaagacatctggcctgctaccccaatggaggagaccttctaacgctcgctgctggacgatgacgacatgggccacctggtggatgccgaggagtccctggtacaccatcatggcctcttctgcccataccctcccc

SEQ ID NO: 4187 - DNA, 401 bp, Bos taurus
  Clone ID: 18-LIB34-026-Q1-E1-E5
ggcgaaggacgcggtttctggaggcgaagaacgcggttggccaatcgcaagccagaagatgaaggttctgtgggttgccgtggtggtcgcgcttctggcaggatgccaggcggatatggagggagagctggggcccgaggagcccctgactacccagcagccccgggggaaggacagccagccttgggagcaggcgctgggccgcttctgggattacctgcgctgggtgcagaccctgtctgaccaggtgcaggaggagctgctcaacacccaggtcattcaggaactgacggcgctgatggaggagaccatgaaggaggtgaaggcctacaaggaggagctggagggacagctaggccccatggcccaggagacacaggcccgcgtgtccaaggagctgc

SEQ ID NO: 4188 - DNA, 382 bp, Bos taurus
  unsure (364): unsure at all n locations; Clone ID: 18-LIB34-027-Q1-E1-E5
ggaatgggttccttctccaggggatcttcccgacccagagatggaatctgtgtctcctgtttggcatgtggattctttaccgctgatccacctggaaagcccctacatatatctataaataaaaccatcttttccccccaaaactgcaaattgcttggtttattgtttcagttgatagttgtcatgaggaactgccaatgttatacatgatgatccaactctttttttctctatcttataatcttcctgctttttgttttgttttaaatttatttcattttctctaactcctttgccatttccttggtctgatcatctctgtggctcacctggccaactacaatagtcctcttaatcaatctcnctgtttctcctctgttca

SEQ ID NO: 4189 - DNA, 342 bp, Bos taurus
  Clone ID: 18-LIB34-028-Q1-E1-E5
atcctatacagcagaaaatttcccagtggcacctttgaacagatcagccatcttgtgaatgaagttgtttccttaacagtaacctgctgtgcggaaggggccgatcctgactgctatgacaacaggacttcagcattgtctgacaagtcctgtgaaagcaactctccattcccagtgcaccctggaactcctgagtgctgcacccatgagggccttgaaaagaagctctgtatggctgccctgaagcaccagccacaagaatttccaacttacgtagagccaacatatgacgagatctgtgaggcattcaggaaagatcccaaggacgttgctgatcgattt

SEQ ID NO: 4190 - DNA, 414 bp, Bos taurus
  Clone ID: 18-LIB34-028-Q1-E1-E9
aaaaaactgaacaagaatgtggtttttgtgattgacatcagctcctccatggaaggccagaaactgaagcagaccaaggaggcgctccataaaatcctgggggacatgcggccaggggactacttcgacctggtcctctttgggtctgcagtgcagtcatggaagggttcgctggtgcaggcatctcctgccaacctggaggcagctcggaacttcgtgcagcaattctccctggccggagctacaaacctgaatggaggtctgcttaggggaattgagatcttgaacagagctcagcacagtctcccagaactcagcagccacgcctcaattctcatcatgttgacagatggcgagcccacagaaggggtgatggatcgtaaccaaatcgtcaagaatgtccgagatggcatc

SEQ ID NO: 4191 - DNA, 399 bp, Bos taurus
  Clone ID: 18-LIB34-029-Q1-E1-E5
ccacgactggccatctgatctataaatgtggcgggatcgacaagagaacaattgaaaagttcgagaaggaggctgccgagatgggaaagggctccttcaaatatgcctgggtcttggacaaacttaaagctgaacgtgagcgtggtatcaccattgatatctccctgtggaaatttgagaccagcaagtactatgttaccatcattgatgccccaggacacagagacttcatcaaaaacatgattacaggcacatcccaggctgactgtgctgtcctgatcgttgctgctggtgttggtgaatttgaagccggtatctccaagaacgggcagacccgtgagcatgcccttttggcttacaccctgggtgtgaaacaactaattgttggcgttaacaaaa

SEQ ID NO: 4192 - DNA, 419 bp, Bos taurus
  Clone ID: 18-LIB34-030-Q1-E1-E9
agtggctgtcggtactgcacctcctcttacttcccgcgtcactgctgccgccatgcccggaggtctcctcctcggggacgaggctcccaacttcgaggcaaatactaccatcggccgcatccgtttccacgactatctgggagactcatggggcattctcttctcccatcctcgggacttcaccccagtgtgtaccacggagctcggcagagcagcaaagctggcaccagaatttgccaagagaaatgtcaagatgattgctctttccatagacagtgtggaagaccatcttgcatggagcaaggatatcaatgcttacaatggtgaagagcccacagaaaagttaccttttcccatcattgatgataagaatcgggaccttgccatccagttgggcatgctggacccagcagagaaag

SEQ ID NO: 4193 - DNA, 363 bp, Bos taurus
  Clone ID: 18-LIB34-031-Q1-E1-E5
gatggttgtccagaaaatgaatctaagttcagctttaaagataccaaaaattcaaataaaccccactgtagctttaaaagttagtctaaaaaggtacagccttttacaaacggatacaaccttgactagagagtaaaatttaacactaccatagtaggcctaaaagcagccatcaattaagaaagcgttaaagctcaacaacaaaaattaaatagattccaacaacaaatgattaactcctagccccaatactggactaatctattatagaatagaagcaataatgttaatatgagtaacaagaaagattttctccttgcataagttcaagtcagtgcctgataatactctgaccactaacag

SEQ ID NO: 4194 - DNA, 365 bp, Bos taurus
  Clone ID: 18-LIB34-032-Q1-E1-E5
tcgagggacgagtcaggcatccgactcgcatcagatcattgtcatgactggtaagaggaattaggaccagggctcgcagtatcacgtcatgatacagttcattctggccagcttcctgcttctgccctttctgcgcgtctgcatcgtacagtctctcctgaagctttttagtcctaacacagacaaaatcattcaccggggagattgtccttattaccggacctggaaacggtattgacaagcagactgcctacgaattttccaaccttagatgcaagctggtcctgttgggattaaataggcatggactttaggaaacatcaaccgaatgcaagagactgggttggaaaggtcagacctttgtg

SEQ ID NO: 4195 - DNA, 418 bp, Bos taurus
  Clone ID: 18-LIB34-032-Q1-E1-E9
gatgtaacaatgttggtgttcgcatttatgtggatgctgtaattaatcatatgactggaagtggtgtgagtgcgggaacgagcagtacttgtggaagttacttcaaccctggaactagggatttcccagcagtcccatactctggatgggattttaatgatgaaaaatgtaatactggaaatggagaaattaaaagctatgatgttgcttatcaggtcagagattgtcgtctggttggtcttcttgatcttgcattggcgaaagattacgtgcgctccacagttgctgaatatctaaaccgactcattgacattggtgtagcagggttccgaattgatgcttctaagcacatgtggcctggagacataaaggcagttttggataaactgcataatctaaacacaagctggttccctga

SEQ ID NO: 4196 - DNA, 357 bp, Bos taurus
  Clone ID: 18-LIB34-033-Q1-E1-E5
ggcccgcctgccgctgcggggccaccatgctcctgcccaggcctggagactgaccctaaacccgcaccatctctcagctccgcccccacctgccggaccccagggtcccgccccggccccggaggtcagccggggaatcattaactagaggctgtgacatggcggagaaggagggtggccggactgtgccatgctgctccgggaccaacgtggccgctctcactgtggggaccgtcctgctcctgacaggcatcggggcagcgtcctgggccattggtgactgttctactcaggagtgatcacgagccagtggtatccagtgcaggtcggccccgcggatgctcggctcacggtgtt

SEQ ID NO: 4197 - DNA, 421 bp, Bos taurus
  Clone ID: 18-LIB34-034-Q1-E1-E9
aaggttttcctcagcaccagaagaggggcttgggtcctcaatcgtgtaggagactatggatatccttttgatacaattttgtcatctcgatttaatcatttgctgaagaagattattggtgaatcagcaacaaatagatatttggaagaacagattaaccaaaggtttaatcatgaaatgtttggcctgaagcctaaacacagagctctcagtcagcatccaacaatacatgatgacctgccaaaccgtataatttctggctttgtgaaggtgaaaacacatgtgaaggagttcatagagacagcagccatatttgaagacggctccagggaagatgacattgatgctgttatctttgctacaggctatagctttgcatttccttttcttgaagattctgtcaaagtagtcaaaaataagg

SEQ ID NO: 4198 - DNA, 431 bp, Bos taurus
  Clone ID: 18-LIB34-035-Q1-E1-E5
gatttttgaaccttaaacagtacaactggagtatttgtgtgaatgtaccactgggaaaatctaacatgttgatgttaatcaatgtccttctcaccttgtggttttacactgctcatggacaggggaaacattgtaattatccagtaataagacatggacggctatatcagtcatacagtggatactttccagcacgtgtaaatcaacagtttctctataactgtgatcagtattttgtgcctccttcactatattcctcggattacctgacttgcacagcagaaggatggtttccagaagaaccatgccttagagaatgtattttcaataatttggaaaatggatataccccaagtagtgaaagaaaagctgtacagggtgaaacagtaagggttcgctgctattatggctacagtcttcaaaataatcag

SEQ ID NO: 4199 - DNA, 403 bp, Bos taurus
  Clone ID: 18-LIB34-036-Q1-E1-E5
cggacgcgtgggctccgcttcctcctttcctcaggcatcaaagcagagaccacgggaacctagttcaccaggctcgaggctggaggccccgccatgacatccctaaggccccttctgatgctggccctgctggcgtgggttgttgtggctgaccaagagtcctgcaagggccgctgcaccgagggcttcaacgccaccaggaagtgtcagtgtgacgagctctgttcttactaccagagctgctgtgccgacttcatggctgagtgcaagccccaagtgactcgtggggatgtgttccatctgccagaagatgagtacgggttccatgactacagcgacgcgcagaccgtcaacagcaacgtggaagcacagcccgagagcaccaccctggcccctggtctgc

SEQ ID NO: 4200 - DNA, 409 bp, Bos taurus
  Clone ID: 18-LIB34-036-Q1-E1-E9
cggacgcgtgggctagttctagatcgcgagcggccgccctttttttttttttttcatctacacagtgtttttatttttattcaactataagcaaacagcaaaattaaggacaatattcaccaactccagaacagttttcttttttaaaccaaagtgtgattaatttaacaagcacagactttcagattctgataacctcttacccaacccagccctgctgctcatctagatggccaggctttaacagcaaagcaatttcttctatggagctttttccagtattgctctttaaaggagccacagtgggacactgacacgcagtaaccagcctgagacgttgggggtcccctggttgtcttggtgagacagagccgtgaaaacacatgccagtaggtaccttcacacacaa

SEQ ID NO: 4201 - DNA, 409 bp, Bos taurus
  Clone ID: 18-LIB34-037-Q1-E1-E4
aaataaaactgggttgttgggtatattttggaagtgtgccagaattggtgaacggaagagtccgtatgttgcagtgtgctgtatcgtgatggccttcagcatccttttcatacagtagcttggaacaacgccagaattccagtcgctatcagatttaaatatgacaaaaaaggactgatctgccgaaaatagtggaaagaatggttaacccttttatctctcaacattgaatgagctacactttcagctgctgttctccatttttgttattggaccaatgttctatataaataattaggatgtaacatttaatacgcatagttgaaatgtgtctgtaacaatcaacctcagtactgtcgctacaatattacattctgcatatgtcattcttttgtgctagataccagtc

SEQ ID NO: 4202 - DNA, 410 bp, Bos taurus
  Clone ID: 18-LIB34-037-Q1-E1-E9
ttaaaatactgattggcatggaatattttaaatgaagtgattctaacttgtgatttggattgggatccatagggaagcacatgcaccaaccaagatacaaaatgtcttgaaatgatattaccaaaattttaagtaggaaagttacctgaacacttctgcttccacttaactgactggcccgcaatattgtaggaacagcatgtcctttgtactgtggtattcagaacagccacagtactcactttttccaaatgattctagtaattgcctagaaatatctttttcttacctgttatttatcaatttttcccagtatttttatatggaaaaaaaattgtactgaagatacttagtatgcagttgataagaggaatctggtctaattatggttggtgattattttttatact

SEQ ID NO: 4203 - DNA, 427 bp, Bos taurus
  Clone ID: 18-LIB34-038-Q1-E1-E5
agtagaggctactttgccttccctcttctttctcagccattttgtaaaccccgtaattatgaagcggttgcttgagaaaataacagataaacatagaatagactgaccaagatggtttagagtttgtttttttttttaactaggttatttataatgtatttctgaaccacttggcagagaaatttacaacacttaatgttcatattttgagtaaagaaagctaaaaccttgtctgcttttttggtactacatgcattagtaaaaggttaagttttgttctccactgcagtaatatttaacatctcagaaaaaaaaaaaatcttgcatgttctgtagttttgtattaagtcagtcttttcatatgcactatttcaagtgaaaacaggtggtttgcctgtctacattagtatcctaacaggttccccct

SEQ ID NO: 4204 - DNA, 411 bp, Bos taurus
  Clone ID: 18-LIB34-038-Q1-E1-E9
caagaaggcatcctgaatatgctgtctcagtgctattgagacttgccaaggaatatgaagccacactggaggaatgctgtgccaaagatgatccacatgcatgctattccacagtgtttgacaaacttaagcatcttgtggatgagcctcagaatttaatcaaacaaaactgtgaccaattcgaaaaacttggagagtatggattccaaaatgcgctcatagttcgttacaccaggaaagtaccccaagtgtcaactccaactctcgtggaggtttcaagaagcctaggaaaagtgggtactaggtgttgtacaaagccggaatcagaaagaatgccctgtactgaagactatctgagcttgatcctgaaccggttgtgcgtgctgcatgagaagacacagtgagtgaaaa

SEQ ID NO: 4205 - DNA, 427 bp, Bos taurus
  Clone ID: 18-LIB34-039-Q1-E1-E5
cgagaaaaacaggaaaaaggaatggcaaatttggctcaattagaagcattgtatcaatcttcttgggatagccagtttgtgggtggtggggaggactgttttctcataaatcagttttgttgtgaggtaaggaaagatgagcaaattgaaaaggaaaacacttataccagttacctggacaagttttttagcaggaaagaagatactgaaatgctagaaactgagccggtagaggatgggaagcttggggagagaggaaatgaggaaggatttctgaacagcagtggggagttcctcttcaacaagcagcttgaatccataggcatcccacagtttcacagtccagttgggtcaccacttaagtcaatacaggccacattaacaccttctgctatgaaatcttcccctcagattcctcataagacat

SEQ ID NO: 4206 - DNA, 423 bp, Bos taurus
  Clone ID: 18-LIB34-040-Q1-E1-E5
agaggtcggagatcatgcctgtgttagcggcccttctgcggcgcggccccctgcttcagaggcgggtgcaggaaataaggtatgcggagcgaagttatgtatcaaaacccactttgaatgaagtggtcatagtaagtgctataagaacacccattggatcctttctaggcagtctttcctctctgccagccactaaacttggttccattgcaattcagggagccattgaaaaggcagggattccaaaagaagaagtgaaagaagcatacatgggcaatgttctacaaggaggtgaaggacaggcccctacaaggcaagcagtactgggagcaggcttacctatttctactccatgtaccactataaacaaagtttgtgcctcaggaatgaaagccatcatgatggcctctcagaatcttatgt

SEQ ID NO: 4207 - DNA, 418 bp, Bos taurus
  Clone ID: 18-LIB34-041-Q1-E1-E5
agtaaactgaaggaatgctgtgataagcctttgttggaaaaatcccactgcattgctgaggtagaaaaagatgccatacctgaaaacctgcccccattaactgctgactttgctgaagataaggatgtttgcaaaaactatcaggaagcaaaagatgccttcctgggctcgtttttgtatgaatattcaagaaggcatcctgaatatgctgtctcagtgctattgagacttgccaaggaatatgaagccacactggaggaatgctgtgccaaagatgatccacatgcatgctattccacagtgtttgacaaacttaagcatcttgtggatgagcctcagaatttaatcaaacagaactgtgaccaattcgaaaaacttggagagtatggattccaaaatgcgctcatagttcgttaca

SEQ ID NO: 4208 - DNA, 415 bp, Bos taurus
  Clone ID: 18-LIB34-042-Q1-E1-E5
aggagcattgagatctttggacaatttaatgggcgaaagtgtgtggacgccgtgggagaccgacagcagtgtgtacccacagaggcctgcgaagaccccgaggagggctgtggcaacgatttccagtgcggtacaggcagatgcataaagaatcgacttctgtgtaatgaagacaatgactgcggagactattcagatgaggataactgtgaacaggatcctcgtcccccttgccgcaaccgagtggtggaagagtcagagctggcacggacggcaggatttgggatcaacatcttaggcatggatccgctcagcaccccttttgacaaccagtactacaatggactctgtgaccgagtttgggacggcaacaccttgacgtactaccgcaggccctggaacgtggcttcgctga

SEQ ID NO: 4209 - DNA, 396 bp, Bos taurus
  Clone ID: 18-LIB34-042-Q1-E1-E9
aggcctctccagctcaccatggctcgggcattgagagtgccagttgcactgtggctgttgggcttgtgctggtctttggctaaagcccaccctctggctagagctcctgagcttgggcacggagttgaaggtgggaatgtggccaagccggatccagaagtgacggaacgctgctcggatggctggggctttgatgctaccaccctggatgagcatgggaacatgctgtttttaaaaggggagtttgtgtggaagggtcatgcctgggcccggcagttgatctcagagaggtggaaggatgcccccagtcccgtggatgctgcattccgctatgatcgtaacagtgtccttctgatcaagggggacaaattctgggtatatcctcctgaaaaaggg

SEQ ID NO: 4210 - DNA, 405 bp, Bos taurus
  unsure (334): unsure at all n locations; Clone ID: 18-LIB34-043-Q1-E1-E5
acggacgcgtgggggctgaagctagttaacatcagtgtcttggctcccaactggctcccaattcctggtgaaactcctaaagggagactgttaaatcatgaaattaatcaccatccttttcctttgttccaggctgctaccaagtttaacccaagagtcttctcaagaaatcgactgcaacaaccaggatgtatttaaagctgtggacgctgctctgacaaaatacaacagtgaaaacaagagtggcaaccagtttgtattgtaccgcataaccgaggttgccagaatggataatcctgacacattttattccttgaagtaccaaatcaagganggcgactgtccttttcaaagtaacaaaacttggcaagactgtgactacaaggactctgcacaagctgccac

SEQ ID NO: 4211 - DNA, 397 bp, Bos taurus
  Clone ID: 18-LIB34-044-Q1-E1-E5
aaacaaatatccataaatgagaaatcaaagatgaatcccagacaaatggcagttacaaaatcaggcaaataataattaaaataatggaatatacatatatacatatacagccatgaacaaagtctaagcagtccatcaaaataaaatacagcagattaacctggtgaacagaaaaataggaaaattatatttaccagtcaagaacagaactaactaaagcacagactggaaaacacaactaaagcaatgtgccatgtggggaataaagcaacgaaaacaaaactaacaaatatgttgagaggaaagaaaagaaagaatagatatgcaaagttaaatagaggtagattaagaagatttatatacattaaagattaactgcaagggggaaagaacagta

SEQ ID NO: 4212 - DNA, 388 bp, Bos taurus
  Clone ID: 18-LIB34-045-Q1-E1-E5
gatggcgatccagagcgatggcaagaaggggagcaaagttttcatgtattacttcgataatccaggtggccagattccgtcctgggtcattaactgggctgctaagaatggagttcctaacttcttgaaagacatggtgaaagcctgtcagaactacaagaaaacctaggggaggaagctgggagctttgtgtccatgggatgctgttccttgaagtgcgacggcccccgatgctcagcctgcctttcccttttctgtgctcagaagcctgcacactctctagcactttgtccccgagcgtgtttgcctgacatctgctccctttcccagtctccccaccccgggacccactgccttcctccacgctggaatgtgggtcagattattg

SEQ ID NO: 4213 - DNA, 372 bp, Bos taurus
  Clone ID: 18-LIB34-046-Q1-E1-E5
ggcggctgggaccctgtacacatatcctgaaaactggagggccttcaaggccctcattgccgctcagtacagcggggctcaggtccgcgtgcgctccgcaccaccccacttccattttggccaaaccaaccgcacccccgaatttctccgtaaatttcctgctggcaaggttccagcctttgacggtgactatggattctgtgtgttcgagagcaatgccattgcctacgatgtgagcaaccaggatttgccgggaagtactcccgaggcagcagcacaagttgtgcagtgagtgagctttgctgatatccacatagtgccaccggccaacacctgagtgttccctaaccttaggcattatgcaacacacca

SEQ ID NO: 4214 - DNA, 274 bp, Bos taurus
  Clone ID: 18-LIB34-046-Q1-E1-E9
atcactttggcagaatgagctgtgtgacatatagtacacatcgccctcgcctcagcgctgcctattctaggggtgtgttacgtccagatacataccagagtgagattgctcgagcagtttaaagattcgggagatgaagacttaatgcgccaggaactcagtgcctattctcagtaactcgaacagtatccaatttataagcaggtaagattagtgagacaactaacttagttgacgcatgcatttatagctgaagtattcacacgcgggccgt

SEQ ID NO: 4215 - DNA, 436 bp, Bos taurus
  Clone ID: 18-LIB34-047-Q1-E1-E5
gataacattccccagctcgaagaggtttctcagtttctgcagagttgcactggtttccgcctccgaccagtcgctggcctgctttcttctcgggatttcttgggtggcctggctttccgagtcttccactgcactcagtacatcagacatgggtctaagcccatgtatacaccagaaccggacatatgccatgagctcttgggacatgtacctttgttttcagatcgcagctttgcccagttttcccaggagatcggccttgcctccctgggtgcacctgatgagtacattgaaaaacttgcaacaatttactggtttactgtggagtttgggctctgcaagcaaggagactccataaaggcatatggtgctgggctcctgtcatcctttggtgaattacagtattgcctatcagacaagcgaaagctccttcctc

SEQ ID NO: 4216 - DNA, 351 bp, Bos taurus
  unsure (337): unsure at all n locations; Clone ID: 18-LIB34-048-Q1-E1-E5
gtcttcagctgattggcaacacttcatggaggtaatatcaaatggtctcctgctataatgtgagccctaggctttattttcttatttacagtagggggtttaactggaattgtcttagccaactcttccctcgatattgttcttcacgacacatactacgttgtcgcacatttccactatgttttatcaataggagctgtatttgctattatagggggatttgttcattgattcccactattctcaggttatactctcaacgatacatgagccaaaatccacttcgcaattatatttgtaggcgtcaatataaccttctttccacaacactttctangactatctggcatg

SEQ ID NO: 4217 - DNA, 383 bp, Bos taurus
  Clone ID: 18-LIB34-049-Q1-E1-E5
aaagcgctctcctcgtccatcctcatccgtgttaggtgcagtccgggacaccaggaagatggcaccggctgggggcaaaaatgtcaagaagggcatcctagaacggctaaactctggagaggtcatcatcggagacggagggtttgtctttgcgctggagaagaggggctacgtgaaggcagggccctggaccccagaagctgctgtggaacacccagaagcagttcgccaacttcatcgagagttcctcagagctggctcgaatgtcatgcagaccttcaccttctatgccagtgaagacaagctggagaacagggggaactatgttgcagagaaaatatccgggcagaaagtcaatgaagccgcttgtgacattgcccggc

SEQ ID NO: 4218 - DNA, 338 bp, Bos taurus
  Clone ID: 18-LIB34-049-Q1-E1-E9
tacgattttggcgatgattctagtgacaagtttttcacatcccataatggcatgcagttcagtacttgggacagtgacaatgataagtatgatggcaactgtgctgaacaggatggatctggttggtggatgaacaaatgtcacgctggccacctcaatggagtttattatcaaggtggcacttactcaaaaacatctactcctaatggttatgataatggcattatttgggccacgatggaaacccggtggtagtccatgaacaaaaccaccatgaagatggtgtcacttagtagacttgccatcggagaaggagagcgccaccaacgtggggggag

SEQ ID NO: 4219 - DNA, 370 bp, Bos taurus
  Clone ID: 18-LIB34-050-Q1-E1-E5
aaagtactgacgtcagctgccatacagagactcacgtgtgccagtattcaagaatttggggaaagagctttaaaagcatggtcagtagctcgcctgagccagaaatttcccaaagctgagtttgtagaagttaccaagctagtgacagatctcacaaaagtccacaacgaatgctgccatggagacctacctgaatgcgcagatgacagggcagatcttgccaagtacatatgtgataatcaagatagaatctccagtaaactgaacgaatgctgtgataagcctttgttggaaaaatcacactgcattgctgaagtagaaaaagatgccatagctgaaaacctgcatccattaattgatgactttgctg

SEQ ID NO: 4220 - DNA, 229 bp, Bos taurus
  Clone ID: 18-LIB34-051-Q1-E1-E5
aaccgctgactattctcaaccaaccataaagatattggtaccctttatctactatttggtgcttgggccggtatagtaggaacagctctaagccttctaattcgcgctgaattaggccaacccggaactctgctcggagacgaccaaatctacaacgtagttgtaaccgcacacgcatttgtaataatcttcttcatagtaataccaatcataattggaggattcggta

SEQ ID NO: 4221 - DNA, 234 bp, Bos taurus
  Clone ID: 18-LIB34-052-Q1-E1-E5
cctcgagcagggagctggtggctcttccatccccagaccagccaagcctgtgagtgacaccccagacagaggaaccagagccatgcggagtctcagcggactgctgttgttactgactgcctgcctggcggtaaacgccagctccgtgcccacattgcccgatgacattcaagtgcaggagaacttcgacctgtctaggatctatgggaagtggttcaatgtggccgtgggctc

SEQ ID NO: 4222 - DNA, 350 bp, Bos taurus
  Clone ID: 18-LIB34-055-Q1-E1-E5
ctcggagccccgggcccgccgacaccatgagttggtcctcgcaccctccgagtgtaatcttctacattctttcattgctttcttcagcatgcctggcatatgttgctacccgagacaactgctgcatcttagatgaaagatttggtagttattgcccaactacctgtggaattgcagatttcctgaataattaccaaaccagtgtagacaaagatctacgaactttggaaggcatcttatatcaggttgagaacaagacatcagaagccagagagctggtcaaagcaatccaaatcagctataaccctgatcaaccatcaaagccagataacatagagagtgctaccaaa

SEQ ID NO: 4223 - DNA, 368 bp, Bos taurus
  unsure (272): unsure at all n locations; Clone ID: 18-LIB34-056-Q1-E1-E5
gctgattaatctcaaccaaccataaagatattggtaccctttatctactatttggtgcttgggccggtataataagaacagctctaagccttctaattcgcgctgaattaggccaaccctgaactctgctcggagacgaccaaatctacaacgtagttgtaaccgcacacgcatttgtaataatcttcttcatagtaataccaatcataattggaggatactgtaactgacttgttctcctaataattggtgctcccgatatagcattatcnccgaataaataatataagcttctgactcctctctccctcattcctacgactcctcgcatcatctatagttgaagctggggcaagaacaggctgaac

SEQ ID NO: 4224 - DNA, 254 bp, Bos taurus
  Clone ID: 18-LIB34-058-Q1-E1-E9
gtccggaactcgcgggtaaacacaagcctctacaatgacgtcctattacgcgtccgcttgaatgcgcagatgacagggcagatcttgccaagtacatatgtgataatcaagatacaatctccagtaaactgaaggaatgctgtgataagcctttgttggaaaaatcccactgcattgctgaggtagaaaaagatgccatacctgaaaacctgcccccattaactgctgactttgctgaagataaggatgtttgc

SEQ ID NO: 4225 - DNA, 202 bp, Bos taurus
  Clone ID: 18-LIB34-059-Q1-E1-E5
ctgcatcttagatgaaagatttggtagttattgcccaactacctgtggaattgcagatttcctgaataattaccataccagtgtagacaaagatcgacgaactttggaaggcatcttatatcaggttgagaacaaaacatcagaagccagagagctggtcaaagcattccaaatcagctataaccctgatcaaccattcaaa

SEQ ID NO: 4226 - DNA, 206 bp, Bos taurus
  Clone ID: 18-LIB34-059-Q1-E1-E9
gacccagcgagctccgcgtccgcgtgtcggtctgcccttctgtccgtccgctacgggaggcttccgccgcgggtgttttctgctgcagaacctgagaccatggccaaaccagcacagggtgccaagtaccggggctccattcgtgacttccccgacttcaaccccagccaggatgccgagactctgtacaatgccatgaagggctt

SEQ ID NO: 4227 - DNA, 236 bp, Bos taurus
  Clone ID: 18-LIB34-060-Q1-E1-E5
gagccccgggcccgccgacaccatgagttggtcctcgcaccctccgagtgtaatcttctacattctttcattgctttcttcagcatgcctggcatatgttgctacccgagacaactgctgcatcttagatgaaagatttggtagttattgcccaactacctgtggaattgcagatttcctgaataattaccaaaccagtgtagacaaagatctacgaactttggaaggcatcttat

SEQ ID NO: 4228 - DNA, 362 bp, Bos taurus
  Clone ID: 18-LIB34-061-Q1-E1-E5
ggttctgaaaccctagaggacgcaactgtgagtgtctctgtcctagcctctcaacttgctttcctgtgtccaatagcactgcagactccagtactagcctgtccagagcagcaagtgagaggaaacaagccagcattgtaagaggacatgcttctcctccctctctccgtgctgctcctgctcacacagccctggagatccctgggagcagaaatgacaaccttttctcagaaaatactggccaatgcctgtaccctggttatgtgtagccccctggagagtggcttgcctggtcatgatggacaagatgggagagaatgtccccatggagagaagggggatccaggttcaccaggacctgc

SEQ ID NO: 4229 - DNA, 207 bp, Bos taurus
  Clone ID: 18-LIB34-062-Q1-E1-E5
tccgggtcagccaacgcgtccgcgctgacaattctaagcaaacataaagatattggtaccctttatctactatttggtgcttgggccggtatagtaggaacagctctaagccttctaattcgcgctgaattaggccaacccggaactctgctcggagacgaccaaatctacaacgtagttgtaaccgcacacgcatttgtaataatc

SEQ ID NO: 4230 - DNA, 242 bp, Bos taurus
  unsure (43): unsure at all n locations; Clone ID: 18-LIB34-064-Q1-E1-E5
ccacgcgtccgagtgcccactcctcgctcctcgtgcggcgtangcccctaccccggccatggccacgctcagggtcctgcccgaagcccaagccaaggtggatgtgttccgtgaagaggtacgtgctaagacatagaacctgctcgggagctattttcccaagaagatttctgagttggatgcagttttaaaagaaccagatctcaattacgccaagctcatccatgctacagccccattgg

SEQ ID NO: 4231 - DNA, 203 bp, Bos taurus
  Clone ID: 18-LIB34-067-Q1-E1-E9
tgcctgttctaagccccacgcagacacaggaagggtcacaaggccaagatccagggagatcaggaggccacaccccggcgcccctgagaagatagcatggaactgatccaggatacctcccgccctccagcaaagtatgtgaagggcatccctctcatcaagtactttgcagaggccctggggccactggagagctttgaagc

SEQ ID NO: 4232 - DNA, 209 bp, Bos taurus
  unsure (184): unsure at all n locations; Clone ID: 18-LIB34-069-Q1-E1-E5
ctagttctagatcgcgagcggccgcccttttttttttttttttagtcttaggaaacaaaatatttattgaaatggtatgtagataaattatcaccggcataaaactgttagtggagttctcaacatgggttctttttacttttaaagtgaagtgaggctttgcaagtccattgtcccatagganaaaatattatcctttttccttttca

SEQ ID NO: 4233 - DNA, 227 bp, Bos taurus
  unsure (210)...(211): unsure at all n locations; Clone ID: 18-LIB34-069-Q1-E1-E9
ggcggcggctctggatccactgcccacaccccgctctcgcaggcagacatgaggacagagagaacttccttcctcctggctctggggctcctggtgtctgggttctgctccagggtccactgcctcccagagaatgtgaccccagaagaacagcacaaagggacgtctgtggatggccactcattagcctcccagcaacactgacttcgnnccttcagcctctacaa

SEQ ID NO: 4234 - DNA, 392 bp, Bos taurus
  Clone ID: 18-LIB34-071-Q1-E1-E5
gaagtctctcaacagaatgacctgtctagtctgcccgcagggtgacaactatgagtttcgtctactttgttatgggtctcaccgtggctgccatatttactgccttcggcccaagatctaggctgtcccaaaacgatactggttctgtgctgtctgtcaggcccagcaagtacaaggagaattgactcagaaatctgctttcccaaaacgacgccagtaaacggcaaatcggttaagtgctgaccttcccatacggtgacaacagccgagctcaggctgctaccaaggtgccgagagagcccatcagtgccccggtagtcaaaagaaaggctgtccccctcgaaccaggcgcgattctccatgcgcaaccatcacactgatctcacattctg

SEQ ID NO: 4235 - DNA, 397 bp, Bos taurus
  Clone ID: 18-LIB34-071-Q1-E1-E9
agggcggcggctctggatccactgcccacaccccgctctcgcaggcagacatgaggacagagagaacttccttcctcctggctctggggctcctggtgtctgggttctgctccagggtccactgcctcccagagaatgtgaccccagaagaacagcacaaagggacgtctgtggatggccactcattagcctccagcaacactgacttcgccttcagcctctacaagcagttggctttgaaggaccccaataagaatgtcatcttctcccctctgagcatctccatagccttggccttcctgtccctgggggctcatgaccacactgtgacagagatcctggaaggtctcaagttcaacctcacagagacccccgagacagaaatccaccagggctt

SEQ ID NO: 4236 - DNA, 385 bp, Bos taurus
  Clone ID: 18-LIB34-072-Q1-E1-E5
agttctagatcgcaaacggccgccctttttttattttttgactcactattgacagaagatattgatgtatgctggtacgttcatgaattatcaccatgcattcctgtgctcgtgtatgtctcaacattcattcttgtaacctgaatattctgtcgcagttctactgatacatgctaccgtatgtgaagccacaccgtatgcatgccataccaagttcgttacacatgtatgccactctacagtgtttgatatacctacccatcatgtggatgatcctcacactttactccgcctgaactgtgacaatctccattcacttgatgagtatagattccctggtgcactcaatattcgttacatcatactgtgtaccccaagtgtcaac

SEQ ID NO: 4237 - DNA, 414 bp, Bos taurus
  Clone ID: 18-LIB34-073-Q1-E1-E5
agggagagctggggcccgaggagcccctgactacgcagcagccccgggggaaggacagccagccttgggagcaggcgctgggccgcttctgggattacctgcgctgggtgcagaccctgtctgaccaggtgcaggaggagctgctcaacacccaagtccatccaggaactgacggccctaatggaggaaacaatgacggagttaagggcttacaaggaggacttggaggaacacttaggcccaatggccacagaaacaaaggcccgcttttcaaaggacctgcaagcagcccaagcccgggtaggctccgacatggaggacttgcggaaccccctggcacagtacccaagcgaggtgcaagccatgctgggccagttctacgaggagctgcgggcccgcatggcctcccacctg

SEQ ID NO: 4238 - DNA, 431 bp, Bos taurus
  unsure (379): unsure at all n locations; Clone ID: 18-LIB34-074-Q1-E1-E5
tgctgcatcttagatgaaagatttggtagttattgcccaactacctgtggaattgcagatttcctgaataattaccaaaccagtgtagacaaagatctacgaactttggaaggcatcttatatcaggttgagaacaaaacatcagaagccagagagctggtcaaagcaatccaaatcagctataaccctgatcaaccatcaaagccaaataacatagagagtgctaccaagaattccaagagtatgatggaagaaattatgaaatatgaaacactgataacaacacatgaatcaacaattcgatttttgcaagaaatatataactcaaatagtcaaaaaatcgttaacctaagagataaagtggtccagcttgaagcanactgtcaagaagccttgtcaagatacagtgaaaatacatgatgtaactggga

SEQ ID NO: 4239 - DNA, 383 bp, Bos taurus
  Clone ID: 18-LIB34-075-Q1-E1-E5
tgtcggcatccaacccgctcgaaacctaacccgccctgatggtttagaagaccctgaggatactaaagaagatgagaacgtgcccactgctcctgatcctccaagtcagcatttacgtgggcatcgcacaggcttttgcattgatcccagctttgatgttcagaagaaatgtccactctgtgaattaatgttccctctcaactataatcagcgcatattcgaagaacatgttgacagtcactggaaggtgtgcccaatgtgcagcgagcagttccctcctgactatgaccagcatgtgtttgaaaggcatgtccagacccattttgatcagaatgttttaaattttgactagttacgtttgtattaggagttaataatacagt

SEQ ID NO: 4240 - DNA, 395 bp, Bos taurus
  Clone ID: 18-LIB34-076-Q1-E1-E5
gggtgacccacgaatccgagcatggtacttgaagtcatagaacaccagaatgcacaccagattgtaaatcgcctcctgtcattggccatggtgaatagcaagtaatctctaaattcgttagatttgatcaacagactgtctatgaatgtgatagagggtacatcctgcttggaacaaaagtactctcctgcagatcttcaggctggtcacctgcggtccctcagtgtaaagcattgtgtcagaaatcagagataaactatggcaggttatctgtggtgaacgttacataagttgaagctgaaataattacgatccagtgtgagtctggctacactgtgattggttctgaaaagagcacttgctcaaatgacacaacctgagatccggttgtgccc

SEQ ID NO: 4241 - DNA, 467 bp, Bos taurus
  unsure (377): unsure at all n locations; Clone ID: 18-LIB34-077-Q1-E1-E5
cgggtggcccaaacgtccgggaacagagcagctgaagacataccccttaccacaacttccatctttgcatcaggatgcctgggagaggaggacaatctctctccatggtgtgtgtagatgtctggattttagccttgtctgttctatcagtcatggctgacgccacttctgtaccagttaccgagtcctgtgattctcaaggacctccaggccttccaggccctcccggccttcctggccctcctggccctccagggcccccaggccctccaggattgcgaggaccaactgggattccgggagacattgagagttgcttgtctccccctaaatctgcctttgcagtgaagatgaatgatcccctcccagccccctcncagcccattgtcttcaagggaaccctgcataatgaccaggaccacttcaatcttaccacgggagtgttcacctgcaccatccctggcgtg

SEQ ID NO: 4242 - DNA, 362 bp, Bos taurus
  unsure (17): unsure at all n locations; Clone ID: 18-LIB34-078-Q1-E1-E5
tcgtattacggtcccgnggccgccgccgccgggcccccgccccgcccgcccgctatggccgctccccgcgctttggcggtcgccgcgcccgcgccggggatggccgcgctcaggcgctcggggaaggcgatcctgtgatgcggcctggcgggcggtatcgagatctgcatcactttccccatcgagtacgtgaagacgcagctgcagctggtcgagcgctcgcacccgccgcgctaccggggcatcggggactgcctgcggcagacagtctggcagccatggcgtcctggggcctgtttcggcgcctcagctccctgctctacgggttcgtcccttaggcggccgtcacgttcgggacgttc

SEQ ID NO: 4243 - DNA, 445 bp, Bos taurus
  Clone ID: 18-LIB34-078-Q1-E1-E9
tcgcagcatattccaggggtgtgtttcgtcgagatacagacacgagtgagattgctcatcggtttaaagatttgggagaagaacattttaaaggcctggtactgattgccttgtctcagtatctccagcagtgtccatttgatgagcatgtaaaattagtgaacgaactaactgagtttgcaaaaacatgtgttgctgatgagtcccatgccggctgtgaaaagtcacttcacactctctttggagatgaattgtgtaaagttgcatcccttcgtgaaacctatggtgacatggctgactgctgtgataaacaagagcctgaaagaaatgaatgcttcctgagccacaaagatgatagcccagacctccctaaattgaaaccagaccccagtactttgtgtgatgagtttaaggcagatgaaaagaagttttggggacaatacct

SEQ ID NO: 4244 - DNA, 407 bp, Bos taurus
  Clone ID: 18-LIB34-079-Q1-E1-E9
ccaagcgggccggagggaggttgtgtacagcagtgaggagcctgcagaggaacatggcgctgctctgggggctcctggcgctcatcctctcctgcctgtcaagcctgtgctcagcgttctctcctgtgagcaccatggagcccttggatctgcagctaatggacgggcaggcccagcagaagctgcccccactttccctcctcaagctggacaaccaggagccaggtggccagattgccccgaagaaggccccagaagactgcaagttgtccccaacccctgagcagacacgcaggctggcccgggccatgatgaccttcaccacagacctcttctccctggtggcccaaagctccaccaggcccaacctcatcctgtcacctctgagtgtggccctggccctgtct

SEQ ID NO: 4245 - DNA, 395 bp, Bos taurus
  Clone ID: 18-LIB34-080-Q1-E1-E5
cattgaggttaccttagttaaaggcatattcccacctccactggaagagccaaccttggttgtgatcggccttgtccagtcccttggagctgccatccccactactgacctgcagtcgcgctgggcagtacaagtaattaagggaacatgccctttggcttctgtgacagacatgacgaatgatgttgatgagtacatggggaagaagctcaaaatgtttggcaaatgtgctaccatacagacggattatgttgtttatatggatgagcttgcctccttcattggggcaaagcccaacatcccatggctgtttcacacagatccacagttggcattggaggtctactttgggccttgcaccccatactagtttacgctggtgggcccaggaaaat

SEQ ID NO: 4246 - DNA, 410 bp, Bos taurus
  Clone ID: 18-LIB34-081-Q1-E1-E5
agccgcggtttcctgcttcaacagtgcttgaacggaacccggctgctcgtccccccctaccccggccggccactcagagccagccctcgtcaccacttgacagcgccctccgaccggcccaaggtccccgccaccgctccagtgccgctcggccgtcgccgccaccaccaccaccaccgcccgttttcagccgcccaccatgacgaccgcatccccctcgcaggtgcgccagaactaccaccaggactcggaggccgccatcaaccgccagatcaacctggagctctacgcctcctatgtctacctgtccatgtcgtactattttgaccgtgatgatgtggctttgaagaactttgccaaatactttcttcaccaatctcatgaggagagggaacatgctgagagactga

SEQ ID NO: 4247 - DNA, 392 bp, Bos taurus
  Clone ID: 18-LIB34-082-Q1-E1-E5
ggctgaagctagttaacatcagtgtcttggctcccaactggctcccaattcctggtgaaactcctaaagggagactgttaaatcatgaaattaatcaccatccttttcctttgttccaggctgctaccaagtttaacccaagagtcttctcaagaaatcgactgcaacaaccaggatgtatttaaagctgtggacgctgctctgacaaaatacaacagtgaaaacaagagtggcaaccagtttgtattgtaccgcataaccgaggttgccagaatggataatcctgacacattttattccttgaagtaccaaatcaaggagggcgactgtccttttcaaagtaacaaaacttggcaggactgtgactacaaggactctgcacaagctgccac

SEQ ID NO: 4248 - DNA, 226 bp, Bos taurus
  Clone ID: 18-LIB34-083-Q1-E1-E5
actagttctagatcgcgagcggccgccctttttttttttttttttttcacagtcccaactttattgtcacttggtcacacgcactttttaaaaaacacacacgcttgtaaaatacccacacatcaggaattagaaggccataaacaaggggcttacaggtgccaaaaatatcctaggattcagaataaacaaaactcaaaaataaaaaaacaaaaaaagggcgcga

SEQ ID NO: 4249 - DNA, 386 bp, Bos taurus
  unsure (324): unsure at all n locations; Clone ID: 18-LIB34-083-Q1-E1-E9
agtcgacccgggcacaagatcaccctgaacatcgacgctgagtattgggcccgattggggctcgtggccgtcgccaatggcgtgtctgcgctgactactaagaacacattgatccacgagaaagatctgcgacgtagtgtagaaagcggacattggctgcaccccaggcagtggcataaactatgctggcgtcttcacggatgcaggactcactctcaagaccagccagcgcctggacactcatcagagggcaaatccgcagtgcccgcaacgagccatccgccgacgccgctcggtgcagctcatggagaagtggatggatanagcgggtcagttcagcaccgatctgcgcaagtgctgcgataacggcatgccggacaacccca

SEQ ID NO: 4250 - DNA, 424 bp, Bos taurus
  Clone ID: 18-LIB34-084-Q1-E1-E5
aagatggcggagtacgacttgactactcgcatcgcgcactttttagatcggcatttagtctttccgttgcttgagtttctctccgtaaaagagatatataatgaaaaggagttgttacaagggaaattggatcttcttagtgataccaacatggtagactttgctatggatgtgtacaaaaacctttattctgatgatattcctcatgctttgagagaaaaaagaacaactgttgttgcacagctgaaacagcttcaagcagaaactgaaccaattgtgaagatgtttgaagatccagaaactacaaggcaaatgcagtcaaccagggatggtcagatgctgtttgactacctggcagacaagcatggtttcaggcaggaatatttagatacactgtacaagtatgcaaaattccagtatgaat

SEQ ID NO: 4251 - DNA, 405 bp, Bos taurus
  Clone ID: 18-LIB34-085-Q1-E1-E5
agcggacgcgtgggccatggtgaggaagaagcagtggaggaagtcaggagcacacagctgctctgggaatgcccggccatccctgtgcaagtggtgcttgtgttacttatgaaaagcccctaccccaaggtcttccgcatggcagcgatcatgtaggatatgttacgttcagtgataacataacttagttatcagaagtcagctcagtgatcttccttgccatgactgatatttgatgggtttttaaaaccaaactgatgttgaatatttcttacggcacagataataagaacatccagtttatggcttaactccatttagatttttttttttttgcatgcggacactattggaagacctttggataggtcttacgctgttagaagcattttatatttccttttt

SEQ ID NO: 4252 - DNA, 372 bp, Bos taurus
  Clone ID: 18-LIB34-085-Q1-E1-E9
agaaaagaacctcctgaaatacatacaatttaagacaattgtatccagtgtaaataagcgtcccgatttccaaaccactggccaatgggatgttatcactgaaaaggatggtaaaaaggaatcagctgtctttgatgccgtaatgatttgttctggacatcatgtgtaccccaacatacctaaagagtcctttccaggaataaaactttttaaaggcaaatgcttccacagccgggactataaagaaccaggaatcttcaaggggaagcgagtcctggtgattggtctggggaactcaggctgtgacatcgcctcagaactcagccacatagctgaaaaagtcatcatcagctcccgaagtggctcctgggt

SEQ ID NO: 4253 - DNA, 452 bp, Bos taurus
  Clone ID: 18-LIB34-086-Q1-E1-E5
gtgatcggctcggccggcgtgggcaagagcgctctggtgcaaaggtgggtgcgcggcaacttccgtgaggcgtacctgccgaccatcgaagatacctaccgccaggcgctaggctgcagccacaaggcgggtgcgctgcacatcaccgacaccaccggtggccgccgctaccggggcctgcagcgccttgccattgccaggggtcacgccttcatcctggtttattctatcaccaggaagcaaaccctggaggagctgaagccgctctatgagctgatccgtcaactcaaaggtaacaacccgcaaaagtgccccgtcatcctggtgggcaacaagtgcgatgagagccgtcgggaggtgagtgagaaggaaggtgctgcctatgcgtgcgagtggaattgcgccttcttggagacctcggccaagatgaatatcaacgtccaggagctgtt

SEQ ID NO: 4254 - DNA, 387 bp, Bos taurus
  Clone ID: 19-BOVMS1-002-Q1-E1-E3
gggtcgacgcacgcatcagcaaacacgcactgccgtcaatctacctattgttgatattgcaccctatgacatcggtcgtcctgatcaacaatttggtgcggatattgggcctgcttgctttttatacaccaaagtcaatccacagtcgcagaacaagcttcacactccatatgttccttttgttccaatcttgtcagccagtacaagtgagcacgttccaattacttatttccaaaattcttgggaaaaaagtgtaatttgaacacgcaatgatacttgtctttgctattagaccatatacagttcaaatgcatagtgttcgatttatttaccaatttcaaattcaaaatgtctcaatggtgctataatacatatacgtcaacactc

SEQ ID NO: 4255 - DNA, 436 bp, Bos taurus
  Clone ID: 19-BOVMS1-003-Q1-E1-E11
ggaaatgatacctgcagagcacttttaaagatattttttaggctaatggtcaagataacacattgaaaagaaagctataattatgtccaatgagggctcttttggttgctagagatgaggaaagtgtatactgattttaatttgtacttaaaatacattttactaattaactattgatttttaaatatgacggattcttcttgtagatattaatcttccttactgtattttcctagagaaacctaaatgaggatgtgttccagctagtttctgtatattggcatatgtgctctatgtatattgacataattgaaactgcattaagtacaccacattagaaactttttgaacatttttaagtttattgtattaaattttatgataacatacaaggttttgactcaagctttgtatgcaagaagaggtggacattttt

SEQ ID NO: 4256 - DNA, 397 bp, Bos taurus
  Clone ID: 19-BOVMS1-003-Q1-E1-E3
actgaaagttactgaagatgctttaaaagctatagccagattagcactagaacgaaaaacaggtgcacgaggcctccggtccattatggaaaagctgttactagaaccaatgttcgaagtccctaattctgatattgtatgcgtggaggttgacaaagaagtagtagaaggaaagaaggaaccaggatacatccgggctccaaccaaagaatcctcggaagaggagtatgactctggagttgaagaagaaggatggcctcgtcaagcagatgctgcaaacagctaaactgtcagacttccgttgtgtatataaaggtgtccttcttttgtttaggatcataactgtctctgcagtctgacattaaaagcattggatctatcttggatatcatataca

SEQ ID NO: 4257 - DNA, 303 bp, Bos taurus
  Clone ID: 19-BOVMS1-004-Q1-E1-E3
atgcgacgtcatagctcttctatagtgtcacctaaattcaattcactggccgtcgttttacaacgtcgtgactgggaaaaccctggcgttacccaacttaatcgccttgcagcacatccccctttcgccagctggcgtaatagcgaagaggcccgcaccgatcgcccttcccaacagttgcgcagcctgaatggcgaatgggacgcgccctgtagcggcgcattaagcgcggcgggtgtggtggttacgcgcagcgtgaccgctacacttgccagcgccctagcgcccgctcctttcgctttc

SEQ ID NO: 4258 - DNA, 347 bp, Bos taurus
  Clone ID: 19-BOVMS1-005-Q1-E1-E11
atgcgacgtcatagctcttctagagtgtcacctaaattcaattcactggccgtcgttttacaacgtcgtgactgggaaaaccctggcgttacccaacttaatcgccttgcagcacatccccctttcgccagctggcgtaatagcgaagaggcccgcaccgatcgcccttcccaacagttgcgcagcctgaatggcgaatgggacgcgccctgtagcggcgcattaagcgcggcgggtgtggtggttacacgcagcgtgaccgctacacttgccagcgccctagcgcccgctcctttcgctttcttcccttcctttctcgccacgttcgccggctttccccgtcaagc

SEQ ID NO: 4259 - DNA, 94 bp, Bos taurus
  Clone ID: 19-BOVMS1-005-Q1-E1-E3
caacagatagagggctctttccgggatcacaaacattaaccaaaacgttaatttatgtgacttggcagttattctataccatttcctgcccatt

SEQ ID NO: 4260 - DNA, 250 bp, Bos taurus
  Clone ID: 19-BOVMS1-006-Q1-E1-E3
atgcgacgtcatagctcttctatagtgtcacctaaattcaattcactggccgtcgttttacaacgtcgtgactgggaaaaccctggcgttacccaacttaatcgccttgcagcacatccccctttcgccagctggcgtaatagcgaagaggcccgcaccgatcgcccttcccaacagttgcgcagcctgaatggcgaatgggacgcgccctgtagcggcgcattaagcgcggcgggtgtggtgggtacgc

SEQ ID NO: 4261 - DNA, 463 bp, Bos taurus
  unsure (170): unsure at all n locations; Clone ID: 19-BOVMS1-007-Q1-E1-E11
tcggtatcatgggtcgaccgacccgtccgataaaactaggattccaagatgcaacatcaccaatcatagaagaactacttcactttcatgaccacacgctaataattgtcttcttaattagctcattagtactttacattatttcactaatactaacgacaaagctgacncatacaagcacgatagatgcacaagaagtagagacaatctgaaccattctgcccgccatcatcttaattctaattgctcttccttctttacgaattctatacataatagatgaaatcaataacccatctcttacagtaaaaaccataggacatcagtgatactgaagctatgagtatacagattatgaggacttaagcttcgactcctacataattccaacatcagaattaaagccaggggagctacgactattagaagtcgataatcgagttgtactaccaatagaaataac

SEQ ID NO: 4262 - DNA, 421 bp, Bos taurus
  Clone ID: 19-BOVMS1-008-Q1-E1-E3
attcatttagtttagagctatgcagtgaagtggttatccctgaaggagatagcaagccagactccaccactactgggtttcctcaatgcataaaagaggaggatgccccctcagataatgatagtggcatctgtatgagccctgactcctctctgggctctccccaggatagcccttccacctccaggggctctccaaataagagcctgctatctccaggtgccctcagtggctcttcccgccccaaaccctacgaccctcctggagagaagatggtagcagcaaaagtcaagggtgagaagctagacaagaagctgaagaaaatggagcagaacaagacagcagctactaggtaccgccagaagaagagggcggaacaagagggcctcactggtgaatgtaaagagctagaaaaaaagaa

SEQ ID NO: 4263 - DNA, 467 bp, Bos taurus
  Clone ID: 19-BOVMS1-009-Q1-E1-E11
gggtcgatcccacgcgtcggtcacattttaaatgaaggctgaattatgcatgtcttaggttgccatgttaaatatctaaccagctatgatccctcatttcccctgttatctcccaaccacatcttgttgatagtggtgttggttaaagaacatatcaacataaatggccaatgtgataattttttgatagaacaacttgcctaggctataagcccccaggttttcaatcaaacactaatccagattgttgctatgaagatatttttgtagatgtcatcaaagtccataatgatttgactttaaataagggacattgtcctagataagctgggtgggcctaatgttcaatcaggtggaagtctaagggcggatctgaggctcctatgaagaagatagtgcacttgtgaatagcagcttcaactcatgcccaagagtctgaacttcaccttcctcgataatctgccctg

SEQ ID NO: 4264 - DNA, 479 bp, Bos taurus
  unsure (15)...(16),(342),(425): unsure at all n locations; Clone ID: 19-BOVMS1-009-Q1-E1-E3
tcggctaaacaggannaaataattaatactatgctgatctcactacaactaatcctaattataacctttaacgccatgggactaatcctaatttaaaatccaattgaagcaacactagtcccaacactcaataataataaccgatgaaggaaccaaacagaacgcctaaacgccggactctatttcctaatctatacactagctggctccctaaccctattagtcgcactaatttatatccaaaacacagtaggattcctaaatttcccaatattacagtactgagtaaacctggtcataactcttgatctaatgttctcatatgactagcatgtataatanctttccatagtaaaataacactatatggcctcacctttgactacctaaagctcacgtagaagcccccatcgcaggctccatantccttgcaacagttctactaaaactagggggtacggtatgctacgaatcacact

SEQ ID NO: 4265 - DNA, 486 bp, Bos taurus
  Clone ID: 19-BOVMS1-010-Q1-E1-E3
ggtccggtcatccgggtcgagccccgcgtccgggttacaattataacaagggttatggggcaataattcacacattgctgcctggcaggctgggaaccggagagactggtggaattccatctgaggtgcctttgttacagtgatcaggcagcccaagtcatttaacttctctaatttcccagcagtatattatgtggcattttattgctcaggcaataactggtttaatgcgcttagtctctgatggcaaagtgttaattttgtcttaaaaccttccagtaaatgcaacctagttttatcaccatagccaccagcaggcatggataattattttaacaatgctgatttttgagttttgtagtatattatggaatatagtccagttaaatatctggtttcagtatgttaaagaatacaagagaggttaatttctgctcaagtggtaccacttaaaaggcatgtattcctttagtatatagatgaaat

SEQ ID NO: 4266 - DNA, 375 bp, Bos taurus
  Clone ID: 19-BOVMS1-011-Q1-E1-E11
ctgctcccgccgcagccccagggcccctcgccgccgccaccatggacgccatcaagaagaagatgcagatgctcaagctcgacaaggagaacgccttggatcgagcggagcaggcggaggccgataagaaggcagcggaggacaggagcaagcagctggaagatgagctggtgtcgctgcaaaagaaactcaaggccaccgaagatgaactggacaaatactccgaggctctcaaagatgcccaggagaagctggagctggcggagaaaaaggccaccgacgctgaagccgacgtagcttctctgaacagacgcatccaacctggttgaggaaagagttggatcgtgcccaggagcgtctggcaacagctctgca

SEQ ID NO: 4267 - DNA, 459 bp, Bos taurus
  Clone ID: 19-BOVMS1-012-Q1-E1-E3
cacattcctccagctgatccattgaagaaaactcttaactgcctttctcctggattcatgacagtgttattcctttttctataaatatatttttatttaggaaaaaagtcagtgattctaattgtatcacgttgtaagaaagcactctgtggatcaacctaagtgggtacacaagaattttttttcttgatgtatgtaagcacattttgttcctttatatctgtttacaagactgtgaatcaaaaagacaaagctttcttcctagtttttataatgttttttcgaattagtgtgactgtgggttgaactgcagtctacagaggttgggaaatcaaagtcactgagcccccagaagggcatccccctctcctgcctcaagtctgcctggctgttcgcccatcgttgaacacttttaggttctgtccttgcacctgttcactgggtacctctcctcaatca

SEQ ID NO: 4268 - DNA, 397 bp, Bos taurus
  Clone ID: 19-BOVMS1-013-Q1-E1-E11
cctcgaggcctcctgcaccccactccggcccccggccaagccgccgctgtccagtcacttcgctgctactcccatgggtcacatgagacagacgaggagtttgatgctcgctgggtgacatacttcaataagccagatattgatgcttgggagttgcgtaaagggatgaacacacttgttggctatgacctggttccagagcccaaaatcattgatgctgctttgcgggcatgcagacgtttaaatgattttgctagtgcagttcgcatcgtataagttgttaaggacaaagcaggacctcataatgaaaatctaccctatgtcatccaagaacttaaaccaactttgaatggactgggaaaccccactccagaagaactggggcttgacaaagtgt

SEQ ID NO: 4269 - DNA, 463 bp, Bos taurus
  Clone ID: 19-BOVMS1-013-Q1-E1-E3
gaaacatggaacgtgtctggggatatcgtgaaaggggttgtgactgtggactgaagaaaccacaccagctgattgctccgtctaaaaacttttctggcacaaattacatgacatgttaacagaggaaacaggaatcatttcaaatccactgcatagcaatcttcagtcttacggcggctggtagtattttaaacctctctaacaagataaaggaagtcaccaaaactatttgcaaaatggtctaattgttgatatcaaaccaaaaccatactgttaatcaaacatacaaaacttcagggacagcatgtttggtggatttgtacccttctagcaaatttcaccatgggtttgatttgtcaatgttctataagacgtactgtccacagacttctaagctaagctgtcattacaacaagtatttatttcagactgcatgggtatagaaggaaaaggacctaaaaac

SEQ ID NO: 4270 - DNA, 353 bp, Bos taurus
  Clone ID: 19-BOVMS1-014-Q1-E1-E3
cgcagactgattgggatcattgtaacagggaggcagttgcctcagcaacgaactctgtcagatatgaccgtgtctgagatgaatttctctctccttgttgaagacatgttgggaaatattgaccagccaaaatacagagagattgtcgcggagttactaatggtcgtaaccattgtactggaaagaaaccctgagctagaatttcaagacaaagtatatcttgacagtctggtgaaagaagcatttcatgaatttcacagagatgacagtcgactaacggatattgagaaacaagatgacatgacttcgttttacaacactcacccgctgggaaaaataggaacatgcaacta

SEQ ID NO: 4271 - DNA, 388 bp, Bos taurus
  Clone ID: 19-BOVMS1-015-Q1-E1-E11
atgcgacgtcatagctcttctatagtgtcacctaaattcaattcactggccgtcgttttacaacgtcgtgactgggaaaaccctggcgttacccaacttaatcgccttgcagcacatccccctttcgccagctggcgtaatagcgaagaggcccgcaccgatcgcccttcccaacagttgcgcagcctgaatggcgaatgggacgcgccctgtagcggcgcattaagcgcggcgggtgtggtggttacgcgcagcgtgaccgctacacttgccagcgccctagcgcccgctcctttcgctttcttcccttcctttctcgccacgttcgccggctttccccgtcaagctctaaatcgggggctccctttaaggttccgatttagtgctt

SEQ ID NO: 4272 - DNA, 419 bp, Bos taurus
  Clone ID: 19-BOVMS1-016-Q1-E1-E11
cccacgcgtccgcaagagttcattagtcgagttcaagccagttaccctcatctacttgaacagctgttatctacttcagacaatccagaagatgaaaatacagagtcaccaattattcattttggacctggagaaaaccattcagaagattcagtcatgatgaatacacctgtggttaaagctgctttggaaatgggctttagtagaaggctggtaaagcagactgttcagagtaaaatcctaatgactggagagaattataaaaccatcagtgatcttgtattagatttacttaatgcaaaagatgaaataagggaagaggagaaagaaagagcaactgaggaaaaagaatcagatgacctgtcattaatccggaagaatagaatggcactttttcaacatcggacttgtgtgcttcc

SEQ ID NO: 4273 - DNA, 205 bp, Bos taurus
  unsure (71): unsure at all n locations; Clone ID: 19-BOVMS1-018-Q1-E1-E3
gtgagatcgtgggcaagaggatccgcgtgaagctggacggcagccgactcataaaaggtccatctggacanagctcagcagaacaacgtggagcacaaggttgaaacgttttctggtgtctataagaagctcacgggcaaggatgttaattttgaattcccagagtttcagttgtaaacaaacgactaaataaaatattattctc

SEQ ID NO: 4274 - DNA, 395 bp, Bos taurus
  Clone ID: 19-BOVMS1-019-Q1-E1-E11
gccggggaggctttggagggcgaggaggcttccgaggaggcagaggaggaggaggagaccacaagccacaaggaaagaagacgaagtttgaatagtttcttctatcccttctctccctcttccatttgaaagaaaggactctggggtttttactctgttaactgatcaatgacagagccttctgaggacattccaagacagtatacagctctgtggtctacttggaaatccgtatagataacatttcaagggaggtaaccctgttggtgttgactggatattcgtataaactttttaaagagtgatagagctaacccttatctgtaagttttgaatttatattgtttcttcccatgtacaaaaccatttttttcctacatagtttgtttatttgt

SEQ ID NO: 4275 - DNA, 365 bp, Bos taurus
  Clone ID: 19-BOVMS1-019-Q1-E1-E3
atgcgacgtcatagctcttctatagtgtcacctaaattcaattcactggccgtcgttttacaacgtcgtgactgggaaaaccctggcgttacccaacttaatcgccttgcagcacatccccctttcgccagctggcgtaatagcgaagaggcccgcaccgatcgcccttcccaacagttgcgcagcctgaatggcgaatgggacgcgccctgtagcggcgcattaagcgcggcgggtgtggtggttacgcgcagcgtgaccgctacacttgccagcgccctagcgcccgctcctttcgctttcttcccttcctttctcgccacgttcgccggctttccccgtcaagctctaaatcgggggctccc

SEQ ID NO: 4276 - DNA, 307 bp, Bos taurus
  Clone ID: 19-BOVMS1-021-Q1-E1-E11
caagacaagaataatcgatgttgtctataatgcatccaacaacgaactggtccgtaccaagaccctggtgaagaactgtattgtgcttatcgacagcacaccgtaccgacagtggtacgagtcccactatgcactgcccctgggccgcaagaagggggccaagctgactcctgaggaggaagagattttaaacaagaaacgatcaaagaagattcagaagaaatacgatgagaggaaaaagaacgcgaaaatcagcagtcttctataggagcagttccagcacggcaagcttcttgcatgcatcgct

SEQ ID NO: 4277 - DNA, 449 bp, Bos taurus
  Clone ID: 19-BOVMS1-021-Q1-E1-E3
agctgacgccccacactcacctaaccaccatggatatcgccatccaccacccctggatccgccgccccttcttccctttccactctcccagccgcctctttgaccagttttttggcgagcacctgttagagtctgatctcttcccagcttctacttccctgagccccttctaccttcggccgccctcatttctgcgggcacccagctggattgacactggcctctcagagatgcgtctggagaaggacagattctctgtcaacctggatgtgaagcacttctccccagaggaactcaaggtcaaggtgctgggagatgtgattgaggtgcatggcaaacatgaagagcgccaggatgaacatggttttatctcccgggagttccacaggaaataccggatcccagctgacgtggaacctctcgccattacttcatccctgtcgtctgat

SEQ ID NO: 4278 - DNA, 443 bp, Bos taurus
  Clone ID: 19-BOVMS1-022-Q1-E1-E3
ggggaagatggcggcggccgttccgcagcgggcctggaccgtggagcagctgcgcagcgagcagctccccaagaaggacattatcaagtttctgcaggatcacggttcagattcgtttcttgcagaacataaattactaggtaacattaaaaatgtggccaagacagctaataaggaccatttggttacagcctataaccatcttttcgaaagtaagcgtttcaagggtactgaaagtataagtaaagtgtctgagcaggtgaaaaatgtgaagcttaatgaagataaacccaaagaaaccaagtctgaagagactctggatgagggtccaccaaaatatacaaaatctgttcttaaaaaaggagataaaaccaactttcccaaaaagggagatgttgttcactgctggtatacaggaacactacaaaatgggactgtttttg

SEQ ID NO: 4279 - DNA, 420 bp, Bos taurus
  Clone ID: 19-BOVMS1-023-Q1-E1-E3
aacttgattaggatgatggttcacgtagtgggccatcgccctgatagacggtttttcgccctttgacgttggagtccacgttcttaatagtggactcttgttccaaactggaacaacactcaaccctatctcggtctattcttttgatttataagggattttgccgatttcggcctattggttaaaaaatgagctgatttaacaaaaatttaacgcgaattttaacaaaatattaacgcttacaatttatgtggcacttttcggggaaatgtgcgcggaacccctatttgtttatttttctaaatacattcaaatatgtttccgctcatgagacaataaccctgataaatgcttcaataatattgaaaaaagaagagtatgagtaatcaacatttccgtgttcgccctagtccctttttt

SEQ ID NO: 4280 - DNA, 292 bp, Bos taurus
  Clone ID: 19-LIB188-001-Q1-E1-E3
atggccgcgggatacttgtcctccgactcagtctgccggtctctctgccactccacgtctacatcttctgggtagaagccgatgaccatgcaggtgacgctgaccgtgcttttgctgagctcttccttgggtgggtccaggacatacacctgcggctcccgggccggccctttgctcctggagatgatcctcacgatggaggccgagaggcctttgatgttgaccttgcacttgaactcctttcctccagtccagtcctggtgctggatgggcagggcgctgaccacgcggt

SEQ ID NO: 4281 - DNA, 389 bp, Bos taurus
  unsure (16): unsure at all n locations; Clone ID: 19-LIB188-003-Q1-E1-E11
cagtgattctcactcncggtccatgatcgtctctagctcctcaaagtgccggagtttgatttccaactttttcatctgggtctccaccagcagggccaccagcgatttgatcttcctctcctcaacaacagccaagtgcttggccttcaaagcggtagcagccaaggcaacggcggctgcggtggagaggttgccctcgccaatgtcacgctccaccttcgtcctcctttccccctctgactccaccacttctttcagcagctcctcctgcccttccttgggctccctctccttctcaagattcgctgtcgggtctccatcactcttttctgactccttctcgctatcgccatccttccctttctcatcgtccttcatgggtgcctcac

SEQ ID NO: 4282 - DNA, 445 bp, Bos taurus
  unsure (407): unsure at all n locations; Clone ID: 19-LIB188-003-Q1-E1-E3
ccggatccagacacatacagatgcagctgcagaaagaggggtccagtgatctgaagtcacatagcggaatgcagcattactcagtccccacaaggcagctgtctcaaactttaggaaccgtgagagacacatcagagccctggtcactgtcaccacttgcagcctgggtgtaggtctgtcttttttcacctgagcgcttcttcctccagatcacagctccagccaccacagctactacgaggagaaccaggccaacaatgctgcccatggtgaggaaggaggtctgaggaggttcccatctcaaggtgaggggctcctgaagcccttcgtgctgcacatggcacgtgtatctctgctcctctccagaaggcaccaccagggccgcccacttctggaagtttccgtcncctgaaggcctggtctccacaagctccatgtcctgggt

SEQ ID NO: 4283 - DNA, 378 bp, Bos taurus
  Clone ID: 19-LIB188-004-Q1-E1-E3
taaaaattcaaagaaccaacattttactaacctataatattaaggttccattaatgccagaaatcctccggccaaataacaaggcttaataaggcaaaatggccttattcaaccatgctgcagaatgtgttagattaaccaattaatattgaaaagtttataatggaaccttaatatatactgttgcaattgacttaaattccatatatatacattttttttcacaattttcaacctgctgtatgtaagactttaaagacttcgaatgctgaggataaactgacagaccccttactcacacagcagtattcacaggcttgatttgtttttcgctttaagttgcatgacgtttctgcaggaaatattagttaatctcac

SEQ ID NO: 4284 - DNA, 430 bp, Bos taurus
  unsure (367),(409): unsure at all n locations; Clone ID: 19-LIB188-007-Q1-E1-E11
gcaatgggcccgggatactggcgtaccaccttcaacagcttccccttgttcatgatcatgtaggtgtagtaccggatcttggcttgctcgccggggtccgtgcgcaggtggaagttgacgttgagagtctccccaggcttgagctccacgcggggcacagagaggtgcaggtagttattggagttcccctgggtgttgtagggtagggcctgcatggtcctggtggcctgtcgactctcctgtccagccgctcctgcacacgcactcgccacagtcacagtcgccattatctccgcagagcagccccttgtgtctcacgcaggagaagttgtcacactggcagtaaggcccgtaaatgtttccgtanggggacaagtggcagacacactgcccgcagtagcagtcgccntctccactgcacgaggggcgc

SEQ ID NO: 4285 - DNA, 223 bp, Bos taurus
  Clone ID: 19-LIB188-008-Q1-E1-E3
gaacccgatgttgcaaggcgatctcaacaaccgcattgcactgtccatcaccaataggtgcccatagacgcatagggacacaaccccactgcaacctcctctacgtgtctgatatacatgtcgcctgcgtcgtgctcaaagacgtccatgtcatgtccgccggctcagacaaacttagcgtcatcacatgctaaggccggacatcccacagatggccggccat

SEQ ID NO: 4286 - DNA, 368 bp, Bos taurus
  Clone ID: 19-LIB188-009-Q1-E1-E11
tatgataggacagcccaccgggcactttgacaagcttgttgttgttcaaatgaagttccctcaaatgaggagtgttggccaaagagccattgtcaaccgcagagatgctgttgaaactcagtcccaacttagccaaattattcagtcctttcaggctagctgcatcaactttggtgattttgttgccatcgagatgtaattcagtaagggaaggaggaacaccttgagggatggtagttatatttgtgtcagcactgcggatgtatgagagcttcttcattccctgaaaggctccattttcaatgcctgagctcttcaacgggttggtgccaagttctactaagatcatctcgttgaaaccattgaac

SEQ ID NO: 4287 - DNA, 436 bp, Bos taurus
  Clone ID: 19-LIB188-011-Q1-E1-E11
ttgtgccgaggctgcatgcgcccgtgcgccatggaggccggatactcctggtactgccgctcggtgtcagctcgcacgtcactcagctgggcttcgataccactgatcagcgcctggatctgcgccagctgggctccgaagcgagcctccgtttccgccagtgtgccttccagggcggctttcatgctgagctgagactgcagctcgatctccagaccctggagggtgcgccgcaggtcggtgacctccgtcttgctgatctgcagctgctccgtgtggccagcgacctccctgttcagctcctcggtctggctgatgaaccaggcctcagcatccttccggttcttctcagcaatgacctcatattggcttctcatgtcactcaggatcttggctaggtcgatgcccggagcagaatccacctccacactgacct

SEQ ID NO: 4288 - DNA, 385 bp, Bos taurus
  Clone ID: 19-LIB188-012-Q1-E1-E3
acaaaaatgctccagcgaaactgtcttaaatatttttctacaggtgtaaaaccaaagtttcctgcaaaccccagtccacgcccttcatgaatctactgtgtatctattttgcctctctagttctagaaaagtagagacaactttgaatccagggtttggagctgccccgcgtctgtctttcctatgcactctgagttaaaacgggactcgcgggaccgttggcggcgtgctccggcccctcagcaccttctgtggatttggcgcctccggcctctttgtctccttcggaagtctccagggcctccggggggcttgtgcagttagcatccggcttagctttgtccacctcgttatcaatctcaaccttatcttctggatgcttgct

SEQ ID NO: 4289 - DNA, 410 bp, Bos taurus
  Clone ID: 19-LIB188-013-Q1-E1-E11
acgatgagtcaggcccctccatcgtccaccgcaaatgcttctaggcggactgttagctgcgttacaccctttttcttgacaaaacctaacttgcgcagaaaacgacatgagattggcatggctttatttgttttttttttttgtcctttttgattttttttttttttggcgcttgactcaggatttaaaaactggaacggtgaaggtgacagcagtcggttggatcgagcattcccaaagttctacagtgtggccgatgacttgattgtagcaaatctgagctttcctcctgcctcctgcctcccagcaaagtccagatctctcacctgccaggtcaggggccgtgttgttggggtttagaacagactacagggaaatcgaggaccatgcccatacctcgccccaagcac

SEQ ID NO: 4290 - DNA, 283 bp, Bos taurus
  Clone ID: 19-LIB188-013-Q1-E1-E3
acatgagtaatgccggagtgtgcaggtccctcagctggagatgtcactgacttctcgggaccatgcacgacattggactgagaaaaggacagcaccgaccgatgaggacacatgacagttcccgtgaaacgctagtactgctggttgatcaaccaccgcagcatcagcagtcgaattgtgcacatgttcactatcattcacagtcaggctcccgctttcactaaatagcttaacagaccaattatggaacgggcattaccttgtgcgtaagacaccttgcctc

SEQ ID NO: 4291 - DNA, 374 bp, Bos taurus
  Clone ID: 19-LIB188-014-Q1-E1-E3
acaacatcccacacgggcccgtcgtcggttccactcgcaagctctacgaaaagaaaatcttcgagtatgagtcccagaggcggaggctctcgcccccgagctcgtccgcatcctctttctcctatcggttctcggacttagattcggcgtccgtggactcggatatgtatgatctgcccaagaaagaggacgccttactttaccagagcaagggctataatgatgactactatgaggagagttacttgaccaccaggacttacggggaacctgaatctatgggcacatccaagggcttccgccagccctcagcttcactctcagatgctgacccctttcaccgccaggtccgtgatgacaatcttttccctttg

SEQ ID NO: 4292 - DNA, 409 bp, Bos taurus
  Clone ID: 19-LIB188-015-Q1-E1-E11
acacgttctggctgagccagtctctctccgtgatggtcagcatgctgtaggccctgaaagttatgggtgaggactgcacagtctccacctggccttcagaaattccagacactatccgctttccatcacgaaaccaggacaaggagatctgtttggggctgaagtccgtggcctggcagatgaggctggacttgctattgccgtcaccagagaggctgttgcgaggcgggacaaagacactcacgactggggacagcacttccgcctttgtagcgatcaccctcacggtgccgacggtctttcctcccttggggtgctggacttcgcacaccaggtagtcatccggcccttgaaaggcgcttgaggagggcaggaccacctgagaagaggccgaccacaagccgtccct

SEQ ID NO: 4293 - DNA, 392 bp, Bos taurus
  Clone ID: 19-LIB188-015-Q1-E1-E3
actgctacaaccccagccaccaccccgaggagcagctctcctccaaggacctggtgtcctgcgcctaccaggtggcccgaggcatggagtatcttgcctccaagaagtgcatccaccgggacctggccgccaggaacgtcctggtgacggaggacaacgtgatgaagattgcggacttcggtcttgctcgagacatccaccacatcgactactataaaaagacaaccaacggccgactgcccgtcaaatggatggcaccggaggccttgtttgaccggatctacacccaccagagcgacgtgtggtcttttggggtgctcctctgggaaatcttcactctgggcggctccccataccctggggtccccgtggaggagcttttcaagctgctg

SEQ ID NO: 4294 - DNA, 400 bp, Bos taurus
  unsure (28): unsure at all n locations; Clone ID: 19-LIB188-016-Q1-E1-E3
ccatagccgccggataccgcagctgaanggcagcgggagactcggtgattgacatggaggcctctttcagagcccttggacgcgttcatttctcccctcagccccaattacctttggctggggctccccgggacccctctgcctctgcaaccatggctctctgcaactgcactggcagcttcacgtccttgatttccacgcgctccacctttattccccagtcatcagtggcatcatccaaggtacacggacggcggtttcatggcgacatctttgggcttggagacggtgttcttttctgggaagggcaggtccgagtgggccactgtgcacgtgaactcctctccggactcccagtcctccgagcagaccgaggcctcaccccgggcgctgaacgtgt

SEQ ID NO: 4295 - DNA, 428 bp, Bos taurus
  Clone ID: 19-LIB188-017-Q1-E1-E3
gcggccggatcatacagaaatggaaaaactaagggattccattagacccttgaggaccatgtaagtggtaccaaaaaggaaacacaggcttctgaagaccttctcagggaccactatattgacctgaaggaccgtccattctttgctggcctggtgaaatacatgcactcagggcccgtggttgccatggtctgggagggactgaatgttgtgaaaacaggtcgagtgatgcttggggagactaaccctgcggactccaagcctgggaccatccgtggggacttttgcatccaagttggcaagaacattatccatggcagtgattccgtggagagtgcagagaaggagattgccttgtggtttcgccctgaggaactggtgaattacaagagctgtgctcagaactggatctacgactgacttggaag

SEQ ID NO: 4296 - DNA, 382 bp, Bos taurus
  Clone ID: 19-LIB188-019-Q1-E1-E3
gatccttgagcaggacaaagtcactcgagcccctccagggagctgtggctaaattcttctctgccagctgtgttccctgcattgatagacaagcataccccaacctgtgtcaactgtgcaagggggagggggagaaccagtgtgcctgctcctcccgggaaccatacttcggttattctggtgccttcaagtgtctgcaggacggggctggagacgtggcttttgttaaagagacgacagtgtttgagaacttgccagagaaggctgacagggaccagtatgagcttctctgcccgaacaacagtccggcgccaattgaatccgttcaacgagtgccacctgtccccaagtcccttctcatgcctgtcctggcccgaaatgt

SEQ ID NO: 4297 - DNA, 390 bp, Bos taurus
  unsure (174): unsure at all n locations; Clone ID: 19-LIB188-020-Q1-E1-E3
acttcattaaagagctacggtttccagcagggctccaaatggtcaggcatggcttctatagcaggtctaaggaagcagcggggacgtcacaggacgatgagagggcaggtaactaccagaggccccttgtggcatcagcaggggcctcacactgctcggtgacatcagatgcangtctaaggagccaacgagtgactgcaggggctctcccaaccaaaagctaacttgccaaccgggtttctgaccctcctgccggcaaacttggccttgctgcccagttcctcttcaattcttaggaagcagaaagagagatggggagagaaagacagatgtcaaacttcaatgcaataaattttcccacccagagaggtattcaaggacacacttctt

SEQ ID NO: 4298 - DNA, 373 bp, Bos taurus
  Clone ID: 19-LIB188-021-Q1-E1-E3
tgaaaaggaccggcggatccgggaattgactgctgtggttcagaagagatttggcttccctgaaggcagtgtagagctttatgctgaaaaggtagccacaagaggactgtgtgccattgcccaggcagagtctctgcgttacaaactcctaggaggccttgctgtgcggagggcctgctatggtgtgctgcggttcatcatggagagtggggccaaaggctgcgaggtcgtggtgtctgggaaacttcgaggacagagggctaaacccatgaagtttgtggatggcctcatgatccacagtggggaccctgttaactactatgtggacaccgccgtgcgccatgtgctgctcagacagggtgtgctgggcatc

SEQ ID NO: 4299 - DNA, 405 bp, Bos taurus
  Clone ID: 19-LIB188-024-Q1-E1-E11
gatacagccactgaccactggaagggcacgaccgcccgcagcaagatggcaatgatccgtgtgaagtaaatgtagcagatgaccatgacatagtaatgccggaacagcttcagcttggccaggttcactgccaccttcccatcagtgccagacgcgtcctggagatgccggatggaccagaccacggggaacaggatggtgccacagcagatgagatccaccaggaagaggatctccttccagataccgtagtcgctggcaccctcctcgcgggactccatgacaatgtaggccacgttggccaggacctgcagtgggatcactatcccaaagatcttcttctccttgtctgacagcacatacttgacgaagggccaaccggagccgatcaaggcaatggtgatg

SEQ ID NO: 4300 - DNA, 424 bp, Bos taurus
  Clone ID: 19-LIB188-024-Q1-E1-E3
catgtacgcgggatagcaaaaccaaccctatggccccaccaacataagcccccagggctgggtctgtgcccacaaagggttggcctgttttgactgaactaacctgtggatttagtccaacaaatgcatttgcctgatttcagggctgaatttctgcttgacccaagtgtcaggcagagctgggtggcctcagctgactggcggtggacaggctgcacgatgggccgaaagtgcattactagagatgaccgcggttgaggacacctatttcccaggacccatggctatgtgaccacactggccgtgagtgactggttgttgaggatgactactctttagcaaacctattgtgtgtctgtagaggctgtttgatgattaaaacaatggctacttcctgttttggcaaatacttgactgcattttc

SEQ ID NO: 4301 - DNA, 403 bp, Bos taurus
  Clone ID: 19-LIB188-025-Q1-E1-E11
cagaagacaaggacgtggacgtggtgagaaacctggttttccacctgaagaagggctacatgatcgtcaagtgccgtggccagcaggacatcaagcatcggatgagcctggacaaggccctgcagagagagcggatattcttcgaggatcacgcacatttcagggaccttctggaggaagggaaggccactatcccctgcctggcagaaagactgaccagtgaactcatcatgcacatttgtaaaactctgcccctgttggaaaatcaaataaaggagactcaccagagaataacagaggagttacagaagtatggcaaggacatcccagaagaagaaagtgagaaaatgttctgtctgatagagaaaattgatacatttaataaagagatcatctcaacaat

SEQ ID NO: 4302 - DNA, 365 bp, Bos taurus
  Clone ID: 19-LIB188-025-Q1-E1-E3
cccgtccaattttgaggtcctggtaaggccaaatttgtatggaaacatccttagtgacctgtgtgcgggattgattggaggtcttggtgtgacaccaagcggaaacattggagccaacggagttgcaatcttcgattcggttcacgggaccgccccggacattgcgggcaaggacatggccaatcccacagccctcctgctcagcgccgtgatgatgctgcgccacatggggctttttgaccacgctgcgaagattgagacggcgtgttttgctacaattaaggatggaaagagcttaaccaaagatttgggaagcaattcaaagtgctcggacttcacagaagaaatctgtcgccgagtaaaag

SEQ ID NO: 4303 - DNA, 410 bp, Bos taurus
  Clone ID: 19-LIB188-026-Q1-E1-E3
cggcatactcctagttgaaggtcaaggccacgatgcggtccacgtcttccaccagctgcttgaatgtgggtctctgagacgggacctcgtgccagcaatctctcatcatcatgtacagctcgttggtgcagttactgggcttgtccatacgatgaccctccttcagtagcttgaaaagctcctccacggggaccccacggtatggggagccgcccatattgaatatttcccaaatgagcaccccataagaccacacgtcgctctggtgggtgtagatccggtcaaacaaggcctccggtgccatccattgtacaggcagtcggacgttggttgtctttttatagtagtcgatgtggtggatgtctcgagcacgaccgaagtccgcgatcttcatcacattgtcctccgtc

SEQ ID NO: 4304 - DNA, 399 bp, Bos taurus
  unsure (142): unsure at all n locations; Clone ID: 19-LIB188-027-Q1-E1-E3
gaacctgcagggaagattgctattgacagaggctatgacatcgcccagatatcccgacacctggacttcatcagccttttgacctatgactttcacggagcctggcgccagacagtcggacaccacaagcccctgtttcganggccaggaagatgcaagttctgacagattcagtaacgctgactacgctgtgagctacatgcctgaggctgggggctccagccaataagctggtgatgggtatccccacttttgggaggagctacactctggcctcttccaagacagatgtgggagcccccatctcagggccagggaattccaggccagttcaccaaggagaaagggatccttgcctattatgagatctgtgacttcctccacggagccaccaaccac

SEQ ID NO: 4305 - DNA, 381 bp, Bos taurus
  Clone ID: 19-LIB188-028-Q1-E1-E3
gccatgaacccgggatagcctctaccccaaaccagaagtttcaaccagttacccaacttcttaactatacacccagctggccagggcagccagcagtcatgggagcatctcacctgtctggaaaaggttctgcataggcgtggcttctccctggactcctctgcaggactctcctctctgttatttcatccacacagacccacatctcctaaggctcgaggggcagtcaatccatccaggggcaaaactggcttccagagaaaatctgtatacagtcgccctgcccgccatactacagcggtgcactggcggtccactgtcgtccatgtggacgtgggcttctgacattctactgcatcctgtgagaaaataaagcctttt

SEQ ID NO: 4306 - DNA, 444 bp, Bos taurus
  unsure (382): unsure at all n locations; Clone ID: 19-LIB2809-002-Q1-E1-E3
tggccgcgggatacctggtgagattgtggaaagcctttcaagcagtgaggaatctattacacgcatcaataagaaaattgagaagtttcagagtgaggaacagcagcaaacagaggatgaactccaggataaaatccacccctttgcccagacacagtctctagtctatcccttccctgggcccatccctaacagcctcccacaaaacatccctcctcttactcaaacccctgtggtggtgccgcctttccttcagcctgaagtaatgggagtctccaaagtgaaggaggctatggctcctaagcacaaagaaatgcccttccctaaatatccagttgagccctttactgaaagccagagcctgactctcactgatgttganaatctgcaccttcctctgcctctgctccagtcttggatgcaccagcctcaacagcctcttcc

SEQ ID NO: 4307 - DNA, 472 bp, Bos taurus
  Clone ID: 19-LIB2809-005-Q1-E1-E11
tgctcgccgtagccatggccacgcgatacttgcgtaggtgggggttgactactgagtaaggaatactgtttttaaggttctaaagctaaattcaaatgatgcattaatgacccaaaaactcagatctgatggtgtctgaatttctaacagtccttgctttgtgggtatgctgacaacttatctggatgccttacatcttttctaaacagtgttgcctctgaacgtgctctgctccctccctgctccctctttggagcccctttgcaccccagagcctgcagaagtggctggtataaaagggggcctggctagagaatgatcagtgtagctgtttgcaggattcctttctgggcttcattttggaaactttgcttagggctatttttcttaattgcccacatttgatggagggtagaaggaattttgaatgtatttgatttattattattatttttttttttagattaaagga

SEQ ID NO: 4308 - DNA, 244 bp, Bos taurus
  unsure (9): unsure at all n locations; Clone ID: 19-LIB2809-007-Q1-E1-E11
tttttatantcagtgtccagcacaaggactttgttctcattcaaggcatcgatcttgaacaccgcagggatcttggttttttctgcaatgatcttcctctgagcacactcaccgttctcccatttctgcagcaggatctccaggtcgccctcaggggtgggcttcagctcctccacatacactctcaggggggcactctgggcgtccatcacggagatgtccctggccgccatggccaacgagt

SEQ ID NO: 4309 - DNA, 457 bp, Bos taurus
  Clone ID: 19-LIB2809-007-Q1-E1-E3
caggcatcacatggtctcggcaacgctgtaagttgatagcagccaggtcaaagccgtggatcttgtgagtgggctggaaaagcttgttgcgcagctcactcgtcaccattttatcctgattcatcagtttggacttcttggccagcagaccccgcaccagagggtcaattccaccgtctttgattatcctccaggtgttgaagaacagggtgtgtatggggagctctgcttccggaccccatggctggtaattctcatccaggcgggacacagtggagggaacctccatgtggccaaagcggaaggcaaaggtgaagacattggaaattcggggatccacagagttattatagccttggtatggcaggatccacttctgcatctcactacctagcacaatgggtaggtagtccctaaaggtgatgatctgtatgaacgctcccaggattttccgggc

SEQ ID NO: 4310 - DNA, 435 bp, Bos taurus
  Clone ID: 19-LIB2809-008-Q1-E1-E11
tgggcccggcatacagcagaaaggcctgaatgggcatatctctctggggatagggcactgctttctggggaacaggcaggactttggactgagaaagggacagcacggactgaggaggaaacatgacagttggaggaagaagctggtgaggctggtgcatccaagactggagcagaggcagaggaaggtgcagattttcaacatcagtgagagtcaggctctggctttcagtaaagggctcaactggatatttagggaagggcatttctttgtgcttaggagccatagcctccttcactttggagactcccattacttcaggctgaaggaaaggcggcaccaccacaggggtttgagtaagaggagggatgttttgtgggaggctgttagggatgggcccagggaagggatagactagagactgtgtctgggcaa

SEQ ID NO: 4311 - DNA, 450 bp, Bos taurus
  Clone ID: 19-LIB2809-011-Q1-E1-E11
gccatagcggcgggatacagcagaaaggcctgaatgggcatatctctctggggatagggcactgctttctggggaacaggcaggactttggactgagaaagggacagcacggactgaggaggaaacatgacagttggaggaagaggctggtgaggctggtgcatccaagactggagcagaggcagaggaaggtgcagattttcaacatcagtgagagtcaggctctggctttcagtaaagggctcaactggatatttagggaagggcatttctttgtgcttaggagccatagcctccttcactttggagactcccattacttcaggctgaaggaaaggcggcaccaccacaggggtttgagtaagaggagggatgttttgtgggaggctgttagggatgggcccagggaagggatagactacagactgtgtctgggcaaaggggtggatt

SEQ ID NO: 4312 - DNA, 358 bp, Bos taurus
  Clone ID: 19-LIB2809-012-Q1-E1-E3
tggccgcgggatacagggctcatcaccccactgcggacccctctcccactggctggacccccccgccgggttggggccttccttgactatgaatcaggagacatcttcttcgacaacatgagtgatggatcccatatctagactttctccagggcgtctttctctggccgcctccgggccttcttctgcttgtggtcctgtggtaaaaagcccctgacgagctgccgagtcactgatcgacgtgagggagtcatggtagttgctgatgccaaggacatttcaaaggagatcccactgtcgcccatgggggaggactctgcctccgcggatatagaaaccctccattctaaactaatcc

SEQ ID NO: 4313 - DNA, 455 bp, Bos taurus
  Clone ID: 19-LIB2809-013-Q1-E1-E3
ccgtgccgcagctcccggacgccaaggcggcgggaacactaccaaaatgttaattgagaaaagctgaaaagttttagtttactcaatatcacatgctagaagaaagtttgcatgagaaaacactgaagaggtaattttttaatccagatttcacaaactcatggtgcaaattgggtcccatagcttcctctagagtaataactgcttttcactgcttgttggctgcctgtgaaaatttgaaataactcaaaagctactaacaaaactagtcatatccacccatgctgttctggccaccatagccagccccgtaacagccgctcacagactggctctcaaggccactgtaagtggactgggttgacacccccatgccttgcatcatctggctgctatatgccccgttgctggcccctgttgtggaatttaagaaaagttctatgtatcgatgttgc

SEQ ID NO: 4314 - DNA, 452 bp, Bos taurus
  unsure (407): unsure at all n locations; Clone ID: 19-LIB2809-014-Q1-E1-E3
gcggccggatccttgtaggatcaccactagcaatggtattgatggtagggatttctgttttatcctgatttttctttggtggaatggccataaatgataaatgtgggtgtgggtggcgtgccatggtagttggctgggcttggcaggacttggcaggcacagtatttgacaaaacttgccattgaagaatttgggcaggtgacctaactgcagctggctttgcataatatgggtatggcagaaattgattattaattagtgcaactggtttctgttggtagtaattgagtccataactaggatacctactcagcacatactgaattgggatatatttggctatcttgtcactgaagaatctttcatctttctcacagcgtattggttgttcttggttttgctcctgngcacccaaaaatggcagggttaatgccaggatagtcacaactagg

SEQ ID NO: 4315 - DNA, 389 bp, Bos taurus
  Clone ID: 19-LIB2809-015-Q1-E1-E3
gaatgggcatatctctctggggatagggcactgctttctggggaacaggcaggactttggactgagaaagggacagcacggactgaggaggaaacatgacagttggaggaagaggctggtgaggctggtgcatccaagactggagcagaggcagaggaaggtgcagattttcaacatcagtgagagtcaggctctggctttcagtaaagggctcaactggatatttagggaagggcatttctttgtgcttaggagccatagcctccttcactttggagactcccattacttcaggctgaaggaaaggcgacaccaccacaggggtttgagtaagaggagggatgttttgtgggaggctgttaaggatgggcccacggaagggataaact

SEQ ID NO: 4316 - DNA, 358 bp, Bos taurus
  Clone ID: 19-LIB2809-016-Q1-E1-E11
gccatgtaaccgggatggccggtaggattgtgaaaagcctttcaagcagtgaggaatctattacacgcatcaataagaaaattgagaagtttcagagtgaggaacagcagcaaacagaggatgaactccaggataaaagcgacccctttgcccagacacagtcgctagtcgatcccttccctgggcccatccctaacagcctcccacaaaacatccctcctcttactcaaacccctgtggtggtgccgcctttccttcagcctgaagtaatgggagtctccaaagtgagggaggctatggctcctaagcacaaagaaatgcccttccctaaatactcagttgagccctttactgaaag

SEQ ID NO: 4317 - DNA, 389 bp, Bos taurus
  unsure (49): unsure at all n locations; Clone ID: 19-LIB2809-016-Q1-E1-E3
cccgggctacagcagaaaggactgaatgggcatatctctctggggatanggcactgctttctggggaacaggcaggactttggactgagaaagggacagcacggactgaggaggaaacatgacagttggaggaagaggctggtgaggctggtgcatccaagactggagcagaggcagaggaaggtgcagattttcaacatcagtgagagtcaggctatggctttcagtaaagggctcaactggatatttagggaagggcatttctttgtgcttaggagccatagcctccttcactttggagactcccattacttcaggctgaaggaaaggcggcaccaccacaggggtttgagtaagaggagggatgttttgtgggaagctgttatgga

SEQ ID NO: 4318 - DNA, 393 bp, Bos taurus
  Clone ID: 19-LIB2809-017-Q1-E1-E11
gccatgggcacgggatacgtgccgagattgtggaaagcctttcaagcagtgaggaatctattacacgcatcaataagaaaattgagaagtttcagagtgaggaacagcagcaaacagaggatgaactccaggataaaatccacccctttgcccagacacagtctctagtctatcccttccctgggcccatccctaacagcctcccacaaaacatccctcctcttactcaaacccctgtggtggtgccgcctttccttcagcctgaagtaatgggagtctccaaagtgaaggaggctatggctcctaagcacaaagaaatgcccttccctaaatatccagttgagccctttactgaaagccagagcctgactctcactgatgttgaaaatctgc

SEQ ID NO: 4319 - DNA, 346 bp, Bos taurus
  Clone ID: 19-LIB2809-018-Q1-E1-E3
aaattacccaggaatttgtggctaaaatcagtttaccacagataagctatgatgtgtctggttaattagcatttttatcttgaatgtaaattaatgtcataaaactaacaatacatgttttttattttttaaggaaattgttcccaatagtgttgaggtgagatatatctactaaatttaaaatatattaacatcatccaggatatcttaaaatttaattaaactttttattttttgaattttttagcagaatcacattcaaaaggaagatgtgccctctgagcgttacctgggttatctggtaaaattttattaaaagttaatcaaataccaatgtatcacggaa

SEQ ID NO: 4320 - DNA, 442 bp, Bos taurus
  Clone ID: 19-LIB2809-019-Q1-E1-E3
cgcaatgggcgcgggctacctggagagattgtggaaagcctttcaagcagtgaggaatctattacacgcatcaataagaaaattgagaagtttcagagtgaggaacagcagcaaacagaggatgaactccaggataaaatccacccctttgcccagacacagtctctagtctatcccttccctgggcccatccataacagcctcccacaaaacatccctcctcttactcaaacccctgtggtggtgccgcctttccttcagcctgaagtaatgggagtctccaaagtgaaggaggctatggctcctaagcacaaagaaatgcccttccctaaatatccagttgagccctttactgaaagccagagcctgactctcacggaaggttgaaaatccggaacttcctctgcctcggctccagtcttggatgcaccagcctcaccag

SEQ ID NO: 4321 - DNA, 364 bp, Bos taurus
  Clone ID: 19-LIB2809-020-Q1-E1-E3
gaataacctttgtcttaggttgaatcaatggcttcaaacctttctgatgctgataaacagtcttgagatactggggcaaggcgaatttctggtaacgctggctgatttttttcagaaaatttaggcgattcttttcttcttcagtcagtttagttttcttagtgaatacttctgttgattccatgtcaacggtcttctttgaattttcctcactggtggagagctgctctctgttcagagtgggagtaatgggaacagcatttctcttaacctgatcccatgggttcaaaacaattggaccttgatacacatactggagatactgggggaacttctgataaaactgattgatttcattcagtgc

SEQ ID NO: 4322 - DNA, 444 bp, Bos taurus
  Clone ID: 19-LIB2809-021-Q1-E1-E3
gccatggatccgggatagacgtgatcgggtcctagatctgcgcctagcaggtgttctagaccgagacctgcctctccgggcaggtgttctagatcgtgacctccgcctggcgggtgttctagatcgtgacctccgcctggcaggtgttctagaccgagacctgcctctccgggcaggtgttctagaacgagatctgcccctagttgcaggggatctagagtgtgacctgcctcgtcttgctgatctagacctgcctcttctctgtgcatttctgctcctggaccagcctggccgctgaggagacctagagcggccacgtcgctgggggcttctagatcgtccccacctctgtgcagaacgtgatctacgccactgaggtgaccgggaccgagaatgccctctcttggtaggggttcgagaccgagaccgccccctcttattggg

SEQ ID NO: 4323 - DNA, 381 bp, Bos taurus
  unsure (326),(343): unsure at all n locations; Clone ID: 19-LIB2809-024-Q1-E1-E11
gaactggcccaactggccatcgtgcccctgctgctgctgtgtaacgtccagccccgccgcaacctgccggtggtctttgagcacgactcctggttcatcatcttcatggctgccttcgccttctccaatggctaccttgccagtctctgcatgtgctttgggcccaagaaagtgaagccggctgaggcagagacagctggagccatcatggccttctttctgtctctgggcctggcgctgggggccgtcttctccttcctgttccgggcaatcgtgtgaccgcggatggacggcaggatggcaccggctgcctgttcctgccttcncctttaagggtgggcangggtcctctggaggttttcttgtctagccatctcctgc

SEQ ID NO: 4324 - DNA, 424 bp, Bos taurus
  Clone ID: 19-LIB2809-025-Q1-E1-E11
cccggacaacagaaaggcagaatgggcatatctctctggggatagggcactgctttctggggaacaggcaggactttggactgagaaagggacagcacggactgaggaggaaacatgacagttggaggaagaggctggtgaggctggtgcatccaagactggagcagaggcagaggaaggtgcagattttcaacatcagtgagagtcaggctctggctttcagtaaagggctcaactggatatttagggaagggcatttctttgtgcttaggagccatagcctccttcactttggagactcccattacttcaggctgaaggaaaggcggcaccaccacaggggtttgagtaagaggagggatgttttgtgggaggctgttagacctgcccgggcggccgctcgaacctgacaattgttcgggac

SEQ ID NO: 4325 - DNA, 420 bp, Bos taurus
  unsure (394),(411): unsure at all n locations; Clone ID: 19-LIB2809-025-Q1-E1-E3
gccatgggcgcgggatacagcagaaaggcctgaatgggcatatctctctggggatagggcactgctttctggggaacaggcaggactttggactgagaaagggacagcacggactgaggaggaaacatgacagttggaggaagaggctggtgaggctggtgcatccaagactggagcagaggcagaggaaggtgcagattttcaacatcagtgagagtcaggctctggctttcagtaaagggctcaactggatatttagggaagggcatttctttgtgcttaggagccatagcctccttcactttggagactcccattacttcaggctgaaggaaaggcggcaccaccacaggggtttgagtaagaggagggatgttttgtgggaagctgttanggatgggcccaaggaanggatagact

SEQ ID NO: 4326 - DNA, 377 bp, Bos taurus
  Clone ID: 19-LIB2809-027-Q1-E1-E3
gagcaggcccgtggaacatgagtcttcccgaggccaacaaggtgaggctatcaaacaacttgaagatggaataacgaggctgatgaatggagaagatgattgtccgtccttgtttagacatcctcttcaggagcaaaaggacagcatttgctgtgcttgaatctaagccagttgtgggctcatccaggaacaagatggatggatcagtaataagctccattgcaatactagtcctttttctttctcctccagacacaccacggataaactgagttccaaccttggaatctgccactttatccagacctaactcttgaataaccttgttaatccgttcatttttttcgtaacttgtcatagttgttggaagccccaag

SEQ ID NO: 4327 - DNA, 431 bp, Bos taurus
  Clone ID: 19-LIB2809-029-Q1-E1-E3
ataacctttgtcttaggttgaatccatggcttcatagctttctgatgctgataaacagtcttgagatactggggcaaggcgaatttctggtaacgctggctgatttttttcagaaaatttaggcgattcttttcgtcttcagtcagtttagttttcttagtgaatacttctgttgattccatgtcaacggtcttctttgaattttcctcactggtggagagctgctctctgttcagagtgggagtaatgggaacagcatttctcttaacctgatcccatgggttcaaaacaattggaccttgatacaaatactggagatactgggggaaactctgagtaaactgattgatttcattcagtggcttctggtagtgcttatcgtccacagtaatcttaacttcctctgtggcaacttcagcagattcctcact

SEQ ID NO: 4328 - DNA, 445 bp, Bos taurus
  Clone ID: 19-LIB2809-030-Q1-E1-E3
gccaagggcccgggataccaagtacccgccaacttctggatatccaggcccttcatggtctgggtgacaatgagggcctgggcgccacaagtgagggccagggcaagcaggaggcacttcatggctgcagctggggtcacgctacaaggaagccaaggccagcataaacccagtgactggaagggtagaggaaaagcctcccaaccccatggaaggcatgacagaggagcagaaggagcacgaggccatgaagctggtgaacatgttcgacaagctttccaggcacagggtcatccagcccatggggatgagtccccggggtcagctcacatccctgcaggacgccatgtgtgagaccatggaggggcagctctcctcggaccctgactcggaccctgaatgaaaattggcggcccttctgctccccttcagaaccggtgctgct

SEQ ID NO: 4329 - DNA, 393 bp, Bos taurus
  Clone ID: 19-LIB2809-031-Q1-E1-E3
ccgcctagggcccgggatccagcagaaaggccagaatgggcatatctctctggggatagggcactgctttctggggaacaggcaggactttggactgagaaagggacagcacggactgaggaggaaacatgacagttggaggaagaggctggtgaggctggtgcatccaagactggagcagaggcagaggaaggtgcagattttcaacatcagtgagagtcaggctctggctttcagtaaagggctcaactggatatttagggaagggcatttctttgtgcttaggagccatagcctccttcactttggagactcccattacttcaggctgaaggaaaggcggcaccaccacaggggtttgagtaagaggagggatgttttgtgggacgctgt

SEQ ID NO: 4330 - DNA, 384 bp, Bos taurus
  unsure (259): unsure at all n locations; Clone ID: 19-LIB2809-032-Q1-E1-E11
gccatgagggcgggatacaccagaaaggcctgaatgggcatatctctctggggatagggcactgctttctggggaacaggcaggactttggactgagaaagggacagcacggactgaggaggaaacatgacagttggaggaagaggctggtgaggctggtgcatccaagactggagcagaggcagaggaaggtgcagattttcaacatcagtgagagtcaggctctggctttcagtaaagggctcaactggatatttanggaagggcatttctttgtgcttaggagccatagcctccttcactttggagactcccattacttcaggctgaaggaaaagcggcaccaccacacgggtttgagttagacgacggatgttttgtggg

SEQ ID NO: 4331 - DNA, 401 bp, Bos taurus
  Clone ID: 19-LIB2809-032-Q1-E1-E3
cgcctagggcccgggatactgggctatcatccacactgcggacccctctcccactggctggacccccccgccgggttggggtcttccttgactatgaatcaggagacatcttcttctacaacatgactgatggatcccatatctatactttctccaaggcctctttctctggccccctccggcccttcttctgcttgtggtcctgtggtaaaaagcccctgactatctgcccagtcactgatgggcttgagggagtcatggtagttgctgatgccaacgacatttcaaaggagatcccactgtcccccatgggggaagactctgcctccggggatataaaaaccctccattctaaactaatccctctacagcccagccaaggggtgccctaagaaatactc

SEQ ID NO: 4332 - DNA, 344 bp, Bos taurus
  Clone ID: 19-LIB3057-003-Q1-K1-E3
tgtggctgaagctacgaggcgggagtggaggtgcgcggacgcaggcaggcagacaggcacagtcagtcgggaaggactgcaaatcctattctccaatttctctccaactgcccggagctagcgtttgtggctcccggcctggtgttttggggagcgccgggagagccccttctccagccgcccccaggcggagagccccgctgcgcgggcgctgctgacagcgcggagagcggctactgtccgcccggggaagtccggagagcggctgcagcggcaagaacttttcccggccaggaagacaggagacaagtggccgccgggtcccggaacgaacttttggcaaa

SEQ ID NO: 4333 - DNA, 327 bp, Bos taurus
  Clone ID: 19-LIB3057-004-Q1-K1-E11
ggcgcccaacgaacgtgcggtgcgtgacgggcgagggggcggccgcctttccggccgcgccccgtgtcccgggacgaagggctctccgcaccggaccccggtcccgacgcgcggcgggggcgcgccgcgccgcgccccgggggacgcgggcgacggcccgccggcggggacggcgggggaccggctatccgaggccaaccgaggctcccgcggcgctgccgtatcgttccgcctgggcgggattctgacttagaggcgttcagtcataatcccacagatggtagcttcgccccattggctcctcagccaagcacatacaccaaatgt

SEQ ID NO: 4334 - DNA, 227 bp, Bos taurus
  Clone ID: 19-LIB3057-004-Q1-K1-E3
ccgaactaagtgattcttcgaatcatgtctgttggctcctgggattttaccagcacagaggtggttgcctagagggaatggaccccgatggtgtcatcgacagcaactggaatgagattgttgataactttgatgatatgaacttaaatgagtctattcctctgtgcatctattcttatggttttgagaagccatcatctattcagcagatagctattattccatgt

SEQ ID NO: 4335 - DNA, 430 bp, Bos taurus
  unsure (423): unsure at all n locations; Clone ID: 19-LIB3057-006-Q1-K1-E11
caaacttcccttagatactgagctcagtaaattgttctaggaaattatctctcatttcagactttctcacatgagacatgttaccatcttttggctttctgactatcgaaaaaaatagataaaatttccataaacagaagaattataccaccactgttcaataattgcctttaaaatatttcacatttcatttaaaagttctcttcaaccttgtgataaaatggtcaagaatttttctaatagtaaagttccaacaattttgttatgccgagttgctcagttgtgtctgactcttgtgactccatggactgtagcccaccaggctcttctgtccatggggattctccaggcaagaatactggagtgggttgccatgccctcctccaggggatatttccaaccaagggatcaaacccaggtctncctcatt

SEQ ID NO: 4336 - DNA, 373 bp, Bos taurus
  Clone ID: 19-LIB3057-006-Q1-K1-E3
gcccaacagacccaccatgaagtccttatgagcttgattcttgggttgctgcgctccgggaatgaccctctgtatcacctagtcaccgaggtacggagtatgaaaggagccccatatgctatcctatcgagggccatacacatcgatgaagcacacaaactacttacggaaggcatggtgatgttctatggccaggtatttcctggagccaaagagactgagccctaccctgagtagtcaggactcccgtacctgcgaactacggatgaagatgcacgtaattccgctgtctataacctgctccattgcctgcgcagatattcaagcaagagtgacacttaccgtaagctattgaaacgcagaatcatctaca

SEQ ID NO: 4337 - DNA, 427 bp, Bos taurus
  Clone ID: 19-LIB3057-008-Q1-K1-E3
gatacttgtctgccggcttctggttcccacgcaagtaagcctgctgtcaatggaggaggacagggatacccgcaaaatcaacaacagtttcctgcgcgaccacagctatgcgaccgaagctgacattatctctacggtagaattcaaccacacgggagaattactagcgacaggggacaaggggggtcgggttgtaatatttcaacgagagcaggagagtaaaaatcaggttcatcgtaggggtgaatacaatgtttacagcacattccagagccatgaacccgagttcgattacctgaaaagtttagaaatagaagaaaaaatcaataaaataagatggctccctcagcagaatgcagcctacttccttctgtctactaatgataaaactgtgaagctgtggaaagtcagcgagcgtgataagaag

SEQ ID NO: 4338 - DNA, 412 bp, Bos taurus
  Clone ID: 19-LIB3057-010-Q1-K1-E11
tcgacccacgcatccacgagcggccagctttattcactaatacattttggattcaatgcattcatcgaccttccaggcccatggaacatttcattatgatgaaatttcggttccctactgggaatctgcctaatcctacaaatcctcacaggcctattcctagcaatacactacacatccgacacaacaacagcattctcctctgttacccatatctgccgagacttgaactactgctgaatcatccgatacatacacgcatacggagctacaatgttctgtatctgcttatatatgcacgtacgactaggcttatattaccggtcttacacttttctagtaacatgaaatattggagttatccatcttctcacattaatagccacagcatttataggatacatcctaccat

SEQ ID NO: 4339 - DNA, 414 bp, Bos taurus
  unsure (114),(317): unsure at all n locations; Clone ID: 19-LIB3057-014-Q1-K1-E11
ccttccttttcaaaagccactgcttcctcggcctctaagcagcctgcaggggaccgctttgactctgctccccgaccaggcccgggactgtgtcgtggtgctggaccaggcctncccgcatagtgagcctgggcctgaggtttcctcctggaggcagcaccgtggggccctgtggcaggaggaagctgggggcatcttctccccagggtttacactccagatggacaacgtctctgtggaccctgacatcatgagtccccacgtccacctgccctgggacctcggcgaggccagcctcacaggccgactcgagtcangcctccgtgaaagtggcttttcacaagcgctaagtgccctcagcgacctgagaggtgagcccgaccccactgaggatacctgccagggcctgagcca

SEQ ID NO: 4340 - DNA, 430 bp, Bos taurus
  Clone ID: 19-LIB3057-015-Q1-K1-E11
cagagaccttatgagaatgctcagagcccagggataaaaggcctcgcttaccctggtgtgatgagtcacaccagtgcagcccagcagccagcggggctaagcagccaaccccagtcaccatactggagagatggatcatttcatccgcttggagtgagaccgctggacctggggaccatgagtccacgagtttggtatgggccaaacccaggccacatgccaagcctgtataaaactccagtgcctgagaccaacctcctggggaacacacccaccattccattcacctccttgccatcaagagatgagtcttcaaaatataccatacacagcagttctggcattcagattggcgacagtaattacatggagattggtggaatgagttcatcggtgctcgacagcacatacatgaacttgaaagaagagc

SEQ ID NO: 4341 - DNA, 458 bp, Bos taurus
  Clone ID: 19-LIB3057-015-Q1-K1-E3
attgaagttcttggttttaatgctcgttagcgttaagcctttcttaatgcaattatgcgctatgggatgccccctgaggatgcttttaccacccagtggctcgtgcgggatctgcgaggcaaatctgagaaggagttcaaggcttatgtctcgctttttatgcggcatttatgtgagccgggagcagatggggccgagacctttgctgatggcgtcccccgagaaggcctgtctcgccagcatgtccttactcggattggggttatgtccttgattcgcatgaaggtttaagtagtttaaacatgggaggtgtcttctttatcattctcttttctttctttatatttatttatttttttattattttttatttcgtgtttattttttttttattattttactttttttatattcttttgtcttttttttttaatttttttatttttttttcttttttt

SEQ ID NO: 4342 - DNA, 438 bp, Bos taurus
  Clone ID: 19-LIB3057-016-Q1-K1-E3
cccttcctacccctgaagataaagaacatgcccaacagacccaccatgaagtccttatgagcgtgattcttgggttgctgcgctcctggaatgaccctctctatcacctagtcaccgaggtgcggggtatgaaaggagccccagatgctatcctatcgagggccatagagattgaggaagaaaacaaacgacttctggaaggcatggagatgatatttggccaggttattcctggagccaaagagactgagccctaccctgtgtggtcaggactcccgtccctgcaaactaaggatgaagatgcacgttattccgctttttataacctgctccactgcctgcgcagggattcaagcaagattgacacttaccttaagctcctgaattgcagaatcatctacaacaacaactgctaagcccacattcatcctatccatt

SEQ ID NO: 4343 - DNA, 275 bp, Bos taurus
  Clone ID: 19-LIB3057-018-Q1-K1-E11
gccgaggccgaccgctgggcgtggctgctggtgctcagcttcgtgtttgggtgcaatgtggtcaggatcctcctgccgtccttctcctttttcatgtcccgggtgctgcagaaggacgcagagcatgagtcctagatgcgagcctagatccagggcatgaagcacgagctctctactgtcaacatgatggatgagtttgccagatatgccaggctttataggaagatcaacaagatgaccgatttactctaaactcatgtgaaagcacttacagc

SEQ ID NO: 4344 - DNA, 351 bp, Bos taurus
  Clone ID: 19-LIB3057-018-Q1-K1-E3
ggcggagtacgacttgactactcgcatcgcgcactttttagatcggcatttagtctttccgttgcgtgagtttctctccgtagaagagatatataatgaaaaggagttgttacaagggaaattggatcttcttagtgataccaacatggtagactttgctatggatgtgtacaaaaacctttattctgatgatattcctcatgctttgagagaaaaaagaacaactgttgttgcacagctgaaacagcttcaagcagaaactgaaccaattgtgaagatgtttgaagatccagatactacaaggcatatgcagtcaaccagggatggtcggatgctgtttgactacctggc

SEQ ID NO: 4345 - DNA, 353 bp, Bos taurus
  Clone ID: 19-LIB3057-020-Q1-K1-E3
gcctggaccacaaatttgacctgatgtatgccaagcgtgcctttgttcactggtacgtgggtgagggcatggaggaaggagagttttctgaggcccgtgaggacatggctgcccttgagaaggattatgaggaggttggtgtggattctgtggaaggagagggagaggaagaaggagaggaatattaattaccattcctttcagccttgcagcatgtcatactcaacttcagcattagctgacaggcgtaaaaactttgactagattgtcttcgctttcaactatgatcatgtattgcttttccatgtgtgtctggaacacttatgtcctgtctcaaaagtaaagattttaag

SEQ ID NO: 4346 - DNA, 405 bp, Bos taurus
  Clone ID: 19-LIB3057-021-Q1-K1-E11
agcgcagcgtggtctgccagccggagatgcgtgacgttgtgttctgaggagcggccagcggcgcgatggagcgggccagggaccgtttacacttgagacggactacagaacagcacgtaccagaggtggaagtccaagtcaaacgtagaaggacagcctcactgaacaaccaggagtgtcacgtgtacctgaggcgatctcagcagcagcaagtacctgtggtggatttccaggcagaactgagacaggcattcttagctgagacaccaagaggtggttaaagcagtattggaacaccaaggctccatctactatttgaagcttctgcctcagcttgcattatttgtaagagaacctgcgtcatacctttatctgtagcccttcctaggtcttaaggatcctgaa

SEQ ID NO: 4347 - DNA, 378 bp, Bos taurus
  Clone ID: 19-LIB3057-021-Q1-K1-E3
gtccttatgagcttgattcttgggttgctgcgctcctggaatgaccctctgtatcacctagtcaccgaggtacggggtatgaaaggagccccagatgctatcctatcgagggccatagagattgaggaagaaaacaaacgacttctggaaggcatggagatgatatttggccaggtaattcctggagccaaagagactgagccctaccctgtgtggtcaggactcccgtccctagcaaactaaggatgaagatgcacgttattccgctttttataacctgctccactgcctgcgcagggattcaagcaagattgacacttaccttaagctcctgaattgcagaatcatctacaacaacaactgctaagcccacattca

SEQ ID NO: 4348 - DNA, 384 bp, Bos taurus
  Clone ID: 19-LIB3057-024-Q1-K1-E11
agcaaaaccaacaaagcagaaagattctcttgaagaccaatattaatacttggcctctgtgggatgcattgttgttcagtcactaagtcgtatccaactctttgggaccccatggactgtaacctgccaggctgctctcgtctctggggtttttccaggcagcaattctggagtggattgccatttctccagaggatcatcccaattcaggggtcaaacctgcatctcctgcattggcaggctgattctttagctctgagccacctatgtagcccctttacctcacctaaccaaccacatattattaacttgactattgtcagacaatattcagtatcttgccacttatcactcctactgcctgcaggcttgtctatttcatta

SEQ ID NO: 4349 - DNA, 355 bp, Bos taurus
  Clone ID: 19-LIB3057-025-Q1-K1-E3
cgggctccgccatgttgggacttgtgggtcgtgtggttgctgcctcggcctccggggcgcttgcggggactcagcccttcagcgccgctaccgcaagcccagcttttactgcgggccgctcctgcagcgctccagcctgccagagactatgccgctcaagcatctccatcgccaaaggccggcgccaccactgggcgcatcgtggcggtcattggtgcagtggtggacgtccagtttgatgagggactgcctaccatcctaaatgccctggaggtgcaaggcagggagaccaggctggtttggaggtggcccagcatttgggtgagagcacagtaaggaccattgctatggatgg

SEQ ID NO: 4350 - DNA, 329 bp, Bos taurus
  Clone ID: 19-LIB3058-001-Q1-K1-E3
tcgcggactcgtggggtgatgtccctgtatagagtcttctcttgtgttgttggaagagggtgtttgctatgaccagtgcattctctaggcaaaattctgttagcctttgctgggagttattaattgcctgtaatgtttggtgtgctgcttagccccaaaacaagccccaaaaaaaaaaataaaaaaaaaaaaaaaaaaaacataaaaaaaaaaaaaaaaaaaaaaaataaaaaaaaaaaaaaaagaacacaaataaaaaaaaaaaaaataataaataacttacaaataaaagatttaaaaaaaaagggggggccgctttaaaggtccca

SEQ ID NO: 4351 - DNA, 449 bp, Bos taurus
  Clone ID: 19-LIB3058-002-Q1-K1-E3
gccgacttcccttgcctacattgttccattggccagaggctgttcaccttgagacctgatgcggttatgagtacgaccgggcgtggacggaattcggtcctccggattttcaagggccgccgggggcgcaccggacaccgcgcgatgtgcggtgctcttccggccgctggaccctacctccggctgaaccgattccagggttggcgggccgttaagcagaaaagataactcttcccgaggcccccgccggcgtctccggacttcctaacgtcgccgtctgccgccacgtcccggctcgggaaatcttaacccgattccctttcgggtgacgcgcgtgatcgcgctatctgccgggtttcccccgtcccttaggatcggcttacccatgtgcaagtgccgttcacatggaacctttctcctcttcggccttcaaagttctcatttgaata

SEQ ID NO: 4352 - DNA, 280 bp, Bos taurus
  Clone ID: 19-LIB3058-003-Q1-K1-E3
gttctagatcgcgagcggccgccctttttttttttttttttttcttattcttttttttaggatcgaggtttaactggaattggcttagccaactcttccctcgacattgctctttacgacacatactactttgacgaacattttcactatgatctatcaataggagctgtattcgctattatagggggatttgctcattgattccaactattttcacgttatactcttaacgatacatgagccaaattccaatttcgcattatatttgagggcttctata

SEQ ID NO: 4353 - DNA, 439 bp, Bos taurus
  Clone ID: 19-LIB3058-005-Q1-K1-E3
caatgaccctggacctcgctctgctccgtagcgtgcagcattttgctcaggcgttcaaggccaagaatgtgtctcttcacgtgcttgtgtgcaacgcagctgtgtttgggctcccctggaccctcacaaaggacggcctggagaccaccttccaggtgaaccacctgggccacttttacctcgtccagctcctgcaggacgtcctgtgccgctccgcgcctgcccgggtcgtcgtggtctcctcggagtcccatagattcacagatattaacgattcctcgggaaaactagactttagccgcctttctccatcgaaaaacgactactgggccatgctggcctacaaccggtccaaactgtgcaacatcctgttctccaacgagctccaccgtcgactgtccccccgcggggtcacgtctaatgctgtgcaccccgggaa

SEQ ID NO: 4354 - DNA, 378 bp, Bos taurus
  Clone ID: 19-LIB3058-006-Q1-K1-E3
cctgcccttccggaagccgttaatcatcttcaccccaaagtccctgctgcggcatcgggaagccaggtccaactttgacgagatgcttccaggaacccacttccagcgggtgatcccagaagatggccctgcagcacagaacccaggaaacgtcaagagacttctcttctgtactggcaaggtgtactatgacctcacccgagagcgcaaagcgcgggacatggtggagcaggtggccatcaccaggatcgagcagctgtcgcctttccccttcgacctcctgctgcaggaggtccagaagtaccccagcgctgagctggcctggtgccaggaggagcacaagaaccaaggctactacgactacgtgaagcccaggct

SEQ ID NO: 4355 - DNA, 435 bp, Bos taurus
  unsure (115),(405): unsure at all n locations; Clone ID: 19-LIB3058-007-Q1-K1-E3
gagaggagacgggtcacctcagtcactcggcggtcctatgtctcctcctcagagatggtggtggggggccgccgcctgggtcccggcacccgcctgtccctggctcgaatgccgncttcactcccagcccgggtggacttctccctggccggggcactcaactccggcttcaaagagacccgggccagcgagagggcagagatgatggagctcaatgaccgcttcgccagctacattgagaaggtgcgcttcctggagcagcagaacaaggcgctggctgccgagctcaaccagctgcgggccaaggaacccaccaagctggccgacgtctaccaggcggagctgcgcgagctgcgcctgcggctcgatcaactcactgccaacagcgcccggctcgaggtgganagggacaacctggcacaggacctgggcacc

SEQ ID NO: 4356 - DNA, 344 bp, Bos taurus
  Clone ID: 19-LIB3058-008-Q1-K1-E3
gcaaggccgtgcccatacgcagcggccgcaagggtggctcctttcagtcctgtaccatcatctgagcgtcctgggccacctgccccttctttacaagggaaggaggaggggaggggagcatccctctgcttgatctttgattcttttttattttttactcaaagttaactttcctgtaatttttaaaaacttgtaaaataacctcttttcctgcccacccccttcccctctaacgctcaagctttcaacacaagggggtgggtaggcgtcatttaggaacctggaccacagttgaccaggctgggccaagtttggcctggactggagccacgaccctaagccct

SEQ ID NO: 4357 - DNA, 201 bp, Bos taurus
  Clone ID: 19-LIB3058-009-Q1-K1-E3
gttctagatcgcgagcggccgtccttttttttttactcttattttatcttttatactgaggggtcaagaatttattaagggataccttcaaaacatacttttaatcacgttatcaaaaaatcaatctaaaatcacttcaaaattctgcaactgtcaatttaaaaaattatgttctaatttttgaaaagttcaaactcatat

SEQ ID NO: 4358 - DNA, 392 bp, Bos taurus
  Clone ID: 19-LIB3058-013-Q1-K1-E11
ggtgggagtgtcagggcaccaggggctctggctgtcagggcccctgtggccagggaagcacagactggcagcagcaaaggctgagccccctgcccctctgcccacagtctggaggcacaggcctctctgacagccgcaccctcagctccagctccatggacctctcccgacgaaactccctcgtgggctaatcctgaaggggcagccgttcgccagagccttcaccggcactgtccccaccccagccctgcgcatgggcctgctgcttgccctcctgtctcttccaaggacccctatcttttctgttcaatctcagggtaaccttctccctttatcatcttagcctgagccctggaggctgggcccgcccgctccagctctcccccttattt

SEQ ID NO: 4359 - DNA, 392 bp, Bos taurus
  Clone ID: 19-LIB3058-013-Q1-K1-E3
atgaaaacgaccttctggcaccaggctcgcccacccttggccccctgcgcccagcaccacagcccggcactgcgctgcggctcccagccactcccctgcagcttggttcataccacacagactctgcccggacctcttgtacgtctgccttttctctgcccgcctacccaaccccagcccttcgggccacccagcctgcatatgtgttcacttttatttaaataaacttgtgtggtaaaagtccaaaaaagaaagatgaagccgaaataatatattgcctgaatttctacctctagaaatgagctgtatgtgctacgcataaataatacttgagcctggggcagtgcacaagtctttttaaaagtaacatggtttacttgcacacaactgat

SEQ ID NO: 4360 - DNA, 442 bp, Bos taurus
  Clone ID: 19-LIB3058-015-Q1-K1-E3
cgacaatgaagcgctgtatgacatctgcttccgcaccctgaaactgaccacccccacctacggggacctcaaccacctggtgtcggccaccatgagcggggtcaccacctgcctgcgcttcccgggccagctcaatgccgacctgcgcaagctggccgtgaacatggtgcccttcccacgcctgcacttcttcatgcccggcttcgccccactgaccagccggggcagccagcagtacagggcactgaccgtccctgagctgacccagcagatgttcgatgccaagaacatgatggccgcgtgcgacccacgccacggccgctatctgaccgtggccgccgtcttccggggccgcatgtccatgaaagaggtggatgagcagatgctgagcgtgcagagcaagaacagcagctacttcgtggagtggatccccaacaacgtg

SEQ ID NO: 4361 - DNA, 459 bp, Bos taurus
  Clone ID: 19-LIB3058-017-Q1-K1-E3
gtgaccccggcccgggcgggagcggagctgcgaggtccagttccgcgagtcggagggggactgggcacgccctaccccgagcccgccgcgaccatgctgtcccgcctgctgaaagaacaccaggccaagcagaatgaacgcaaagagcttcaggagaagagaaggcgagaggccatcactgcagcgacctgcctgacagaagctttggtcgatcacctcaatgtaggtgtggcccaggcctacatgaaccagaggaagcttgaccatgaggtgaagaccctgcaggtccaggcagcccagtttgccaagcagacaggccagtggatcgggatggtggagaacttcaaccaggcactcaaggaaattggggatgtggagaactgggctcggagcatcgagctggacatgcgcaccattgccaccgcgctggaataccttccggatgagcagaacatggga

SEQ ID NO: 4362 - DNA, 366 bp, Bos taurus
  Clone ID: 19-LIB3058-018-Q1-K1-E11
atttaattcagggcatattggctttttctctaaagaaaaaaaaaaaggtatattagactactttttacttgcggtagactccagtattttctccctcttagtcagtgagccttcagtaaagctgcatgtctttagaatgtatgtcagagtgagatcatggaaaaagcaagagaattccagaaaaacacctatttctgctttgttgactatgccaaagcctttgactgtgtggatcacaataaactgtggaaaattctggaagagatgggaataccagaccacctgacctgcttcttgagaaacctgtatgcaggtcaagaagcaacagttagaactggacatggaacaacagactggttccaaata

SEQ ID NO: 4363 - DNA, 400 bp, Bos taurus
  unsure (12): unsure at all n locations; Clone ID: 19-LIB3058-018-Q1-K1-E3
gcggcggcggcngcgggattcccgctccgctgagcccagcccgagagtcctttccaccttcctgcctcctgctcttgccgcccctgggtgccgacatgacgcccgatctgctaaacttcaagaagggatggatgtctatcttggatgagcctggagagtggaagaagcactggtttgtgttgaccgactcaagcctcaagtactaccgggattccaccgctgaggaggcggatgagctggacggcgagatcgacctgcgctcctgcacggacgtcaccgagtacgcggtgcagcgcaactatggcttccagatccataccaaagacgctgtctataccttgtcggccatgacctcgggcatccggaggaactggatcgaggctctgaggaagactgtgcg

SEQ ID NO: 4364 - DNA, 464 bp, Bos taurus
  Clone ID: 19-LIB3058-019-Q1-K1-E3
gttctacataacttcttaatttctacattccctcctttactcttcttcagagatttcctttcagtgagcaacttttccatcctcttaatgtattcctttttagtaggaatccagaagtattagattaaatggaaaagcattcaacattttggggctgggggaatcacagattaaatgcctcctgtatcatatgtgatggaggtcttgtgtatctgtgacaacagggagtttccttattcactcttcatttgctgctgtttaagttgacaacttcccttcccaataaaaactcacttacacctcctgcctttgtagttctggtattcactttactatgtaatagaagtagcatgttgctgccagaatacaaccgttgcttttggcaaattaaagtgcatgtcatttcttaatacactagaaagggggaaaaaagcacacagtccagtctaaaacattagtacttt

SEQ ID NO: 4365 - DNA, 303 bp, Bos taurus
  Clone ID: 19-LIB3058-023-Q1-K1-E11
gcggactgcaactgatagctggagaagtactacaagcttcctaacggtcaggggatcagcataggcagtgaccgtaataggtgccctgaggctctttctcagacttccttcgtggtcatggaatactgaggcattaacgaaactaccttcaattccataatgaaatgagacttattcatactgatggacatatactccaactcggtgctgtccgtatggcaccatcatgtaccacagcatccaagccaggattcataaagagatcactgcactgacagccatcacaatgacgatcaagatcat

SEQ ID NO: 4366 - DNA, 366 bp, Bos taurus
  Clone ID: 19-LIB3058-029-Q1-K1-E11
acccacctgcttcctcccagaaacccactgaccagtacactcgcttttcccgaatcggtgccggactgggtgccggccccagtgaggacggtgaggggtcctctatcccactcttttctaaccccagctgacatctcccgtgcttcccccataacctactgattcccaccttttgatttcagcatctcttccaccagacccccacgaagtccccacactggcgtcacaaccccccttaggatgaaaatgaggaatagtcaacgtaacgcccaaacgtggctctttaatccccttctaattctgaatatttcgcgtgggtttactataatgtctattaatacatagcctcaatgatgagaggataag

SEQ ID NO: 4367 - DNA, 176 bp, Bos taurus
  Clone ID: 19-LIB3058-031-Q1-K1-E11
acaggggaagccagtgctgcccgggcggttacagcgagagcgcgtctcgcggaggcggtgtgcgcccggctgtcaccatgagcgatcaggctctgagctttctgaaggactttttggccgtcgtcgtagtctctgtcatcttcaatactgctttctcgcccatttatagggtcaaa

SEQ ID NO: 4368 - DNA, 165 bp, Bos taurus
  Clone ID: 19-LIB3058-031-Q1-K1-E3
ccgcttactccagctactccgcgcccgtctcctcctcgctgtccgtgcggcgcagctggtcctccagctccggttccttgatgcccatcctcgagagcctcgacctgagccaggtcgccgccatcagcaacgaccttaagtcgatccgtacccaggagattgctc

SEQ ID NO: 4369 - DNA, 266 bp, Bos taurus
  Clone ID: 19-LIB3058-032-Q1-K1-E3
ccggcctcccttttttctttacctttttttacattaattactacacaagaacaaagttgactattacaaccaccacggcctttaacaccaatattatttatctgaacactatcacaaacataccaaacttcatatcatttaactgaaatacaatcatatctaaaatcgaactttaacgtataatatacattaaaaccatcttccctattttttatatcaaaattctcttattttattatactaaatatcttttacttcaaatttta

SEQ ID NO: 4370 - DNA, 411 bp, Bos taurus
  unsure (344): unsure at all n locations; Clone ID: 19-LIB3058-034-Q1-K1-E3
gggcgctcaggccgcgctcgcggatccttggttaggggagggaggccgctcctggccacgcttgcagcctgtcccgcagcacagaccccggcggccatggcctccaggcaagctcccctctgtggcctggctccttgctgcctctggctcctgggtgttgtccttctgatgaatgcgtccgcccggcctgccaaccactcgtctgctcgagagagagcaggcaatagggaggaaaatgagatcctgcccccggaccacctgaatggggtgaagctggagatggatgggcacctcaacaaagatttccaccaggaggtcttcctgggcaaggacatggatgactntgaggaggacgcagagcctcgaaagagccggaggaagctgatggtcatcttctccaaggtggatttg

SEQ ID NO: 4371 - DNA, 369 bp, Bos taurus
  unsure (256),(318): unsure at all n locations; Clone ID: 19-LIB3058-035-Q1-K1-E3
tgctcttctcagctctctggaccttcctgtggttcgttggcttctgcttcctcaccaagcagtgggcggccaccaagaagaacgatgtgcatgtagaagccgactcagcccgggcggccatcaccttcagcttcttctccatcttctcctggtgcgtgctggccttcctggcctaccagcgctacaaggctggagtggacgaattcatccagaactacgtggaccccactccggacccgagcacggcctacgcctnctacccaggcgtgcctgcggacacctaccagcagccgcccttcacccagaacgccgagagcnaccgagggctaccagccgcccctgtgtactgagctgcagccaggatggtat

SEQ ID NO: 4372 - DNA, 414 bp, Bos taurus
  Clone ID: 19-LIB3058-036-Q1-K1-E11
aaggagagaaaggaaagcgcgaggaccttcgccgtttccgccaccgcgccggagccgaggagtgcgggccgtagccccagcgcgccttacgccgctggctcccgcgtactcggacttgttccagcagcctgttaaaacatggtggattactatgaagttctaggtgtgcagagacacgcctcggccgaggatattaaaaaggcatatcggaaactggcactgaagtggcatccagataaaaatcctgagaacaaagaagaagcggagagaaaattcaagcaagtagctgaggcgtatgaggtgttgtcagatgctaagaaacgggacatctatgacagatatggcaaagaaggattaaacggtggcggaggaaggtgaagtcacttcgacagtacggttgagtttggcttcaca

SEQ ID NO: 4373 - DNA, 457 bp, Bos taurus
  Clone ID: 19-LIB3058-036-Q1-K1-E3
cggcccgacccacgcgtccgggagtaagtacgtgaataaagaaattataaatgttctcaaggaggtgaaacagataaagacccagatagaacaaaccaatgaagagcgcaaattactgctcagctccctagaggaagccaagaagaagaaagaggacgccctgaatgacaccagggattctgaaaacaagctgaaggcgtcccacggggtgtgcaatgagaccatgacagccctttgggaggaatgtaagccctgcctcaagcagacctgcatgaagttctacgcgcgggtgtgcagaagcggatcgggactggttggccaccagcttgaggagttcctaaaccagagctaccccttctacttctggatcaacggtgaccgcatcgattccctgatggagaatgaccgggagcagagccacgtgatggacgtcatggaggacagcttcacccgggcg

SEQ ID NO: 4374 - DNA, 414 bp, Bos taurus
  unsure (33),(65),(127),(246): unsure at all n locations; Clone ID: 19-LIB3058-037-Q1-K1-E11
gacccacgcgtccgcttgactttccgagtgttntctgtagattgctactgtagagagtgtgctgntctatcagtcctaaacctggtctggcttctccagtcactggtccagagaccatgtgactctntgtacagtttatcctggtgttccctgtaatgcagtagaggctactttgccttccctcttctttctcagcccatttgtaaccccgaattatgaagcggttgcttgagaaaataacagatnaacatagaatagactgaccaagatggtttaaagtttggttttttttttaactaggttatttataaaggatttctgaaccacttggcagagaaatttacaacacttaatggtcatattttgagtaaagaaagctaaaaccttgtctgcttttttggtactacatgcatt

SEQ ID NO: 4375 - DNA, 401 bp, Bos taurus
  Clone ID: 19-LIB3058-037-Q1-K1-E3
gcgttccggacgcgtgggcccgagccggctggttcggttacccccggggccaccctccccaagtgcccgtctcagcttcggaaaggcccaccagtccctccgcctcccaaacacaccccgtccaaggaggtcaagcaggagcagatcctcagcttgtttgacgacacgtttgtccctgagatcagcgtgaccaccccttcccagtttgaggccccggggcctttctcggagcaggccagtctgctggacctggactttgaccccctcccgcctgtggcaagccctgtgaaggcgcccacgccctctggtcagtcgattccatgggacctctgggagcccacagagagtccagctggcagcttgccttccggggagcccagcgctgccgagggcacctttgc

SEQ ID NO: 4376 - DNA, 355 bp, Bos taurus
  Clone ID: 19-LIB3058-038-Q1-K1-E3
ctgactctccaaaggagaatgattgaattattatggttttcattttgcatggtttctctgtaggcatgtggggaaggtcccatggaaacacagaacatcatacaggtgtcagagtttgtcctcttggggttctcacagatggaggagttccagaaattcctgtttgtggtgttcccatttgtctatgtcatcaccattgtgggaaccctcctcatcatggtcacagtgactattgactctcagctccacataatcatgtatttcttctctgaaatcagtctgtcatcggatcagatcagatcaggtcagatcagtcgctcagtcgtgtccaactcttcgtgctcccaattacacc

SEQ ID NO: 4377 - DNA, 442 bp, Bos taurus
  Clone ID: 19-LIB3058-039-Q1-K1-E3
gaaagagaagacattgaattcatttgttagacgtttggaaccaaaccagttgctcatgttgacgagttcactgctgacatgctgggatctgctgagttagctgaggaggtcagcttaaatggttctggcaaactgatcaagattacaggctgtgcaagccctggaaaaacagttacaattgttgttcgtggttctaacaaattggtgattgaagaagctgagcgctctatccatgatgctctctgtgttattcgctgtttagtgaagaagagagctcttattgcaggaagtggtgctccagaaatagagttggccctacggttaactgaatactcacgaacattgagtggtatggaatcctactgcattcgtgcttttgcagatgctatggaagtcattccatctacactagctgaaaacgctggcctgaatcccatttcta

SEQ ID NO: 4378 - DNA, 409 bp, Bos taurus
  unsure (311): unsure at all n locations; Clone ID: 19-LIB3058-040-Q1-K1-E11
cccactcgtccggtgctgtttatacttgccatggatgtaactccaaaaagttttggtgtatctaggtcagggtagcagaacttttttcgtttaaatggagttgaataatggagaatttgtgtctgggaaattcctgaattcattgaaaaagtaacaaactattccttgtctccaatacgtaaaataagcattttctcagtcattacaatttactgccagttgtgagtggctttttaattaactcgactttcattgcacttcgattggtgacatttgaggagactgtatctgtctactttgaatggctgttntgagggactgtcccattaatgaacatactgcatggccttggagagagactctgggctcttggcttagatgtattcatcaaatactcctttcagagctc

SEQ ID NO: 4379 - DNA, 299 bp, Bos taurus
  unsure (44): unsure at all n locations; Clone ID: 19-LIB3058-043-Q1-K1-E3
acccacgcgtccgcggacgcgtgggcgcgagcggtcgtccatgnatatttcctaccatcacactaattttaaggagggttctaattaataccagtgactcctgcttaaaaaataaaagttgtagtcatttattcatgctgaatcacaacttattccttaaatataagtgatattctaacctagcagagtagtgactcactacatatgcttgcacttcaatgtaacactatcatctttcatatagattcactgtgctcctattaccaaaccatcgatatactcctgatcgcttatagtta

SEQ ID NO: 4380 - DNA, 416 bp, Bos taurus
  unsure (62): unsure at all n locations; Clone ID: 19-LIB3058-048-Q1-K1-E3
gtgcgtgcaaagaaaaaagaagctgatgtgtaatacagaaattccatgcctgcgtccagttntcagcaacagaagcttcgtgtctgtgaggtctgttcggcctaccttggcctccatgacaatgaccgtcgtcttgcagaccacttcgggggcaagttacacttgggattcattcagatccgtgagaagctcgatcagttaaggaaaactgtggctgagaagcaggagaagagaaatcaggatcggctgaggaggcgagaggagagagagcgggaggagcggctgagcagaaggtctggatcaagaacaagagatcgcaagaggtcgcgcttccgggaccgacgtcgcaagcgatcgaggtcaacttccagagagcggcggaagtcgtcccgctcccggtcccgagacagacaccg

SEQ ID NO: 4381 - DNA, 445 bp, Bos taurus
  Clone ID: 19-LIB3058-049-Q1-K1-E3
agccttccggaaggttcctttaaaaactaggaataattcttccatgtgacccagcaattccactactgggaatattgaggaaacccccgggtggcatttaacccaaaggttaattacagcactaatttacattatccaggacatggaagcaaccctagatgtcctttgacagatgagtggatgaagaagatgtgtatgatatacaatggaatattacttagccataaaaaggaactagtctgagtcaatggtagtgaggtggatgaatctggagtctgttatacagagtgaagtaagtcagaaagacaaaacaagtattatatgttagcgcatatatatagaagttaacctggagaaaaaaaatggcaacccattccagtattcttgcctggaaaatcctatggacagaagagcctggcaggccacagtccctgagattgtaaag

SEQ ID NO: 4382 - DNA, 424 bp, Bos taurus
  Clone ID: 19-LIB3058-051-Q1-K1-E3
aagatgttgtcttgtgctggagctgattgactccagacaggtatgcgcggtgcctttggaaagccccagggcacagtggccagggtccacattggccaggtcataatgtccatccgcaccaagctgcataacaaggaacatgtgattgaagccctccgccgggccaagttcaagttccctggccgccagaagatccacatctctaagaagtggggatttaccaagttcaacgcggatgaatttgagaacatggtggcagaaaagcgactcatcccagacggctgtggggtcaaatacatgcctaatcgtggtcccctggacaaatggcgggccctacactcatgagcatcagtgctgtcccctccttaatcatgctcaccaataaatgctatttgctgtcaaaaaaaagtactttagttaacct

SEQ ID NO: 4383 - DNA, 451 bp, Bos taurus
  Clone ID: 19-LIB3058-052-Q1-K1-E11
tgccgtaccgggcccgaaccacgcgtcgaccgacgcgtgcgcgagcccctgcggcttgtgtctgggatctccagagcagattctgcctgggtctgtcaccgcctgagctaagaccttcacttcattaccccgagggacctgcgtggagcagagcgctgattgcacttgcgattataaaggtgcacacatcactcctggggcaacgcatgcccctacccgtggacaggtccactctcagggacctgcctgaagcccagagccactgtggatatgcactgtgaagacctattgacttagacacaggatcagatacggagctaatttcccgagaagaattctgagatggatgcatttttaaaggggccagatctcaatgaagcctacctgagcaatctgaatgccccattggacattccagtgcctgatgcagtcaaggataaagagaaagaag

SEQ ID NO: 4384 - DNA, 351 bp, Bos taurus
  Clone ID: 19-LIB3058-054-Q1-K1-E3
caagctgtagcctctttctggatgagtcacagattttacattgaattctggaggcagagggcgttccctgggcccgcccagcaccccatcccttccttggtctgatgaaatgcagtaattaatgcagagatgttttggggggcaatctctctcctttcatgtggttttagagccaatctccaggtaatgggacttggggtcatattttgccttcacatctccatcctcagagtacaaatccacacagaggcctctgccagaaagccttgggtcgactagcgcgaacacgtaaacactagaacttaacaattttctgctcctgtgcagggtcaagggtcagagccctttcac

SEQ ID NO: 4385 - DNA, 405 bp, Bos taurus
  unsure (390): unsure at all n locations; Clone ID: 19-LIB34-001-Q1-E1-E11
aggagagagttaatttaaactgggagggaccattcaaaccaggagggaatcaacaaagtcagatcctagcaccatcttaaatggagatggagagttcataaaaagcagggcttaaaaaacacaaagcccttgttgtgtcttccagcatagctagttgagtagtaggcaaacagaagagattatatatgagagaaagttcattaaggtgacaaagtcctataagggaagtactctttgaggagtttgaaatctagaattggagagaagatgaaagattagggagcagagaggaggaggtcatccatgtgattgatgtaactgagtgaatgaaaggggaataataggaattcaaactcagcagcaggttgtatgtttactgtcatgatctanaaagacagatttcac

SEQ ID NO: 4386 - DNA, 212 bp, Bos taurus
  Clone ID: 19-LIB34-001-Q1-E1-E3
aaaattgttgtttcaactcaaacagccttagcctaaacacgacacaaccacaggcatctcagcctaccctgagagtaagaggaaaaaagagaaatgaaaactcagagcttattcatctgttttccttttctgttggtgttaaaccaacactctcactaaagaacgtaaatttctttaaatattttgcttcttttgtttgtgctacaattaat

SEQ ID NO: 4387 - DNA, 416 bp, Bos taurus
  Clone ID: 19-LIB34-002-Q1-E1-E11
cggtctagctatccgggctcgaccacgcgtccgtgaaaagatcagagaaattggatgtaaatttacatttttgaatatgcttgttgtttcacatgatacatttagggtatgcagctccttttgtagtttttatttttactagttaagtttggaaatgatgccaaatttttgtatttctttaagcaatgtgttctcttcagtgatatatattgcattatatattgatgtgtgtatcaatatatactgatatgtattacacttacacaatacaaacacataagagggggtgaaaaccgtagcatttgcattctctatagcctctacagagagatcctaaacagcaaactcatggtgttgtgatgtacagaaatggagaagagtattaaaccatatttaagaatatggtctaccaataa

SEQ ID NO: 4388 - DNA, 406 bp, Bos taurus
  Clone ID: 19-LIB34-002-Q1-E1-E3
acaagtgctgcacagagtcattggtgaacagacggccatgtttctctgctctgacacctgatgaaacatatgtacccaaagcctttgatgagaaattgttcaccttccatgcagatatatgcacacttcccgatactgagaaacaaatcaagaaacaaactgcacttgttgagctgttgaaacacaagcccaaggcaacagaggaacaactgaaaaccgtcatggagaattttgtggcttttgtagacaagtgctgtgcagctgatgacaaagaagcctgctttgctgtggagggtccaaaacttgttgtttcaactcaaacagccttagcctaaacacgacacaaccacaggcatctcagcctaccctgagagtaagaggaaaaaagagaaatgaaaactcagag

SEQ ID NO: 4389 - DNA, 393 bp, Bos taurus
  Clone ID: 19-LIB34-003-Q1-E1-E11
gctggattctatggttaggttaggatttcccttcttggtgggaagttccattacttacaaggttgtaaccaactttctatcaaaagtgaaaattaggggggaaggaagggtgggaagtcaggtaggaaaatgccctagatctcctggtgtggtgcttcccttgcctggggctcaatgccctaacaggctccgcataaatggatggatggccctaccttaaagaaaaagttcttattatgtggtcctccatttataacacaaagcagagtagtatttttatatttaaatgtaaaaacaaaaaaattatatatatgggtgtgcagataaatgtgtgttttctctttagggagaaaaagccattctggttacggggaacccaaatttgagactaag

SEQ ID NO: 4390 - DNA, 397 bp, Bos taurus
  Clone ID: 19-LIB34-003-Q1-E1-E3
agcattggagaaggggtgactacagtaagaccaggtgataaagtcatcccactctttattccccagtgtggaaagtgcaatgtttgtaaacacccagaagccaacctttgcctgaaatgccagctgaaggagcctcgggggacccttaatgatggtacctgcaggttcacctgcatggggaagcccatccaccacttcctcggcaccagcaccttcacccagtacacagtggtggatgagatgtcagtggccaagatccatgcagactcaccactggagaaagtctgtctcattggctgcggattttctactggttatgggtctgcagtcaaaattgccaaggtcacccagggctccacctgtgccgtgtttggcctgggaagagttggcctgtctg

SEQ ID NO: 4391 - DNA, 328 bp, Bos taurus
  Clone ID: 19-LIB34-004-Q1-E1-E3
gacgcctccagctgcctgcctgctgacacaccggggcctctctgaagccaccatgaaatccttcgttctgctcttttgcctggctcagctctggggctgccactcgatcccgcttgacccggttgcaggttataaggaaccggcctgtgatgacccagacacagagcaagcagccttggctgccgtggactacatcaacaagcaccttcctcggggctacaagcacaccttgaaccagattgacagtgtgaaggtgtggccgaggcgggccacgggagacgtgtatgacattgaaatagataccctggaaaccacctgccacgtactg

SEQ ID NO: 4392 - DNA, 406 bp, Bos taurus
  unsure (368): unsure at all n locations; Clone ID: 19-LIB34-005-Q1-E1-E3
gcggcggctctggatccactgcccacaccccgctctcgcaggcagacatgaggacagagagaacttccttcctcctggctctggggctcctggtgtctgggttctgctccagggtccactgcctcccagagaatgtgaccccagaagaacagcacaaagggacgtctgtggatggccactcattagcctccagcaacactgacttcgccttcagcctctacaagcagttggctttgaaggaccccaataagaatgtcatcttctcccctctgagcatctccatagccttggccttcctgtccctgggggctcatgaccacactgtgacagagatcctggaaggtctcaagttcaacctcacagagacncccgagacagaaatccaccaaggcttccagcaactcct

SEQ ID NO: 4393 - DNA, 408 bp, Bos taurus
  Clone ID: 19-LIB34-006-Q1-E1-E11
aaactttggcacaatgaagtgggtgacttttatttctcttctccttctcttcagctctgcttattccaggggtgtgtttcgtcgagatacacacaagagtgagattgctcatcggtttaaagatttgggagaagaacattttaaaggcctggtactgattgccttttctcagtatctccagcagtgtccatttgatgagcatgtaaaattagtgaacgaactaactgagtttgcaaaaacatgtgttgctgatgagtcccatgccggctgtgaaaagtcacttcacactctctttggagatgaattgtgtaaagttgcatcccttcgtgaaacctatggtgacatggctgactgctgtgagaaacaagagcctgaaagaaatgaatgcttcctgagccacaaagatga

SEQ ID NO: 4394 - DNA, 361 bp, Bos taurus
  Clone ID: 19-LIB34-006-Q1-E1-E3
acacatcactttggcacaatgaagtgggtgacttttatttctcttcgccttctcttcagctctgcttagtccaggggtgtgtttcgtcgagatacacacaacaatgagattgctcatcggtttaaagatttgggagaagaacattttaaaggcctggtactgattgccttttctcagtatctccagcactgtccatttgatgagcatgtaaaattagtaaacgagctaactgagtttgcagaaccatgtgttgctgatgattcccaagccggctgtgaaaaatcacttcacactcgctttgtataataattgtgtaaagttgcatcccttcgtgaaacctatggtgacatagctgactgct

SEQ ID NO: 4395 - DNA, 415 bp, Bos taurus
  unsure (409): unsure at all n locations; Clone ID: 19-LIB34-007-Q1-E1-E3
atctggttggtggatgaacaaatgtcacgctggccacctcaatggagtttattatcaaggtggcacttactcaaaaacatctactcctaatggttatgataatggcattatttgggccacatggaaatcccggtggtattccatgaagaaaaccaccatgaagataatcccacttaacagacttgccatcggagaaggacagcagcaccaactggggggagccaaacaggtcggagtagaacatcacgttgaaatagaatatgactaagtcattttgccctgagctgttcattctgttaacacacaaagtttcagaaactttcctgaaattttcttctcgttttctcttaccgtatttattaattttaagtcgttctttaaggatatttagctctgaatggcaattaanactcac

SEQ ID NO: 4396 - DNA, 407 bp, Bos taurus
  Clone ID: 19-LIB34-008-Q1-E1-E11
caaaccgactagtaagcaatcgctttgtaaccctccaacaatgaatacttcaacttgtatcaaaacaaataatgagtacctacaattctaaaggacaaacatgaacattaatattaatatctctgatcctatttattggatcaacaaacctactaggcctattaccccattcattcacaccaacaacacaactatcaataaacctaggcatagccatccccctgtgagcaggagccgtaattacaggattccgcaataaaactaaagcatcacttgcccatttcttaccacaaggaacacccactccactaatcccaatactagtaattattgaaactatcagcctttttattcaacctatagccctcgccgtgcggttaacagcttacatcactgcaggacaccta

SEQ ID NO: 4397 - DNA, 377 bp, Bos taurus
  Clone ID: 19-LIB34-008-Q1-E1-E3
agcaactggacctcgcctaagctgtgtctctgactcatttctgactttaggcaagttcttccaatgggaaaaatggcgaatatgtttagtttcatccttgtcaccactgctctggtaatgggcaggggaagctcggctctggagaactgcctccaggagcaggcgcggctcagagcccaagtgtacctgctggagacccgggtcaagcagcaacaagtcaagatctcgcagcttttgcatgagaaacaagtccagctccttgataaaggagaggagaatagtgtcattgaccttggaggaaagacgcaatacgcagattgttcagagattttcaatgacgggtacaagcagagtggattttagaaaatcaaagctct

SEQ ID NO: 4398 - DNA, 392 bp, Bos taurus
  Clone ID: 19-LIB34-009-Q1-E1-E3
aaggactctaatacattgaccaagaacatagtggaactaatgagaggggattttgccaaagctaacaacaatgataatacatttaaacaaatatcagaagatctgagaagcagaattgagatcctgaggcgcaaagtcatagaacaagtacaacgtatcaacgttctgcagaaaaatgtcagggatcaactggtagatatgaaacgattggaggtggacattgatattaagatccgatcttgcaaagggtcatgcagtagagctttagaacataaggtagatctggaggactataaaaatcagcagaagcaacttgaacaggttattgccataaacctacttccctctagagacattcaatacttaccattgataaaaatgagtacaattac

SEQ ID NO: 4399 - DNA, 285 bp, Bos taurus
  Clone ID: 19-LIB34-010-Q1-E2-E3
gggtccacgcacgcctctagaatgaatcttgtcagaatgggttgtgataaccccagccatgtggagaggcctggggctggctccggctctctgcctcatcataacccgtgggacagacttacagggcaacagctcctactgttcataacctccaacatggagtataaaggatccactcccgaagctgaactcctaacgttcactcactgtatttgctcttcttcaagcatgatgaacttctctgcattctgcaagcatctatactggaggatctactagtaatgc

SEQ ID NO: 4400 - DNA, 370 bp, Bos taurus
  unsure (322): unsure at all n locations; Clone ID: 19-LIB34-011-Q1-E1-E3
agcaattgctcaagttcatgccgaaaacggagacctagttgcagagggagcaaagaagatgttggcattggggataacaggtcccgagggccatgagctgagccgtccagaagcggtggaggcagaagccacgctgagggccgtcaccatagccagcgccgtgaactgccctctctacgtcgtgcacgtgatgagcaagtctgcggcaaaggtggtggcggatgcccggagagatgggaaggtggtctacggagaacccatcgcagcaagtctcggcacggatggcactcaccactgggatagagaatggctccatgccgcncatcacgttatgggtccacccctgcgaacaagaccttcaacgcctgac

SEQ ID NO: 4401 - DNA, 406 bp, Bos taurus
  Clone ID: 19-LIB34-012-Q1-E1-E3
agctagtgacagatctcacaaaagtccacaaggaatgctgccatggtgacctacttgaatgcgcagatgacagggcagatcttgccaagtacatatgtgataatcaagatacaatctccagtaaactgaaggaatgctgtgataagcctttgttggaaaaatcccactgcattgctgaggtagaaaaagatgccatacctgaaaacctgcccccattaactgctgactttgctgaagataaggatgtttgcaaaaactatcaggaagcaaaagatgccttcctgggctcgtttttgtatgaatattcaagaaggcatcctgaatatgctgtctcagtgctattgagacttgccaaggaatatgaagccacactggatgaatgctgtgccaaagatgatccacatgc

SEQ ID NO: 4402 - DNA, 368 bp, Bos taurus
  Clone ID: 19-LIB34-013-Q1-E1-E11
cggacgcgtccgagatttatggggaacatacatatacaaaattgctagaagacatccctacatttatgcaccagaactcctttactatgctaataacgtataatggagtttttcaagaatgcggctaccctgaagataaaggtgtctgcctgctaacatagactgattctatgagagaacaagtaatgatcttcagctgccagactgaaactcaagtgtgccagtattcacatatttggcgaatgagctttacaagcatggtcagtagatcacctgagccagaactctctcagggctgaatttgtacaagttaccacgctaatgacagatctcacatgcagtctagaagggaatgctgccatggagac

SEQ ID NO: 4403 - DNA, 360 bp, Bos taurus
  unsure (19): unsure at all n locations; Clone ID: 19-LIB34-013-Q1-E1-E3
cacgcgtccgaaaaactanaggacgcaactgtgagtgtctctgtcctagcctctcaacttgctttcctgtgtccaacagcactgcaaactccagtactaccctgtccagaacaacaagttagaagaaaccagccatcaatgtaagaagacatgcttcacctccctcgctccgtgctgctcctgctcacacagccctggaaattcctgggagcagaaatgacaaccttttctcagaaaatactggccaatgcctgtaccctggttatgtgtaaccccctggatagtggcttgcctggtcaagatggacaacatgggagagaatgtccccatggagataaaggggatccaggttcaacagga

SEQ ID NO: 4404 - DNA, 434 bp, Bos taurus
  Clone ID: 19-LIB34-014-Q1-E1-E3
gggtccacgcacgcgtccgaagacacgtgggccaaaatactggactgggtagccgttccttctccgggggatcttcccaacccagggactgatcccacgtctcccgcattgcaggtggaaactattacagaattatgagaaaatacagggtttaaacaaagtcaaacaagcttctttactataggacttatagtaaggaagaactttgctacccaagactttactaagctaaactgctttctgctcttcaagagcataatattaagaatttgccaaatttcttgacaacaaaaccttttctttgatgcatggctactaacaggtcatagcacaataatggtccaaagaacactggctttgaaactattacaagaaaagtctaaagtgaattattatttgctaattccttatcatcaattggctataattataac

SEQ ID NO: 4405 - DNA, 373 bp, Bos taurus
  Clone ID: 19-LIB34-015-Q1-E1-E11
caatggggtactacaaaaatgaagcgaaaacaaaagctgatttttttgaagatgaaaatggacagaggtggctctgtactggagacattggggagtttgaccctgatggttgtttgaagatcattgatcgtaagaaggaccttgtaaaactacaggcaggagaatatgtttctcttgggaaggtggaggctgctttgaagaatctcccactaatagataacatttgtgcatatgcaaacagttatcattcttatgtcatcggatttgttgtgccaaatcaaaaggaactaacagaactagcacgaaggaaaggacttcatgggacttgggaggagctgtgtaacagctgtgaaatggagaatgacgtactgaa

SEQ ID NO: 4406 - DNA, 380 bp, Bos taurus
  Clone ID: 19-LIB34-015-Q1-E1-E3
cgtcaatataacgttcttcccacaagactttctaggactatctggcatgcctcgacgatactccgactacccagatgcagacacaatatgaaatactatctcatcaataagctcattcatttccctaggagcagttatactaatagttttcagcatctgagaagcatttgcatctaaaccataagtcttgactgtgaacttaaccacgacaaatctacaatgattgaatggatgccctccaccatatcacacatttgaagaacccacctatgttaacctaaaataagaaaggaaggaatcgaaccccctactattggtttcaagccaacatcataacctctatgtctctctcaataaatggtgcccaaaattaaagggcg

SEQ ID NO: 4407 - DNA, 410 bp, Bos taurus
  Clone ID: 19-LIB34-016-Q1-E1-E3
agccaatcccaatggcagatactactggggtggagcgtacacctgggacatggcaaagcacggcacagacgatggagtggtgtggatgaactggcagggctcctggtactcaatgaagaagatgtccatgaagatcaggccttacttcccagagcaatagtaccccccacacagagtattattcgtccacatgtaataacatttttatatatcatgttatcagaaattttttttcataccttatatctctctaaagctatcaaaatgtagttggtgtgagttttcagaaaaagtttttaggacaaatgacattaaaaacagcacatggttttctttcatatctgtcatttccattgtgtaccatgaagtaactaatacgatgactgtggacagtcagtgttcacaatttc

SEQ ID NO: 4408 - DNA, 405 bp, Bos taurus
  Clone ID: 19-LIB34-017-Q1-E1-E3
gtgtgaaacagcagagaacactgaagagtgcatcgccaagatcatgaaaggagaagctgatgccatgagcttggacggaggctacctctacatagcaggcaaatgtggcctggtgcctgtcctggcagagaactacaaaactgagggtgaaagttgcaagaacacaccagaaaaagggtatcttgctgtagctgtggttaaaacatcagatgctaatatcaactggaacaatctgaaagacaagaagtcctgccacactgcagtagacagaaccgctggctggaacatccccatgggtttgctctacagcaagattaataactgtaaatttgatgaatttttcagcgcaggttgtgcacctggatctccgcgaaattccagtctctgtgctctgtgcattggctc

SEQ ID NO: 4409 - DNA, 384 bp, Bos taurus
  Clone ID: 19-LIB34-018-Q1-E1-E11
aagaagaccactggcctggtgggattggctgtttgtgaaactccacatgagaggctaaaaatattgtatacaaaaattcttgatgttcttggacacatccctaaaaatgcagcatatagaaagtatacagaacagattacaaatgagaagctgagtatggttaaagcggaacctgatgttaaaaaactagaagagcgactgcagggtggccaaatagaagaggttattcttcaggctgaaaacgaactaagtctggcaagaaaaatgatccagtggaaaccatgggagcctttagtggaagagcctccagccagccaatggaaatggccaatataaacagcattaactaacttatctgttgataggagactgatgtaattaaat

SEQ ID NO: 4410 - DNA, 411 bp, Bos taurus
  Clone ID: 19-LIB34-018-Q1-E1-E3
aggtaataattaccgccgtactactactactctcgctccctgtattagcagccggcatcacaatgctattaacagaccggaacctaaatacaaccttcttcgacccggcaggaggaggagaccctattctatatcaacacttattctgattctttggacaccccgaagtctatattttaatcttacctgggtttggaataatctctcatatcgtgacctactactcaggaaaaaaagaaccattcggatatatgggaatagtttgggctataatgtcaatcggatttctaggtttcatcgtatgagcccaccatatattcactgtcggaatagacgtcgacacacgagcctacttcacatcagccactataattattgctattccaaccggggtaaaagtcttcagctgat

SEQ ID NO: 4411 - DNA, 420 bp, Bos taurus
  Clone ID: 19-LIB34-019-Q1-E1-E4
ggcggctctggatccactgcccacatcccgctctcgcaggcagacatgagggcagagagaacttccttcctcctggccctggggctcctggtggctgggatccgcagtgtccactgcctcccagagaatgtggtggtgaaggaccagcacagaagggtggatggccacacgttagcctccagcaacaccgacttcgccttcagcctctacaagcagttggctttgaagaaccccaataagaatgtcatcttatccccgctgagtgtctccatagccttgggcttcctgtctctgggggcccgtggctccaccctgacagagatcctggaaggtctcaagttcaacctcacagagatccaggagaaagaaatacaccatagctttcagcacctcctgcaggcgctcaatcaacccaacaac

SEQ ID NO: 4412 - DNA, 399 bp, Bos taurus
  unsure (349): unsure at all n locations; Clone ID: 19-LIB34-020-Q1-E1-E11
gggagtccaaaaaatcttcttaccctgggctgacctaagtgatctcatggttactgaaagaaatctgaaagtttccaaggttttacaaagagccacgattgaggtggatgaagaaggtacagaggcaatggcaggaaccctattagaaatcactgcttattacatgcctcccatcgtcaaagtggaccggccgtttctcttcatcatctatgaagaaacctccagaaccgtgctgtttctgggccgggtggtggatccgaccctcctgtgatccacagcacgcgtgagtccttggagccacagcgatgctggatctgaggtgtctgaatccacacgggacattggcacntggtgtccccttgttcccaagtgctaattcgagccattcttagatctgca

SEQ ID NO: 4413 - DNA, 399 bp, Bos taurus
  Clone ID: 19-LIB34-020-Q1-E2-E11
gggagtccaaaagatcttcttaccctgggctgacctaagtgatctcatggttactgaaagaaatctgaaagtttccaaggttttacaaagagccacgattgaggtggatgaagaaggtacagaggcaatggcaggaaccctattagaaatcactgcttattacatgcctcccatcgtcaaagtggaccggccgtttctcttcatcatctatgaagaaacctccagaaccgtgctgtttctgggccgggtggtggatccgaccctcctgtgatccacagcacgcgtgagtccttggagccacagcgatgctggatctgaggtgtctgaatccacacgggacattggcactggtgtcccccttgttcccaagtgctaattcgagccattcttagatctgca

SEQ ID NO: 4414 - DNA, 420 bp, Bos taurus
  Clone ID: 19-LIB34-020-Q1-E2-E3
aagataccctctcgactaaacaaccaagatagaataaaacaaaacatttaatcccaatttaaagtataagagatagaaatctaagtacggcgctatagagaaagtaccgcaagggaacgatgaaagagaaaactaaaagtataaaaaagcaaagattaatccttgtagcttttgcataatgaattaactagtataagacttaacacaatgaattttagctaagcagcccgaaaccagacgagctactcacaaacagtttaccaagaactaactcatctatgtggcaaaatagtgagaagatttgtaagtacaggtgacatgcctaacgagcctggtgatagctggttgtccagaaaatgaatctaagttcagctttaaagataccaagaattcagataaaccccactgtaactttaaaag

SEQ ID NO: 4415 - DNA, 432 bp, Bos taurus
  Clone ID: 19-LIB34-021-Q1-E1-E11
gcccaaagataccctctcgactaaacaaccaagatagaataaaacaaaacatttaatcccaatttaaagtataggagatagaaatctaagtacggcgctatagagaaagtaccgcaagggaacgatgaaagaaaaaactaaaagtataaaaaagcaaagattaccccttgtaccttttgcataatgaattaactagtataagacttatacaaaattgaatttaaccaaacaaccccgaaccaacacaatctacacacaaacagtttaccaagatctaacacaccaatgtggcaaaatagtgaaaatatttgtatgtagatgtgacatgcctaacgaccctggagatatctggttgtccagaaaatgactctaagttcagctttaaagataccaaattttcaaataaaccccactgtagctttaaaagttagt

SEQ ID NO: 4416 - DNA, 417 bp, Bos taurus
  unsure (372): unsure at all n locations; Clone ID: 19-LIB34-021-Q1-E1-E3
ttaggctctgaatctcatttttcgcagattatgtggtgttggaaaagaccttgattttgtatatgtttcaacttgttccttctctgtcttccagtttccaagtgttctgctgtctgcctttgatgaaatgcagaatttcaagatagggaatactgaaaaatgctatacacattttaaggagaatggccaatttactaattggtgcctttccaaggttcttatgtatagttctgatagaattttcacctgtctgtgtatctctgggataagattcatagacagtgacatacaattagaaagacatttttgttataaagacactgtttttcaggcttctcggatcaattagagaaatgtttgcttttacttaanatcacaggtcttcctcttgaattaaatttaaaagtgagatagtac

SEQ ID NO: 4417 - DNA, 249 bp, Bos taurus
  Clone ID: 19-LIB34-023-Q1-E1-E11
gggtccacgcacgcgtccgaacgccggcgtgacccacccgccatgctccccccagcgctcgtcatgctgttggggtttctctgccacgttgctatcgcaggacgaagctgccccaagccagatgagctaccgttttccacggtggttccactgatacggaactatgagcccggggagcacatagtcttcgcctgccagccgggcaacgtctcccggggagggatccggcggtttaaatgcccgctcaca

SEQ ID NO: 4418 - DNA, 387 bp, Bos taurus
  Clone ID: 19-LIB34-023-Q1-E1-E3
caggtccgtatctcgcgggtccacgcacgcgtctgatctcactgctgctgacggccggtaactgtacagaacgccagtatgtcagctctggtcctggagagccgagccttgggcaggaaactcagcgactttggacaggaaacgagctatattgaaggcaactctgatcaaaatgctgtatcgctgatcttctcactcagagaagaagttggtgcactggccacagtattacgtttatttgaggagaatgatataaacctgacccacattgaatcaagaccttcacgtttaaggaaagacgagtatgaatttttcaccaatctggatcaacgcagcgtgcctgccctggcaaacatcatccagatcttgagacatgatattggtgcc

SEQ ID NO: 4419 - DNA, 407 bp, Bos taurus
  Clone ID: 19-LIB34-024-Q1-E1-E3
actcgtgggtcgacgcaagcctctacactgagtcgtttaatcttactaactatacccattataataataagctttaacacctacaaaccttccaactacccactctacgtaaaaacagctatctcatacgccttcattaccagcataattcccacaataatatttatccactcaggccaagaactaattatttcaaactgacactgactaaccatccaaactcttaaattatccctcagctttaaaatagactatttctcaataatatttatcccagtagcactattcgtcacatgatctattatagaattctcaatatgatatatatactcagaccccaatattaacaaattcttcaaatatctactcctagtcctcattactaagctcatccttggtaacgcaaa

SEQ ID NO: 4420 - DNA, 363 bp, Bos taurus
  Clone ID: 19-LIB34-025-Q1-E1-E11
cttctcccgactcgacgtcgtcgttacagggaagaagaagcgggtgagaaaaacttctgtttccaccgttttgcccatttctgcagatttgttccgaggccgaggcatcgccagggcagtgatggctctccagaggacccaggcctttcttctgctcttgctgctgaccctgctggggctagggctggtacagccctcctatggccaggatcgcatgtaccaaccattcctgaggcaacatgtggaccctgatgagacaggaggcaatgacagctactgcaatttgatgatgccgagacggaagatgacttcacatcactgcaagcgcttcaacactttcagtcatgaagatctttggaacat

SEQ ID NO: 4421 - DNA, 433 bp, Bos taurus
  Clone ID: 19-LIB34-025-Q1-E1-E3
acggtccgagaatctccgggccaaccaagccgtccggagaccctcgttgccctgggtgctgaggtgcggtggtccagctgcaatatcttctccacccaggaccatgcagcagctgccattgccaaggctggcattccagtgtacgcctggaagggtgaaacggatgaggagtacctgtggtgcattgaacagacgctgtacttcaaggacgggcccctcaacatgattctggacgacggtggtgacctcaccaacctcatccacaccaagtacccgcagctcctgtcaggcatccgaggcatctctgaagagaccacaacgggggtccacaacctgtacaagatgatggccaaagggatcctgaaggtgccggccatcaatgtcaatgactctgtcaccaagagcaagtttgacaacctctatggctgccggg

SEQ ID NO: 4422 - DNA, 412 bp, Bos taurus
  Clone ID: 19-LIB34-026-Q1-E1-E3
ctggcacggacggcaggatttgggatcaacatcttaggcatggatccgctcagcaccccttttgacaaccagtactacaatggactctgtgaccgagtttgggacggcaacaccttgacgtactaccgcaggccctggaacgtggcttcgctgacctatgacaccaaagctgacaagaatttcagaactgaaaatcatgaagaaagcattcagatactcagaactattatcgaagagaagaaattaaattttaatgcaggtttatctgtaaaatatacacctgttgaagcaattgaaaagaatagatgtgtagatttagaacattctgacaaaggaagcacctcaagtccttccaagttggctgcggaagctaagtttcgatttacatattccagagatgatatttacagac

SEQ ID NO: 4423 - DNA, 236 bp, Bos taurus
  Clone ID: 19-LIB34-027-Q1-E1-E11
cagaggctgaagctagttaacatcagtgtcttgggtcccaactggctcccaattcctggtgaaactcctaaagggagactgttaaatcatgaaattaatcaccatccttttccgttggtccaagctgctaccaagtttaacccaagagtcttctcaagaaatcgactgcaacaaccagggatgttattaaaactgtggacactgctctgacaaaatacaacagtgaaaacaagagt

SEQ ID NO: 4424 - DNA, 327 bp, Bos taurus
  Clone ID: 19-LIB34-027-Q1-E1-E3
gaagaaattatgaaatatgaaacactgatatcaacacatgaatcaacaattcgatttttgcaagaaatatataactcaaatagtcaaaaaatcgttaacctaagagataaagtggtccagcttgaagcaaactgtcaagagccttgtcaagatacagtgaaaatacatgatgtaactgggagagattgccaagatgttgccaataagggggccaaagagagtggactttactttatcagacctctgaaagctaagcagcagttcttagtctactgtgaaattgatgggtctggaaatggatggactgtgtgtcagaagaggcttgat

SEQ ID NO: 4425 - DNA, 377 bp, Bos taurus
  Clone ID: 19-LIB34-029-Q1-E1-E3
attccaggctcggagccccgggcccgccgacaccatgagttggtcctcgcaccctccgagtgtaatcttctacattctttcattgctttcttcagcatgcctggcatatgttgctacccgagacaactgctgcatcttagatgaaagatttggtagttattgcccaactacctgtggaattgcagatttcctgaataattaccagagcagtgtagacaaagatctacgaactttggaaggcatcttatatcaggttgagaacaagacatcagaagccagagagctggtcaaagcaatccaaatcagctataaccctgatcaaccatcagagccaaataacatagagagtgctaccaagaattccaagagtatgatgg

SEQ ID NO: 4426 - DNA, 421 bp, Bos taurus
  Clone ID: 19-LIB34-030-Q1-E1-E3
caaacaatggatcccaaaggccagagagtgaagcttaatgatggccacttcattcctgtcctgggatttggaacctttgcacctcgagaggttcctaagagtgaagctctggaagtcaccaaatttgctatagaggctgggttccgccatattgacagtgctcatttgtaccaaaatgaagagcaggttggccaggccattcgaagcaagattgccgatggcactgtaaagagagaagacattttctacacttcaaagctttggtccacttcccttcgtccagaattggtccgaccagccttggaaaagtcactgaataatcttcaactggactatgtcgatctttatattattcattttccagtggctctgaaaccaggggagacacttttcgcaacagatgagaatggaaaaacaatat

SEQ ID NO: 4427 - DNA, 390 bp, Bos taurus
  Clone ID: 19-LIB34-031-Q1-E1-E11
atgatttcttgcaacttcgaaaaatttaaaaccatgaaacatctattactgctacttttctgtgcttttagagttcacgcccaatttcctactgactatgactacggacaagatgacagacctaacgtacgtttgggtgcccgcggtcatctgccctatgacaagaagaaagaagaggcccccagcctgagacctgtgccccctcccatcagcaggagtggctatctggctcgtcccgccacagcaactgtgggccagaagaacgtggctagaaatccccctgacgctgatgggtgcctgcacgcggacccagatctgggtgtgttgtgtcctacaagatctaagttgcaacataccttggtaagacacgagagaccaatccgcaagagt

SEQ ID NO: 4428 - DNA, 378 bp, Bos taurus
  Clone ID: 19-LIB34-031-Q1-E1-E3
atccacgcgtccgcactccgcttcacacctttcctcaagcatcaatagcatagaccacgggaacctatttcaccatgctcgacgctggaggccccgccatgacatcccgaaggccccttctgatgctggccctgctggcgtgggttgttgtggctgatcaagagtcctgcaatggccgctgcaccgatggcttcaacgccaccaggaaatgtcagtgtgacgagctctgttcttactaccagagctgctgtgccgacttcatggctgagtacaaaccccaagtgactcgtggggatgtgttccatctgccagaatatgactactggttacatgactacagcgacgcgcagaccgtcaacagcaccgtggaaggcacag

SEQ ID NO: 4429 - DNA, 401 bp, Bos taurus
  Clone ID: 19-LIB34-035-Q1-E1-E11
attgtaattgatccattcctagaacgactgagacatgtcaaggagatagaggaactatccaatgtaaatttagtaatggcaagctgcatggccatgacgtttctttcttctgcactaaatattgaatgcatttccatctacacacaagatgcacagtgcataaacggtaccatccagattctgcaaatgcttcatggagcacagttcttgaacattcagcgataacggatgcatcttacttgatatcatgcgtcgctggatttcacactgaacattacatgtcatgcatacatgtgttcgtctgataatcggagcgttacggccaaatccttagactgattttagcaataaaataaaattttgacacctttctgagataaagaatgctactcttcaatgac

SEQ ID NO: 4430 - DNA, 450 bp, Bos taurus
  Clone ID: 19-LIB34-035-Q1-E1-E3
accgggccgtagattccggaagccacccacgcgtccggatctagatcgacgagcggccgcccttttttttttttttttttctttgacagtgctttattatctgtgctcagattttaaatgagatccctaatttccccagtttcgacctaaacatgtacagttctagtactgaccttctaattagcagtatgaccctagacaagccaccttacatctctgcctccacccacatccaagagagataatgacacccttttttaacctacttacttataggtaggtaggcgtaagatttatgttgctgatcaatcacaggtaaaatatataaggtttttcatactaactactttctaatatttgtttttataatttaatcaaaataaaaatggcatactttcagaactacaagattcagcagttgtatcagatgaatttagtagatctagtcat

SEQ ID NO: 4431 - DNA, 414 bp, Bos taurus
  Clone ID: 19-LIB34-036-Q1-E1-E3
gcaactctccactcgcagtgcaccctggaactcctgagtgatgcacccatgacggccttgcaaagaacctctggaaggctgcactgaagcaccaaccacaagaatttccaacttacgtcgagccaatgaaagacaacatctgtgaagcattcatgaaacatcccaacgactttgctgatcgatttatgtatgaatattccattaattatggacaagctcctctgacacttttagtccgttacaccaagagttaactctctatggtagggtcctgctgtacttcaccaaacccaacagtatgctttctgagagagagacttcagcttaaacatttttcacctcacaccagtatgacaaacagaatctgctcacaatacgctgcttatgggaacgagaaatcaatgctcagccatc

SEQ ID NO: 4432 - DNA, 327 bp, Bos taurus
  Clone ID: 19-LIB34-038-Q1-E1-E3
gttgtcatcacgaacaccgtatcactcgcaggcaaacttgctctcacctgcgcacaatggtacctcctaaagaataattgattccaccagttgcagaacaggagacaaggatcccatgcaagaagatcactgtagtgactgtaggccaacttggcatggcatgtgacatcagcattctgggaaattcgctcactgacgaccttgctcttgtggatgttttggcagacacactcatacgacaaacgatggactcgcagcacggcagcttaatccttcagacaccactgattgtggcagacaaagattactccgtcactgaccaattcc

SEQ ID NO: 4433 - DNA, 414 bp, Bos taurus
  Clone ID: 19-LIB34-039-Q1-E1-E11
gggtccacgcacgcgtctacagtgaatcttattatatgaatattcaagaaggcatcctgaatatgctgtctcagtgctattgagacttgccaaggaatatgaagccacactggaggaatgctgtgccaaagatgatccacatgcatgctattccacagtgtttgacaaacttaagcatcttgtggatgagcctcagaatttaatcaaacaaaactgtgaccaattcgaaaaacttggagagtatggattccataatgcgctcatagttcgttacaccaggaaagtaccccaagtgtcaactccaactctcgtggaggtttcaagaagcctatgacaagtgggtactatgtgttgtacaaagccggaatcagagagaatgccctgtactgaatactatctgagcctgatcctgaa

SEQ ID NO: 4434 - DNA, 388 bp, Bos taurus
  unsure (202): unsure at all n locations; Clone ID: 19-LIB34-039-Q1-E1-E3
ggaacaaccataacttcatggagcgcaaaacgcggaatgacctccgttccaggttcttggccctgagggatcaagtcgctaccctggccacctgctccaaagcccccaaagtagtgatcccgaccaacgccttgaaatacatgcaagccctaatgggagctgagaagaagatggctactgagaaaaggcagctcaggtgtcngcaacaacagctgcagaaaagaatcacgtacctcagtggcaactaactgaccacagtctgactgctctgtcttcacagatacacaagtttattttttaaacgctcctctcccacgtaagaatttgcacagttcggttcacgtcgggatacctgcacaatacattcacataatgcattgcacacaca

SEQ ID NO: 4435 - DNA, 435 bp, Bos taurus
  Clone ID: 19-LIB34-040-Q1-E1-E3
gggaccacccacgcgtccgggtatttctataacggtacatccatggcctgtgagaccttcttatatggcggctgcatggggaatggcaacaacttcctctcggagaaggagtgtctgcagacctgccggactgtggaggcctgtaacctccccatagtccaggggccatgccgaagctacatccagctctgggcatttgatgctgtcaaggggaagtgcgtccgcttcagctatgggggctgcaagggcaatggtaacaaattttactcggagaaggagtgtaaggagtactgtggcattcctggtgaagcggatgaggagttgctgcgcttctccaactgaccggtccgcatgcctgaagtccacaacgcagcaggaagtgggaaggtcagagtctgccccaaagccctgctgcaagttccaataaaaaccaaa

SEQ ID NO: 4436 - DNA, 406 bp, Bos taurus
  Clone ID: 19-LIB34-041-Q1-E1-E3
acagaccgtgatgactgggagaatgggctgactgcaatggaatgtgcgctgtgcttggagagaagtgtgaatcagtcactactggaactgcacaaactggccactgaaaaagatgatccccatctgtgtgatttcattgagactcattacctgaatgagcaggtggaagccatcaaagaattgggtgaccacataaccaacctgcgcaagatgggggctcctggatctggcatggcagagtacctctttgacaagcacaccctgggacacagttagagctaagcctcaggctggtttcccacagccacaggggtgacttccctggtcaccaaggcagtgcatgcatatttgggttaccttcatcttttctataagttgtaacaaaaccatctacttaaattctttc

SEQ ID NO: 4437 - DNA, 426 bp, Bos taurus
  Clone ID: 19-LIB34-042-Q1-E1-E3
gagatgcccactttgccggcatgcatggctgcacagccttcggctggatgaccctgcagggcaggaagagcaggggcactgatctgcacagcaagacagcagccaccgtgggcatcagccgtgagcatgccaagatcatcaactacggccgcatctatggggccgggcagcccttcgccgagcgcctgctcatgcagttcaaccaccgactcacgcggcaggaggcagctgagaaggcccagcagatgtatgcggtcaccaagggcctccgccggtaccggttgtcagatgagggcgagtggctggtgaaggagttggacctccctgtggagaggaccgaggacggctgggtttccctgaaggatctgcgcaagattcagagagaagcttcaaagaaatcgcgatggaagaagtgggaggtggttg

SEQ ID NO: 4438 - DNA, 410 bp, Bos taurus
  Clone ID: 19-LIB34-043-Q1-E1-E11
atctagatcgcgagcggccgccctttttttttttttttttttttttttttttttttttttttttttttttttttttttttttttttttttttttaattcagaaaaaattttttaaaaaaggaaaggcaagtttttgaagtggaaaacagtttttttaagcacgtctaccaagtacagaaatcctcttcaaagccctaaaagcaaaatgttctgggaaaatgcacgtgtacagctcacagtcaatattcctcaacaaatggatacccagggggaccaacacccagtaatagcccattaaaccccaaattgctgttgaggccaaccattgctttcaaaacttcgggagtcagttcaaagtcaaacacctgtaagttcgccttgatccgcttcccggtgtaacccctgggcaa

SEQ ID NO: 4439 - DNA, 349 bp, Bos taurus
  Clone ID: 19-LIB34-043-Q1-E1-E3
ctgtgtcttgctctcttgcatggccagtacggaaattaccatcattgagggaaccgcgtctatgaggaatcctgaagcggcatgtccgcccatgatgtacaagccagtgacagctctgaggggctgtgacttgtaggctgcgcctcgccttacacatcgtctgcctgtgaagcacgcacatttcatgctgagtaggatagcaagcgtgtaagctggtgacagatagcgctttgatggtgtgacatatttcgtgctgtgtacagtactgtatgtccactatatggatcaggttgtccctttttgtcctcaccgccatgtctctatctaactttaggggtcgcttcatcat

SEQ ID NO: 4440 - DNA, 421 bp, Bos taurus
  Clone ID: 19-LIB34-045-Q1-E1-E11
gatgaagtactggggcgtagcgtcctttctccagaaaggaaacgatgaccactggatcattgacacggactacgagacctttgccgtgcagtactcctgccgcctcctgaacctcgatggcacctgcgctgacagctactctttcgtgtttgcccgagaccccagcggcttttccccggaagtgcagaaaatcgtgcggcagaggcaggaggagctgtgcctggccaggcagtaccggctgatccctcacaacggttattgtgatggcaagtcagaaagaaacattttgtaacaacatggaaggtgtcctttcattaggaaacttcccattaaccttactcagcctccaactcttaggagtttagtttgcttcacctcccctccctgcccctcgcggccctcccctcccctccgtggacaa

SEQ ID NO: 4441 - DNA, 420 bp, Bos taurus
  Clone ID: 19-LIB34-045-Q1-E1-E3
gatctacctacccgaggccgctggtgtgcggagaccccgggggaaactaccgtcaccatgtctgaccaggaagcaaaaccttcaaccgaggacttgggggataagaaggaaggagagtatattaaactcaaagtcattggacaggatagcagtgagattcacttcaaagtgaaaatgacaacacatctcaagaaactcaaagaatcatactgtcaaagacagggagttcccatgaattcactcaggtttctctttgaaggtcagagaattgctgataatcacactccaaaagaactgggaatggaggaagaagatgtgattgaagtttatcaggaacaaacagggggtcattcaacggtttaaatattccttttaattttttttcattcccccttaagccttttttagttttaaaaatag

SEQ ID NO: 4442 - DNA, 400 bp, Bos taurus
  Clone ID: 19-LIB34-047-Q1-E1-E11
gtaacttgcagccacagggcaaggtccaggtatgaagtcctttctatccccactttgtcctcccaaatcctctggcacccagagaacagcacatccagagctcaacctggtacagaccagccatggtgctctggggtccggcgctgggagccctgctagtggccattgtgggatatctgtgccttcgggggctgctccggtaacgaagacccaaggagccccctctggataagggccccgtgccctggctgggccatgccatggatttccggaagaatatgttcgaatttctgacgcacatgcagggcaaacatggggacatattcacggtacagctaaggggccagtacttcacctttgtcatgggccctctgtcttttggccctatcctcaacgatgc

SEQ ID NO: 4443 - DNA, 408 bp, Bos taurus
  unsure (330): unsure at all n locations; Clone ID: 19-LIB34-048-Q1-E1-E3
gggaaatgcagagcagtccagattgactatcaaccaatggatatccaataagactgaagggcgtatcactgatgtcattcccccacaagccatcaatgagttcactgtcctggtgctagtcaacaccatttacttcaagggcctgtggaagtcaaagttcagtcccgagaacacaaggaaggaactgttctacaaggctgatggggagtcatgttcagtactcatgatgtaccaggaaagcaagttccgctatcggagagtagcagaaagcacccaggtgctcgagttgcacttcaagggtgatgacatcaccatggtgctcatcctgcncaagctggagaagaccctgggcaaagtggaacaggaactcaccccagacatgctgcaagagtggctggatgagctgac

SEQ ID NO: 4444 - DNA, 430 bp, Bos taurus
  Clone ID: 19-LIB34-049-Q1-E1-E3
gggcattcccattgggaacgcacactcacccgcgggaagagccttgcaagggaccctttggcctctgacctgatcgtccaaagagaaagggaacctcggcatccgtgccccccagcccagctctgcagagatgcctcctcagctctcagacggcctcaactactcagccaaaatcgtccggggctccctggacagcctgccccaggccgtgagggagttcgtggagagcagcgccaagctgtgccggcctgaccaagtccacatctgcgatggctccgatgaggagaaccggcagctgctgagccacatggaggacgagggtgtgatcaagaggctgaagaagtatgacaactgctggttggctctcactgaccccagggatgtggccagaattgatagcaagacggtcatcatcactcgagagcaaaga

SEQ ID NO: 4445 - DNA, 434 bp, Bos taurus
  Clone ID: 19-LIB34-050-Q1-E1-E3
aaggaaacaccaaggtcctggatcagtatatatttgaactaagcaggaagactcggattccagaagtattcctcactaaaatacttgagtcaaccctgaaaagccttgatgaatgctgccactctgaatcttctactgcctgtttaaatgcaaagggccctcaattgacaagggaattatcatctttcattcaaaaaggacaagaactatgtgctgattattcagaaaacacatttactgagtacaagaaaaaactggcagagcgactaagaggaaaatttcctgatgccacggagacggatctccaagagctggttgccaagcgctcagactttgcctccaagtgttgttctgtaaactcacctcctctctactgcaattcagagattgatgctgaaattaataccctacagtcctgatgcatgtgtaccatc

SEQ ID NO: 4446 - DNA, 235 bp, Bos taurus
  Clone ID: 19-LIB34-051-Q1-E1-E3
gacaagcattaccataaatgatgttgtttatgtcattgactcctgcaagcaaaaagtgaagctgttcactgctcacaacaatatgaccaattatgctacagtatgggcatctaaaacaaaccttgagcagcggaaaggacgagctggccgtgtgcgccctggattctgctttcacctctgcagccgagctcgttttgagagacttgaaacccacatgacaccagagatgttccgc

SEQ ID NO: 4447 - DNA, 239 bp, Bos taurus
  Clone ID: 19-LIB34-052-Q1-E1-E3
ctagttctagatcgcgagcggccgcccttttttttttttttttatgtgttgtcatgcagatataggctgactaggagagtgaatacataggcttggattatagctactgcaaactctagaattgttagtaggattagaatggtgaatgtaattagagctgttgtagtgctaatgcttattagtgcaagtgtagctcctccgattaggtgaattaataggtgtcctgcagtgatgttagc

SEQ ID NO: 4448 - DNA, 242 bp, Bos taurus
  Clone ID: 19-LIB34-054-Q1-E1-E3
aaactttggcacaatgaagtgggtgacttttatttctcttctccttctcttcagctctgcttattccaggggtgtgtttcgtcgagatacacacaggagtgagattgctcatcggtttaaagatttgggagaagaacattttaaaggcctggtactgattgccttttctcagtatctccagcagtgtccatttgatgagcatgtaaaattagtgaacgaactaactgagtttgcaaaaacat

SEQ ID NO: 4449 - DNA, 340 bp, Bos taurus
  Clone ID: 19-LIB34-055-Q1-E1-E11
actgcccacatcccgctctcgcaggcagacatgagggcagagagaacttccttcctcctggccctggggctcctggtggctgggatccgcagtgtccactgcctcccagaaaatgtggtggtgaaggaccagcacagaagggtggatggccacacgttagcctccagcaacaccgacttcgccttcagcctctacaagcagttggctttgaagaaccccaataagaatgtcatcttatccccgctgagtgtctccatagccttggccttcctgtctctgggggcccgtggctccaccctgacagagatcctggaaggtctcaagttcaacctcacagaga

SEQ ID NO: 4450 - DNA, 358 bp, Bos taurus
  Clone ID: 19-LIB34-055-Q1-E1-E3
agggaagatagcctttgataaaggcagaacaagcacaaagccctttcacctcaaatcctctgccatcaaagtgcccatgatgaacagcaagaagtaccctgtggcctctttcacagaccggactctgaacgcccgggtgggccgcctgcagctgtctcacaacctcagctttgtgatcctggtgccccagaccgtgaaacaccatctccaagacctggagcaggctctcagcaccgccgtcttcaaagctgtcataaagaagctggagatgaccaagttccatcccactcacctgacgatgcctcgcatcaaagtgcagagcagtcaggacatgctggattactttgacttcatctac

SEQ ID NO: 4451 - DNA, 373 bp, Bos taurus
  Clone ID: 19-LIB34-056-Q1-E1-E3
attattgcggcacgtactcaacctgtctagtcctcactgggatgcatgtggcagtatttgggccacattgaacatctcggtggaattccacgacgaataccaccacgaatataatcccacgtaccatacttgcgatcggcttaatgagagcagcaccaactggcgggagccatacaggctggagacgtccagaaggccatttcaaaatgtacttacttctttaaagaactttatctgataagatcacgataatatttttcctatgggacaatggacttgcaatgcctcacctcaccttaagagtcagatgaacccatgttgagaactccactaacagttttatgccggtgataatttatctacataccatttc

SEQ ID NO: 4452 - DNA, 227 bp, Bos taurus
  Clone ID: 19-LIB34-057-Q1-E1-E11
ctctgtggacggaggaccaacaagaattcaaactccccagtggtgaaagagttccacatcccatacagtaaattgcaggtgatcttccggtcggacttctccaacgaggagcgtttcaccgggtttgctgcgtactatgttgctgaggatatagatgagtgcacagcctttgcagatgctccttgcagccacttctgcaataacttccttggtggttacttctgctc

SEQ ID NO: 4453 - DNA, 214 bp, Bos taurus
  Clone ID: 19-LIB34-057-Q1-E1-E3
gggacagggcaagctgcgaagatctgcaacaacttgctgttagctattaatatgattggaactgctgaagctatgaatctgggaatcacgttagggcttgacccaaaactcttggctaaaatcctaaatatgagctcaagacgatgttggtcaagtgacacttataatcctgtacctgcggtgatggatggagttccctcggctaataactatc

SEQ ID NO: 4454 - DNA, 225 bp, Bos taurus
  Clone ID: 19-LIB34-058-Q1-E1-E3
catctggtgtaacttcttattctcaagtgactggaataaccggtgagtctgtcaggctaccctgcttatatactggagaaatcacaactgcatgctggggccgaggggaatgttcttggtggagctgcagagaagacattatccaaacggatggatacaagttcattttccaaaaggcaaaactttatcacctagaaggatatattggcaaagggaatttgacct

SEQ ID NO: 4455 - DNA, 208 bp, Bos taurus
  Clone ID: 19-LIB34-059-Q1-E1-E3
ccgacaaagacacggtgctgctggagttctacgctccgtggtgcgggcactgcaaacagtttgctccagaatacgaaaaaatcgccgccaccttgaaggagaacgaccctcccatccctgtcgccaagatcgacgcgacctcagagtcggcgctggccagcaggtttgacgtgagtggctaccccaccaatcaagatccgtgaagaag

SEQ ID NO: 4456 - DNA, 317 bp, Bos taurus
  Clone ID: 19-LIB34-060-Q1-E1-E11
aggagaaggaggtgatacaggacgtggtggcagaaaaatgaagaggatcctggttttcctccttgctgtagcctttgtgcatgctctagagagaggccgagattatgagaaagataaagtctgcaaggaccttgccagcctgggaagagatgacttcacatctttgtcaatggtcctatacagcagaaaatttcccagtggcacctttgaacagatcagccatcttgtgaatgaagttgtttccttaacagtaacctgctgtgcggaaggggccgatcctgactgctatgacaacaggacttcagcattgtctgaca

SEQ ID NO: 4457 - DNA, 403 bp, Bos taurus
  Clone ID: 19-LIB34-061-Q1-E1-E11
cgcctggctgtaccggcctgagattcccggatcgccccacgggcccgcgaaggatgatatcttgcaacttcgaaaattttggtaccatgaaacatctattagtgctacgtttctgtgcttttagagttcaggcccaatttcctactgactatgactagggacaagatgacagacctaaggtaggtttggatgcccgcggtcatcggccctatgacaagacgaatgaagaggcccccagcctgagacctgtgccccctcccatcaggcagcgtggctatcgggctcgtcccgccacatcaactgtgggccataacaaagtggcgagaaagccccctgacgctgatagcctgctgcacgcgagacccggatctgggtgtgttgtgtcctacatgatgtcagttgc

SEQ ID NO: 4458 - DNA, 366 bp, Bos taurus
  Clone ID: 19-LIB34-061-Q1-E1-E3
attgtgacagtcttcctgggactggttataggtgccattttctatgatctaaacaatgatcctgcaagaatctagaacagagccggggtgctcttcttcctgatgaccaaccagtgtttcagcagtgtgtcagccgtggagctcctggtggtggagaagaagctgtttatacatgaatatatcagtggatactatagagtgtcatcttacatctttggaaaactgttatctgatttactccccatgaggatgttaccaagtattatatttacatgtataacatacttcatgttaggactgaaaccaaacgtggaggccttcttcatcatgatgcttaccctgatgatggtggcttaatcagctaat

SEQ ID NO: 4459 - DNA, 195 bp, Bos taurus
  unsure (116): unsure at all n locations; Clone ID: 19-LIB34-062-Q1-E1-E11
tgttcaccttccatgcagatatatgcacacttcccgatactgagaaacaaatcaagaaacaaactgcacttgttgagctgttgaaacacaagcccatgacggttttcagttgttcntctgctttggggggcaggttattaccaagctcagtgcagaaccctttgtatgagcatcagaagctggacttacatcaac

SEQ ID NO: 4460 - DNA, 181 bp, Bos taurus
  unsure (23): unsure at all n locations; Clone ID: 19-LIB34-062-Q1-E1-E3
ttaaaacagaagcaatcgcgaangggcccgcggcgggtgttgacgcgatgtgatttctgcccagtgctctgaatgtcaaagtgaagaaattcaatgaagcgcgggtaaacggcgggagtaactatgactctcttaaggtagccaaatgcctcgtcatctaattagtgacgcgcatgaatgg

SEQ ID NO: 4461 - DNA, 307 bp, Bos taurus
  Clone ID: 19-LIB34-063-Q1-E1-E3
agttgtcaagaacaaggcctacttcaagagataccaagtgaaattcagaagaaggcgagagggcaaaactgactactatgctcggaaacgattggtaatccaagataaaaataagtacaacacacctaaatacagaatgattgttcgtgtaacgaacagagatatcatttgtcagattgcttatgcccgtatagaaggagatatgatagtttgtgcagcttatgctcacgaactcccaaaatatggtgtgaaagttggcctgacaaattatgctgcggcatattgtactggcctgctgctggcccgc

SEQ ID NO: 4462 - DNA, 401 bp, Bos taurus
  unsure (262): unsure at all n locations; Clone ID: 19-LIB34-064-Q1-E1-E11
gggaaaaaaactcacccaaaaaaaaatcccggttaaagttggacaacaatttttcacacaaacaacaaacaaggcaaaaaaattaacaacaacttcataaaccaaaaaaagaaaaaaaagaaaacttttaaccttggcctttttaaccatctcatacaaaccaactacttatagtacagctaagtacatacacaaaaaaagttactggaatgctcggaataagattgtttttttttgttgttgtttttgcgttttttacaanggttttttttctcctttgagattataatgaacatggtcacaccacaagtaaagtcacagtatgacagagaacgctcccaaggctggtttggtcatccgagatcattaaaaatggctgacccctaacaatatgtacaaaa

SEQ ID NO: 4463 - DNA, 200 bp, Bos taurus
  Clone ID: 19-LIB34-066-Q1-E1-E11
ccccacacatcattgggacaatgatttgggtgacgtttacatctcgtcacgttctcttcagctcggcctattccattggtgtgtttcgcagacatactcactggaatgatattgctcatcagtttgcagatttgggagatgggtattttaggtgcctggtatcgactgcgttttctcaatacccccagcaatgtcgactt

SEQ ID NO: 4464 - DNA, 241 bp, Bos taurus
  Clone ID: 19-LIB34-067-Q1-E1-E3
agccgccgagaaagcatcgttgaagtgttccccgcctccactgccattatgtctaaatcagagtctcccaaagagcccgaacagctgcggaagctcttcatcggaggattgagctttgaaacaaccgatgagagtctgaggagccattttgagcaatggggaacgctcacagactgtgtggtaatgagggatccaaacaccaagcgctccagaggcttcgggtttgtcacgtacgccacgg

SEQ ID NO: 4465 - DNA, 168 bp, Bos taurus
  Clone ID: 19-LIB34-068-Q1-E1-E11
caatagaaatgccataatttattctgttgtataaaaaagtcatccttatgtaacaaaatgtcttcttagaagaagatatatattatttcaggtcataaataattagcaaacatacaactgttggcaacttaaaaaaacaaaacaaaatcaacactggtgctttccagt

SEQ ID NO: 4466 - DNA, 216 bp, Bos taurus
  Clone ID: 19-LIB34-069-Q1-E1-E3
actctggcaaaaatgtcactttgcctgctgtgttcaaggctcccattcgacccgatattgttaactttgttcacaccaacttgcgcaaaaacaacagacagccctatgctgtcagtgaattagcaggtcatcaaaccagtgctgagtcttggggtaccggcagagctgtggctcgaattcccaggggttcgaggtggcgggaactcaccgtttccg

SEQ ID NO: 4467 - DNA, 247 bp, Bos taurus
  unsure (220),(222),(237)...(238): unsure at all n locations; Clone ID: 19-LIB34-070-Q1-E1-E11
acggggggatccagaaagaactgcagttttaaagtcttctaatgttgtatcacttcactgtctaggctacacaggattttagttggaggttgtaattcatattgtcctttatatctgatctgtgattaaaacagtaatgttaagacagcctaggaaaaaatcaatttcctaatgttagaaataggaatggttcaataaaaccctgctggatggcaagganantggttcaaatgaaannccttgcagc

SEQ ID NO: 4468 - DNA, 231 bp, Bos taurus
  Clone ID: 19-LIB34-070-Q1-E1-E3
ggaatggagagtggtcacagctaccaaaatgcttagaggcatgtgtaatttcagaagaaacaatgagaaaacatcacatacagttaagatggaaacacgataaaaaaatttactctaaaacagaggatactattgaatttatgtgtcaacatggttatcgtcaactgacaccaaaacatacatttcgagcaacttgtcgggaaggaaaggtggtgtatcctcgatgtggat

SEQ ID NO: 4469 - DNA, 275 bp, Bos taurus
  Clone ID: 19-LIB34-071-Q1-E1-E3
tctagatcgcgagcggccgcccttttttttttttttttttttttttgggtgaaaaattgtaatttattgaaactcaactcaaaaaatataagatgctgtagtgtacaagatattacacaaagcaccctcgggcgcacattcaagtcaagtaagaactcctgccctcttccctagccctgcccccacagactctgacgctcagatttccaataaaacgtgcttttctctcttgacaaaaaaaaaaaaaaaaacaagaggacaaataaaaaagaaaa

SEQ ID NO: 4470 - DNA, 382 bp, Bos taurus
  Clone ID: 19-LIB34-072-Q1-E1-E11
aggcggacggctctggatccactgcccacaccccgctctcgcaggcagacatgaggacagagagaatgtcccccctcctggctctggggatcctggtggctgggctctgctccagggtccactgcctcccagagaatgtgaccccagaagaacagcacaaagtgacatctgtggatggccactcattatcctccagcaacactgacttcgccttcagcctctacaagcagttggctttgaaggaccccaataagaacgtcatcttctcccctctgagcatctccatagccttggccttcttgtccctgggggctcatggccccactgtgacagagatcctggaaggtctcaagttcaacctcacagagacccccgaagacag

SEQ ID NO: 4471 - DNA, 410 bp, Bos taurus
  Clone ID: 19-LIB34-072-Q1-E1-E3
acaggctcagagccccgggcccgccgacaccatgagttggtcctcgcaccctccgagtgtaatcttctacattctttcattgctttcttcagcatgcctggcatatgttgctacccgagacaactgctgcatcttagatgaaagatttggtagttattgcccaactacctgtggaattgcagatttcctgaataattaccaaaccagtgtagacaaagatctacgaactttggaaggcatcttatatcaggttgagaacaaaacatcagaagccagagagctggtcaaagcaatccaaatcagctataaccctgatcaaccatcaaagccaaataacatagagagtgctaccaagaattccaagagtatgatggaagaaattatgaaatatgaaacactgatatcaacac

SEQ ID NO: 4472 - DNA, 324 bp, Bos taurus
  unsure (272): unsure at all n locations; Clone ID: 19-LIB34-073-Q1-E1-E3
agtacgaataagggacttaggaaaaaatccatttttggttctaacaaatgcatttaagttgtaaacgtctttttaagcctttgaagtgcctatgattctatgtaactcgttgcagactggtgttaatgagtatatataacagttaaaaaaaaagttggtattttataagcacagacaattctaatggtaacttttgtagtcttacgaatagacgtaaattgtaatttgggaatataaaaactactgaataaatcatgtggcctaatattganaatgtcactgttataaattttgtacattttcgatcaaatgttcacctcccct

SEQ ID NO: 4473 - DNA, 418 bp, Bos taurus
  unsure (123),(204),(271),(310): unsure at all n locations; Clone ID: 19-LIB34-074-Q1-E1-E3
accttctatttgctcagatctacattttgccttgaagctccctgccctgagaagtgattgaggaaggcacccagcaaggactgggcacggcaaggagtcagtagaccaaccaggggtgcgcanggtcttcagcctttcttccaccactgccgtccaggaggatggaggccttcaacgaatcttccccgttcaacttctccctcncgcacaactttggcaagcggcccaccgaccgggcgctgagtgtcattctggtgatcatgctgttaancatcatgctctcgctgggttgcaccatggagttcagcangatcaaggcgcacttctggaagcccaggggctggccgtcgctctggtggcgcagtttggcatcatgcccctcactgcctttggactgggcaagttcttccagctgaat

SEQ ID NO: 4474 - DNA, 409 bp, Bos taurus
  Clone ID: 19-LIB34-075-Q1-E1-E11
gacccacgcgtcagggcagaggcactggatccactgcccacacgtcgctctcgcatgcagacatgaggacagacaaaacttccttcctcctgattctggggctcctgatgtctgggttctgctcgagggtccaatgcctcccaggatatgtgatcccagtatatcactacaccaggacgtctgtagatggacacacattagcctccagcatcagcgacttcgtcttcagcttctacactcaattggctttataggactccaggtaaaatgtcatcttctcccctctgatcatctgcatatccttggccttcctgtccctgtgggatcatgaacacactgtgacatctatcctgacaagtctcaagttcaccctcaaactcatgcccgagacagaaatccaccagggctt

SEQ ID NO: 4475 - DNA, 266 bp, Bos taurus
  Clone ID: 19-LIB34-076-Q1-E1-E3
acccacgcgtccgctgtactatcagacatggctgacgccacttctgtaacagtttacgagtcctgtgaattcccaaggacttcaaggccttcaaggccttccgggccttctgggccttcttggccctcaagggccccaaggccttcaagaattgcaagggccaattggaattccgggaaaaattgaaatttgcttgtccccccctaaatctgcctttgcattgaaaatgaatgatcccctccaaaccccctccaagcccattgtct

SEQ ID NO: 4476 - DNA, 468 bp, Bos taurus
  unsure (378): unsure at all n locations; Clone ID: 19-LIB34-077-Q1-E1-E11
ccacgcccccgcgccgggaccaggtgtcgtgaaaaccaccgttaaacctaagccaaaatgggaaaggagaagacccacatcaacatcgttgtcattgggcacgtagattcagggaagtctaccacgactggccatctgatctataaatgtggcgggatcgacaagagaacaattgaaaagttcgagaaggaggctgccgagatgggaaagggctccttcaaatatgcctgggtcttggacaaacttaaagctgaacgtgagcgtggtatcaccattgatatctccctgtggaaatttgagaccagcaagtactatgttaccatcattgatgccccaggacacagagacttcatcaaaaacatgattacaggcacatcncaggctgactgtgctgtcctgatcgttgctgctggtgttggtgaatttgaagccggtatctccaagaacgggcagacccgtgagcatgcc

SEQ ID NO: 4477 - DNA, 416 bp, Bos taurus
  unsure (16)...(17): unsure at all n locations; Clone ID: 19-LIB34-077-Q1-E1-E3
tccaatagcagctggnngacatcctttcccagctgggtatcaggaaaatcttcaccagcgatgcggacttctcaggaatcacagatgaccacaagctggcagtttcccacgtgatccacaaggctgtgctcgacgtgggcgaggagggcacggaaggagctgctgtcacggctgtcgtaatggctacctcatcactcttgcacacgctaactgtcagtttcaacaggccctttctgctttccatattctgcaaagagactcagagcatcatctttttgggcaaagtcaccaaccccaaggaagcctagagctcccctcctccctaaggagctgggtgcccaagtccctggaagcagcctggccccctctgctcaaccctggaaggtgacagcgacagtgctaagggctccaagtgc

SEQ ID NO: 4478 - DNA, 444 bp, Bos taurus
  Clone ID: 19-LIB34-078-Q1-E1-E3
tagggaacgatgaaagaaaaaactaaaagtataaaaaagcaaagattaccccttgtaccttttgcataatgaattaactagtataagacttaacaaaatgaattttagctaagcagcccgaaaccagacgagctactcacaaacagtttaccaagaactaactcatctatgtggcaaaatagtgagaagatttgtaagtagaggtgacatgcctaacgagcctggtgatagctggttgtccagaaaatgaatctaagttcagctttaaagataccaaaaattcaaataaaccccactgtagctttaaaagttagtctaaaaaggtacagccttttagaaacggatacaaccttgactagagagtaaaatttaacactaacatagtaagcctaaaagcaggcatcaattataatagcgttaaagctcaacaacataaattaaata

SEQ ID NO: 4479 - DNA, 382 bp, Bos taurus
  Clone ID: 19-LIB34-079-Q1-E1-E3
aattggtgaaaataaaaatcaaagactatcctaggttggggtggatttaagggttagaacagcaggattcctatccatttttaggctcacctctatcggagaatcttcacatgagtccatctaaccgtccacgtctctctctttccatgcaggtatcagtaccattaaggttagcattcgtaacgccaattccctgggaggaggcttccactgctggacctgcgatgtccgtcgccggggcaccctgcagtcctactttgactgaccaggcctgctggggcttggggctttgcctcagataaacctaggaagcttagggacaaggttcattctcctgctttaaaaagtgcatcaactgtagtgctttaaacaatcatatttt

SEQ ID NO: 4480 - DNA, 418 bp, Bos taurus
  Clone ID: 19-LIB34-080-Q1-E1-E3
gggccgagccacgcgtccgaaaaacatggtcagtagctcgcctgagccagaaatttcccaaggctgagtttgtagaagttaccaagctagtgacagatctcacaaaagtccacaaggaatgctgccatggtgacctacttgaatgcgcagatgacagggcagatcttgccaagtacatatgtgataatcaagatacaatctccagtagactgaaggaatgctgtgataagcctttgttggaaaaatcccactgcattgctgaggtagaaaaagatgccatacctgaaaacctgcccccattaactgctgactttgctgaagataacgatgtttgcacaaactatcaggaagcaaaagatgccttcctgggctcgtttttgtaggaatattcaagaaggcatcctgaatatgctgtctc

SEQ ID NO: 4481 - DNA, 445 bp, Bos taurus
  Clone ID: 19-LIB34-081-Q1-E1-E11
gcccaaccaagcctccaggccgcaggccaaagccaaaggaaagaaggagacaaggaaccccggtccgaaccgcccccggggggttggccaaggccgggattaaccaccttgacccggaaattcaaccaccaacgggcctgcaaccccaccaaggaaattgaatccaaaccccggtgcccaaaaccaagaaaattcttgggggaggaaagcaacgtgcaaagggtggactccccagtcacagtgtgtggtgacatccatggacaattctatgacctcaaggagctgttcagagtgggtggcgatgtccctgagactaactacctcttcatgggggactttgtggatcgtggtttctacagcgtcgaaacgtttctcctgctgctggcacttaaggttcgctatcctgaccgcatcaccctgatccggggcaaccatgagagccgtc

SEQ ID NO: 4482 - DNA, 413 bp, Bos taurus
  Clone ID: 19-LIB34-083-Q1-E1-E3
aagatttgaaaaatggcaacaaatgaaagtatcagcgtctttagttcagcatccttggctgtggaatatgtagattcacttttgcctgacaatcctctgcaggaaccatttaaaaatgcttggaactatatgttgaataattatacaaagttccagattgcaacgtggggatctctcatagttcatgaggtcctttatttcttgttctgtttacctggatttttgtttcaatttataccttacatgaaaaagtacaaaattcaaaaggataaaccagaaacatgggaaaaccaatggaaatgttttaaagtgcttctctttaatcacttttgtatccagcttccgttgatttgtggaacttattaatttacagagtaattcagtattccctatgattgggaaacactgccaag

SEQ ID NO: 4483 - DNA, 392 bp, Bos taurus
  unsure (245),(291): unsure at all n locations; Clone ID: 19-LIB34-084-Q1-E1-E11
cacgcggccgagctgaggtacacagaaagcacatcatggggcaaaacgttgcagattacatgcgctacctgattgaggaagatgaagatgcttacaaagaaacagttctctcagtacataaagaacaacgtaactccagacatgatggaggagatgtataagaaagctcatgctgcaatacgagagaatccagtgtatgagaagaagcctaagaaagaagttaaaaagaagaggtggaaccgtcncaaaatgtcactttgccagaagaaagatcgggtagctcagaaaaangaagcttccttagagctcaggaacgagctgctgaaagttaaccaaactacaattttctatcaacatttttcagataagaataataaacttattgaacaagc

SEQ ID NO: 4484 - DNA, 299 bp, Bos taurus
  Clone ID: 19-LIB34-084-Q1-E1-E3
actattatatatcaacacttattctgattctttggacaccccgaagtctatattttaatcttacctgggtttggaataatctctcatatcgtgacctactactcaggaaaaaaagaaccattcggatatatgggaatagtttgggctataatgtcaatcggatttctaggtttcatcgtatgagcccaccatatattcactgtcggaatagacgtcgacacacgagcctacttcacatcagccactataattattgctattccaaccggggtaaaagtcttcagctgattggcaacact

SEQ ID NO: 4485 - DNA, 425 bp, Bos taurus
  Clone ID: 19-LIB34-085-Q1-E1-E3
ttccaggccgacccacgcgtccaattatgaaatatgaaacactgatatcaacacatgaatcaacaattcgatttttgcaagaaatatataactcaaatagtcaaaaaatcgttaacctaagagataaagtggtccagcttgaagcaaactgtcaagagccttgtcaagatacagtgaaaatacatgatgtaactgggagagattgccaagatgttgccaataagggggccaaagagagtggactttactttatcagacctctgaaagctaagcagcagttcttagtctactgtgaaattgatgggtctggaaatggatggactgtgtttcagaagaggcttgatggcagtctggatttcaagaaaaactggattcaatataaagaaggggttggacatctgtctcctactggaaacacagaattt

SEQ ID NO: 4486 - DNA, 266 bp, Bos taurus
  Clone ID: 19-LIB34-086-Q1-E1-E11
gacaaatgtgcctgctccaaccacgaaccatacatcagctactcaagggcctttatatgtctgatggagggcgctggagatgtggcctttgtcaagcactcaacggtattcgacaacctgcctaacccagacgacaagaaaaactatcatctgctctgcagggacaacacccagtagtctgtacatacttaccatgaatgctacttggcaatggttccttctcatgcggttgtggcaccaactgtgtgctgcaaagatgatgtgat

SEQ ID NO: 4487 - DNA, 495 bp, Bos taurus
  Clone ID: 19-LIB34-086-Q1-E1-E3
cggtgccgactccgggtagaccacgcggcccaacaagtactcctcacatctggaaaagcaccagttatatatagatgagactgtgaagaataatatcccaactaagcttcgtgtgctccgttcaattctggagaatttgagaagcaaaatacaaaaattagaatcggatgtctcaactcagatggaatactgccgcaccccgtgtactgttacttgcaatattcctgtggtgtctggcaaagaatgtgaggaaatcatcaggaatggaggtgaaacatctgaaatgtacctcattcagcctgaggattctagcaaaccatatagagtatactgtgatatgaaaacggaaaaaggaggatggacagtaattcagaaccgtcaagatggtagtgttgactttggcaggaaatgggatccatataaacaaggatttggaaatattgcaaccaatgcagaagggaagaaatactgtggtgtaccaggtgagtattggct

SEQ ID NO: 4488 - DNA, 401 bp, Bos taurus
  Clone ID: 20-BOVMS1-002-Q1-E1-E7
acggcagttttcctttgagtgccaatttcttactagtactatttcttaatgtaacatgtttacctggaatgtattttaactatttttgtatagtgtaaactgaaacatgcacattttgtacattgtgctttctttttgtgggacatatgcagtgtgatccagttgttttccatcgtttggttgcgctgacctaggaatgttggtcatatcaaacattaaatttaaaaatgaccactcttttaattaaaattaacttttaaatgtttataggagtatgtgctgtgaagtgatctgaaatttgtaatatttttgtcatgaactgtactgctcctaattattgtaatgtaataaaaatagttatggtgactatcataaaccatacaaaaaaaaaggcggccgct

SEQ ID NO: 4489 - DNA, 192 bp, Bos taurus
  Clone ID: 20-BOVMS1-004-Q1-E1-E11
atgcgacgtcatagctcttctatagtgtcacctaaattcaattcactggccgtcgttttacaacgtcgtgactgggaaaaccctggcgttacccaacttaatcgccttgcagcacatccccctttcgccagctggcgtaatagcgaagaggcccgcaccgatcgcccttcccaacagttgcgcagcctgaat

SEQ ID NO: 4490 - DNA, 379 bp, Bos taurus
  Clone ID: 20-BOVMS1-004-Q1-E1-E7
cgcgtccgagtaaaaaaaaaaagataaaaaaaaaaaataaaaaaaaaaaaaaaaaaaaaaaataaaaaaaaaaaaaaaaaaaaaataaaataaaaaaaaaataaattaaaaaaaaaagaaaatgaaaaaaaaaatgaaaaaaaggggggttactcaaattggttcaaattttcctttcgctagcatgtgcgttttacattttttgaatgggttcatcgatcttcatttcaatggcgctgtttttatgggtactgggatggaaaatgttggggtgtattaagttttggcggtttggaggttaagccctttttgaaagctagatttttaagcgctctggctccagattttttcgtgttaaacatttgctttctcgaaaggt

SEQ ID NO: 4491 - DNA, 427 bp, Bos taurus
  Clone ID: 20-BOVMS1-005-Q1-E1-E7
attaactcaggaagtaaattgaattactctttctggctttttaatcatcttcagcaaagtccgaaggagccagaaccaatactagccaagtgatttattttcaaggactgaaactaagttctttaggtccaagatgtggaacactgtttcactggaatatcattaggctagtgcatcagtaacatgttaattattaataacgaattctcagtgacttttgtgaatagttaatcttggccactggctggtagacctaacttataccacaaaagccaatgatatgatgaaccaagattaatgccactccatatggagggctgcctggaagtgtgtaacttcagtaccaatcagatggtaccatcttataaagcctcttcttgtaacagtgaaaacttgtgggtaggacagtggatgaagtttattgctc

SEQ ID NO: 4492 - DNA, 430 bp, Bos taurus
  Clone ID: 20-BOVMS1-006-Q1-E1-E7
cgcgtccgaaaaatgaacgaaaatttatttacctcttttattacccctgtaattttaggtctccctctcgtaacccttatcgtactattcccaagcctactattcccaacatcaaaccgactagtaggcaatcgctttgtaaccctccaacaatgaatacttcaacttgtatcaaaacaaataatgagtatccacaattctaaaggacaaacatgaacattaatattaatatctctgatcctatttattggatcaacaaacctactaggcctattaccccattcattcacaccaacaacacaactatcaataaacctaggcatagccatccccctgtgaacaagaaccgtaattacaggattccgcaataaaaactaaagcaacacttgcccattttctaacacaatggaccaccaacccaactaatcca

SEQ ID NO: 4493 - DNA, 443 bp, Bos taurus
  Clone ID: 20-BOVMS1-007-Q1-E1-E7
cagatctttgctgaaaacatgtgtggcctcagtgaagatgcaacaatgacaaaagagagtgccgtgattgccaaggatggcaaaatctacaaaaatccagtgtatgaagacttcgatttcacagaggcacctatgtttactcagccattggtcaacacctatgctgtagctggttacaatgctacgctgaactgcagtgtgagaggaaatcctaagcccaaaattacctggatgaagaacaaagttgttattaaggatgatccaagatacaggatgttcagcaaccaaggggtctgtactctggagattcgcaagcccagcccctatgacgggggcacttactgctgcaaagcagtcaatgaccttgggacagtggagatcgaatgcaaactggaggtgaaagttgtagcacaataaggatttttgaatgtgtattatcatct

SEQ ID NO: 4494 - DNA, 390 bp, Bos taurus
  Clone ID: 20-BOVMS1-008-Q1-E1-E11
gggccgacccacgcgtcagagcaatagcacaaacaatctcatacgaagtaacgctagcaattatcctgttatcagtactcctaataagtgggtcctttaccctctccacattaattactacacaagaacaaatatggttaatcctcccagcatggcctctagcaataatatgatttatctcaacactagcagaaacaaaccgagctccatttgatttaactgaaggagaatcagagctagtctcgggcttcaacgtagaatatgcagcaggaccatttgccctcttcttcatagcagagtacgcaaatattatcataataaatatctttacagcaattttattcctaggaacatcccacaatccacacataccagaactctacacaatca

SEQ ID NO: 4495 - DNA, 359 bp, Bos taurus
  Clone ID: 20-BOVMS1-008-Q1-E1-E7
atgcgacgtcatagctcttctatagtgtcacctaaattcaattcactggccgtcgttttacaacgtcgtgactgggaaaaccctggcgttacccaacttaatcgccttgcagcacatccccctttcgccagctggcgtaatagcgaagaggcccgcaccgatcgcccttcccaacagttgcgcagcctgaatggcgaatgggacgcgccctgtatcggcgcattaagcgcggcgggtgtggtggttacgcgcagcgtgaccgctacacttgccagcgccctaacgcccgctcctttcgctttcatcccttcctttctcgccacgtttgccggctttcccgtcaagctctaaatctgggg

SEQ ID NO: 4496 - DNA, 444 bp, Bos taurus
  Clone ID: 20-BOVMS1-010-Q1-E1-E11
aaatatagaacaacctctaacactcctgtaaattatcttttaaaatgctagtatttttcctctcttaataatagcttgccctcagaaagattcaaactaccctgcctaaatagcaagagactggaggctactctggttctgtcggttcagttcataagtacaattattcacacagcagtcggctcttggagtcatcacctgacattggccggtgactgcagagtgcagagactgatcgagatgcagacccacctcagttcagtcttcaggccccgttgatttaaaactttctatcttgctctgttagggtatctaatccttttacacaacatttaagccaccaaactgagaccttgatatcttcatttgaaacagcatctgaagttctgttagcgccctgaaccagtttgtgttcgctacggaactgaaactcatgtcttgttt

SEQ ID NO: 4497 - DNA, 434 bp, Bos taurus
  Clone ID: 20-BOVMS1-013-Q1-E1-E7
gcagcgtgagtaggacccgtttacttgtcaatcaaaatccctactttcttggaattactctcctcttgccattggaatgtagtccaagagtgaaccaggaactagtgacttggagatagaaatgaagaatagagttgataaagcactgaacctttaaaccccctctacggttggttgcatcataactaagttacaaattaaaggagatatataaagttgagatcaattaaatcttaataaacttaacagtttatggtttagtatttccccttccttttcctgctttgtttcaagattatattttaatagtttttccctagataggcttttcaactgagcctgttatcatcagctgatacagaattttaactacagaggacaaaaaatgatactgtaattttattatcagactttcaaaattacattcattgaag

SEQ ID NO: 4498 - DNA, 361 bp, Bos taurus
  Clone ID: 20-BOVMS1-014-Q1-E1-E7
gataaatcgcatgttgtaatcagtaaagtcaaatgcgacactgtaaaacattgctgcatttaaattaaccttcaggaaggacgcacatggagatctaatctaatttagactgaatggaaatatcatgatctctatattacgtcatgaagaatcttctgtatgacagtagcatgtattactgataggttgatagaatgcaggaattactcattatagtcgcctaggataacacatggctattgcagtcaatcttgaagtgtatatgtgccttacaatagtctctcatagcatatgtgaaacctaaatttcaaatgggacactccctgggactgcacattacacgcatctgaagtagtagttt

SEQ ID NO: 4499 - DNA, 373 bp, Bos taurus
  Clone ID: 20-BOVMS1-016-Q1-E1-E7
tagatcgcgagcggccgcccttttttttttttttttttttttttttattttttttttctcttttgggtaccaaattaccttatctgaaggaatggtactaaagaaacaacttaagtaaatgttttgttacaacttacataaacgatgaacgtaacccaaatatgcatgcactgccttggtgaccaaggaagtcacccctgttgctgtgggaaaccatcctgaggcttaactctcactgtgtcccacggtgtgcttgtcaaagaggtactctgcgtcgaccccggcccggaggacgcttatgcgggatttcaagcgattgcaacaggacccacctgtcggtgtcagtggcgcaccatctgaaaacaacatcatg

SEQ ID NO: 4500 - DNA, 343 bp, Bos taurus
  Clone ID: 20-BOVMS1-017-Q1-E1-E11
gttgagatggccgtttccgacttgtagagagattttaataaatctggtttcgtaaaaaaaaaaaaatagagggataaaaaaaaaaaaagaaaaaaaaaagtcaacaaaagaagaaaaaaaaacaaaaacaaaagaaaaaaaagaaaaaaaaaaggaagtaaaaaatcaaaaaaaaaaaaggggggccacccaataggttcaacactaatgttcccataaaggaaagataaaatccctttcaaaatgtcacaaatattaattccacaggccgcccttttaaaatctcaatggaggggaaaacccgggcttgacccagtttaatgactctggacaacacccccct

SEQ ID NO: 4501 - DNA, 443 bp, Bos taurus
  Clone ID: 20-BOVMS1-017-Q1-E1-E7
tcagatttcagtagccatcagctttaaatttgacctaagtctctgtagccaagataaggttgggacattgcaatcatttttcgaaggagaatttactatggcttcaagatctttaaggtcaagtttagcctaagaccaggaactggaaatttaacacagcactatcccatagaaacttcagtaaaaatggaaatctctatctatattgtcttgtatggtaaccactagccagctacatctggtgactgagaacttgaaatatggcaagtgtgactgcagaactgaatttttcattgtatctcattttaattaattaaaatagccctatgtgactcatgaatacatactgaacggatcagctctcagtacacattcatatttgggttgttacatcaggaaataaaatgtgtttttaaaaattacaaaagtcagtatgtagagaa

SEQ ID NO: 4502 - DNA, 453 bp, Bos taurus
  Clone ID: 20-BOVMS1-018-Q1-E1-E7
ttcacatcctattggccgtagcattccttacgttagtggaacgaaaagttctaggctatatacaactccgaaaaggtccaaatgtcgtaggtccatatggcctacttcaacccatcgccgatgcaatcaaacttttcattaaagaaccactacgacccgctacatcttcagcctcaatatttatcctagcacctatcatagctttaggcctagccttaaccatgtgaattcccctaccaataccctatcctcttatcaacataaacctaggagtcctatttatactagccatatcaagcctagccgtatactccattctctgatcaggctgagcttccaactcaaaatacgcactaatcggagccctacgagcagtagcacagacaatctcatacgaagtaaccctacaatttacctggtaacagtactcctaataagtgggtcctttaccct

SEQ ID NO: 4503 - DNA, 329 bp, Bos taurus
  Clone ID: 20-BOVMS1-020-Q1-E1-E11
atgcgacgtcatagctcttctatagtgtcacctaaattcaattcactggccgtcgttttacaacgtcgtgactgggaaaaccctggcgttacccaacttaagtcgccttgcagcacatccccctttcgccagctggcgtaatagcgaagaggcccgcaccgttcgcccttcccaacagttgcgcatcctgaatggcgaatgggacgcgccctgtagcggcgcattaagcgcggcgggtgtggtggttacgcgcaacgtgaccgctacacttgccagcgccctagcgcccgctcctttcgctttcttcccttcctttctcgccacgttcg

SEQ ID NO: 4504 - DNA, 446 bp, Bos taurus
  Clone ID: 20-BOVMS1-021-Q1-E1-E7
aaaaaggcctccgttatggaataattctttttattatctccgaagtactattctttaccggatttttctgagctttctaccactcaagcctcgcccccacccctgaactaggcggctgctgacccccaacaggcattcacccactaaaccccctagaagtcccactgctcaacacctctgtcctattggcttccggagtttctattacctgagcccatcatagtttaatagaaggggaccgaaagcatatattacaagccctatttatcaccatcacattaggagtctacttcacactactacaagcctcagaatactatgaagcaccttttactatctccgacggagtttacggctcaactttttttgtagccacaggcttccacggcctccacgtcatcattgggtccaccttcttaattgtctgcttcttccgccaattaaaa

SEQ ID NO: 4505 - DNA, 250 bp, Bos taurus
  Clone ID: 20-BOVMS1-022-Q1-E1-E11
ccaaccaataaataaaatttgtaacaaaggcatcatcgaactttcaggcccaatcaacatttcatcatgatgaaatttcggttccctcctgggaatctgcctaatcctacaaatccccaaaggcctattcctagcaatacactacacatccgacacaacaacagcattctcctctgttacccatatctgccgagacgtgaactacggctgaatcatccgatacatacacgcaaacggagcttcaatgttt

SEQ ID NO: 4506 - DNA, 93 bp, Bos taurus
  Clone ID: 20-BOVMS1-022-Q1-E1-E7
cccacgcgtccggttccataaatacaaagagccttatcagtattaaatttatcaaaaatcccaataactcaacacagaatttgcaccctaacc

SEQ ID NO: 4507 - DNA, 458 bp, Bos taurus
  Clone ID: 20-BOVMS1-023-Q1-E1-E11
ttccggcgtccaccacgcgtccgaagaaaaaaaaaaaaaaaaaaaaaaaaaaaaaaaaaaaaaaaaaaaaaaaaaaaaaaaaaaaaaaaaaaaaaaaaaaaaaaaaaaaaaaaaaaaaaaaaaaaaaaaaaaaaaaaggggggccccccaaaaggttcaaaccttacttacccgtgaatgcaacttcaaaccccttcaaaagtgccaccaaaattcaattcacgggccgtcttttaaaaacttcgtaacgggaaaaaccctggcgtaaccaaacttaacccccttgaaaaaaacccccctttcccaaactggcgtaaaaccaaaaaggcccgaaccgatcgcccttccaaaaatttgcccacccaaaatggcaaatggaaccccccctgtaccggcccataaaccccggcgggtgtgggggtaacccccagcgtaaccgctaaatttgcaaaccccca

SEQ ID NO: 4508 - DNA, 243 bp, Bos taurus
  Clone ID: 20-LIB188-001-Q1-E1-E11
acgtccgaccaggcggcgggttcgagcccaactttatgctcttcgaaaagtgcgaggtgaatggcgagaaggcgcatccgctcttcgccttccttcgggaggttctgcccacgccaagtgacgacgccactgctctcatgaccgaccctaagttcatcacctggtccccggtgtgccgcaacgacgtctcctggaacttcgagaagttcctggtgggcccagacggtgtgcccgtgcgcaggt

SEQ ID NO: 4509 - DNA, 405 bp, Bos taurus
  Clone ID: 20-LIB188-002-Q1-E1-E11
acatcaagctgtcaacagcgatcaagcggaacgagaacatggctaaagggctgcagaaggccctgctgcagcagcagccggaagatgacagcaagcgcgcccctcggccccaggacctgatccggctctatgacatcattctgcagaatttggtggaattgctccagcctcctggcttagaggaggatagagccttccagaaagagataggccttaaaactctggtctacaaggcttacaggtgtttcttcatcgctcagtcctacgtgctggtgaagaagtggaatgaagcccttgtcctgtatgacagggtcctgaaatacgcagacgaagtgaattccgacgctggagccttcaagaacagcctcaaggacctgccggacgtgcaggagctcatcacacaag

SEQ ID NO: 4510 - DNA, 93 bp, Bos taurus
  Clone ID: 20-LIB188-002-Q1-E1-E7
accccggaatcgcggacaggatgcagaaagagatcactgccctggcacccagcacaatgaagatcaagatcatcgcgccccctgagcgcaagt

SEQ ID NO: 4511 - DNA, 416 bp, Bos taurus
  Clone ID: 20-LIB188-003-Q1-E1-E7
actcccagcagcactacttacacgtcttccttcgtcttcacctaccctgaggctgactccttccccagctgtgcggctgcccaccgcaagggcagcagcagcaacgagccttcctctgactcgctcagctcacccacgctgctggccctgtgagcgggcagagaggggaggcagtgggcgtgcacgtggccactgcctgagttggcgcattacagagaggagaaacacgtcttccctcgagggttcccatagacctagggaggaccttatctgtgcgtgaaacacaccaggctgtgggcctcaaggacttgcaagcgagcatccccgtgtggactcaagtccttacctcttctggagatgtagcaaaacgcatggagtgtgtattgttcccagtgacacatctgagagctggtagt

SEQ ID NO: 4512 - DNA, 404 bp, Bos taurus
  Clone ID: 20-LIB188-004-Q1-E1-E11
acaagcttattttttttttttttttttttatttttttttttttttttatttttttttttttttttttttttttgttttttttatcttttttttttttttttttttttttttttttttagaccaaaggtataggccttaacggccaaaggaggagcggccccaaccagggggcccaaagaggggccgggaggggccagggcccaaggaggggcaaaagtggccccggtcccccaggccccccaaacggggaacgcgggaaaacaatcgcccgcccccaaagggccaaaggtccccgggccccaaaaggccccgaaaggggcccacctaaatggggaattgccccccaagcggggttgggtaaaagaaaacccggagttacaagagcagggcctacaaggctttgt

SEQ ID NO: 4513 - DNA, 365 bp, Bos taurus
  Clone ID: 20-LIB188-004-Q1-E1-E7
gccaatcagttttgtgtatgaaattctaaagaaggttaccaaagaagagcaggtatgataacttctgcccagaagcagcaggccgcagtgccctggggagcccttcaaaggtcaattacaattgtgtgcaaacagaagatcccggtgaagccacagcctgctaggcttgtgtgcagctccagtatgttcaccaaagcagtcactgggttttctgcaccctgcctccatcctgtatcataggtgggaaattaaacagctttgtgagcctcaaaaaaaaacagcatagacaaacaacatgattcacaggcttgaaatagtgtaacgcattaagtctggagacgtttcagccagaattaacggttaat

SEQ ID NO: 4514 - DNA, 379 bp, Bos taurus
  Clone ID: 20-LIB188-005-Q1-E1-E7
catgctaccgaccgccatgcgggcgggatacaaatcaatgttttgaaaataatgatctcaaactttctaagttaaattttaaaaaacctgatcgtttgccatatggggtgggtttgctcttagaaccgcatgctgtagaaatgctcacagtgcatataggactcagtccttagatgttccttttcttttaagaaataacctctttgaagttgtgacgtcgcgctctgtccacttcgcgtcgcccctctgtgcacacgcatcgcattggaggccgtgcagttagcggctctacacgctcgcctggcgagatgtcactgttttctttctttaaaaaaacaagtcctgttccaaaatcgttgttggatggggtggggggtgt

SEQ ID NO: 4515 - DNA, 432 bp, Bos taurus
  unsure (383),(386)...(387): unsure at all n locations; Clone ID: 20-LIB188-007-Q1-E1-E7
gccatgggcccgggatacagacacattcagatgcagctgcagaaagaggggtccagtgatctgaagtcacatagcgggatgcagcattactcagtccccacaaggcagctgtctcaaactttaggaaccgtgagagacacatcagagccctggtcactgtcaccacttgcagcctgggtgtaggtctgtcttttttcacctgagcgcttcttcctccagatcacagctccagccaccacagctactacgaggagaaccaggccaacaatgatgcccatggtgaggaaggaggtctgaggaggttcccatctcagggtgaggggctcctgaagcccttcgtgctgcacatggcacgtgtatctctgctcctctccagaaggcancanncaggccgcccaattccggaaatttccgttcccctgaaggcctggt

SEQ ID NO: 4516 - DNA, 412 bp, Bos taurus
  Clone ID: 20-LIB188-008-Q1-E1-E11
acaattatatcttacttttaattaattgcgcttaaggccttaattaaatctggaggttcccttcttagagcagctcatactgacggaggtgcatgcgctggatgatgtcacggcagtcgttgaacacacggcggatgttctcggtgtccacagcgcaggtgaagtgagggtagcagtagtggcgcccgtctccactagcagtgctgattctcagaaattcatctcgaatgaagtacaataaagacgcctctgcagcttaagcctctcatagaccctagacccctgacagaaagctaggcaaagcatctctcctgcaaattaagcgggtttccagtattcccatgtagacgagccttcagagacaggcactcaagcatatctttagaatataccaccttggccctggctgcgt

SEQ ID NO: 4517 - DNA, 416 bp, Bos taurus
  Clone ID: 20-LIB188-008-Q1-E1-E7
acgacaatgaatttggctacagcaacagggtggtggacctcatggtccacatggcctccaaggagtaaggtccctggacccccagccccagcaggagcacgagaggaagagttcctcagctgctggggagtcctgccccatctccgccacactgagaatctcctgacttccacatgtttccatctctaaggccctgaggaaggggaggggcttagggagccctgccttgtgtactggcccgactggccttcgtgcccctgctgctgctgtgtaacgtccagccccgccgcaacctgccggtggtctttgagcacgactcctggttcatcatcttcatggctgccttcgccttctccaatggctaccttgcaagtctctgcatgtgctttgggcccaagaaagtgaagccggctgag

SEQ ID NO: 4518 - DNA, 390 bp, Bos taurus
  Clone ID: 20-LIB188-009-Q1-E1-E7
gggcgcgggatacacgcgcagcaaccactgggctgtcggacacttaatgggaaaaaagagtgtggcagagtccccacaacttcatgaggaggagagcctgaaggagcagctgagggagtatgcccagtgggaagaagcgacaaggaacttgctaagcctcctacatgcaaagggggcccgaggccaccagatgcctccatgggagcccctgagcattcaccagcctgcctgggattccgaggacgtcagcatcttcaaagacacaggtcctcagcatgaaggaaggaacccccagcctaactgacaatgacgatggccgcctccctcaaataagcagaacacaatccttaagaaactgcgttctatgggcatcagttctactggatcatc

SEQ ID NO: 4519 - DNA, 407 bp, Bos taurus
  unsure (394): unsure at all n locations; Clone ID: 20-LIB188-010-Q1-E1-E7
actgggggtctcccttgaggtcgtaagtggccccatccagacccatgatcagatattctttcccaggttccaactgaaggcggcaagaggctcggaccaggaagtttctggtctgatcagcggtggccctggcatccttggtgaaatgcaggacttgggtgatacgggtctcaaagaggcggaaagcagccctgctgtcttctcggagaaccttaacctggaagccgtagtccactcggggagagtagcaggcgaatttcatccggtaaccctccaagtcctgctgcccacgctccagggcccggcgctgtcgagggcacttcccctcagcacactggcagacatccgcagagcacaacgtggacaagagtttgctcttacgtggtgccccatnaaacacagaacac

SEQ ID NO: 4520 - DNA, 410 bp, Bos taurus
  Clone ID: 20-LIB188-011-Q1-E1-E7
accaaaacattccctatggccccaccaacataagcccccagggctgggtctgtgcccacaaagggttggcctgttttgactgaactaacctgtggatttagtccaacaaatgcatttgcctgatttcagggctgaatttctgcttgacccaagtgtcaggcagagctgggtggcctcagctgactggcggtggacaggctgcaggatgggccgaaagtgcattactagagatgaccgcggttgaggacacctatttcccaggacccatggctatgtgaccacactggccgtgagtgactggttgttgaggatgactactctttagcaaacctattgtgtgtctgtagaggctgtttgatgattaaaacaatggctacttcctgttttggcaaatacttgactgcattttc

SEQ ID NO: 4521 - DNA, 393 bp, Bos taurus
  Clone ID: 20-LIB188-012-Q1-E1-E11
actgccggctgcagaagtgcttcgaagtgggcatgtccaaggagtctgtgagaaatgaccggaacaagaaaaagaaggaggtgcccaagcccgagtgctccgagagctacacgttgacgccggaggtgggagagctcatcgagaaggtgcgcaaagcgcatcaggagaccttccctgctctctgccaactgggcaaatacactacgaacaacagctcagaacagcgtgtctctctggacattgacctctgggacaagttcagtgaactctccaccaagtgcatcattaagactgtggagttcgccaagcaactgcccggcttcaccaccctcaccattgcggaccagatcaccctcctcaaggctgcctgcctggatatcctgatcctgccga

SEQ ID NO: 4522 - DNA, 420 bp, Bos taurus
  Clone ID: 20-LIB188-012-Q1-E1-E7
acatgaagtatatgctgtggatgttctcgtcagctcaggagagggcaaggccaaggatgcaggacagagaaccaccatttacaagagagacccctctaagcagtatggcctgaaaatgaaaacttcccgtgccttcttcagtgaggtcgaaaggcgttttgatgccatgcccttttctttaagagcatttgaagatgagaagaaggcccgcatgggtgtggtggagtgcgccaaacatgaactgctacaaccatttaatgttctctatgagaaggagggtgaatttgttgcccagtttaaatttacagttctgcttatgcccaatggccccatgcggataaccagtggtccttttgagcctgacctttacaagtctgagatggaggtccaggatgcagagctcaaggcactcctccagag

SEQ ID NO: 4523 - DNA, 405 bp, Bos taurus
  Clone ID: 20-LIB188-013-Q1-E1-E7
acctgcagacgctgaccaccattgctgctgagaaaaactcgaccatcatcttccctctgcccatagacatgctgcaggctatcatggggccaaaacagtgagccgcgggggcggcagagctgagacgggcccaaaccagccctcagccgggaggtggaggggtgcacgctgggcctttctccctccctcccctgttccataggttgagtgtgatattcttacaacgcatagtgatcctagcaacagatgaaggttgttagcttgtaaatacgacatgagagagaggtgattaatgtaagataaccttactctaaaatatttaaaagttcatgtgtttagattgctccatgataggtgaagtccatcttctttcagatttcatcgagtcgttctgcaccctccatc

SEQ ID NO: 4524 - DNA, 431 bp, Bos taurus
  Clone ID: 20-LIB188-014-Q1-E1-E11
cggatactccactaggtcagtgacggtgtaggcgttgggtggcgctgtctcgcccacccgatgatgggacacgggccccacccggaggaccccctcctccttgaacacccagcgggaaagggccacagccagctcgtagttgccagtctgggaatacctctgggagccgggtgcagccttctgcactgctgagttgaagaaggcgtcgctgaagaagtcaagggagccgctgaagatgacccgggcgttgttccgggcctgcagccccgcgatgagaagggtgttcttccccacggcgtgcgggtaccccgaggtagtgcatgcacttagtgagctgctccgcgccggtgctctcctgtcctggctagatcctcagttctgttgagatgaccgcctttatagtttgggttttaattacagtttccagtttc

SEQ ID NO: 4525 - DNA, 355 bp, Bos taurus
  Clone ID: 20-LIB188-015-Q1-E1-E7
accaggctctcgggcctggccttctcttctttctcccacctttgtgatggtcagtgaggcatgggaagcccaccctccagctctgctagtgtcctccaggcccagctcccagtcagtggtggccatgatgcggtacgctggtcacagcgccccccaagttgggctcctgtcggtgtcttaggtgagggttccccatcgccccccgccccccacaggggctcaaaagtatcaagggaatggcggccacctgattccccatggagacaggcaaacggattttgactggcggccccagcggtcactggagccctgttcactgtgtcgtccaactatcaaggatgtgcaatgtcacatg

SEQ ID NO: 4526 - DNA, 423 bp, Bos taurus
  unsure (409): unsure at all n locations; Clone ID: 20-LIB188-017-Q1-E1-E7
actctaccgtccccagaggagcttctcctggatacagtagaactggcttctctcctctcctggggatttctaagaacccatgagcgagaccggggcaatcttaaagctttatccaaatgccctcaacagaggatgatgaattataccacgatgcacccacccatggaatactctgcagctgcttccaataaaaagaatgggctccttctctgtgggacacatgatttccaaagagcgcggtccagagcagtgtgtatggtgggctaccatttgtgtctgatgtgtgtgtgctcagttgtgcctgactccttgcgatcccatggactgtagcctgctagacttctctgtccccgggattttccaggcaagaatattggagtgggttgctacttccttctccaggagatcntcccggcccggggg

SEQ ID NO: 4527 - DNA, 427 bp, Bos taurus
  Clone ID: 20-LIB188-018-Q1-E1-E11
actgtccctgtgggtcgtgtggagactggtgttctcaaacctggcatggtggtcacctttgctccagtcaatgtaacaactgaagtgaagtctgtagaaatgcaccatgaagcattgagtgaagcccttcctggggacaatgtgggctttaatgtcaaaaacgtgtctgtcaaagatgtccgtcgtggcattgtggctggtgacagcaaaattgttcaaccaatggaacctgctggtttaacagctcaggtgataattttgacccatcaaggcaaaatcagtgctggatatgcacctgtgctggattgtcacacagctcacattgcttgcaagtttgctgacctgaaggagaagattgatcgtcgttctgggaaaaagctggaagatggccctaaattcttgaaatctggtgacgctgccatcgttg

SEQ ID NO: 4528 - DNA, 414 bp, Bos taurus
  Clone ID: 20-LIB188-018-Q1-E1-E7
acttgagcaggacagagtcactcgagcccctccagggagctgtggctaaattcttctctgccagctgtgttccctgcattgatagacaagcataccccaacctgtgtcaactgtgcaagggggagggggagaaccagtgtgcctgctcctcccgggaaccatacttcggttattctggtgccttcaagtgtctgcaggacggggctggagacgtggcttttgttaaagagacgacagtgtttgagaacttgccagagaaggctgacagggaccagtatgagcttctctgcctgaacaacagtcgggcgccagtggatgcgttcaaggagtgccacctggcccaggtcccttctcatgctgtcgtggcccgaagtgtggatggcaaggaagacttgatctggaagcttctcagca

SEQ ID NO: 4529 - DNA, 264 bp, Bos taurus
  Clone ID: 20-LIB188-019-Q1-E1-E7
actcagtgtaaggctgacggtttacttgctgcaagccgtgtatcgtgcagttacattctcccagttgatcacattccaaatggccttcaggtaatcgggcctgacatttttatactgaaggtaataagcatgctcccacacgtcaatccccagcagggggataagacctgttgttccttgcaggggatcctggttagaacaagcagcaatctgtaagcgtccctgctccttattgaagccgagccaaccccaaccggagccttg

SEQ ID NO: 4530 - DNA, 412 bp, Bos taurus
  unsure (309): unsure at all n locations; Clone ID: 20-LIB188-020-Q1-E1-E7
gccatgggggcgggatactctttcaacccccttctgatgcctatgtcagaagctttctctatctcctttatactttaataaaactttattacacaaaagctctgagcgatcaagcctcgtctctggccccggattgaattcttctcctccgggggccaagaatcccggtgtcttcacgtgattcaacaacctttcagtattacggtgatggtggcctcatagaaggagtttggaagtttaccttcctctgcaactttctggaagaattggagtaggataggtgttagctcttcccaaaatttttggaanaattcacctgtgaacccttctggacctgggcttttgtttgctgaaagttttgagtacagtttcaaattctgtgcatgtgatgggtctgttaagattttctatt

SEQ ID NO: 4531 - DNA, 279 bp, Bos taurus
  Clone ID: 20-LIB188-022-Q1-E1-E11
acttgtcctccgactcagtctgccggtctctctgccactccacgtctacatcttctgggtagaagccgatgaccatgcaggtgacgctgaccgtgcttttgctgagctcttccttgggtgggtccaggacatacacctgcggctcccgggccggccctttgctcctggagatgatcctcacgatggaggccgagaggcctttgatgttgaccttgcacttgaactcctttcctccagtccagtcctggtgctggatgggcagggcgctgaccacgcggt

SEQ ID NO: 4532 - DNA, 414 bp, Bos taurus
  Clone ID: 20-LIB188-022-Q1-E1-E7
accaaaagaccttcctcctgatactgcgctgctggacctgcaaaacaacaaaataactgagatcaaagatggagactttaagaacctgaagaaccttcatacactgattctcatcaacaacaaaattagcaaaatcagccctggggcatttgctcctttggtgaaattggaacgactttatctttccaagaatcaactgaaggaattgccagagaaaatgcccaaaactcttcaggagctgcgtgtccatgagaacgagatcaccaaagtgcgaaagtctgtgttcaatggattgaaccagatgatcgtcgtagaacttggcaccaacccgctgaagagttcaggcattgaaaatggagcctttcagggaatgaagaagctctcctacatccgcattgctgacacaaatataac

SEQ ID NO: 4533 - DNA, 447 bp, Bos taurus
  Clone ID: 20-LIB188-023-Q1-E1-E11
catgaacccgtacgccatggcggcgggatacaactcaggcccatagggaaggccctggtaaggtggacctaggtctgggccatactcgtaggggagtccaaagccacctggccgtgggggtccatatgcaggggggcgcagcacgttgcacagggcttcaaagtcatctgagtcctgtgcggggcagagggcacagtccatgccccaggcctcgccatagaggcagcagcattctgtgtaggtggcctggcgatccagccgagggcgactgcacacgaggtcagcccccacttcctgccagcacactcccagattgtcatcaaggctctggctctcgttagagacgcagcggcgccgcgagccgtccagcacaagtgggggccccacgtgcaattataagaaccgataatgttgacgcaacgggcttcctcaaaaacttggtcctcc

SEQ ID NO: 4534 - DNA, 458 bp, Bos taurus
  Clone ID: 20-LIB188-023-Q1-E1-E7
acgctcccttagcccacccctcgtccgcaggccctctgtgagatccttctctggccttctccagaatggggctggccctctgctgggggtatgagatcatgtctccgccttcccatgaaagacagtctttgcagaatcaaatgcaattttcaatctgagggtttcctttgaggaatttggtttctgtgattgcctctgaagcctatttaggccatggaggctctacaaattctgaggtttctgaaatcagaagtgaaaaaaatagatgaataaacgagactctgaccactaacccctcctcctgaagccacagcacagtttcgggttccaatcagaaatgttggcaagatgaaattcccatgcataaatgggatccacagatgggcctggtggtatttgtaactttttgcaaggcaaatatatatattttcatgcacaaattttttaaacgttccctt

SEQ ID NO: 4535 - DNA, 450 bp, Bos taurus
  Clone ID: 20-LIB188-025-Q1-E1-E7
cgccatgggcgcgggatacatgaacacgcaccccggccgcctgctgctctgcctcacgcttggcctctggctcaccaccgcctgggtgctgtcggtagccgagaggcaggccgtgaatgccactgggcacctttcagacacactgtggctgatccccatcacattcctgaccattggctatggtgatgtggtgccaggcaccatgtggggcaagattgtctgcctctgcactggcgtcatgggggtctgctgcacagccctgctggtggccgtggtggcccggaagctggagtttaataaggcagagaagcatgtgcacaacttcatgatggatattcagtatgccaaagagatgagggagtcagctgcccgagtgctgcaggagtcctggatgttgtacttggcctccatcttcggcaccgagaaagacaaagtcaactgatggacaaa

SEQ ID NO: 4536 - DNA, 410 bp, Bos taurus
  Clone ID: 20-LIB188-026-Q1-E1-E7
acctgaagggaagattgctattgacagaggctatgacatcgcccagatatcccgacacctggacttcatcagccttttgacctatgactttcacggagcctggcgccagacagtcggacaccacagccccctgtttcgaggccaggaagatgcaagttctgacagattcagtaacgctgactacgctgtgagctacatgctgaggctgggggctccagccaataagctggtgatgggtatccccacttttgggaggagctacactctggcctcttccaagacagatgtgggagcccccatctcagggccaggaattccaggccagttcaccaaggagaaagggatccttgcctattatgagatctgtgacttcctccacggaaccaccacccacagattccgttgacagc

SEQ ID NO: 4537 - DNA, 389 bp, Bos taurus
  Clone ID: 20-LIB188-027-Q1-E1-E11
acagatgtcaaggatcatggaacctttggcgtcctgaggcttcttgactgtttcgggggctgggcgtatggaaacccgcagcatcgctaaggcaggagacttcctcgaaaaccactacagagagttgcgaagaccatatactgtggccattgctgcctatgccctggctttgttgggcaagctggagggtgaccgcctcaccaaatttctgaacacagccaaagaaaagaaccgctgggaggaacccaaccagaagctctacaatgtggaggccacgtcctacgccctcttggctctgctggcacgcaaagactacgacactacgcctcctgtcgtgcgctggctcaacgagcagagatactatggaggtggttatggctccacgcagg

SEQ ID NO: 4538 - DNA, 430 bp, Bos taurus
  unsure (401): unsure at all n locations; Clone ID: 20-LIB188-027-Q1-E1-E7
acagacacattcagatgcagctgcagaaagaggggtccagtgatctgaagtcacatagcgggatgcagcattactcagtccccacaaggcagctgtctcaaactttaggaaccgtgagagacacatcagagccctggtcactgtcaccacttgcagcctgggtgtaggtctgtcttttttcacctgagcgcttcttcctccagatcacagctccagccaccacagctactacgaggagaaccaggccaacaatgatgcccatggtgaggaaggaggtctgaggaggttcccatctcagggtgaggggctcctgaagcccttcgtgctgcacatggcacgtgtatctctgctcctctccagaagggcacaccagggccgcccacttctggaagtttccgtcncctgaaggcctggtctccacaagctccat

SEQ ID NO: 4539 - DNA, 385 bp, Bos taurus
  unsure (379): unsure at all n locations; Clone ID: 20-LIB188-028-Q1-E1-E7
atgctcctaaccgccatgggcccgggatacgacctcaatgcaaaaaaagcaaaaggcattcctgagttttatgactatgacgtggccctcgtcaggctcaaggaaaagctcaagtatgagaccaccatcaggcccatttgtctcccctgcactgagggatcgattcaagccttgaggcttccaaggtcaaccacatgccagcaacagatgcaagagctactccctgcaaaggacattgaagctctgtttgtgtctgagtctaagaagaccctgactcggaaggcagtctacatcaagaatggggacaagaaagccagctgtgagagagatgctctacgcgccccaggttatgaaaaagtcaaggacgtctctgaggtantcaccc

SEQ ID NO: 4540 - DNA, 261 bp, Bos taurus
  Clone ID: 20-LIB2809-001-Q1-E1-E11
accgctggcacatcaactttaccacgttcttcattgattgcatggctgccatcggtctggcttatgaccggaagaaagtatccaaggctgccatcttggccaggataaaaagaactggagaggaaagctacaagagtggctgaatttgtggtcccttgggttccttttccaaaagccatctgggcagaggtttaatgttctgtttattaactactgaataatgctaccaggatgctaaagatgacgttaacccattacagt

SEQ ID NO: 4541 - DNA, 413 bp, Bos taurus
  Clone ID: 20-LIB2809-001-Q1-E1-E7
actttgtatattttcagtctgagaagctgttccagataacccaggtaacgctcagagggcacatcttccttttgaatgtgcttctgctcaacactattgggaacaatttcctcacttgacgaaatgctttcagcttccatttgcttaatatcttccatggcttgatcctcagttgattcactcccaatatccttgctcagttcattgaccttctcctttccaaacacttctggaaaaggtgccacaaaaaacctgagtaaattttcattgaggacttcttgagggagtccttggtgcttgataggatgtttaagcctggcaagagcaacagccacaagacaggtaaggatgagaagtttcatggttgtcaagatcttttgtacaagctttttttttttttttttttttttttt

SEQ ID NO: 4542 - DNA, 344 bp, Bos taurus
  Clone ID: 20-LIB2809-003-Q1-E1-E7
atactaaaaaagaaacagttttagaatcaactacatttgtgtgtccatcacagtaataagtccctaactgttatatttagaatgtaaatctttaataaactccaaaatctcattttgcaatctattgatcgtgaactgcaaacggaggctggggcccccgtggtgtgatctgcaggctgcgtgtcacctcagtgcccatcgatcacagatcacggaggggacaaggcactcgtcttcgacgaggtcgcgtcaggataggtcaggcccgaccacacggtggcgccgtcaactctcgtcccacaggcgggtgcctacgacgaaccggtcccgctcccttcacttgc

SEQ ID NO: 4543 - DNA, 472 bp, Bos taurus
  Clone ID: 20-LIB2809-004-Q1-E1-E11
acctggtgagaatgtggaaagcctttcaagcagtgaggaatctattacacgcatcaataagaaaattgagaagtttcagagtgaggaacagcagcaaacagaggatgaactccaggataaaatccacccctttgcccagacacagtctctagtctatcccttccctgggcccatccctaacagcctcccacaaaacatccctcctcttactcaaacccctgtggtggtgccgcctttccttcagcctgaagtaatgggagtctccaaagtgaaggaggctatggctcctaagcacaaagaaatgcccttccctaaatatccagttgagccctttactgaaggccagagcctgactctcactgatgttgaaaatctgcaccttcctctgcctctgctccagtcttggatgcaccagcctcaccagcctcttcctccaactgtcatgtttcctcctcagtccgtgctgtccctt

SEQ ID NO: 4544 - DNA, 387 bp, Bos taurus
  unsure (378): unsure at all n locations; Clone ID: 20-LIB2809-004-Q1-E1-E7
acagcagaaaagcctgaatgggcatatctctctggggatagggcactgctttctggggaacaggcaggactttggactgagaaagggacagcacggactgaggaggaaacatgacagttggaggaagaggctggtgaggctggtgcatccaagactggagcacaggcagaggaaggtgcagattttcaacatcagtgagagtcaggctctggctttcagtaaagggctcaactggatatttagggaagggcatttctttgtgcttaggagccatagcctccttcactttggagactcccattacttcaggctgaaggaaaggcggcaccaccacaggggtttgagtaagaggagggatgttttgtgcgaggctgttanggatgggcc

SEQ ID NO: 4545 - DNA, 381 bp, Bos taurus
  Clone ID: 20-LIB2809-006-Q1-E1-E7
acttgtaattgtgtaggtgggggttgtctactgagtaaggaatactgtttttaaggttctaaagctaaattcaaatgatgcattaatgacccaaaaactcagatctgatggtgtctgaatttctaacagtccttgctttgtgggtatgctgacaacttatctggatgccttacatcttttctaaacagtgttgcctctgaacgtgctctgctccctccctgctccctctttggagcccctttgcaccccagagcctgcagaagtggctggtataaaagggggcctggctagagaatgatcagtgtagctgtttgcaggattcctttctgggcttcattttggaaactttgcttaaggctatttttcttaattgcccacatt

SEQ ID NO: 4546 - DNA, 376 bp, Bos taurus
  Clone ID: 20-LIB2809-007-Q1-E1-E7
cataccaagtccccgacagcttctgcatatctcgttggtgatagggcactgctttctgtggatcatgcaagtcttttgactgatattgggacagcaccgactgatgatgaagcatgacagtttgaggagtatgctggtcatgctggtgcatccatgactggaacagatgcttcggaaggtgcatattttcaatatcagtgttactcaagctcttgttttcagtgaatggctcatctggacatttagggaagggcatttctttgtgctctagaagccatagactcattcactttgcagactcccattacttcaagcttaacgacatgtttcaccctcagatgggtttgattactatgacctatgttctgtgggatgc

SEQ ID NO: 4547 - DNA, 384 bp, Bos taurus
  Clone ID: 20-LIB2809-010-Q1-E1-E11
acctcacatagggaataacctttgtcttaggttgaatccatggcttcatagctttctgatgctgataaacagtcttgagatactggggcaaggcgaatttctggtaacgctggctgatttttttcagaaaatttaggcgattcttttcttcttcagtcagtttagttttcttagtgaatacttctgttgattctatgtcaacggtcttctttgaattttcctcactggtggagagctgctctctgttcagagtgggagtaatgggaacagcatttctcttaacctgatcccatgggttcaaaacaattggaccttgatacagatactggagatactgggggaacttctgataaaactgattgatttcattcagtgctttctggt

SEQ ID NO: 4548 - DNA, 428 bp, Bos taurus
  Clone ID: 20-LIB2809-012-Q1-E1-E11
actttgcccttccctgtccatcccagacctactcagctcccaccgtgcctaagaaaacgggatggcttgaggactgggtgccagagacccctgggcgggggcgaggaagaggagggagggagaggtgactgggagggagacactgcctgcccccaggtcagctacaatcaggagggcgggcggaggaggcagcttttttcttatgtggttattttttttccgaatggcctaaaaaggtattttatccaccggaagactgacacaatctcagtcaaggcacacaattatttgatatgatggcacttacaggagaactgattcagaggcttttaaaacattttccatacagaaatttaatgaacactttaactccctttgactcagtggcctttatacgagcatgatactactggaatttaggtaacaag

SEQ ID NO: 4549 - DNA, 427 bp, Bos taurus
  Clone ID: 20-LIB2809-013-Q1-E1-E7
acagttgctacacataaaagacataccatgtgtgcacagggtatgtggactatccagcattttacctttaaaaagtatgtaaactatgaaaatacaacatcagcactgcagtcgacatgttgtattctgccccattcatcttggagttagatttatccaaagtgattcatgagtccgttatgtgttttttctcctttctgccatttaaattagtagtagacaaaaatcaaataaaagtatgagataatggaatattaggaccagctcatttttctcaggtttatgttctcttatttggaccaagaatctcacgtggggtaaaattcccctctgaattttagacttttgggactttagctgagacagttgggtttgctttcaactagatgaaagcagaagggtattgaggtcctcccgctgttcccca

SEQ ID NO: 4550 - DNA, 434 bp, Bos taurus
  Clone ID: 20-LIB2809-014-Q1-E1-E7
acaacagaaaggcctgaatgggcatatctctctggggatagggcactgctttctggggaacaggcaggactttggactgagaaagggacagcacggactgaggaggaaacatgacagttggaggaagaggctggtgaggctggtgcatccaagactggagcagaggcagaggaaggtgcagattttcaacatcagtgagagtcaggctctggctttcagtaaagggctcaactggatatttagggaagggcatttctttgtgcttaggagccatagcctccttcactttggagactcccattacttcaggctgaaggaaaggcggcaccaccacaggggtttgagtaagaggagggatgttttgtgggaggctgttagggatgggcccagggaacggatagactagagactgtgtctgggcaaaggggtggatt

SEQ ID NO: 4551 - DNA, 219 bp, Bos taurus
  Clone ID: 20-LIB2809-015-Q1-E1-E11
atcgctgatagggctgcctgggcatctctcactggggatagggcactgccttctgggtacaaggcatgacttttctctgatgtcaggacaacaccgtctcatgatcagggacttcggtttgtcgagtatgctggtgaggctggtgcgtccttcactggaccatacgctccggaaggttcccattttcaatcctgtgtgtgcagtcaggctctggctttc

SEQ ID NO: 4552 - DNA, 304 bp, Bos taurus
  Clone ID: 20-LIB2809-016-Q1-E1-E7
ccgcgacggccccgggatacagtggagaactcacaggggagaagagtttccatccatgtcagagtccaggaatcctgatgaacaaggtttgtttactgtgagagcttcagtgatcatcagggacagctctatgaagaatgtgtcctgctgcatccggaacctccttcttggccaggagaaagatgtagaggtttccattccagcctccttcttctcaaggctgacgctctggatggtggctgtggcggtcatcttggtggtcgtaggacttcgcacatatgggtccataccctcctacctgtag

SEQ ID NO: 4553 - DNA, 137 bp, Bos taurus
  Clone ID: 20-LIB2809-017-Q1-E1-E7
gataaatggtaaagatgtgggaagccttttaagcagtgaagaatctagtatacgcatcactgataaaattgagaagtttcagagtgaggaacatcaacaaacaaaggatgaactccaggattaaatccaaccctttg

SEQ ID NO: 4554 - DNA, 369 bp, Bos taurus
  Clone ID: 20-LIB2809-018-Q1-E1-E11
acagtaaactttaaaattttctttttaaattgaaagccaacaactctgcctttatgatgctaagctcatgttcttatttcttctcctatcttctttctcttctgttcccattatccttccctttgttttgtccctgtcaccttcctttctccttctcctcattgccccccacgcaagcaggtggtcagtcattggtgggtttccagcttccaaagcctatacaacccctgctgtagtctcaaactagtggtctttgccccggctgaccctttccttgcagctgtctcagctttaaggttgatggctcaagctagagatattactgaatcttctgggaagggcctttatcatctttagcctagacttttg

SEQ ID NO: 4555 - DNA, 425 bp, Bos taurus
  Clone ID: 20-LIB2809-018-Q1-E1-E7
acagcagaaaggcctgaatgggcatatctctctggggatagggcactgctttctggggaacaggcaggactttggactgagaaagggacagcacggactgaggaggaaacatgacagttggaggaagaggctggtgaggctggtgcatccaagactggagcagaggcagaggaaggtgcagattttcaacatcagtgagagtcaggctctggctttcagtaaagggctcaactggatatttagggaagggcatttctttgtgcttaggagccatagcctccttcactttggagactcccattacttcaggctgaaggaaaggcggcaccaccacaggggtttgagtaagacgagggatgttttgtgggaggctgttagggatgggcccagggaagggatagactagagactgtgtctgggcaaag

SEQ ID NO: 4556 - DNA, 347 bp, Bos taurus
  Clone ID: 20-LIB2809-019-Q1-E1-E7
actgacagaggcggccgtgggagaggagttgggcaccgtgttagtgctcgtctcgctgatatagatcttagagatggggatcttcagagctttgctggccacctgcaccatcttggtgtgaaggccttggcccatctctgtgcccccgtggctcaccagcacggagccatctgtgtatacgtggatcagggctcctgcctgatttagaaaaggaactgtgaagcttattccaaatttggtaggaattatgcacaatcctctctttttccaacaattctccttgttgaacttgtcgacctcactcttccgagcgtaatactcagagctcttcaggcactcatcccagc

SEQ ID NO: 4557 - DNA, 409 bp, Bos taurus
  Clone ID: 20-LIB2809-020-Q1-E1-E7
acttgtacttgtgtaggtgggggttgtctactgagtaaggaatactgtttttaaggttctaaagctaaattcaaatgatgcattaatgacccaaaaactcagatctgatggtgtctgaatttctaacagtccttgctttgtgggtatgctgacaacttatctggatgccttacatcttttctaaacagtgttgcctctgaacgtgctctgctccctccccgctccctctttggagcccctttgcaccccagagcctgcagaagtggctggtataaaagggggcctggctagagaatgatcagtgtagctgtttgcaggattcctttctgggcttcattttggaaactttgcttagggctatgtttcttaagtgcccacatttgatggagggtagaaggaattttgaatg

SEQ ID NO: 4558 - DNA, 364 bp, Bos taurus
  Clone ID: 20-LIB2809-021-Q1-E1-E11
acagcaaaaaggcctgaatgggcatatctctctggggatagggcactgctttctggggaacaggcaggactttggactgagaaagggacagcacggactgaggaggaaacatgacagttggaggaagaggctggtgaggctggtgcatccaagactggagcagaggcagaggaaggtgcagattttcaacatcagtgagagtcaggctctggctttcagtaaagggctcaactggatatttagggaagggcatttctttgtgcttaggagccatagcctccttcactttggagactcccattacttcaggctgaaggaaaggcggcaccaccacaggggtttgagtaagaggagggatgttttg

SEQ ID NO: 4559 - DNA, 293 bp, Bos taurus
  Clone ID: 20-LIB2809-021-Q1-E1-E7
tactgtgaacggaggcagtcttggcatcgtgttcctacatttttcagccagaatttcagcatcagatgcctcagttgcgtatcaccctgtagcatcggcagccattagattacaatgagtggataagctttccttgaactatagtgccgaagagttccgagtgatgagatcagaaggtcaatacttcagcaccgtgtttttagatccatttcttttgccagcctgtctgtgtctgcccagaggtgagaccttaagctgactcagatcggttctcttaaagtccctttatggga

SEQ ID NO: 4560 - DNA, 382 bp, Bos taurus
  unsure (218): unsure at all n locations; Clone ID: 20-LIB2809-023-Q1-E1-E7
gcatgataccgaaccgccatcggcccgggataccgaatattcatcagctgagggaagtccatctcctccttcacctcccagtcactgcggacttccaccgaagagtctcggggcttctgtgatttttggtcccatttctgcctcacttcaaattgtttctggaattttttctgcagtcgtatgcgttctctctccttctgcttggcactcttaagcanggtctgcaggttgaactgcaacatgttccgtcgatctttgtctctgcggagatttcgctgtggaatcgcattcgattccgctggtaagcggtcttctgtgtgcgcgctgtgtccaccagctggaaactagtttcatcctcctcgtggaagtaagcatactgact

SEQ ID NO: 4561 - DNA, 380 bp, Bos taurus
  Clone ID: 20-LIB2809-025-Q1-E1-E7
gatcctgatggaggcggacgtgggagaggagttgggcaccgtgttagtgctcgtctcgctgatatagatcttagagatggggatcttcagagctttgctggccacctgcaccatcttggtgtgaaggccttggcccatctctgtgcccccgtggctcaccagcacggagccatctgtgtatacgtggatcagggctcctgcctgatttagaaaaggaactgtgaagcttattccaaatttggtaggaattatgcacaatcctctctttttccaacaattctccttgttgaacttgtcgacctcactcttccgagcgtaatactcagagctcttcatgcactcatcccagcacctgggcacgctgaacccctcaagcttct

SEQ ID NO: 4562 - DNA, 374 bp, Bos taurus
  Clone ID: 20-LIB2809-026-Q1-E1-E11
acagcaaaaaggcctgaatgggcatatctctctggggatagggcactgctttctggggaacaggcaggactttggactgagaaagggacagcacggactgaggaggaaacatgacagttggaggaagaggctggtgaggctggtgcatccaagactggagcagaggcagaggaaggtgcagattttcaacatcagtgagagtcaagctctggctttcagtaaagggctcaactggatatttagggaacggcatttctttgtgcttaagagccatagcctccttcactttggagactcccattacttcaagctgaaggaaaggcggcaccaccacaggggtttgagtaagaggagggatgttttgtgggaggctg

SEQ ID NO: 4563 - DNA, 390 bp, Bos taurus
  Clone ID: 20-LIB2809-027-Q1-E1-E7
gcccgggataaatccaaggaccaaattttcaatggtattaccagaagtggaagcagcattagcagagattcctggagtcaggagtgttgtgttgtttggagtagaaactcatgtgtgcatccagcagacagctctggagctcgttggccgaggtatcgaggttcatattgtcgcggatgccacatcatcgagaagcatgatggacaggatgtttgcccttgagcgtcttgctcgaaccgggatcattgtgactacaagtgaggctgttctgctacagctggtggctgataaagaccatccaaaattcaaggaaattcagaatctaattaaggcgagtgccccagagtcgggtctgctttccaaagtataagacatgtgaaagactggtat

SEQ ID NO: 4564 - DNA, 438 bp, Bos taurus
  Clone ID: 20-LIB2809-028-Q1-E1-E11
gccatgggcccgggatacagtccctgtgggtcgtgtggagactggtgttctcaaacctggcatggtggtcacctttgctccagtcaatgtaacaactgaagtgaagtctgtagaaatgcaccatgaagcattgagtgaagcccttcctggggacaatgtgggctttaatgtcaaaaacgtgtctgtcaaagatgtccgtcgtggcaatgtggctggtgacagcaaaaatgatccacccatggaagctgctggcttcacagctcaggtgattattttgaaccatccaggccaaatcagtgctggatatgcacctgtgctggattgtcacacagctcacattgcttgcaagtttgctgagctgaaggagaagattgatcgtcgttctgggaaaaagctggaagatggccctaaattcttgaaatctggtgacgctgccat

SEQ ID NO: 4565 - DNA, 327 bp, Bos taurus
  Clone ID: 20-LIB2809-028-Q1-E1-E7
tcgtgtctctctccatcggagaccgcgtccctgctgacatccgtctcacagaggtcacagacctcctggtggacgagtcgagtttcacgggagacgccgagcgaagcagtaagaccgataccccactgccaggcgagggtgacctcacgagcctgacgcacagcgtcttcatggggaccctggtgcagtgcgggaagggccagggcgtcgtgatcggaacaggagaaaagtcgcagtttggagaggtgttcaagatgcatcaggctgaagagacagctaaaactcctctacagaaaagcatggacaagctggggaagcaactgacac

SEQ ID NO: 4566 - DNA, 343 bp, Bos taurus
  Clone ID: 20-LIB2809-029-Q1-E1-E11
accaagtacccgccatcttcaggatatccatgcaggaaattctctaattcaagcgttccgtgaacatcattgcttcagtctttagtctggagtctacagtcagctgtgttcgatgtggtcattctggaaagttgagaaggaacgttagagcctgggaatgcgttgaattcctcgaagaaagggaacagattctgggacccgtgatactcagctgagagtatgagctggggaaggaacagcacattcgaagagaatctggcactgagaggcaagacggtgtgggcgccgacaattggtgatgagtaatatgctgccaggataggtgtccactacagatacatca

SEQ ID NO: 4567 - DNA, 398 bp, Bos taurus
  Clone ID: 20-LIB2809-031-Q1-E1-E11
acagcagaaaggcctgaatgggcatatctctctggggatagggcactgctttctggggaacaggcaggactttggactgagaaagggacagcacggactgaggaggaaacatgacagttggaggaagaggctggtgaggctggtgcatccaagactggagcagaggcagaggaaggtgcagattttcaacatcagtgagagtcaggctctggctttcagtaagggctcaactggatatttagggaagggcatttctttgtgcttaggagccatagcctccttcactttggagactcccattacttcaggctgaaggaaaggcggcaccaccacaggggtttgagtaagacgagggatgttttgtgggaggctgttagggatgggcccacggaagggat

SEQ ID NO: 4568 - DNA, 384 bp, Bos taurus
  Clone ID: 20-LIB2809-031-Q1-E1-E7
acagcagaaaggcctgaatgggcatatctctctggggatagggcactgctttctggggaacaggcaggactttggactgagaaagggacagcacggactgaggaggaaacatgacagttggaggaagaggctggtgaggctggtgcatccaagactggagcagaggcagaggaaggtgcagattttcaacatcagtgagagtcaggctctggctttcagtaaagaaacttctcatccttacctgtcttgtggctgttgctcttgccaggcctaaacatcctatcaagcaccaaggactccctcaagaagtcctcaatgaaaatttactcaggttttttgtggcaccttttccagaagtgtttggaaaggagaacgtcaatgaac

SEQ ID NO: 4569 - DNA, 320 bp, Bos taurus
  Clone ID: 20-LIB2809-032-Q1-E1-E7
gccatgggcccgggataaagcagaaaggcctgaatgggcatatctctctggggatagggcactgctttctggggaacaggcaggactttggactgagaaagggacagcacggactgaggaggaaacatgacagttggacgaagatgctggtgaggctggtgcatccaagactggagcagaggcacaggaatgtgcagattttcaacatcagtgagagtcaggctctggctttcagtaaagggctcaactggatatttatggaacggcatttctttgtgcttacgagccatagcctccttcactttggagactcccattac

SEQ ID NO: 4570 - DNA, 319 bp, Bos taurus
  Clone ID: 20-LIB3057-001-Q1-K1-E11
gttctagatcgcgagcggccgtcctttttttttttttttttttttttttttttttgtttttttttttttttttttttttttttaaagaccatttactaaaagtttattggaccaaaggctgaatccagaaatccaagccataaggagtacatgaggttgggtgcctgcaagccactttcaaaaagggtccaaacaaacttaataacctgaaaagagtcacctattttttaaatcaaaccctggcctgaacaaggacatttttaactaccgttgtgtggggcaggggctactaacaggagcacatttgctattggttacg

SEQ ID NO: 4571 - DNA, 278 bp, Bos taurus
  Clone ID: 20-LIB3057-002-Q1-K1-E7
ggatcaacaaaggcagcctgagcgcgcaccgctcttttgcgactccaaaatgcagactgcacagtacctgcagcaacgtcgaaaatttgcagctgcctttttggcatttattttcatcttggcagctgttgacaccgttgaagcaggaatgaatgagataccagatgagatgttcttgaagtattattgctgaggtttggttatccctgagtgtctgttaaactgcttgattttttacctttgttgtgtttgtggcttatattgttatgctcttattt

SEQ ID NO: 4572 - DNA, 361 bp, Bos taurus
  Clone ID: 20-LIB3057-003-Q1-K1-E11
ggctgctgcagctgtggtgggcggagcttccaccgtggcggctgtgcccatggtgcttagcgcggtgggcttcaccagtgcaggaatcactgcctcctccttggcggccaagatgatgtcaatatctgccatcgccaatgggggtggagttgccgccggcagcctggtggccacgctccagtccgtgggagcaagcggactctgcctgtcatccaaactcttggtgggcatcgctgggtccaccctcgtgtccaaatttttgggcctgtaacagtcccctgtcgctccctcggcagagaagaggaccaggtggggtcctgcccgacagcctgatgcagtgagggacccagtcctggggtga

SEQ ID NO: 4573 - DNA, 413 bp, Bos taurus
  Clone ID: 20-LIB3057-005-Q1-K1-E11
gtttcttgaaatcatcaccaccatggacagcaaaggttcgtcgcagaaagggtcccggctgctcctgctgctggtggtgtcaaatctactcttgtgccagggtgtggtctccacccccgtctgtcctaatgggcctggcaactgccaggtatcccttcgagacctgtttgaccgggcagtcatggtgtcccactacatccatgacctctcctcggaaatgttcaacgaatttgataaacggtatgcccagggcaaagggttcattaccatggccctcaacagctgccatacctcctcccttcctacccctgaagataaagaacaagcccaacagacccaccatgaagtccttatgagcttgattcttgggttgctgcgctcctggaatgaccctctgtatcacctagtcaccg

SEQ ID NO: 4574 - DNA, 452 bp, Bos taurus
  Clone ID: 20-LIB3057-005-Q1-K1-E7
cagcgatccttcggcaccctgcaatccagcgagacgcgctgcgcaccgacggagcggacatggggagagcgatcgtagccaggctcggactggggctgctgcttctggcgctgctcttacctacgcagacttactcaaatcaaacaactgttgtaacaccaagtaactcctcccagactacctcacctgcccctcatccagccaatgccaccaccaaggcaagcgatggtactctgcagtcaacagccagtctctttgtgatctcggtctcccttctacatctctactgttaagagactcaggcgaagaaacatctgtactccaacatcttctaaatccagttcaaatggcatctatacatcctgtgtgacaaaggaaaaaaaaagagagaaaaagaagtcttcattgaataaatctgctaattccacaccttatttaattgacagaaatta

SEQ ID NO: 4575 - DNA, 416 bp, Bos taurus
  Clone ID: 20-LIB3057-007-Q1-K1-E11
agcattcacaggagcgcggcctacttttctccccaccatggcgtgtgctcgtccacggaggtcagtgtactccgaaaagggcgagtcctctggcaaaaatgtcactttgcctgctgtgttcaaggctcccattcgacccgatattgacaactttgttcacaccaacttgcgcataaacaacagacagccctatgctgtcagtgaattagcaggtcatcaaaccagtgctgagtcttggggtaccggcagagctgtggctcgaattcccagagttcgaggtggcgggactcaccgttccggtcagggcgcttttggaaacatgtgtcgtgggggccgcatgtttgcgccaactaagacctgtcgacgtttgcaccgcagagtgaatacgactcataagcgatacgccatctgctctg

SEQ ID NO: 4576 - DNA, 379 bp, Bos taurus
  Clone ID: 20-LIB3057-007-Q1-K1-E7
gtttagcaccaggcgccccacgaacgtgcggtgcgtgacgggcgagggggcggccgcctttccggccgcgccccgtgtcccgggacgaagggctctccgcaccggaccccggtcccgacgcgcggcgggggcgcgccgcgccgcgccccgggggacgcgggcgacggcccgccggcggggacggcgggggaccggctatccgaggccaaccgaggctcccgcggcgctgccgtatcgttccgcctgggcgggattctgacttagaggcgttcagtcataatcccacagatggtagcttcgccccattggctcctcagccaagcacatacaccaaatgtctgaacctgcggttcctctcgtactgagcaggattaccatg

SEQ ID NO: 4577 - DNA, 232 bp, Bos taurus
  Clone ID: 20-LIB3057-008-Q1-K1-E11
cggacgcgtgggctagatcgcgagcggtcgcccttttttttttttttttttttttggggtttttttattttttttttatattttttaattatataatttatattttaattttaaaattatgtatataaaatattaaaaaaataaaaagaaaaaataaaaaaaaaaaattagcataaaaacaaaataaaaatgaaagcagtaaaagaataaacttatcattaaatcaaagatg

SEQ ID NO: 4578 - DNA, 353 bp, Bos taurus
  Clone ID: 20-LIB3057-009-Q1-K1-E11
tcccgcctcgacccactcgtccgctcgagcggccgccctttttttattctcaatatccaatagtgcatcggttttggcggagtcttttaaaaaggaggtgagcctaccaaataatgtaagatagccgatgccaaacttgctgtgaataataagggcgccgccaccaagactagtaaacccgtctgaaaggggaaggcagcgaaagatcctaactagccaaagaggccttcaagtgctttcttcgttttcatggaggaattcaggaaggtgttcaacaaggaacattcctacaacaaatcagtgtctgctgtggtcaaagcttgtggagcaaaatggaatacgatttctgatgc

SEQ ID NO: 4579 - DNA, 429 bp, Bos taurus
  Clone ID: 20-LIB3057-009-Q1-K1-E7
cggacgcgtgggtactgtgcaagggctttgatctgaaggactacaggcaggctcggggtgtgacttgaaccaagcgctggggagagtccactgcaaggaaggcgccatggacgatcagggctgcccccggtgtaagaccaccaagtaccggaacccttcgttgaagctgatggtgaatgtgtgcggacacactctctgtgaaagttgtgtggatttactctttgtgagaggagctggaaactgtcctgagtgtggcactccacttcgaaagagcaacttcagggtacagctctttgaagatcctactgttgacaaggaagttgagattcggaaaaaagtgctaaagatatacaataaaagggaagaagactttcctagtctaagagaatataatgatttcctggaagaagtggaagaaattgttttcaa

SEQ ID NO: 4580 - DNA, 421 bp, Bos taurus
  Clone ID: 20-LIB3057-011-Q1-K1-E11
aagtcccacccactaataaaaattgtaaacaatgcattcatcgaccttccaggcccatcgaacatttcattatgatgaaatttcggttccctcctgggaatctgcctaatcctacaaatcctcacaggcctattcctagcaatacactacacatccgacacaacaacagcattctcctctgttacccatatctgccgagacgtgaactacggctgaatcatccgatacatacacgcaaacggagcttcaatgttttttatctgcttatatatgcacgtaagacgaggcttatattacgggtcttacacttttctagaaacatgaaatattggagtaatccttctgctcacagtaatagccacagcatttataggatacgtcctaccatgaggacaaatatcattctgaggagcaacagtca

SEQ ID NO: 4581 - DNA, 379 bp, Bos taurus
  Clone ID: 20-LIB3057-013-Q1-K1-E11
tcccggtcgcgccagcgtccggccgggttgagaggagcgtggcctgcttctctccccgccatggcgtgtgctgggccagtgatatcagtgtggtccgaaaaggctgagtcctctggcaaaaatgtcactttgcctgctgagttcaaggctcccattcgacccgatattgttaactttgatcacaccaacttgcgcaaaaacaacagacagccctatgctgtcagtgaattagcaggtcatcaaaccagtgctgagtcttggggtaccggcagagctgtggctcgaattcccagggttcgaggtggcggtactcaccgttccggtcagggcgcttttggaaacatgtgtcgtgagggccgcatgtttgcgccaactaaga

SEQ ID NO: 4582 - DNA, 393 bp, Bos taurus
  Clone ID: 20-LIB3057-013-Q1-K1-E7
ctcgagcggccgccctttttttttttttttttttttttttttttttttttttttttttgttttttttttttttttttttttttttttttttttttttttttttttttttttttttttttttttttttttttttttttttttttttttttttttttttttttttttttttttttttttttttttttatttttatttattttataatttttttatttttaaaaaattatttataaaattttttttttttttttaaatatatattttttaaaaaattatttaaaatatattattatattttatgattatattattttattattataaatttaaatatttttataaatttttttttttatattaattttttaaattaattttttatttttttaattt

SEQ ID NO: 4583 - DNA, 367 bp, Bos taurus
  unsure (268): unsure at all n locations; Clone ID: 20-LIB3057-015-Q1-K1-E7
cgccgagctggcccgagagttaccggtccggagcaatacggagatccaggactgtatgcggcagctcaagggccgagtggcccgggaggccattcagaggatacatccaggtggcccaaagggtccaaggcgttgggaaacacagaccccagctcccatcgaggtgtggatggatctggctgagaagataacaggcccactggaggaggcgcttactgtggctttctcacaggtgctcgccatcgctgccacggagcccgtcagcctnctgcactcaatgcccttcaagcccacgcaagcttgtggaaagccactgcttctcagagcccctggaggaccggaggacctgggttctgaggctttcagc

SEQ ID NO: 4584 - DNA, 416 bp, Bos taurus
  Clone ID: 20-LIB3057-016-Q1-K1-E11
tttttttttttttttttttttttttttttttttttttttttttattttttttggttttggtatttttttttatttttttttaaaaaaaaaaaaatttaaatgaaaaatagaaaaataataaaaaaataaatttttataaaaaaaaaaaataaaattaaaaaaaaaaaaaaaaaaaaaaaaaaaaagattttaaaaattaaaatataaaaattaaaaaattcataaaaaaaaaaatatttaaaaaaaaaaatttttaaatttttaaagaaaaatttttaaaaattttaaaattattaaattatagaagatataaaaaaagatttattaaaaataaatatttaaaaataatatgggtaattttataaattaaaaaattttataataaaaatttttaattaaaaaaaaaaatttttttt

SEQ ID NO: 4585 - DNA, 407 bp, Bos taurus
  Clone ID: 20-LIB3057-016-Q1-K1-E7
gcgagcggccgcccttttttttttttttttttcagagtacaacagcatttaatggtcagaaacagttgtacagtattacagtcagccacagaagctgtgctggaagacaggacccaatcctcccccacaccaggcaaagcagtattgggcaggagctggcatgtggctgggccacgtcctcatccctgtggcctaaagggagaccatcatttaatatccccagcttccactactcttcagaggagggggtgtaagccccacatgcaagaagcccttgcccccagtgtcaaatgggatgcaagagttacaattaaggggaaactctgtgtaaggtattaatggagttcaaaggggtagggattacccctgtcctccatcacccaaaggtgctcactttcccagtttct

SEQ ID NO: 4586 - DNA, 290 bp, Bos taurus
  Clone ID: 20-LIB3057-018-Q1-K1-E7
ccacgcgtccgtctagatcgcgagcccccgcacctttcacttttttagatcggcatttagtctttccgttgcgtgagtttctctccgtagaagagatatataatgaaaacgagttgttacaacttaaattggatcttcttagtgataccaacatcctagactatgctatggatgtgtacaaaaacctttattcttatgatattcctcatgcttttagagaaaaaagaacaactgttgttgcacaacttaaacaacctcaagcataaacttaaccaatttttaagattttt

SEQ ID NO: 4587 - DNA, 456 bp, Bos taurus
  Clone ID: 20-LIB3057-019-Q1-K1-E11
ccggcacgagatgtctaaaaaggcttcagcgtaacaacgggagatgaagaaccggcctttgaagggactgcatcgccagctgctgttgccgagtcacggattccaccatcatgaatagtcttgctgaggaaaacacgcggaatgctatttttactaaccggactatttttctagacatagcagagtccctaaaccagctctctgctgccttatgagtactgaatattttcttctcttcagaaagagtagcacaaatatgcaatcaatttaataattctcaatgaaggttttatctgcagtaatatgtgtattatctgtaagaatatacttagtgaaaaactgaagagaacaaaatttgtaaccattagcatttaagtactcagaaggcatatccttaatgaccatgacccggctgacagctggccgcataccggaaagcacattgccagtgtttga

SEQ ID NO: 4588 - DNA, 365 bp, Bos taurus
  unsure (349): unsure at all n locations; Clone ID: 20-LIB3057-019-Q1-K1-E7
cggacgcgtggggtcccacccactaataaaaattgtaaacaatgcattcatcgaccttgcagccccatcaaacatttcatcatgatgaaatttcggttccctcctgggaatctgcctaatcctacaaatcctcacaggcctattcctagcaatacactacacatccgacacaacaacagcattctcctctgttacccatatctgccgagacgtgaactacggctgaatcatccgatacatacacgcaaacggagcttcaatgttttttatctgcttatatatgcacgtaggacgaggcttatattacgggtcttacacttttctagaaacatgaaatattggagtaatnccttctggctcacagt

SEQ ID NO: 4589 - DNA, 422 bp, Bos taurus
  Clone ID: 20-LIB3057-020-Q1-K1-E11
cgcgagcggccgcccttttttttttttttttcgtgaaacttgaaaggttttatttcttaacgacagacagctttaagagtcgggatacctggcgccatcactgcctgggcgaatcctcacccaggctgcgaggcggtaggagggcagaagagaggccttcagggtcaactttccgcggagagaggcccctgcccgctgcgccctcactggcccttcttgtgggcgttcttgatgatggcgtttttgaacagcgtgacaaggggcgtttggctcttctcggaggtcatgaacccgccgtagcgcttgtccttgggcgggctgccccagcggaagtgttccatcttatagggccccgagtccttcttctcggccgcctcagcctccgcctccgccaccaggccatactccagctcagcccgggc

SEQ ID NO: 4590 - DNA, 431 bp, Bos taurus
  unsure (371): unsure at all n locations; Clone ID: 20-LIB3057-020-Q1-K1-E7
acagtatctcttgtaggactactaatataccgatcccacctaatatcctcccttctatgcttagagggaataatgctatccgtattcgttatagcagccctaacaatcctcaactcacattttacattagctagcataatacctattatcctactagtcttcgcagcctgtgaagcagccctaggtctatctctactagtaatagtatcaaatacatatggtactgattatgtacaaaacctcaacttactccaatgctaaaatacattattccaacaattatacttatacccctaacctggttatcaaaaaataatataatttgggttaactccacagcacacagccttctaattagctttacaagcctnctcctcataaaccagtttggcgacaacagccttaatttttcactactatttttctccgac

SEQ ID NO: 4591 - DNA, 410 bp, Bos taurus
  Clone ID: 20-LIB3057-023-Q1-K1-E11
gttggtccagcataggcgctctgcccagtgtggcgcgttccttcattttctgccagcggtcgacctttttccctcttaacgaataggtggaacttctgggaccagggattgaaccagcatcctctgcagtggaagtgcagagtcttaaccactggaccagcaggaacttccagggtctactgtcaatcaagaaccagatgggcactgatagaaagatgaatatgacaaggttcctacactaaagagcctgcaaactagcagaggagattaacaatccacaggtacatcaggagaaacgctgggctggaagaagcacaagctggaatcaagattgccgggagaaatatcaataacctcagatatgtagatgacaccacccttatggcagaaagtgaagaggaactaaaaag

SEQ ID NO: 4592 - DNA, 397 bp, Bos taurus
  Clone ID: 20-LIB3057-025-Q1-K1-E11
cggacgcgtgggatcccggagggacagagatactccatccaggatgtaggtgcgctcagactctttgaaggtgtcagcagccagctgatgcaggtgctgagcccggagcacagcgttggcaaacaggccggacaaggacatggctgggaaggcgcccaccacctgagtccagggcaggcagagcagggcgaaagccaggacacccaggttgccttctgcttctctgaaaccatcccggcccccacgggcaagaatgaggcccagcagaaatcagacttggagctgcttcgcatctcactgctcctcatccagtcgtggcttgggcccctgcagttcctcagcagagtcttcaccaacagcttggtgtttggcacctcggaccgtgtctatgagaagc

SEQ ID NO: 4593 - DNA, 414 bp, Bos taurus
  Clone ID: 20-LIB3058-001-Q1-K1-E11
tgacattgaagacaccatggaagagtctggctggaagctggtgcacggcgacgtcttcaggcccccgcagtaccccatgatcctcagctccctgctgggctcgggcattcagctcttctgtatgatcctcattgtcatctttgtggccatgctcgggatgctgtcaccctctagccggggagcactcatgaccacggcctgcttcctcttcatgttcatgggggtatttggtggattttcagctggccgtctgtaccgcactctgaagggccatcggtggaagaaaggggccttctgcacagcgacactgtatcctggcgtggtttttggcatctgcttcgtattgaattgcttcatctggggaaagcactcgtcaggagcggtgccctttcccactatggtggccctgctctg

SEQ ID NO: 4594 - DNA, 243 bp, Bos taurus
  unsure (21): unsure at all n locations; Clone ID: 20-LIB3058-001-Q1-K1-E7
ctatgatgcaacaactcactntgagacgacctgtgatgacattaaggacatctataagaggatgatgggatccgagtttgactttgaggaaatgaagcgcatgataaatgacatctatggggaagagtaacagcagtacatgttatcatctaattaggacaaacttaaaatttggcaaatgatgcatattgtatgaaatcagtattgtaaggcctgcttttgtaatcaaaattgagagattgc

SEQ ID NO: 4595 - DNA, 439 bp, Bos taurus
  unsure (403): unsure at all n locations; Clone ID: 20-LIB3058-002-Q1-K1-E7
cggacgcgtgggcggacgcgtggggccgccgcctcctccttcgccggcgtcgacgatgggtgactatggccacggcggggggcagatgcggggcaacccggactcccgccccaggggccagggccagcgccctaacgtccagcagctcaagctcatggggcagatccacccgacggggctcacgcccaacctgcttaagctcttcgaaccgcgtccaccgctcgagtacaagcccccgctggagaagcgcaaattgccggcctacaccgggatggcacaatttgtgtcgcactttgctgagcccgaggatccagagtatgctccgccagtacccaagtgtgagaccagggcagagaagaaggctagaattcgcaataataagctcgagcaaggcgcaactaanggtggctgaagagcttcagaagtatgacccacaaag

SEQ ID NO: 4596 - DNA, 356 bp, Bos taurus
  Clone ID: 20-LIB3058-003-Q1-K1-E11
ctcctagtaatatcgacctcgaaccctcttactgctactctctatggtcctggttcttgaccgatacccggtcatgcttccactttctgatgtattttatcaccttcttgttatggtcctgtcttaatgatccccactatatatcgtatgctacgttgacgacacgcaattcctgcggttagacatacactgatcgcatcctatggcagaaccgcaagctccatgtatggagcatgacgggccggactattgagatgagcatactcgaatagtcaaagacactgaacaaacttttcttgccaaccctaacaccgcagtccgttactacaaccatattgattccggttcttacaata

SEQ ID NO: 4597 - DNA, 313 bp, Bos taurus
  Clone ID: 20-LIB3058-004-Q1-K1-E7
tctgatataacgagcgttctcacatatgttatcttttttaagctgattttaggcgcatagcgcaggtttgataaaattttgtgaaaaaatttggttcatggtatgggatttgacatcctgtatcattttaaaatctacgtgattacgtaaggctgttagcctctttagagagttgtagagttgtaaaaagggagacaccgattttccacaaaagtccttacaatttacatacccaacctcaaccccctcaataaaaagagaagaaaaagccctatcacttaacaccaatcagtacctttttcattaaaccttt

SEQ ID NO: 4598 - DNA, 430 bp, Bos taurus
  Clone ID: 20-LIB3058-005-Q1-K1-E7
ggggggccggcggctcccaggcctggcctccctcacaggcctcctgtcctaggtcgagtgcttacgcagggcgctgggccgagcccgggtgaagtcctgcacctgcctcgaggcgtgagtgggatgggggtggcggctggcaccctgagcccagacccttccacctgcgccctggtgccgacagcccccctgcagcaatcctggcaccaccccaccctcaggtacctgaagcttagcagccagcatgggccacatgaccccatcatgtctgggtgcctgcccagcaacccctgagtcacagactacgatgcctactgggccatgaacgcacgcaggtgagcatgcggaccaggtgtgcacgagtgcccaccccgttcgtcacactctggacccacccggtctttaccagggcgggtcgtgcccaccaggc

SEQ ID NO: 4599 - DNA, 392 bp, Bos taurus
  Clone ID: 20-LIB3058-007-Q1-K1-E7
tgccgctgcgccgcgctgcgcgggccgagggctcctgcagctgctcgcgcggagccggagccggagccggaggcggaggagaacggcgaggaccgagactgacacttctgctccccgccgcccgccacttacgcggggccccccaacctagcctcagagctgcgcgttaaaaaaaaaaaaaaaaaaaagcggcccttagccccctcctaccctttcctgcttctgcgagaacatcccccctccctccagctccgccagccgaggcgccccttccttggaagccgagcggcttcgctcgcatttcgccgccgtcgcctctcgcaatattgcaatataggggaaaagcataccatggtgaatccgggcagcagctcccagccggccccagtgac

SEQ ID NO: 4600 - DNA, 407 bp, Bos taurus
  Clone ID: 20-LIB3058-008-Q1-K1-E7
agaacatgttgcactcgggaaggttggaggctccctggggcagtgcctctttgtctagcggctcctcacactcggggctgctgctctcagatcttccttccgaggcgtacaaggtgggatcccagaacagggctggccggtgcgggccacaaagcctcccagaattgctgcatgtgaactgacagctgaccacagactctaccttagacacgtgcaccttcaatcgcccagcttctccagagagactgaccatgtgctagcaccccaggaagtcttggattcaaaatgtgatgactcaccagggtcatgccactggtagtgcccacggggtgctgtgtgtgtcccccgctatggccctggggtaggctgggcaggcccctgctactgcggtactgatctggttcctc

SEQ ID NO: 4601 - DNA, 419 bp, Bos taurus
  Clone ID: 20-LIB3058-011-Q1-K1-E11
ctcaaattatggtacatcccttataaattttccatggttctttgttccttttagtagagagttcatatgttaagcaaccattcagtaccctagggtctgatttcaatctgccttttgaccttctctcccactgttttcccacattcaaagtcatttagattcagtcctagttctgttacttagttaatcttaggccaccccatgggctgtggcctgccagactcctctgtccatggaattctccaggcaagaatactggagtgggtggccattcccttctccagttgatcttcctgactcagtgattgaacccaggtctcctgcattgcatgcagattcttaactgtctgagccaccaaggaagtccgttttcgcaaaccatctttaaattagaatattacttcatagtgttgtaacct

SEQ ID NO: 4602 - DNA, 427 bp, Bos taurus
  Clone ID: 20-LIB3058-011-Q1-K1-E7
gaaaatctattaatactaacagagggtgtgaagaaaagggaaacctacactgttgggaaggtaaattggtatagccactttggagaactgtatggaggttcctcaaaacctaaaaatagaggtaccgtatcattcagtaatcccaatcctgggcatgtatctagagagaatcataattcaaaaaaatagatgcagcccagtgttcattgcagcattatttacaatagccaggacatagacgcaacctaaatctcaatcgacagaggaatggataaaagaagatgtggtacgtatcgacaatggaatgttagctgtaaaaaaaagaatgaaatgacctgatttgcagcaacaggaatggacctagagattgttacacaaagtgaaagtagacacagactaatacatggtatcgcatataaatggaatc

SEQ ID NO: 4603 - DNA, 403 bp, Bos taurus
  unsure (311): unsure at all n locations; Clone ID: 20-LIB3058-012-Q1-K1-E11
gtaatatacgagcgggaccccaacccctacatttcaactctaccccatgcctatcagtcctgctttgtgggtgattgatctccacaggctgctccacctttaaacttctgtaaactacactacaccactgagtcccagccctctcccggtgcggggagaaggggagcaggactagtcctgagcctggctggcctggcagggtgacggggccctggtggagcgcagtattccctaaagctgtgggtggtttcggtgatacgtctgtctgacaatcgtcctccccttgtacatgcctggtctgtgtttagctnttcctagtattgtgaggtttcaaataggggttccatgtaaatattctttctgctactgaaatgccagcccccggattgtgcatcctccccac

SEQ ID NO: 4604 - DNA, 152 bp, Bos taurus
  Clone ID: 20-LIB3058-013-Q1-K1-E7
gcaagtttgacatcagcctgtgatggcgaagcattccccgcgttgtgtcttgtacctcaatatctgatgctttaatggctactttggtttgtgtctgtaagttaaggccttggatgtggtttgtccttgaataaaagttttctgctgataag

SEQ ID NO: 4605 - DNA, 430 bp, Bos taurus
  Clone ID: 20-LIB3058-016-Q1-K1-E11
gcggcatgaacgtgtccggaagaagtaccacatcttggtggaaggcgatggcatcccaccgcccattaagagcttcaaggaaatgaaatttcctgcagccatcctgagaggcctgaagaagaagggcatccaccacccaacacccattcagatccagggaatccccaccatgtgagtgtgaagctgacagtcctggggaggagcagccaccggatgagaagcagtctttgtttttcatggagcctgaccctccagcctctcttctctcaccagtctctctggccgtgacatgataggcatagcctttactggctcaagcaagacactggtgttcactttgcccgtcatcatgttctgcctcgaacaagagaaaaggttacctttctctaagcgtgaagggccctatggactcattatctgcccttcgcgg

SEQ ID NO: 4606 - DNA, 351 bp, Bos taurus
  Clone ID: 20-LIB3058-016-Q1-K1-E7
agaccgctcccactatgcaaaatgtaacccttatatggattctccacaatcaatagggttccaagcaacaatcagtgctccacacatgcatgcatatgcactagaacttctatttgatcagttgaatgaaggagctaaggctcttgatgtaggatctggaaatggaatccttactgcatgttttgcacgtatggttggacctattgggaaagtcataggaattgaccacattaaagagctgagagatgactcagtaaataatgtcagaaaggatgatccaatgcttttgtcttcaaggagggtgcaactggttgtgggggatggacgaatgggatatgccgcagaagcccc

SEQ ID NO: 4607 - DNA, 414 bp, Bos taurus
  Clone ID: 20-LIB3058-017-Q1-K1-E7
gtccccgagttcacccccaagtctggagtcaagatccatgtctctgaccaggagctgcagagcgccaatgcctctgaggatgacagccgtctggaagagctcaaggctacactgcccagtcccgaaaagctccctgggttcaagatgtaccctatcgactttgagaaggatgatgactccaacttccatatggatttcatcgtggccgcattcaacctacgggcagagaactatgacattccccctgcagaccggcacaagagcatgctgattgcaggaaagatcatcccaaccattgtcacaaccacagcagccgtagttggcctagtgtgtttagagctgtacaaagtggttcaagggcaccgacagcgcaactgctacaagaatggtttccttaacatggccctgcccttt

SEQ ID NO: 4608 - DNA, 383 bp, Bos taurus
  Clone ID: 20-LIB3058-018-Q1-K1-E7
ggtgaacgtcaccacctcccagggtgccacactggacgcctgcagcttcggggtcaccggcctgaagctccaaggggccacgtgcgccaacaacaagctgtcgctgtccagcgccatctccaccgtcctccccctgacgcagctgcgctgggtcaagcagacaaacgcagagaagaaggctagcgtggtgaccctgcctgtctacctgaacttcacccgcgccgacctcatcttcacggtcgacttcgagatcgccaccaaggaggacccgcggagcttctacgagcgcggcgtggccgtgctctgcacttagtgagcttgcttccagtccccttgtgtgacagtgattgatacttaacgttattcattatgaaagcctacgg

SEQ ID NO: 4609 - DNA, 321 bp, Bos taurus
  Clone ID: 20-LIB3058-020-Q1-K1-E11
gtgaataaatgcaaaatgaataaatataggcagtctacaaagtttattaagatttttactatcttattgtcatagtgtctggcttaggttttttaatatcctctaaggcatgaaatggcaacccaccccagtgttcttgcctggagaatcccagggacagcggagcctggtgggctgctgtccatggggttgcacagtcggacacgactgaagtgacttagcaccagaaggcatgaaatattaagcatctatctttttatttttcttttcttcttgaagatgaatttcaacttttttgccatcccaccacaaacataaaat

SEQ ID NO: 4610 - DNA, 443 bp, Bos taurus
  Clone ID: 20-LIB3058-021-Q1-K1-E7
gatcgcgagcggccgccctttttttttttttttaaggtttgcagctattttatttacaagtatacatttaacacaatgaaataaacactgatatattgaagcctagttaatagtagtgtaacaatatgtatcatttgaatgattacattattttaaacaacaaactacactgaaaaattaatgcgataaaattcttggtcataatattattaagaaatacaatatataaattgaaaatatgattgctcaaaatttgaaaatggaagtgaactcatttggacagagtcagagttgaacataatctgaaaggagggggtgagggagaatctctgacccaaatgaaatctttcaggttaacagaagagaaacgaagcagtttatcgtaaaggatgacgggcagttggctttcctaggcgggactgggccccagcattcctggttct

SEQ ID NO: 4611 - DNA, 312 bp, Bos taurus
  Clone ID: 20-LIB3058-022-Q1-K1-E7
atcgcgagcggccgtcctttttttttttttttttttttttttttttttcaaatgtaatcgtatggttttttattaaagcagaaaaagatccagtatacatgatatcagtctatcatatggctaggttttgaactacattttaatactctaaggtctcagttttcctcctgcattcgtgtccctaacaaatattcgatatctgaaatattacattagtaatgtttttaaaatggctatagggatcgcttcatctgtgatgcctaacacttatctcaagtctgtcattaatttcctaatgctctcaagatgttc

SEQ ID NO: 4612 - DNA, 411 bp, Bos taurus
  Clone ID: 20-LIB3058-024-Q1-K1-E11
gcatgttcagctcagacaccgtcctcatcggtcacagtctggagagcgacctgctggccttgaaggtcatccacagcaccgtggtggacacgtctgtgttattcccacatcgcctgggcctcccctacaagcgctccctgcggaatctcatggccgactacctcagacagatcatccaggacaatgtggacgggcacagctccagcgaggatgccagtgcctgcatgcacctggtgatctggaagatccgagaagacgccaagaccaagcggtgaccgccgcctgcctgcccgctcgcctctcccacagccccggcccgtcctctaccccaggcctcttccaaaacagtgcaataaatctcgagagctaaccctgtccacgtcgccgagacacagaaaaccgagagaacca

SEQ ID NO: 4613 - DNA, 370 bp, Bos taurus
  Clone ID: 20-LIB3058-024-Q1-K1-E7
atgactagcagcctctataatccaacgctatctgcgcccgcagcccgaagccgtatggacctgtaccgcatacagctcgaccttcgagccgtctactcgcttctcagctacgtggccggcttatacatcttcctcgtctgtacggaggtctacagacagatctgcaccgtggacatggtggggctcgcaagtgtgctgtcgctgtgaggtgctggtaactcacgtgatgtacatccatgattactggaagacgtacatcaaggggctgctcggttacttcatcgtggacgttctgatctcggacgtctccgtcgacacgtcctgaaccttattactgctggccatcactggacaccagatcctcacagac

SEQ ID NO: 4614 - DNA, 359 bp, Bos taurus
  Clone ID: 20-LIB3058-028-Q1-K1-E11
gtctgtctgtctgttttgtgtctgtttcgggtatggcgttgacttttggtcggcaggatccctgctgccttggtgatcccgggctgacagccagagagcacagcggctcagctcctggagagcgagggttgaagaaagcagagggcagccgcccgcgcccgctagctcctattaggtcggttcctgcagcggtgcccggtggccttggcgaaagccctgtccggcagagatcatgtattgcctccagtggctgctgcccgtccttcttatccccaagcccctcaaccccgccctgtggttcagccactccatgttcatgggcttctacctgctcagcttccttctggagcggaagcctt

SEQ ID NO: 4615 - DNA, 282 bp, Bos taurus
  Clone ID: 20-LIB3058-028-Q1-K1-E7
aaaaattagagatgtcaagggacaatttcatgcaaggatggctacaataaaagacagaacctgtaaggacctaacaaaggcagaagagattaagaagaggtggcaagaatacacagaggaactacaaggaaggtcttaatgacctggataaccacgatggtgtggtcacccacgatggtgtggtcactcacctagagctgaacatactggatcatgaagtcaggcgggccttaggaagcattacaacaaacagagctaatggaggcaatgaaattccaaatt

SEQ ID NO: 4616 - DNA, 359 bp, Bos taurus
  Clone ID: 20-LIB3058-029-Q1-K1-E7
cggacgcgtgggctgtcttccttcctcaccttccgtttcccctccaacccagcgcttggtggtctcctctgggccgttgaactccaccagctctcaggagccccggcggccccggatcgtgaacgcctggacagaggaggtggaggagctgccctggagcagcacgtcttccgcagggtcacctggcgtcttgcgcctgccccgagctgcgacgctgctgcctggcttgggccgaagccatcatctggaatcctccgtggtccaggacctcgaacccgccaccccagcaccctctggccccacaatcggcaaactaggatggaagtggcctagctggggggcccttcaatgggccaagg

SEQ ID NO: 4617 - DNA, 431 bp, Bos taurus
  Clone ID: 20-LIB3058-032-Q1-K1-E11
tgataatatacatatttcaatgctattttctcaaatcatcccaccctcatcttctccgacagagtccaaaagtctgttctttatatctgtatctcttttgctgtctcacatacagggttatcattaccatctttctaaattccatatatatttgtgttagtatactgtattggtgtttttctttctgacttactttactctgtataatatgcttcagttttcattcaccttatttgatcttatttaaattcactttttttattagctttgttatttttttattgtttttattttctattttttccttattcttttattttttatttttattttcttttgcttgttttccttttttatttttatattttcttttttttttttatttgttttttatttttcttttctttattattttttctattttttttttt

SEQ ID NO: 4618 - DNA, 185 bp, Bos taurus
  Clone ID: 20-LIB3058-032-Q1-K1-E7
ttcaagggcaaaatggttgaattgatgttttttgatgtatgccatttagtgaaagttgtaattcttaaaattcctaccactttggcttcatatttttggacttaacatatttgtgaatagcaagcacattcaaggaaaatttataccttcagtaacccatattttattaacttgtatagttccat

SEQ ID NO: 4619 - DNA, 434 bp, Bos taurus
  Clone ID: 20-LIB3058-035-Q1-K1-E7
ttcttttttctttctttcttttttttttttaactcgaacttttcataactcaggggatgccctgaaaaattatctgcaggtggactatttcatggacaaattttttttctccccttccaaattcagtttctcatcactaaagatcaaagataaaccagcctcaattccagctgctgtgtttgggtggagatttcttcccatgctcaccattgctcccctaccatcccacactctgggggggttgtacttcacgctcttctccagagattacaaaaatgtagcttcttcaagggaggtgggaaggaaggaggaagggaggacccaacctataagagcagtacactgttagtcacttacatcactttactccaaaagtgcttcagtggggttatcctggtgaatctagtggaaatatgtcttagttacattgagat

SEQ ID NO: 4620 - DNA, 406 bp, Bos taurus
  Clone ID: 20-LIB3058-037-Q1-K1-E7
ggggaagtggaacagaagaattgcgttccttccgcaagttcacctaccgcggcgtagacctcgaccagctactggacatgtcctatgagcaactgatgcagctatacagcgcgcgccagcgacggcggctgaaccgcggcctgcggaggaagcagcactcgctgctgaagcggctgcgcaaggccaagaaagatgcgccgcccatggagaagcccgaggtggtgaagacgcacctgcgcgacatgatcattctacccgagatggtgggcagcatggttggcgtctacaacggcaagaccttcaaccaggtggaaatcaagcctgagatgatcggccactacctaggcgagttctccatcacttacaagcccgtgaagcatggccggcccggtatcggggccaccca

SEQ ID NO: 4621 - DNA, 428 bp, Bos taurus
  Clone ID: 20-LIB3058-038-Q1-K1-E11
ccaggatgtgcctttgagtttgagtcgctttccatatgcagggaagggccgagttacctacgctgtcacacgcgggcccagaatagacctcaaatggtgccgagatgttgaagaagtctgagactctaggacctgtgagattttcccctgtgcagtgctaactgggctaaagacacaatcagatctgtcagtcgagcccccgtaactcgtgaactaaccagtctccagccagccaccagctaagaggtgctgagctgatggaggctggccctaagggctgctgtttcccatctaagtatctttgggggcaccagagttcactgggcttctcactttggagaaaaaaaaatttttttcttgtccagttatttagaaagataccatgcaatatacggaggtctcctaaactctagaaagtccatgggaag

SEQ ID NO: 4622 - DNA, 432 bp, Bos taurus
  Clone ID: 20-LIB3058-039-Q1-K1-E11
agcggccgccctttttttttttttttgtactttttaagggaattttatctggaaatgggaagttccaaaagacaacaaagcaacacaaaaagtccacttttaagtaaatctataacttggaaaaaaaaaggcctaaaaatattctgaagggtagtgtataattttaaagtagccatgagaacttccatcaactggctaatttcttcatatcagctggcatgtctggtgattggcattcccttgaaggcttttgtcacccttcagtcttctgcccacaggccttagttttgtttccaagtggtgcttcagtgaggatataaggtccatgacctctaaggttagtgtttgcctcatcaggcagcaagatcctcattccgacagtaccaatatttcagaggttttaagaaaataattggatttttgctcctaatc

SEQ ID NO: 4623 - DNA, 429 bp, Bos taurus
  Clone ID: 20-LIB3058-039-Q1-K1-E7
gccaaactggacaagtctcagattcatgttattgtcttggttggtggctcaacccgtatccccaagattcagaaacttctccaggacttcttcaacgggaaagaactgaataagagcatcaaccctgatgaggctgttgcatatggtgcagctgtccaggcagccattttgtctggagacaaatctgaaaatgttcaagacttgctgctgttggatgtcactcctctttcccttggaattgaaactgctggtggagtcatgactgtcctcatcaagcgcaatactaccattcctaccaagcagacgcagactttcaccacctactctgacaaccagcctggtgtgctcattcaggtttatgaaggtgagcgtgccatgaccaaagataacaacctgcttggcaagtttgaactcacgggcataccttct

SEQ ID NO: 4624 - DNA, 359 bp, Bos taurus
  Clone ID: 20-LIB3058-042-Q1-K1-E11
gcgcatcagtatttgaacacgtgtgactggaaaaacaaattgtacatatccacatgatgaaataatacaaatgctatatatatttattaggacccctggtggctcagtggtaaagaatccacctgccaagcaggagttgtgggttcgatctctgggctgcgaagatccgctggagcaggaaatggcaacccactccagtttacttgcctggataattccatggacagaggaacttggcaggctatagtccatggagtcgcaaagaagtagacatgacttaatgactaaacaacaacatggtttaaagtaatctttatgccaaaacagggaaatgtccacagacactataagctttaaac

SEQ ID NO: 4625 - DNA, 420 bp, Bos taurus
  Clone ID: 20-LIB3058-042-Q1-K1-E7
gttctagatcgcgagcggccgccctttttttttttttttttttttttttttttttttgttttttctaatcctttcatcattgaggctatgtattaatagacattatagtaaacccacgcgaaatattcagaattagaaggggattaaagagccacgtttgggcgttacgttgactattcctcattttcatcctaaggggggttgtgacgccagtgtggggacttcgtgggggtctggtggaagagatgctgaaatcaaaaggtgggaatcagtaggttatgggggaagcacgggagatgtcagctggggttagaaaagagtggtatagaggacccctccccgtcctcactggggccggcacccagtccggcagcgattcgggaaaagcgagtgtactggtcagtgggtttctgggaggaa

SEQ ID NO: 4626 - DNA, 408 bp, Bos taurus
  unsure (358): unsure at all n locations; Clone ID: 20-LIB3058-044-Q1-K1-E7
gggccagggccggctggtttcgggggtctgccgcacagacgccctggaggcttgtgcgaggtctgagccctccagccctggtgcccctttagcacgggcttggggccgtgtcgcaacaggggcacacagtgtgggggacatcagagcgccgcagaccatggccttgcagaccgctccgccccgcctggggtcctgggggacccccgcccatggcagcctgctgctcctgcttctctgccttggttgggttctaccttccagggcccaggctgcagacgtgggactggctcttctgagctcaagtgtgcagcacacatcatgggacctgtcctggcagcagcctgggctgaccgtcctnctgccgaaggcccggcggtgcacagagaagaaggcctgccccccggggcg

SEQ ID NO: 4627 - DNA, 436 bp, Bos taurus
  Clone ID: 20-LIB3058-045-Q1-K1-E7
gcgttaatgacccaaaaactcagatctgtggtgtctgaatttctaacagtccttgcgttgtgggtatgctgacaacttatctggatgccttacatcttttctaaacagtgttgcctctgaacgtgctctgctccctccctgctccctctttggagcccctttgcaccccagagcctgcagaagtggctggtataaaagggggcctggctagagaatgatcagtgtagctgtttgcaggattcctttctgggcttcattttggaaactttgcttagggctatttttcttaattgcccacatttgatggagggtagaaggaattttgaatgtatttgatttattattattatttttttttttttagattaaaggatggttgtagcatttaaaatggaaatttttcctcctggttagctagtatcctgagtgtattctc

SEQ ID NO: 4628 - DNA, 412 bp, Bos taurus
  Clone ID: 20-LIB3058-046-Q1-K1-E7
cggggatcgtcagcaccacccagtttgttggcaaagaactggggctccggaactcggacatggactacatccagacagacgccatcatcaactatggaaactccggaggcccattagtaaacctggatggtgaagtgattggaattaacacactgaaagtgacagctggaatctcctttgcaattccatctgataagattaaaaagttcctaacggaatcccatgaccgacaagccaaaggcaaagccatcaccaagaagaagtatatcggcatccgaatgatgtcactcacacccagcaaagccaaagagttgaaggatcgccaccgagacttccccgacgtgctttcaggagcgtatatcattgaagtaattcctgatacccccgcaaaagctggggggctcaaggaaaa

SEQ ID NO: 4629 - DNA, 405 bp, Bos taurus
  Clone ID: 20-LIB3058-047-Q1-K1-E11
gttgtagatcgcgagcggacgcctcttttctttttttttttatttatttttttttttgggttttttttatttatttttttttatatttttttattttatttatattatttattatttatattgtatttacatattatattaggagtaatagataacacagtatgagatgatgcagctgagtgtgatatgtaaagccttgaatatgatctaatagaaaaggtgataagcactgatgatatatgataaaatcaatgatgatattatatgaatttctgatagatacctattaacaaaacaaagatgttcaagtaaaaatctgaatataatacattaagaaagtgtatagaaagaaaaaattagatcgaaaatactttaaaatcttaatgagcatcgttatagtgatca

SEQ ID NO: 4630 - DNA, 327 bp, Bos taurus
  Clone ID: 20-LIB3058-048-Q1-K1-E11
aagattttccacacgggctagattctcaattaaagtaaagttttcatgaaaaaaaaaaaaaaaaaaaaaaaaaaaaaaaaaaaaaaaaaaaaaaaaaaaaaaaaaaaaaaaaaaaaaaaaaaaaaaaaaaaaaaaaaaaaaaaaaaaaaaaaaaaaaaaaaaaaaaaaaaaaaaaaaaaaaaaaaaaaaaaaaaaaaaaaaaaaaaaaaaaaggggagaaggttaaaaggaaaaaaaaattaaaaaagataaatttaaaggtaaaattttttaaaagggaaaaaaaaaataaaaaaaagggggggaatttaaaaaaatttgaatagg

SEQ ID NO: 4631 - DNA, 434 bp, Bos taurus
  unsure (341),(393): unsure at all n locations; Clone ID: 20-LIB3058-048-Q1-K1-E7
tgaacatccaacagctcaccagctacatatagagcgtcatgtccttggctgaggcgggaaaactctaccgcaaggacctggagattgtcctctgcagcgagcccccactgtaaaacaggggatgggggctgcttctccacctccccctcaaacctgcccctgctgccctgccactgccacccagacccagagatcctgatcatccctgtgactgtccctgccacctgcacacaccagcctgcagagcaggaaaggagaaatggagaaggggctgctgccgggccccctggagccccccgcaaccccccctggctgaccgggcacagcactctgtgtgcggngggcaccaacctcgtgggaggtgggcaggggcacggacaggaggtccctggntctctttgctgtgatgcatgagctcgctcgctggatgaatt

SEQ ID NO: 4632 - DNA, 431 bp, Bos taurus
  Clone ID: 20-LIB3058-049-Q1-K1-E11
gattaaacaaatccgtcatgagtcatgtgcttcgatcaaaattgatgagcctttagaaggatccgaagatcggatcattaccattacgggaacacaggaccagatacagaatgcacagtatttgctgcagaacagtgtgaagcagtattctggaaagtttttctaagactagtgaagaactgaaggagtcctgcatctttttttttttatctgcttctgtttaaaaagccaacattcctctgcttcataggtgttctgcatttgaggtgtagtgaaatctttgctgttcaccagatgtaatgttttagttccttacaaacagggtgggggtgggggagggtgtgcaaaaactaacattgaaattttgaaacagcagcagagtgagtgaattttaatttttgttcattgttggtggtttaaagaagtccccc

SEQ ID NO: 4633 - DNA, 433 bp, Bos taurus
  Clone ID: 20-LIB3058-049-Q1-K1-E7
ccagaccatccaggaagacagtgcgtgttgctcccggggcggtggacgcaatggcggcccagaagagaccctcccagagatccaagtacctggcctcggcgagcaccatggaccacgccaggcacggcttcctccccagacacagagacacgggcatcctcgactccctcggccgcttctttggctcggacagggtgcgcccaagcggggctcaggcaaggatggacaccacgcggccagaaccacccactatggctccctgccccagaaggcgcagcacggccggccccaagacgaaaaccctgtagtgcacttcttcaagaacatcgtgacaccccgcacacctcctccatcgcaaggaaaggggcgaggactgtccctcagcagatttagctggggggctgagggccagaagccaggattcggctatgga

SEQ ID NO: 4634 - DNA, 450 bp, Bos taurus
  Clone ID: 20-LIB3058-051-Q1-K1-E7
gcggcctccagctcctccctggagaagagctacgagcttcctgacgggcaggtcatcaccatcggcaatgagcggttccgctgccctgaggctctcttccagccttccttcctgggcatggaatcctgcggcattcacgaaactaccttcaattccatcatgaagtgtgacgtcgacatccgcaaggacctctacgccaacacggtgctgtccggcgggaccaccatgtaccccggcatcgcggacaggatgcagaaagagatcactgccctggcacccagcacaatgaagatcaagatcatcgcgccccctgagcgcaagtactccgtgtggattggcggctccatcctggcctcgctgtccacctttcagcagatgtggatcagcaagcaggagtacgatgagttcggccccttcatcgtccaccgcaaatgcttctaggcggactgt

SEQ ID NO: 4635 - DNA, 354 bp, Bos taurus
  Clone ID: 20-LIB3058-052-Q1-K1-E7
gtctgtttctccactaatacttcacaattctgattactatagctatataacaaactttgaaattggatagactaattacatttattccttttcaaaatcctttaactatctaattcctttgccttttcatataatgctggaataatcttatctgtaactataaaaaaatcttgttggaattttgatacaaattgttttaaactctgcatatcaatttacggagaattgacatctttcctatgaagaatcctccaatccgtggacacagtatgtcctacatttctgtctagtgaattgaagtctctcagtcgtgtccaactgtatgcgactccgtggactgtatcctaccgggct

SEQ ID NO: 4636 - DNA, 424 bp, Bos taurus
  Clone ID: 20-LIB3058-053-Q1-K1-E7
cggacgcgtggggcacagttctggctgttgacaattttaatgggatcaagatcaaaggaagaactatccgagtggatcatgtatctaactatcgacttcctgaggactcagaagaaatggatgaggtgaccagagagctgcaggagaggggctgtgggactcatactcctccaccaagttcatctgagggctctgaagatgacaaacccaccaaaaaacacaaaaaagacaaaaaggaaaaaaagaaaaaaaagaaagacaaagagaagactggccgggaggtacaggcagagcagccagcctcctcttcattgcccagaagcaagatgataaaggaaaaggatgaccctggctctaaaaagcacagtggcaagcactcagagacgggagagaagggtcagaagtcagagtccagggaggtgcg

SEQ ID NO: 4637 - DNA, 294 bp, Bos taurus
  Clone ID: 20-LIB3058-054-Q1-K1-E11
aaattaaaatttaaaaaatattttattaaaaaaataaaaaaaataatattttttaaatttaaaaaattaaaaaaattataagtattaaaaaaaattaatttgataaaaaatttattttttataaattaaatattttaaaaaacaataatttaaaaaataattgttaaataaaatgtaatgttaatgtaaataaaaaaaatttttattaaaattaaatatacaaaaaaatatatattatattttatataatttattatatatgattttaaaaaatttattaaaaaaatttttaaa

SEQ ID NO: 4638 - DNA, 208 bp, Bos taurus
  Clone ID: 20-LIB3058-054-Q1-K1-E7
tcccggttctacccactcttcctctttaacattcctgtaaacgctaagtttaaaaaaaaaaaaaatattaatatgagaaaattttaaaaaaaaaaaaaacaaaacatttatatataaaaaaaaaaaatataatatattataaattaaatataataaaaatataaaaataataacttaataataaataaatcataatatatttttttac

SEQ ID NO: 4639 - DNA, 445 bp, Bos taurus
  Clone ID: 20-LIB3058-056-Q1-K1-E11
tatcttagtagtattttgttgtatttttgtttaatgttactgtatacatttgacagtgaaagcactttttaaaattatgctattcttgaaactgaaacattcgctcagtcctgtcctactctttgtgaccccatggactgtggcccaccagtctcctctgttcatgggattctccgggcaggaatgctggagtgggtggccattcccttctccagggaagctccccgacccaagggtcaaacccggggcgccctcattgcaggtagattctttactaccagagccaccagggaagccattcttcttactcctcactaaattagaataaccttcaactcattgttggaattattaaaatgcggttttaaagtgagcagtcagtaatgtttagctctataaatgaaaacaaggggaagaagagcttgtttaaaggttttccctttct

SEQ ID NO: 4640 - DNA, 352 bp, Bos taurus
  Clone ID: 20-LIB3058-058-Q1-K1-E11
acgtttttgtattgatcctaaatggatgtcccagcgcacctagaaaattggtctctctctctgtttttaaaaaatagctattcgctaaatgctgcttcttacatagaatttcttaattttcaccgagcagacgtggaaaagtacttttgctttcagggaaaaatgatctgacattaatttattaatgaattggtaatatacaaaacaatcgttttttgtgttattttttggtgatttaagtggcatttctatgcaggcagtacaccacactagctaatctcttgctcgaacttaactagtcaccagatcctctgaaaagagaaatatttaccaaatgtgactaatttggggg

SEQ ID NO: 4641 - DNA, 450 bp, Bos taurus
  Clone ID: 20-LIB3058-058-Q1-K1-E7
cggacgcgtgggggactgcttcaacttagacctaacagatggccatggtgcagtcatgaatacttccagatcttctgattctttccataaaaaaggcaaagtaaaaaaagacaactggtgatctaaatattatgtgtacttttgtaaatttaaaatctaccatatttttaaaagaaaaggaaataagctagcaaacataaaatatcgtgctacaaaagagaacaatttacaaggtagatctgcctctggaccacctgtttatgacttctgccaatattcccattctctcacatcctacaagttaaaattgagaagcactggtatagatacagcctaaccacctcagactaatgttttcagaagtaattgtatgaccttgggagagtaactcctttctataatttactcatttggaaggtaggaaaaatcattctccttacctcattgaat

SEQ ID NO: 4642 - DNA, 359 bp, Bos taurus
  Clone ID: 20-LIB34-001-Q1-E1-E7
gtcaatcttttctctggaaactggtactggaacctcatgttagagcgcatatagcactgcatactccactagtaccctgtccaaagcaccaagtgaaaggacacaagccaacattgtaagaggacatgcgtctcctccctctctccgtgctgctcctgctcacacagccctggagatccctgagagcagtgatgacaaccttttctcagagtatactggccaatgcctgtaccctggttacgtgtagccacctgaagattggcatgcctggtcatgatggacaagatgggagacaatgtcaccatggtcagaatgtggatccacgttcacgatgaccttcacgacgagcatgaatgcct

SEQ ID NO: 4643 - DNA, 397 bp, Bos taurus
  Clone ID: 20-LIB34-003-Q1-E1-E7
cgggcattgagagtgccagttgcactgtggctgttgggcttgtgctggtctttggctaaagcccaccctctggctagagctcctgagcttgggcacggagttgaaggtgggaatgtggccaagccggatccagaagtgacggaacgctgctcggatggctggggctttgatgctaccaccctggatgagcatgggaacatgctgtttttaaaaggggagtttgtgtggaagggtcatgcctgggcccggcagttgatctcagagaggtggaaggatgcccccagtcccgtggatgctgcattccgctatgatcgtaacagtgtccttctgatcaagggggacaaattctgggtatatcctcctgagaatggggacgaatatccaaagttgctccaag

SEQ ID NO: 4644 - DNA, 395 bp, Bos taurus
  Clone ID: 20-LIB34-004-Q1-E1-E11
cttctgttgcccgccctgccccggtcgcattgccgctaagctcgccttcctgcctccggagcccatctactcgctggtgcctgagcctgagcccgggcctggtggggccggggctgcctcctcagggaacctgctggccttagctggcacccctgcgctctggtaacgctatctgatggagcgcgctgacttccagtacagccagcgtgagctggacaccatcgacgtcttcctgaccattagcattcggggcatccgcatctcctgcatgtatgtgcgctgtgtgcctggtgccacgtatacagttctcttctcgcacggcagctcagtggacctgggccagatgatcagcttctacatcggcctatgcacacgcatcaactgcaacatcttct

SEQ ID NO: 4645 - DNA, 410 bp, Bos taurus
  Clone ID: 20-LIB34-004-Q1-E1-E7
tgtaactcctaaccggacaatgtctgacttcactgtttttgaaaggatctctcttgcctggagcccgattacatctttgatgtgggcttgtggtcgtcatttgtatgaatgtgcagaagaagaaaatgataattctttagaaaaagatatagcaacgaagatgcgccttcgggctttatcaaggtatgggcttgatacagagcatgtgtggagaaaccatattttagctggaaatgaggatccccagctcaagtcactctggtacactctgcactttatgaagcagtatacggaagatatggaccagaaatctccaggcaacaaaggatcattggtttatgcaggaattaaatcaattgtaaaatcatctttgggaatggtggaaagcagcagacataattggagtgggc

SEQ ID NO: 4646 - DNA, 327 bp, Bos taurus
  Clone ID: 20-LIB34-005-Q1-E1-E11
gttctagatcgcgagcggccgccctttttttttttttttcagattacaaggtggattattgagttagtggcatgcgaacaggttcatcccgtgatcagcatacgcaggcattagagcgtttcagaggagttcagaggaaggagaggctggaggggtcacgaggacctcgaggtcacggcctggtcatctggcgacgtgcagagctctcgaaaggggcctgaagctcatctcatgggcaagtgggtgcagacgccccgatacttgcaaaagcaactttcacgcctcactcctcctggctcttccggaggtacagctcgcagtgcattc

SEQ ID NO: 4647 - DNA, 408 bp, Bos taurus
  Clone ID: 20-LIB34-005-Q1-E1-E7
ggtggctcttccatccccagaccagccaagcctgtgagtgacaccccagacagaggaaccagagccatgcggagtctcagcggactgctgttgttactgactgcctgcctggcagtaaacgccagctccgtgcccacattgcccgatgacattcaagtgcaggagaacttcgacctgtctaggatctatgggaagtggttcaatgtggccgtgggctccacctgcccatggctgaagaggttcaaggagaagatgaccatgagcacagtggtgttgaaagcggggccgacgagcaatgagatcagcgtcaccaacactcacaggcggaaaggtgtctgtgaatcgatctctggtacttatgagaaaacaagcactgatgggaagtttctctatcacaaagccaagtgg

SEQ ID NO: 4648 - DNA, 392 bp, Bos taurus
  Clone ID: 20-LIB34-007-Q1-E1-E11
gccagacacaccaacgatgagcgccctgcaagctgtcgtcactctcctgctctgcgggcagcttctcgcggtggaaaccggcagtgaggccacagccgacagctgcccaaaggcccccgagattgctaatagccatgtggagtactcggttcgctatcagtgtgacaaatattacaaactgcatgctggaaatggggtgtatacttttaacaataagcaatggataaacaaggacattggacagcaacttcctgaatgtgaagaagatgacagctgcccagagccccccaagattgaaaatggctacgtggagtacttggttcgctatcagtgcaaaccctattacacactgcgcacctgtggagatggagtgtacacctttaacagtaaga

SEQ ID NO: 4649 - DNA, 330 bp, Bos taurus
  Clone ID: 20-LIB34-008-Q1-E1-E7
cacacgggcatcacacttatgcagcaggaccatttgccctcttcttcatagcagagtacgcaaatattatcataataaatatctttacagcaatttgattcctaggaacatcccacaatccacacataccagaactctacacaatcaattttaccattaaatccctactgctcacaatatccttcctatgaatccgagcatcctaccctcgatttcgctatgaccaactaatacacgtactatgagaaaattttctacctctgacactagccctgtgcatgtgacacgtatccctacccatccttacatcaggcatcccaccacaaacat

SEQ ID NO: 4650 - DNA, 375 bp, Bos taurus
  Clone ID: 20-LIB34-010-Q1-E2-E7
cccagatttatcatgtgtattagtggagagtggacccagcctcctcagtgcattgatcaacttaggaagtgtaaagggtcaatattatttccacctgaggggagaccagcacataagattgaatatgaccataacaccaacagaagttaccaatgtcgaggaaaatcagaacgcaaacactcaatctgtataaatggagaatgggatcctaaagtagactgcaaagaagaagcaaaaatacaactatgcccacctccacctcaggttcccaatgcttgtgatatgacaactacagtgaattatcaggatggagaaaaaatatcaattctatgtaaagaaaactatttaattcaagatgcagaagaaattgtgtgc

SEQ ID NO: 4651 - DNA, 380 bp, Bos taurus
  unsure (318),(341): unsure at all n locations; Clone ID: 20-LIB34-011-Q1-E1-E7
attgaaggcagggaccaacaccaagagggctctcctggaagtgtacaacatgatgagcagggaagtaaaccagttcaaagagacctggaaccgcacgcgccacgtcatcatcatcatgactgacggtttgcacaacatgggtggggatccagtcactgtcattcacgatattcggtacttgctagacattggtagaaatcgcaaaaaccccagggaggattatctggatatctatgtgttcggggttggacctctagtgaaccaagagaacatcaatgctttggcttccaagaaggataaagagaaacacgtgttcanactccaaggcatggaaaacctgnaggatgttttcgtccaaatgcctgatgaaagccggacac

SEQ ID NO: 4652 - DNA, 423 bp, Bos taurus
  Clone ID: 20-LIB34-012-Q1-E1-E11
gggagctggtggctcttccatccccagaccagccaagcctgtgagtgacaccccagacagaggaaccagagccatgcggagtctcagcggactgctgttgttactgactgcctgcctggcagtaaacgccagctccgtgcccacattgcccgatgacattcaagtgcaggagaacttcgacctgtctaggatctatgggaagtggttcaatgtggccgtgggctccacctgcccatggctgaagaggttcaaggagaagatgaccatgagcacagtggtgttgaaagcggggccgacgagcaaggagatcagcgtcaccaacactcacaggcggaaaggtgtctgtgaatcgatctctggtacttatgagaaaacaagcactgatgggaagtttctctatcacaaagccaagtggaatatcac

SEQ ID NO: 4653 - DNA, 395 bp, Bos taurus
  Clone ID: 20-LIB34-012-Q1-E1-E7
aaaagtcacttttcagaaggacagacgttatcaactaagaggatatattggcgaaaggaatttgaccttgaccataaagaatgctgacccatctgacagtggcttgtattgctgccgtattgagaaaaaagggtggttcaatgatataataatcactcaagagttgagtataagagattcctcaggagacatgtagtctgctattcccatctcttcaagaatattccagtttgttgtgatccacagttaaaggctttcacacggtcgatgaagtataagtacatgtttttttaattctcttgctttttctatgatctagcataagttggcaatttgatttctggttcctctgccatttccgaatccagcctgtacatctggaagttctctgttca

SEQ ID NO: 4654 - DNA, 408 bp, Bos taurus
  Clone ID: 20-LIB34-013-Q1-E1-E7
tccacgcatgcgaccgactaacagaactttgtgacaatgacgctgtcgaattctctcactctgctctctcgcgtcaactctgactgcacaatcgatttgtagcctgtccatagcaacaagtgtgaggatgcacaccagcattgtaagatgacatgcatctcctccctctcgccgtgcagctcctgctcatacagacttggagatccctgtgaacataaatgacaaccttttctcagaaaatactggccattgcctgtaacctggatatgtgtagccccctgcagagtggctttcctggtcatgatggacacgactggagagaaatgtccccatggaaagaagggggatccatgttcaccaagagctgcatggctagcaggaatgcctggatgggttggcccaattggg

SEQ ID NO: 4655 - DNA, 412 bp, Bos taurus
  Clone ID: 20-LIB34-014-Q1-E1-E11
accgctcagggcagagtcctggggaaacatgtcagcttaaaaggatttgctcagcctgtggccgtcttcctgggagtcccttttgccaagcctcctcttggatccttgaggtttgctccgccgcagcctgcagaaccatggacctttgtgaagaataccatctcttaccctcccatgtgctcccaagacccagtgggggcacagttgctctcagatctctttaccaacagaaaggagaacattagtctcacgttttccgaagactgtctttacctaaatatatacacccctgctgacttgacgaagagaagcaggctgccggtgatggtgtggatccacggaggaggtctcatggtgggcggggcatcaacatatgatgggctggtcctctctgcccatgaaaacgtggtgg

SEQ ID NO: 4656 - DNA, 416 bp, Bos taurus
  Clone ID: 20-LIB34-016-Q1-E1-E11
aggaaagaaccagtccagagggattgcctcagaccacactatctccactcgctcagacctgtggaagattagcgaccatgatttccaatgggataggaaccgtcaccgctggaaaaaggagtatatgtcttctccctttgctgcttattggcctctggggctgtgtgacctgtcatcggagccctgtggaagacgtctgcacagccaaacctcgggacattcctgtgaatcccatgtgtatttaccgttcctcagagaagaaggcaactgagggccaaggctccgagcagaagatccctggggccaccaaccggcgggtctgggaactgtccaaggccaattcccactttgccactgccttctatcagcatttggcagactccaggaataacaatgacaacattttcctgtcaccc

SEQ ID NO: 4657 - DNA, 418 bp, Bos taurus
  Clone ID: 20-LIB34-016-Q1-E1-E7
agaagcttcacactgagaggcaggcagagaacatcacacacagctgaaaggaaactcagaggagggaatcgccaagaaaagtggccatggagctaatcccaaacttttccgtggaaacctgggttctcctggctatcagcctggtgctcctctatctggtgtttgtgagtttgatgaagaatgttttaaaaagtatgggaaaatgtgggggatttttgaaggtaaacatcctctgttggttatcacggatccagacatgatcaaaacagtactagtgaaagaatgttattctgtcttcacaaaccggaggatgttccctatcattgggaagtatggagatgtgttggtgaggaacctgaggaaggaagcagagaaaggcacgtccgtcgacatgaaagaggtctttggggcctacagc

SEQ ID NO: 4658 - DNA, 395 bp, Bos taurus
  Clone ID: 20-LIB34-017-Q1-E1-E11
ccaggctcggagccccgggcccgccgacaccatgagttggtcctcgcaccctccgagtgtaatcttctacattctttcattgctttcttcagcatgcctggcatatgttgctacccgagacaactgctgcatcttagatgaaagatttggtagttattgcccaactacctgtggaattgcagatttcctgaataattaccaaaccagtgtagacaaagatctacgaactttggaaggcatcttatatcaggttgagaacaaaacatcagaagccagagagctggtcaaagcaatccaaatcagctataaccctgatcaaccatcaaagccaaataacatagagagtgctaccaagaattccaagagtatgatgggagaaattatgaaatatgaaa

SEQ ID NO: 4659 - DNA, 384 bp, Bos taurus
  Clone ID: 20-LIB34-017-Q1-E1-E7
caaaagtccacaaggaatgctgccatggtgacctacttgaatgcgcagatgacagggcagatcttgccaagtacatatgtgataatcaagatacaatctccagtaaactgaaggaatgctgtgataagcctttgttggaaaaatcccactgcattgctgaggtagaaaaagatgccatacctgaaaacctgcccccattaactgctgactttgctgaagataaggatgtttgcaaaaactatcaggaagcaaaagatgccttcctgggctcgtttttgtatgaatattcaagaaggcatcctgaatatgctgtctcagtgctattgagacttgccaaggaatatgaagccacactggaggaatgcggtgccaaagatgatccac

SEQ ID NO: 4660 - DNA, 409 bp, Bos taurus
  Clone ID: 20-LIB34-018-Q1-E1-E7
agctgcagtgcagtcatggaagggttcgctggtgcaggcatctcctgccaacctggaggcagctcggaacttcgtgcagcaattctccctggccggggctacaaacctgaatggaggtctgcttaggggaattgagatcttgaacaaagctcagcaaagtctcccagaactcagcaaccacgcctcaattctcatcatgttgacagatggcgagcccacagaaggggtgatggatcgtacccaaatcctcaagaatgtccgagatggcatcaagggcaggttcccactctacaacttgggctttggccatgatgtggacttgaacttcctggaggtcatgtccctggagaacaacggacgtgtccagagaatctacgaggatcatgatgctacccagcagctgcaaggg

SEQ ID NO: 4661 - DNA, 381 bp, Bos taurus
  Clone ID: 20-LIB34-019-Q1-E1-E11
ctttagggtgtccgcgtgagagagttaggcaatttcttgaagccagaactgggaagcgctagtccgccgtgcctagttggagacgtggccgggccacgagactgaaatgtcggacacgtggagctctatccaggcccacaaaaagcagctggactcactgcgggagaggctgcagcggaggcggaagcaggactcggggcacttggatcttcggaatccagaggcagcactgtctccaaccttccgtagcgacagcccagtacctgctgcacccacttctggtggccctaagcccagtacagcttcagcagttcctgaactagctacagaccctgaattagagaagaagttgctacaccacctctctgatctgtcactaac

SEQ ID NO: 4662 - DNA, 404 bp, Bos taurus
  Clone ID: 20-LIB34-019-Q1-E1-E7
ataacttgattgccttttctaatggagtatttggcagtaattgtgatcatgctccttttgatgcaatggttctggtaaaagtctgctattatgttgatgagaacattcttgagaatgaatgaagatggaagggctcagaaaaagtacgggatataccggttccagaggagcttgttttcactgtggaggaaaaagtattacatgacatcaaccaagctaaggaccagtatttcaagcacgtgtccgatctccagcttgtggtatatgcctttacgtcttttggcaaaaagctaaccaacgataagcagcttcaccctgatacatttattcagctggcacttcagttggcctattacagacttcatggacgtcctgattgctgctatgatacagctatgacaaga

SEQ ID NO: 4663 - DNA, 411 bp, Bos taurus
  Clone ID: 20-LIB34-020-Q1-E2-E7
cacttcaagactaagattgaagggctggacatccacttcatccacgtgaagccccctaacctcccctccggccaaaccccaaagcccttgctgatggtgcacggctggcctggctccttctacgagttttataagatcatcccgttcctgactgaccctaagaaccacggcctgagtgatgagcatgtttttgaagtcatctgtccatccattcctggctacagcttctccgaggcatcctccaagaagggcttcaactcagtggccactgccaggatcttttataagctgatgctgcggctgggcttccagaaattctatattcaaggcggggactggggggccctgatctgcaccaacatggcccagctggtgcccagccacatcaagggcctgcacttgaacatggct

SEQ ID NO: 4664 - DNA, 401 bp, Bos taurus
  unsure (359): unsure at all n locations; Clone ID: 20-LIB34-021-Q1-E1-E7
catcttcaagggcaaccactactgggaatatgtgttccagcagcagcccagtcaagaggattgtgaaggcagctccctgccggccgcatttaaacactttgccctgatgcagcgggacagctgggtggacatcttccgacttctcttctggggcggttcctatggtggtgctggacagccccagctcatcagccgcaactggtttggtctgccgggacgactggatgcggccatggccggccacatctatgtctcaggctcagctcccagcttcccccgggccaagatgactaagtctgcacgccgccatcgcaaacgctaccgctcgctccgaagccgtggtcgaggccgcggccganaccagaaaccctaccggcgatctcgatctgccttcctgtcct

SEQ ID NO: 4665 - DNA, 370 bp, Bos taurus
  Clone ID: 20-LIB34-022-Q1-E1-E11
gatggtgaaaacagccatactttttatttctatgactaggaatgtatggtgaacagtcggaatgtggtaacactatgtgagataaaaggtccagataaaaggcaattccatttggtgtgggctgggcccactcttcatttggcagcatgcttcttgtatatctccaggaactcagtcacatcttcaggagaccccaagatgatgggcgacttctgatggatgtcagtgggaacaatgtccagcacagtttccttcccggtggtagccattcctcctgccttctctatgacataggccatgggggttacattcatacagtagtctcagctttccactggagcttttcttgttagctggatacataaagatc

SEQ ID NO: 4666 - DNA, 405 bp, Bos taurus
  Clone ID: 20-LIB34-027-Q1-E1-E7
caggtgtcgtgaaaaccaccgttaaacctaagccaaaatgggaaaggagaagacccacatcaacatcgttgtcattgggcacgtagattcagggaagtctaccacgactggccatctgatctataaatgtggcgggatcgacaagagaacaattgaaaagttcgagaaggaggctgccgagatgggaaagggctccttcaaatatgcctgggtcttggacaaacttaaagctgaacgtgagcgtggtatcaccattgatatctccctgtggaaatttgagaccagcaagtactatgttaccatcattgatgccccaggacacagagacttcatcaagaacatgattacaggcacatcccaagctgactgtgcggtcccgatcgttgctgccggtgttggtgaatt

SEQ ID NO: 4667 - DNA, 310 bp, Bos taurus
  Clone ID: 20-LIB34-028-Q1-E1-E11
aaacaggtaatggctcccaaaggccatagagtgaagcttaatgatggccacttcattcctgtcctgcgatttggcactgctgaagctaaagaggttcctaacagtgaagctctggaagtcaccaaatttgctatacaggttgggttccgccatattgactgtgctcatgtgtaccaacatgaagaacacgttggccaggccattccaagcaagattgcacatggcactgtgaacagagaagaaatattctacacttcaaagctttgggtgcactttcccatccaccagagtttggtcaaaacaacccttg

SEQ ID NO: 4668 - DNA, 399 bp, Bos taurus
  Clone ID: 20-LIB34-028-Q1-E1-E7
cataatactaattattcccatcctattggccgtagcattccttacgttagtggaacgaaaagttctaggctatatacaactccgaaaaggtccaaatgtcgtaggtccatatggcctacttcaacccatcgccgatgcaatcaaacttttcattaaagaaccactacgacccgctacatcttcagcctcaatatttatcctagcacctatcatagctttaggcctagccttaaccatgtgaattcccctaccaataccctatcctcttatcaacataaacctaggagtcctatttatactagccatatcaagcctagccgtatactccattctctgatcaggctgagcttccaactcaaaatacgcactaatcggagccctacgagcagtagcacaaac

SEQ ID NO: 4669 - DNA, 418 bp, Bos taurus
  Clone ID: 20-LIB34-029-Q1-E1-E7
agcatagtggacagagctattccttaaaggaaccgcaaccggttagcagaccagagagtgacccggatgatggcggccggcacggccttaggcttggccctgtggctactactgccgccagtgggcgtgggaggggcagggcccccgccgatccaggacggcgagttcacgttcctgctgcctgcggggcggaagcagtgtttctatcagtccgcgccggccaacgcaagccttgagactgagtaccaggtgatcggaggtgctgggctggacgtggatttcagtctggagagccctcagggagtgctgctggtcagcgagtcccgcaaggcagacggtgtgcacacggtggagcccacggaggccggggactacaagctgtgctttgacaactccttcagcagcatctcggagaagc

SEQ ID NO: 4670 - DNA, 421 bp, Bos taurus
  Clone ID: 20-LIB34-030-Q1-E1-E11
cagtattcaaaaatttggagaaagagctttaaaagcatggtcagtagctcgcctgagccagaaatttcccaaggctgagtttgtagaagttaccaagctagtgacagatctcacaaaagtccacaaggaatgctgccatggtgacctacttgaatgcgcagatgacagggcagatcttgccaagtacatatgtgataatcaagatacaatctccagtaaactgaaggaatgctgtgataagcctttgttggaaaaatcccactgcattgctgaggtagaaaaagatgccatacctgaaaacctgcccccattaactgctgactttgctgaagataaggatgtttgcaaaaactatcaggaagcaaaagatgccttcctgggctcgtttttgtatgaatattcaagaaggcatcctgaatat

SEQ ID NO: 4671 - DNA, 405 bp, Bos taurus
  unsure (331): unsure at all n locations; Clone ID: 20-LIB34-030-Q1-E1-E7
cggacgcgtgggcacctgtgttccaggagcggaaccagcaatgtcgtcctcagccatgccagacgtacctgccccactcaccaatttgcagtttaaatatactaagatcttcataaacaatgaatggcatagttcagtgagtggtaagaaatttccagtctttaatcctgcaactgaggagaaactctgtgaggtggaagaaggagataaggaggatgttgacaaagcagtgaaggctgcaagacaagcttttcagattggctctccatggcgtactatggatgcttcagagagaggacggctgttaaacaagttggctgacttaattganagagatcatctgctcctggcgacaatggaggcaatgaatggtggaaaactattttccaatgcatatctgatgga

SEQ ID NO: 4672 - DNA, 409 bp, Bos taurus
  Clone ID: 20-LIB34-031-Q1-E1-E7
aacttccagccccatcaaacatttcatcatgatgaaatttcggttccctcctgggaatctgcctaatcctacaaatcctcacaggcctattcctagcaatacactacacatccgacacaacaacagcattctcctctgttacccatatctgccgagacgtgaactacggctgaatcatccgatacatacacgcaaacggagcttcaatgttttttatctgcttatatatgcacgtaggacgaggcttatattacgggtcttacacttttctagaaacatgaaatattggagtaatccttctgctcacagtaatagccacagcatttataggatacgtcctaccatgaggacaaatatcattctgaggagcaacagtcatcaccaacctcttatcagcaatcccatacat

SEQ ID NO: 4673 - DNA, 397 bp, Bos taurus
  Clone ID: 20-LIB34-032-Q1-E1-E11
gtctcggagacctcctggatgactatgtcaacacccagggggcttccctgcttagtttgagtcggaagaacctggcgggaacaagcgtagaggactgtgcacccaagtgtgaggaggagacagacttcgtttgcagggcattccattaccacagtaaagagcaacaatgcgtcgtcatggcctacaacagcaagatcacccccgtctttaggatgaaggatgtcattctacatgacaagagaatctatcttttggagtgcaagaccggaaatgggcagacctacagatggaccacagccgactcacacagtggggtcacctgcaaaaaatcgagcgccacttcgccacacgtgcccaagttttcacctgaaaaatttcctctagcgggactggagga

SEQ ID NO: 4674 - DNA, 397 bp, Bos taurus
  Clone ID: 20-LIB34-032-Q1-E1-E7
gggaatccaggaaaatcatgctccccaaagatgagattagatgacttctggtcactgaaattgtgtaggccttcaaaggattacttactgcggcattgcaagtacctcataagaaaacacaggtttgaagaaaaggcccaaatggatccccttagtgctctgaaatatttacaaaatgatctttatataactgtggatcattcagacccagaagagactaaagagtttcagctcctagcttcagctctatttaaatctggttcagatttcacagctttaggcttttcggacgtggatcacacctatgctcaaagaactcagctctttgacaccttagtaaatttctttcctgacagcatgactcctcctaaaggcaacctggtggacctcatcacac

SEQ ID NO: 4675 - DNA, 382 bp, Bos taurus
  Clone ID: 20-LIB34-033-Q1-E1-E7
aaagaagtcctgcacaaaaagaacaaaacaggaggcatctttggcaattctgggtctctcatggttctatataaattttagagttacttgttctagttctgtgaaaatgtcatgggtatcagaaggacttttaagaagagactgctaagtcctccaaaagtttcatatttagataaatgtctttatcttttttaactttttagtttgtattggggtataaacgattaacaatgttgtgttagtttcaagtagatagcaaagggactcagccatacctatgcaggcatgcattcttccccaaactctgttctcatccagactgccacatgacactgagtagagtttcttgggttatacagcagatccttattgattatccatt

SEQ ID NO: 4676 - DNA, 353 bp, Bos taurus
  Clone ID: 20-LIB34-034-Q1-E1-E11
aaagttctagatcgcgagcgggcgcccttttttttttttgttcatctacacagtgtttttatttttattcaactatgatcaaacagcatcgttaacacgatattcaccaggtccagaacagttgtcttttgtagcggaaagtgtgaggaacttaagaggcagaggctttcagattctgataacctcttagccaagccagccctgctgctcatctatatggccaggctttaagaggagaccaatttcttcgagggagctttttccagtagtgctctttaggagaaccacaatgggagactgggaggcagtaagcagcctgagacgttgggggtccactgagtgtcgtggtgaga

SEQ ID NO: 4677 - DNA, 380 bp, Bos taurus
  Clone ID: 20-LIB34-034-Q1-E1-E7
acagcgatggatgtggataccccgagcggcaccaacagcggcgcgggcaagaagcgctttgaagtgaaaaagtggaatgcagtagccctctgggcctgggatattgtggttgataactgtgccatctgcaggaaccacattatggatctttgcatagaatgtcaagccaaccaggcgtccgctacttctgaagagtgcaccgtggcgtggggcgtctgtaaccatgcttttcacttccactgcatctctcgctggctcaaaacacagcaggtgtgtccgttggacaacagagagtgggaattccaaaggtatgggcactagaaaaagagaattcttcgattaagctcaactgtttttttgttatccactgaatgacttgc

SEQ ID NO: 4678 - DNA, 408 bp, Bos taurus
  Clone ID: 20-LIB34-036-Q1-E1-E11
tctctaagtatgagatgaacagagactccaacaagaacacactcatcatctacctggacaaggtctcacacacagtggaggactgtctgtccttcaaagttcaccagtactttaatgtcggacttatacagcctggggcagtcaaggtgtactcctattacaacctggatgaaacttgtatccgcttctatcacccggataaagaggacggaatgctgagcaaactctgccacaaagatacctgccgctgtgcagaggagaactgcttcatgcaccacacggagaaggaggtcactctggaggaccggctggacaaggcttgcgagccgggcgtggactatgtgtacaagaccagacttatccagaagaagctggaagatgactttgacgagtacatcatggtgatcg

SEQ ID NO: 4679 - DNA, 412 bp, Bos taurus
  Clone ID: 20-LIB34-036-Q1-E1-E7
gagatccacgagaaagaagtacaccatagctttcagcacctcctgcaagcgctcaatcaacccagcatccagctgcagctgaacgtgggcaacgccatgttcgtgcaggaggagctgaagctgctgtgtcaagttcatagaagatgcccaggtgctgtactcctcatgaggccttcccgaccatcttcagggattctgaagctgccatgagtctaataaatgaccatgtgaataataaaacccacgggaaaattgaagagctgttcatgtacctttcaccgagaacagagttggtgctagtgatttacatctactttatagcccaatggaagaccccctttgaccccaaacacactgagcaggcacagttccacgtgagcgacatcaagacggtggatgtgcccatgatgac

SEQ ID NO: 4680 - DNA, 401 bp, Bos taurus
  Clone ID: 20-LIB34-037-Q1-E1-E11
agagcttctcctggcctctgccatcttctgcctggtgttctgggtggtcaggacctggcggcctcgggtccctcaaggcctgaagagtccaccggagccctggggctggcctctgcttgggcacatgctgacgttggggaagaacccgcacgtggtcctgtcgcagctgagccagcgctatggggacgtgctgcagatccgcattggctgcacacccgtgctggtgctcagcggcctggacaccgtccggcaggccctcgtgcggcagggcgatgatttcaagggccggcccgacctctacagcttcaccttggtcactgatggccagagcatgaccttcaacccagactctggaccagtgtgggctgccccgcgacccctggcccagaatgctctcaaca

SEQ ID NO: 4681 - DNA, 420 bp, Bos taurus
  Clone ID: 20-LIB34-037-Q1-E1-E7
ccgggcccgccgacaccatgagttggtcctcgcaccctccgagtgtaatcttctacattctttcattgctttcttcagcatgcctggcatatgttgctacccgagacaactgctgcatcttagatgaaagatttggtagttattgcccaactacctgtggaattgcagatttcctgaataattaccaaaccagtgtagacaaagatctacgaactttggaaggcatcttatatcaggttgagaacaaaacatcagaagccagagagctggtcaaagcaatccaaatcagctataaccctgatcaaccatcaaagccaaataacatagagagtgctaccaagaattccaagagtatgatggaagaaattatgaaatatgaaacactgatatcaacacatgaatcaacaattcgatttttgc

SEQ ID NO: 4682 - DNA, 236 bp, Bos taurus
  Clone ID: 20-LIB34-038-Q1-E1-E11
ttcccggggtcacccacgcgtccgagactccaaaaacacctggaatctggttactccactgccatgtgaccgaccacattcatgccggaatggaaactacttacaccgttctagcaaacgaagagatcaagtctggaggaaagaaataaattggtgataagtggaaaaaacagaacaaacagtgatttgtaacaatgtatgtgaaagtgttgaatagaaagcttactttggaatgg

SEQ ID NO: 4683 - DNA, 424 bp, Bos taurus
  Clone ID: 20-LIB34-038-Q1-E1-E7
acgctgctgactttgtcttcgtgcagcccttatcactctctggagaactttctctcccctgggcacaatggcaactcttaaggaaaaattgattgcaccagttgcagaagaagagacaaggatcccaaacaataagatcactgtagtgggtgttggacaagttggtatggcatgtgccatcagcattctgggaaagtctctgactgacgagcttgctcttgtggatgttttggaagataaactcaaaggagaaatgatggacctgcagcacgggagcttattccttcagacaccaaaaattgtggcagacaaagattactctgtcactgccaattccaagattgtggtggtaactgcaggagttcgccagcaagaaggggagagtcgcctgaatttggtgcaaaggaacgttaacgtcttcaag

SEQ ID NO: 4684 - DNA, 433 bp, Bos taurus
  Clone ID: 20-LIB34-039-Q1-E1-E7
gaaacgctgggctggaggaagcacaagctggaatcaagattgccgggagaaatatcaataacctcagatatgcagatgacactacctttatggcagaaagtgaagaggaactaaagagcctcttgatgaaagtgaaagaggagagtgaaaaagttggcttaaagctcaacattcagaaaactaagatcatggcatctggtcccatcacttcatgggaaatagatgggaaaacagtggctgactttattttggggggctccaaaatcactgcagatggtaactgcagccatgaaattaaaagacacttactccttggaaggaaagttatgaccaacatagacagcatattaaatagcagagacatcactttgtcaacaaaggtccatctagtcaaggctatggttttttcagtggtcatgtatagatgtgagat

SEQ ID NO: 4685 - DNA, 271 bp, Bos taurus
  Clone ID: 20-LIB34-040-Q1-E1-E7
tccgtatctcgcgggtccacgcaagcctctagactgattctgggtatatcctcctgagaagggggaggaatatccaaagttgctccaagagaagtttcctggaatcccattcccactggatgcagctgtggaatgtcaccgcggagaatgctctcatgagggtgtcttcttcttccaaggcaaccacacgtggttctgggacttctctacaaaaaccataaagaaacgttcctggccagccgttgggaactgctcctcggccatacgatgg

SEQ ID NO: 4686 - DNA, 353 bp, Bos taurus
  Clone ID: 20-LIB34-041-Q1-E1-E7
agatttttgcaccttaaacagtacaactggagtatttgtgtgaatgtaccactgggaaaatctaacatgttgatgttaatcaatgtccttctcaccttgtggttttacagtgctcatggacacgggaaacattgtaattatccagtaataagacatggacggctatatcagtcatacattggatactttccagcacgtgtaaatcaacagtttctctataactgtgaatagtattttgtgcctccttcactatagtcctcggactacctgacttgcaaagcacaaggatggtttccagaacaactatgccttagagaatgtagtttcaataatttggtaactggatatacccc

SEQ ID NO: 4687 - DNA, 333 bp, Bos taurus
  Clone ID: 20-LIB34-042-Q1-E1-E11
agtgtgtcgagagcttctctgattatcctcccctgggccgttttgctgtgcgtgacatgagacagacagtcgctgtgggtgtcatcaaagcagtggacaagaaggcagctggagctggcaaggtcaccaagtctgcccagaaagctcagaaggctaaatgaatattatccccaatacctgccagcccagtcttaatcagtggtggaagaacggtctcagaactgtttgtctcaattggccatttaagttcaagagtaaaagactggttaatgatcaacactgcatcgtaaaaccgtcagaacgaaaggagaaggttgttgtggaccatatgtc

SEQ ID NO: 4688 - DNA, 313 bp, Bos taurus
  Clone ID: 20-LIB34-042-Q1-E1-E7
aagaaggcggaggaaccagtttctggaggcgaactatgctgttcgtcaatcgcaatccatacaatcagagttctgtagtctgacgtagtcggctcgcttccgacaaggttccagtcagtaatggctgtaactcgagcacgaggagcacctgagaaaacaacatccgcctcagcaaagtagccagtcatggtaacatgctcaggacagtctctggaattacttgccctagcgtgacaaaccgtcagactatcctgcacgaagagctgcataacattcagctcagtcatgaacttgaccgatctgatctatgaga

SEQ ID NO: 4689 - DNA, 396 bp, Bos taurus
  unsure (347): unsure at all n locations; Clone ID: 20-LIB34-043-Q1-E1-E7
cttggacataatgcttttactaatggtaaaggacaaagagctagtggaagtccttttgagcactcatttaacttcaattttgatgacttatttaaggactttgatttttttggtcaaaaccaaaatactcggtccaagaagcattttgaaaatcacttccagacacgccaggatggttccagtagacaaaggcaccatttccaggagttttcttttggaggtggtttgtttgatgacatgtttgaagatatggagaaaatgttttcttttagtggttttgacaccaccaacaatggacatacagtacagactgaaaatagattccatggatctagcaagcactgtangactgtcactcagcgaagaagaaatatggttactacatacactgactgt

SEQ ID NO: 4690 - DNA, 325 bp, Bos taurus
  Clone ID: 20-LIB34-044-Q1-E1-E11
atccaggttgtggaccgtcattgaggaccttaaacaagcagacaagaatggaatctccacgaagctcatgaacgtgtttttgaaagactccatcaccacttgggagattcgggccgtgagcttgtcatacaagaaagggatctgtgtggctgacccctatgaggtcactgtgagtgcaggatttcgttatccacctgcctcgcccctactcggtggtgcgcaacgagcaagtggagatgcgagcgatcctccagacctaccgggaggcggaagatcccaacgtgagggtggaactgccccacgatcgagccgtctgtagcctggc

SEQ ID NO: 4691 - DNA, 410 bp, Bos taurus
  Clone ID: 20-LIB34-044-Q1-E1-E7
aggaaagatggcgtcccgcaaggaaggcaccggttcatctgccacctcttccagctctaccaccggcgctgcaggcaaaggcaaaggcaaaggaggatccggagattcagccgtgaagcaagtgcagatagatggcttggtggtattaaagattatcaaacattaccaggaagaaggacaaggaactgaggtggttcaaggagtgcttttgggccttgttgtagaagatcgacttgagattaccaactgttttcctttccctcagcacactgaagatgatgctgactttgatgaagtccaatatcagatggagatgatgcggagcctgcgccatgtaaacatcgaccacctccacgtgggctggtaccagtccacatactatggctcgttcgtcaaccgggcccttctgg

SEQ ID NO: 4692 - DNA, 324 bp, Bos taurus
  Clone ID: 20-LIB34-045-Q1-E1-E7
gtgacatggctgactgctgtgagaaacaagagcctgaaagaaatgaatgcttcctgagccacaaagatgatagcccagacctccctaaattgaaaccacaccccaatactttgtgtgatgagtttaaggcagatgaaaagaagttttggggaaaatacctatacgacattgctagaagacatccctacttttatgcaccagaactcctttactatgctaataaatataacggagtttttcaagaatgctgccaagctgaatatagacgtgcctgcctgctaccaaagattgaaactatgagagaaaaagtactgacttcatctg

SEQ ID NO: 4693 - DNA, 429 bp, Bos taurus
  Clone ID: 20-LIB34-048-Q1-E1-E11
gagccacaaagatgatagcccagacctccctaaattgaaaccagaccccaatactttgtgtgatgagtttaaggcagatgaaaagaagttttggggaaaatacctatacgaaattgctagaagacatccctacttttatgcaccagaactcctttactatgctaataaatataatggagtttttcaagaatgctgccaagctgaagataaaggtgcctgcctgctaccaaagattgaaactatgagagaaaaagtactgacttcatctgccagacagagactcaggtgtgccagtattcaaaaatttggagaaagagctttaaaagcatggtcagtagctcgcctgagccagaaatttcccaaggctgagtttgtagaagttaccaagctagtgacagatctcacaaaagtccacaaggaatgctgcca

SEQ ID NO: 4694 - DNA, 250 bp, Bos taurus
  Clone ID: 20-LIB34-048-Q1-E1-E7
aacggcggctgggaccctgtacacataccctcaagacgggagggccttcatggtcctcattgccgcgcagtacagcagggctcacgtccgcgtgcgctccgcatcaccccacttccaatttggacacaccaacggcactcccgaaattcgccgtaagttgcctgcaggcaaggttccagcctctgagggtgaggatggattctgtgtgatcaatagcacagccactgccaaatatgtgagcgccaacgat

SEQ ID NO: 4695 - DNA, 410 bp, Bos taurus
  Clone ID: 20-LIB34-049-Q1-E1-E11
agtataagttcacaaactagtgacagatctcacaaaagtccacaaggaatgctgccatggtgacctacttgaatgcgcagatgacagggcagatcttgccaagtacatatgtgataatcaagatacaatctccagtaaactgaaggaatgctgtgataagcctttgttggaaaaatcccactgcattgctgaggtagaaaaagatgccatacctgaaaacctgcccccattaactgctgactttgctgaagataaggatgtttgcaaaaactatcaggaagcaaaagatgccttcctgggctcgtttttgtatgaatattcaagaaggcatcctgaatatgctgtctcagtgctattgagacttgccaaggaatatgaagccacactggaagaaatctgtgccaaagatg

SEQ ID NO: 4696 - DNA, 392 bp, Bos taurus
  Clone ID: 20-LIB34-049-Q1-E1-E7
aaggacacggtgatagagatcacggcctcctctcccagccaccctgccaactctttctactacccgaggctgaaggccctgccccccatcgccaaagtgactctggtgcggctccggcagagccccagggccttcgtcccacccgccttggacctgggggtcgggggcaacgagattgtggacagccttccagacccagagacgccgctggactgcgaggtctcgctctggtcgtcctgggggctgtgcgcaggcccctgcgggcggccgggggcgaagagcaagacgcgctacgtccgcgtgcggccggccaaccacggggcgccctgcccgcccctggaagaggaggccccgtgcgaccccgacaactgcgtctgacaccggcgcccgcg

SEQ ID NO: 4697 - DNA, 409 bp, Bos taurus
  Clone ID: 20-LIB34-050-Q1-E1-E7
cactggtatactatcttctggaagggtgttgtacatctgaggaagtgtgtatgtgtgtgtgaatgtgtgagagagaggttgcccttgtagcatatgacgaatgtctgtaccttcattcttgatgtaattattacataatcattttagcatatttggtttctaaatcattgtgcttattttttcaatctctaaagatacttaaatttggttagttaattgtattttagaaattataattttaggtgatattaatttcattaatgttttacaaagaaatctttccagtttaaaagatgttgaatattcacatgttctaacattttctttactgtaaaacatctagatttggagatacggaaagccttgttttctctgtgtggttcagctactttccatctggtattatgcg

SEQ ID NO: 4698 - DNA, 230 bp, Bos taurus
  Clone ID: 20-LIB34-051-Q1-E1-E7
ctaccgggaaagttatcaggtgcaaagcagccatagtctggaagcctggtggatcattttccattgaggaggtagaagtggctccaccaaaggcaaaagaagttcgcataaagatggtggccacggcgctctgtgggactgagatgaaaatgttgaaggataaaaatcttcagcaccaacactaccctatcattatgggccatgaaggagctggaatagtcgagagtgtg

SEQ ID NO: 4699 - DNA, 242 bp, Bos taurus
  Clone ID: 20-LIB34-052-Q1-E1-E11
ggaagagatccagagcctcctcgccgatggcgcttccatcacctgggaccatctggaccagatgccctacacgaccatgtgcatcaaggaggccatgagactttatccaccagtaccagtcatcagcagagagctgagcaagcccatcaccttccctgatggacgctccttacctgcaggaatcttagtctccctctccatttatgggcttcatcacaacccgaaggtgtggccgaacccat

SEQ ID NO: 4700 - DNA, 229 bp, Bos taurus
  Clone ID: 20-LIB34-052-Q1-E1-E7
gcagcgcccgcgttacacatccgccatgctccccccatcgctcatcatgctgttatggtttcgctgccacattgctatcgcacgactaatatgctgcattccaaatgagctaccgtattccactgtggctccactgaaacggtcatatgagcccagggaccatatatccttctcctgctaaccgggctacgtgtcccggggagggatcccgcgctttacaatcccgctc

SEQ ID NO: 4701 - DNA, 237 bp, Bos taurus
  Clone ID: 20-LIB34-054-Q1-E1-E7
cgccatgctgacccccaggattgcagccctcttgactctgcttctggccagcagctccctgggtcagcgggtgcggagacccccgcggcccccatcccctatcagcaccatccagcccaaggccaactttgacgcccagcagttctcagggacctggctcctggtggccgtggcctccccatgtcgctacctgcaggagcagggccatcgggctgaggccaccactctgcacgtggc

SEQ ID NO: 4702 - DNA, 347 bp, Bos taurus
  Clone ID: 20-LIB34-055-Q1-E1-E7
ctgctgcatcttagatgaaagatttggtagttattgcccaactacctgtggaattgcacatttcctgaataattaccacaccagtgtacacacagatctacgaactttggaaggcatcttatatcaggttgagaacatgacatcagaagccagagagctggtcaaagcaatctagatcagctataaccctgatcaaccatcagagccaaatatcatagagagtgctaccaagaattccaagagtatgatggaagaaattatgaaatatgaaacactgatatcaatacatgaatcaacaattcgatttttgcaagaaatatatgactcaaagtgtcacaaaatcgtta

SEQ ID NO: 4703 - DNA, 342 bp, Bos taurus
  Clone ID: 20-LIB34-056-Q1-E1-E11
gtcctagaagtggtcgccatcgccatgcgctgggtccgcgcgctgctgaagaatgcgtccctggcaggggcacccaaatacatcgagcacttcagcaagttctccccatccccgctgtccatgaagcagtttctggacttcgggtccagcaatgcctgtgagaaaacctcgttcactttcctcaggcaggagctgcctgtgcgcctggccaacatcatgaaggagatcaacctgcttcctgaccgggtgctgagcacaccctcggtgcagctggtacagaactggtatgtccagagtctcctggacatcatggagttcctggacaaggaccctgaggaccat

SEQ ID NO: 4704 - DNA, 369 bp, Bos taurus
  Clone ID: 20-LIB34-056-Q1-E1-E7
caggaactgtctgggcattccactccgggagctatctcgctagtgcaaatgtctgccggccagaggttcgcctttgcaatatgcattctagaaataagtctcctgagagcggggcccactcccagctacgacccagcagaaagacaaggcacaccattgcccatagactgcaggatgagctcctggagtgagtggtcgaaatgtgacccttgcctcaaacaaatgtttcgttcaaggagcattgagatctttggacaatttaatgggcgaaagtgtgtggacgccgtgggagaccgacagcagtgtgtacccacagaggcctgcgaagaccccgaggagggctgtggcaacgatttccagtgcggtaca

SEQ ID NO: 4705 - DNA, 219 bp, Bos taurus
  Clone ID: 20-LIB34-057-Q1-E1-E7
aagaaaaatttggattttaaaggtattaaaatatttttgttttgtacgagagtttgttgctctgtatgactcctgtatgcattgtatattgcaatttattactgtcagagatttgtagacagtttcttattttcatattgaatcatgttacttttgtaattcaagtaagcagctgggttaattcatgatgtttgcccttttaataaaatataagggtaa

SEQ ID NO: 4706 - DNA, 221 bp, Bos taurus
  Clone ID: 20-LIB34-058-Q1-E1-E11
aatctccactaaactgaaggaatgctgtgataagcctttgttggaaaaatcccactgcattgctgaggtagaaaaagatgccatacctgaaaacctgcccccattaactgctgactttgctgaagataaggatgtttgcaaaaactatcaggaagcaaaagatgccttcctgggctcgtttttgtatgaatattcaagaaggcatcctgaatatgctgtct

SEQ ID NO: 4707 - DNA, 250 bp, Bos taurus
  Clone ID: 20-LIB34-058-Q1-E1-E7
ctcccaggcccaggcacacgtcaacatctggtgtaacttcttattctcaagtgactggaataaccggtgagtctgtcaggctaccctgcttatatactggacaaatcacaactgcatgctggggcccaagggaatgttcttggtggatctgcagagaagacattatccagactgatggatatttagtcacttttcataaggacagacgttatcaactaagatgatatattggcgaaaggaatttgacctt

SEQ ID NO: 4708 - DNA, 235 bp, Bos taurus
  Clone ID: 20-LIB34-060-Q1-E1-E7
gagatcgatgtcaagtggctgaacgagaacgctgtggagaaggtgaacatcaagccccaggtggatcgctacttgttgaagaacggacgccgcatcatcctgctggccgagggccggctggtcaacctgggctgtgccatgggccatcctagctttgtgatgagcaactccttcaccaaccaggtcctggcgcagatcgagctctggacccacccagacaagtaccccgtcggag

SEQ ID NO: 4709 - DNA, 358 bp, Bos taurus
  Clone ID: 20-LIB34-061-Q1-E1-E7
acggacgcgtgggggagcttcagtagatctaaccattttctctttacacttagcaggagtttcctcaattttaggagccatcaacttcattacaacaattatcaacataaagccccccgcaatgtcacaataccaaacccctctgttcgtatgatccgtaataattaccgccgtactactactactctcgctccctgtattagcagccggcatcacaatgctattaacagaccggaacctaaatacaaccttcttcgacccggcaggaggaggagaccctattctatatcaacacttattctgattctttggacaccccgaagtctatattttaatcttacctgggtttgggataatc

SEQ ID NO: 4710 - DNA, 163 bp, Bos taurus
  Clone ID: 20-LIB34-062-Q1-E1-E7
cgggcacagcccaaggtttcccgagtgaggatggagaagggaatgaacgttctacatgactttgggatccagtcaacacactacctccaggtgaattaccagaactcccaggattggttcatcttggtgtctgtgattgcagatctcaggaatgccttttatg

SEQ ID NO: 4711 - DNA, 292 bp, Bos taurus
  Clone ID: 20-LIB34-063-Q1-E1-E11
cccacgcgtccgaaagaatgccctgtactgaagactatctgagcttgatcctgaaccggttgtgcgtgctgcatgagaagacaccagtgagtgaaaaagtcaccaagtgctgcacagagtcattggtgaacagacggccatgtttctctgctctgacacctgatgaaacatatgtacccaaagcctttgatgagaaattgttcaccttccatgcagatatatgcacacttcccgatactgagaaacaaatcaagaaacaaactgcacttgttgagctgttgaaacacaagcc

SEQ ID NO: 4712 - DNA, 322 bp, Bos taurus
  unsure (259): unsure at all n locations; Clone ID: 20-LIB34-063-Q1-E1-E7
tactgaaaattgttccagggaagatgaagttattcggaaaatgtgaaccgtgccacatgctgatgtgaaagaaattacggtaacttgtgcttaactgggacggtcgcacaaatacttgcctgagagccaggcctccgggagggcagttgacatgtctgattttgtgggtgttgtacaacaaccaacaactactgtttctgtccacccgactgtagtaataccatttcccccccgttaccataaacacttttattcacanaaaacacaagaatttcaagtgcctgccacttgaaatacttgcgcttctctatctaaacagaca

SEQ ID NO: 4713 - DNA, 439 bp, Bos taurus
  Clone ID: 20-LIB34-064-Q1-E1-E7
acaatactccctttttaaactagtgacgagaacgtcgtctgttgatcccattccttctggccctgcagcgtttggggccactgtcccttccagtccctggccattgctccccgaatctctcccgacagaatgcagccctcctccgtccccctctccctccctcccagtgaccgtggcccctgggggccttcctgtgggacccagagctgcatcattgcccggcggtgggctgaggactgtggcctggctggctggccagcgtggtgctcctcaagactgcagcgctgagacataacctggcctccaagtagaaacaggggctgcagcagggcaggaagcccaccgccctccacataggaaccacaaccaggggaccccagctgcgtgaggcgtcagagccgcctggtcaagatgagcagacctgcctgtgtccttcaag

SEQ ID NO: 4714 - DNA, 215 bp, Bos taurus
  Clone ID: 20-LIB34-065-Q1-E1-E7
caaaatctatcaggaagatatctttccttgtttaaccttctcaaaaagtgagttggcttcagctgttctggaggctgtggagaacaacactttaggcattgaaccagtgggattacaacctgttcgattcgtgaaagcatctgcagttgaatgcggaggaccaaaaaaatgtgctctcacaggtcagagcaagtcctgtaaacacagaattaaac

SEQ ID NO: 4715 - DNA, 252 bp, Bos taurus
  Clone ID: 20-LIB34-066-Q1-E1-E7
cggtcccgtgggtgtgtacagcagttaggaacctgcagacgaacatggcgctgctctgggggctcctgtcgctcatcctctcctgcctgtcaagcctgtgctcatcgttctctcctgtgagcaccatggaccccttggatctgcagctaatggacggacaggcccagcagaatctgaccacactttccctcctcacgctgaacaaccacgatccatgtggccacattgccccgaagaacgccccagactact

SEQ ID NO: 4716 - DNA, 198 bp, Bos taurus
  Clone ID: 20-LIB34-067-Q1-E1-E11
gtcgcccagcgagccgcaaccgggctccagcatgacggaccaggcagccttcgacaccaatatcgtcaccgtgacccgcttcgtcatggaagagggcaggaaggcccgtggcacgggcgagatgacccaactgctcaactcgctttgcaccgcggtcaaagccatctcaacggccgtgcgcaaggcgggaatcgcgca

SEQ ID NO: 4717 - DNA, 232 bp, Bos taurus
  Clone ID: 20-LIB34-067-Q1-E1-E7
agaagagacaacactctcttccctagcccagccaggtgtagccattacctttcctgactttcaggactcagatctcattgcaactgtgatgcctaatacactaccacctcacacagagagtgatgatgactggatccctgacatccagacagagccaaatagccttgcatttaaattgatttcagattttccagaaacaacctcccccaaatgtcctagtcgcccctggaag

SEQ ID NO: 4718 - DNA, 211 bp, Bos taurus
  Clone ID: 20-LIB34-069-Q1-E1-E7
cggacgcgtgggcttaggagcaggtccgggctgaagtcgcctcccagatggcctccaggctgaccccgctgaccctcctgctgctgctgctgctggctggggacagagtcacctcagatatgatcgtcggcccagggaacttacaagaaggggaaagtgaaggagacagccagaaaggaggtattctcgatggtgagtccattcaaggcaa

SEQ ID NO: 4719 - DNA, 202 bp, Bos taurus
  Clone ID: 20-LIB34-071-Q1-E1-E7
aactgtcttccaaccaaatcacctcacctttcttgacttgcgcacagtcttctgagatactcatgattcgtcccagggcatgccccaaggcactgaccaccgctctcactggggatcagccatccgcccgacctctgccaatggtgttgcggtatccctcagatccaacgaggattactagaatgttctgtcccatcatgct

SEQ ID NO: 4720 - DNA, 383 bp, Bos taurus
  Clone ID: 20-LIB34-072-Q1-E1-E7
aggcagctgatgggccacccgccgtccaggcagggcttcttccaggtcccgctgctgccctagcccctgccctgcaaataaagccgccgagcgtgcctggcgcccaggcgccaaaggcgaaaaaaaaaaaaaaaaaaaaaaaaaaaaaaaaaaaaaaaaaaaaaaaaaaaaaaaaaaaaaaaaaaaaaaaaaaaaaaaaaaaaaaaaaaaaaaaaaaaaaaaaaaaaaaaaaaaaaaaaaaaaaaaaagggggggcaccccaaagggttcaaacttaatttagcctggaatgaaacttaaaacccctcaaaaagggcccccaaaatcaaatccaggggccgccatttaaaaacttagtaacgggaaaaacccgggttttccca

SEQ ID NO: 4721 - DNA, 121 bp, Bos taurus
  Clone ID: 20-LIB34-073-Q1-E1-E7
aaatctgacgtaaaaccatgctaagctggttttcacactgaaaattaaatgtcatgcttatatgtgtctgtctgagaatctgatggaaacggaaaaataaagagactgaatttaccgtgtc

SEQ ID NO: 4722 - DNA, 333 bp, Bos taurus
  Clone ID: 20-LIB34-074-Q1-E1-E7
acccacaagtcaacgatgcatcgtacgtgatctatatggaatctactgcccatcaacttgtggcagtacagatttctggagtaactaccagacatgtatatacatcagattcaccatcattggcaggcatcttatctcaggtttaaaacaggggatcatttactagaaagctgctcaaatcaatccaaatcagatataacactgattacccatgacatccatgtaacatagagagtgctacgatcaattccaagaatatgagggaatatattatgatatatgaaacattgataacaacacatgaatcaatgaatcaatttttgcaggaaatat

SEQ ID NO: 4723 - DNA, 419 bp, Bos taurus
  Clone ID: 20-LIB34-075-Q1-E1-E7
agcatcatgaaatgaagattaacgatgaatctacttactaatgttacaaattatacttctgtaacacttgtattgctggatgtgggaaaacagacatgccttactgagttaactcagaagaataaaagtagagaaataacatacgaaagatgagcacacctaattcaactaaaccctattaatttaatgatgtgaagtattttattatgtcagatatgtgatttttgctagaataaaattaaagtatttaaatttgaatggcagagataaaggagaagaaactggaccaaattttatatagataatatttttctagtggaagtagcatgcagattttccttggtgtgattccaattactgatttttttaacagttaaatgtatgcattaaattacattacctaaataaaagtgaagaaa

SEQ ID NO: 4724 - DNA, 445 bp, Bos taurus
  Clone ID: 20-LIB34-076-Q1-E1-E7
ccgggtggacgcacgaatccgtccaggctcggagccccgggcccgccgacaccatgagttggtcctcgcaccctccgagtgtaatcttctacattctttcattgctttcttcatcatgcctggcatatgttgctactcgagacaactgctgcatcttagatgaaagatttggtagttattgcccaactagctgtggaattgcagatttcctgaataattaccataccagtgtagacaaagatctacgaactttggaaggcatcttatatcaggttgagaacagagcatcagaagccagagagctggtcaaagcaatccaaatcagctataaccctgatcaaccatcatagccacataacatagaaagtgctaccaagaattccaagagtatgatggaagaaattatgagatatgaaacactgataacaacacatgaatcaacaat

SEQ ID NO: 4725 - DNA, 235 bp, Bos taurus
  unsure (20): unsure at all n locations; Clone ID: 20-LIB34-077-Q1-E1-E7
gtccggatatgggacttggngggcaagatcattgtcgatgaactgaagcaagaagttatcagtaccagcagtaaggcagagcctccccagtgtacctctctggcctggtctgctgatggccagacactgtttgctggctacacggacaacctggtgcgagtgtggcaggtaaccatcggcacccgctaggaacaaacatggcagagctttaaaaattaaaaaaactggttttctg

SEQ ID NO: 4726 - DNA, 449 bp, Bos taurus
  unsure (430): unsure at all n locations; Clone ID: 20-LIB34-078-Q1-E1-E7
cgtatgagaagaacgcggttggccaatcgcaagccagaagatgaaggttctgtgggttgccgtggtggtcgcgcttctggcaggatgccaggcggatatggagggagagctggggcccgaggagcccctgactacgcagcagccccgggggaaggacagccagccttgggagcaggcgctgggccgcttctgggattacctgcgctgggtgcagaccctgtctgaccaggtgcaggaggagctgctcaacacccaggtcattcaggaactgacggcgctgatggaggagaccatgaaggaggtgaaggcctacaaggaggagctggagggacagctaggccccatggcccaggagacacaggcccgcgtgtccaaggagctgcaggcagcccaggcccggctaggctccgacattgaggacttgcggaancgcctggcacagtaccgaa

SEQ ID NO: 4727 - DNA, 413 bp, Bos taurus
  Clone ID: 20-LIB34-079-Q1-E1-E11
aggccggtgctgcgggagggcccggaggccccgggggccccggaatgggaggccgcggtggcttccgcggaggcttcggtagtggcgtccggggccggggtcgcggccggggtcggggccggggcagaggccgcggagctcgcggaggcaaggccgaggacaaggagtggctccccgttaccaagctgggccgcctggtcaaggacatgaagatcaagtctcttgaggagatctaccttttctctctgcctatcaaggagtctgagattattgactttttcctgggagcatccctgaaggatgaggttttgaagattatgcccgtgcaaaagcagacccgtgctggccagcggaccaggttcaaggcgtttgttgctatcggggattacaacggacatgtcggtctgggtgtc

SEQ ID NO: 4728 - DNA, 386 bp, Bos taurus
  Clone ID: 20-LIB34-079-Q1-E1-E7
gtgaaaaaccttggcaccatagccaagtctggaacaagcgagtttttaaacaaaatgactgaggcacaagaagatggccagtcaacatcggaactgatcggtcagtttggtgttggtttctattctgccttccttgtggcagataaagttattgtcacgtcaaaacacaacaatgacacccaacacatctgggagtccgactccaatgaattttctgtaattgctgaccccagaggaaacactctcggacggggaacaaccattacccttgttttaaaagaagaagcatctgattaccttgaattggatacaattaaaaacctcctgaaaaaatattcacagttcataaactttcctatttatgtatggagcagcaagaccgaaac

SEQ ID NO: 4729 - DNA, 390 bp, Bos taurus
  Clone ID: 20-LIB34-080-Q1-E1-E7
agggctcaggtctaaagtttcagcttggccatcaagccaagcagacttgcagcagaagccaggagaggccctcctgccccccagccccgggtcaccatggggattggtcacaacccccgactctgcctggtacccttgatcctgggcctcttgtgtggaggtgtgggcatgacgccattgcctgaggctgggccccaaagcccctgctctctggagggagtagagatcaaaggtggctccttccggcttctcaaggcgggccaggtgctggagtacttgtgtccttctggcttctacccataccccacgcagattcgcacctgcagatccacagggtcctggagcaccctgcagactcaagacagaaagattgtcaagagggctgaatgc

SEQ ID NO: 4730 - DNA, 411 bp, Bos taurus
  Clone ID: 20-LIB34-082-Q1-E1-E11
agctctctctctatgccttttgttcatggtttagtactagatgggcagggacagggggtccacaagggggtgagggatgttggcgagcactttggtgagccagcgttgcttcagcgagttgaaaagagcttcccacatttcagctctgtcttcctccagttctcagcacggtggttgctcttcagtcacaccaagatctgactccaaaaagtatttttaaatatccatggtttctctttatattgcagccaaccctgataatgcttgttagcacctgtcaccagctctcccaagggtacccatcccgtcaggttcacagacaaatgtcagggaagttgcatgaacactgcgatgggagagtcaggaatagcccggcctgccagtctcagtcctcaccttcctccccgaaca

SEQ ID NO: 4731 - DNA, 400 bp, Bos taurus
  unsure (350): unsure at all n locations; Clone ID: 20-LIB34-082-Q1-E1-E7
agaagccacaatggccgcccagtacctcagcgaacccatgaccagccacgggcttacaaacccaggagattcccagctgagacttgtcttagtgggtaagactggggcaggaaaaagtgcaacaggaaacagcatcctcagagaggaagtgtttctgtccagcttttcggctgtatccatcaccaagcactgtgagacaggaagcagcacctgcaaggggagagaagttgtcgttgtggacacagctggcctctttgacacggaggctccaaatgctgatactgtcaacgagattacccgctgcatggtgctgatctccgcggggcctcatactctgcacctgatcatcncactgggccgttacacacccgaaggctatgaagccacagagaagatcctg

SEQ ID NO: 4732 - DNA, 381 bp, Bos taurus
  Clone ID: 20-LIB34-083-Q1-E1-E11
gcacagtctctccctcaaggactgttttgttttcatggaaaaattcagacattacataaacagagaggatgatataatgtcacgtacatatcagcagcttcagtcattatcaacatggggccaatataattattccctacgtcctaacccctttcctcttttgggtttgttttgtagcaaatcttacacatcctgttattttaactctaagaatttttaaaaatacttaaaatggcatatcacacttaaaataaacataattctttaatattatccaatatcaattattactcccctgctactgctgctgccaagtcacttcagtcgtgttcgactccgtgtgaccccatggacggcaaccaacaaggctcccccatccct

SEQ ID NO: 4733 - DNA, 389 bp, Bos taurus
  Clone ID: 20-LIB34-084-Q1-E1-E7
gatggcatccaggcagtgactgtcttctttaaaggaatttacgagctcaggttcagccaacaccgagaccaccaaagtgacgggcagcctggaaaccaagtacagatggactgaatatggtctgacgtttacagagaaatggaacactgacaacacgctgggcacggagattactgtggaagatcagcttgcacgtggcctgaagctgaccttcgattcatccttctcaccaaacactgggaaaaaaaatgctaaaatcaagacagggtacaagcgggaacatatcaacctgggctgcgatgtggattttgacatagctggtccttccatccggggcgctctggtgctgggttatgaaggttggctggctggctaccagatgaattttg

SEQ ID NO: 4734 - DNA, 402 bp, Bos taurus
  Clone ID: 20-LIB34-085-Q1-E1-E7
agccaactggctcccaattcctggtgaaactcctaaagggagactgttaaatcatgaaattaatcaccatccttttcctttgttccaggctgctaccaagtttaacccaagagtcttctcaagaaatcgactgcaacaaccaggatgtatttaaagctgtggacgctgctctgacaaaatacaacagtgaaaacaagagtggcaaccagtttgtattgtaccgcataaccgaggttgccagaatggataatcctgacacattttattccttgaagtaccaaatcaaggagggcgactgtccttttcaaagtaacaaaacttggcaggactgtgactacaaggactctgcacaagctgccacaggagagtgcacagcgaccgtggccaagagagggaatatga

SEQ ID NO: 4735 - DNA, 441 bp, Bos taurus
  Clone ID: 20-LIB34-086-Q1-E1-E7
gctatctaatgttgattcttttttcactttttcttctcggtgttagtgatactagagatgatagcaaacaattttggtccaaaagcaagtcatggctaccatgtgcacatacaagcgactcatcaccgggaaagcatggggaagctcccaggctcgtcccgggagagaccgccttgtggcccacgtctcctcccagaacaagggaagcacggttggccagtttgctcacatgccacaccactggtgattgtttctagttctgtttagaagaggcagtggctacccggccagcctatctgaaggagtctccaccgcagaggactcggtagtgccgtgtggtttccacattcttcatcatggaggcagatgtacacctgaaatggggaaaaacaaaagatgtctttatttagcctgttgtgtgctggtctaagtgagctgaga

SEQ ID NO: 4736 - DNA, 364 bp, Bos taurus
  unsure (307): unsure at all n locations; Clone ID: 21-BOVMS1-002-Q1-E1-F1
atgcgacgtcatagctcttctatagtgtcacctaaattcaattcactggccgtcgttttacaacgtcgtgactgggaaaaccctggcgttacccaacttaatcgccttgcagcacatccccctttcgccagctggcgtaatagcgaagaggcccgcaccgatcgcccttcccaacagttgcgcagcctgaatggcgaatgggacgcgccctgtagcggcgcattaagcgcggcgggtgtggtggttacgcgcagcgtgaccgctacacttgccagcgccctagcgcccgctcctttcgctttcttcncttcctttctcgccacgttcgccggctttccccgtcaagctctaaatcgggggctcc

SEQ ID NO: 4737 - DNA, 177 bp, Bos taurus
  Clone ID: 21-BOVMS1-003-Q1-E1-F1
cttaatccaaccaagcggtggctgaaaaaattcaacccccaaccttcaatttcccccactactgcagctgcctccaggcttgttgctatagagcctacctgtatgtcaatagacaacagctgaagcaaaaaataaacaaaaggtatacaaaaagatgaaatttgcaaaccataacct

SEQ ID NO: 4738 - DNA, 436 bp, Bos taurus
  Clone ID: 21-BOVMS1-005-Q1-E1-F1
ggggtgtactcctttgatttataagggattttgccgatttcggcctattgggtaaaaaatgagctgatttaacaaaaatttaacgcgaattttaacaaaatattaacgcttacaatttaggtggcacttttcggggaaatgtgcgcggaacccctatttgtttatttttctaaatacattcaaatatgtatccgctcatgagacaataaccctgataaatgcttcaataatattgaaaaaggaagagtatgagtattcaacatttccgtgtcgcccttattcccttttttgcggcattttgccttcctgtttttgctcacccagaaacgctggtgaaagtaaaagatgctgaagatcagttgggtgcaccagtgggttacatcgaactggatctcaacagcggtaagattcttgagagttttcgccccgaagaacg

SEQ ID NO: 4739 - DNA, 397 bp, Bos taurus
  Clone ID: 21-BOVMS1-005-Q1-E1-F9
gtcggaaacagggtcgaccacgcgtccgttttatttattttttttttttttttttttttttttttttttttttttttttatgtgttgtcatgcagatataggctgactaggagagtgaatacataggcttggattatagctactgcaaactctagaattgttagtaggattagaatggtgaatgtaattagagctgttgtagtgctaatgcttattagtgcaagtgtagctcctccgattaggtgaattaataggtgtcctgcagtgatgttagctgttaaccgcacggcgagggctataggttgaataaaaaggctgatagtttcaataattactagtattgggattagtggggtgggtgttccttgtggtaagggtggatatagaagatactaaa

SEQ ID NO: 4740 - DNA, 260 bp, Bos taurus
  Clone ID: 21-BOVMS1-006-Q1-E1-F1
atgcgacgtcatagctcttctatagtgtcacctaaattcaattcactggccgtcgttttacaacgtcgtgactgggaaaaccctggcgttacccaacttaatcgccttgcagcacatccccctttcgccagctggcgtaatagcgaaaaagcccgcaacgatcgcccttcccaaaagtttcccaacctgaatgggcaaatggaacccccctggaaccgggcaataaaccccgccggttttgtgggtaaccccaaccttaa

SEQ ID NO: 4741 - DNA, 232 bp, Bos taurus
  Clone ID: 21-BOVMS1-007-Q1-E1-F1
catcatgctcagtacgacgatggcatgtgacctcaatggtatcggtatccagttgtcccatgctaggcgcatggctgctgatgtcctgtagaactacatgatcactcaagccatcctcaatgacactcaaatgcacctggatcatgcccagcatggccatcaggacttgaatgagcatctggacatggtggagcgcatttccatcctgctgcaggctgagatcgaggagctc

SEQ ID NO: 4742 - DNA, 367 bp, Bos taurus
  Clone ID: 21-BOVMS1-008-Q1-E1-F1
atgcgacgtcatagctcttcaatagggtcacctaaattcaattcactggccgtcgttttagaacgtcgtgactgggaaaaccctggcgttacccaacttaaccgccttgcagcacatccccctttcgccagctggcgtaataacgaataggcccgcaccgatcgcccttcccaacagttgcgcagcctgaatggcgaatgggacgcgccctgtaacggcgcattaagcgcggcgggtgtggtggttacgcgcagcgtgaccgctacacttgccagcgccctagcgcccgctcctttcgctttcttcccttcctttctcgccacgttcgccggctttccccgtcaagctctaaatcgggggctccctt

SEQ ID NO: 4743 - DNA, 475 bp, Bos taurus
  Clone ID: 21-BOVMS1-009-Q1-E1-F9
cgggtcgatcacgcgtccgccaagattccaagatgcaacatcaccaatcatagaagaactacttcactttcatgaccacacgctaataattgtcttcttaattagctcattagtactttacattatttcactaatactaacgacaaagctgacccatacaagcacgatagatgcacaagaagtagagacaatctgaaccattctgcccgccatcatcttaattctaattgctcttccttctttacgaattctatacataatagatgaaatcaataacccatctcttacagtagaaaccataggacatcagtgatactgaagctatgagtatacagattatgaggacttaagcttcgactcctacataattccaacatcagaattaaagccaggggagctacgactattagaagtcgataatcgagttgtactaccaatagaaataacaatccgaatgttagtctcctctgaagac

SEQ ID NO: 4744 - DNA, 351 bp, Bos taurus
  Clone ID: 21-BOVMS1-010-Q1-E1-F1
atgagacgtcataactcttctatggtgtcacctaaatccacttcactggccgtcattttaaaatcacgggactgggaaaaccctggtgttacccggcataaccccgttgcaacacatctccctttcgctagatggcgtcacacttacgaggcctgcagcgatagcccttccgaacagttgcgtagcctgaatgagcaattggacaccccctgtggcggcgcataaaccccctgtggtgtggcagttacccccagcgttatcgcgacaattgccagcgtcctagcgaccgttcctttcgctttattcccttcctttttcgccatcttcccctgctttccccgtcaatctcca

SEQ ID NO: 4745 - DNA, 334 bp, Bos taurus
  Clone ID: 21-BOVMS1-011-Q1-E1-F9
aatgaactagccctaaagatctttatttctgtcttccataagacaagatatggcctacatacctcattccttgggctactgctgtagtcttacattcatgattatgaatttgaaagtaaatactaattatggaaatagtgctataggcctgcatgcctgaaacattttaattggtttaaagtccttttgtagaatggggtacttgatttcctttaaaggaaacatgttttctcattgaattacagggaatttttattaattccaaaaatgcagtcactttaaattatgtaagtataagatcagttccttggataaactccaagctcatttgttt

SEQ ID NO: 4746 - DNA, 99 bp, Bos taurus
  Clone ID: 21-BOVMS1-012-Q1-E1-F1
gctcagtggaagtcacctacccacccctgctgcttcgactccaggccatgcccggtgctggagtgtgctaacctttaccattaaacacaatgtttctct

SEQ ID NO: 4747 - DNA, 301 bp, Bos taurus
  Clone ID: 21-BOVMS1-014-Q1-E1-F1
acgcgtccagaacaaagttaagggactccagtctagattccaatccgagacgatctgtccctgcgcaaccctgtgtctcatacaagcagtgggtgtccagtccatgacactggtgcttttttataggagacaacagagccggagctcactccttcatcctggctctgtatgtacctgtgatgtatgtgagatagtgtaaataggatgcgaacgtgtaccaccgcttctggccctggcttgtacataatgctagtcgacctcacacgcgtcgaatactcacctgcgacttctccatctgagt

SEQ ID NO: 4748 - DNA, 399 bp, Bos taurus
  Clone ID: 21-BOVMS1-015-Q1-E1-F9
ctcagacgttgtgaaagtgactctgactcatgaagaagaggcctgtttgaagaagagtgcagatacactttgggggatccagaaagaactgcagttttaaagtcttctaatgttgtatcatttcactgtctaggctacacaggattttagttggaggttgtaattcatattgtcctttatatctgatctgtgattaaaacagtaatgttaagacagcctaggaaaaaatcaatttcctaatgttagaaataggaatggttcataaaaccctgctggatggcaaggaatggttcatgaaaccttgcagctgtaccctgatgctggatggcacttaccttgtgtggtcctaaattggtttgtcaaataattcaacttcctcaagaggtaccactgcccatg

SEQ ID NO: 4749 - DNA, 239 bp, Bos taurus
  Clone ID: 21-BOVMS1-017-Q1-E1-F1
cttcggcttaaaccccaatcccggccggtcaacataaactccagcctaattctctgaccccatcacccagccccttgaagacagcagagtgtcttgcttgccctgagaaggaagtgtgggccgggtgggacggccacacccagccctagggaggcatggaggcatggtgtctgcaacataaatgtcccttctcaggtaggggagtgacacctggtttaataaaggatttctcacatcac

SEQ ID NO: 4750 - DNA, 410 bp, Bos taurus
  Clone ID: 21-BOVMS1-019-Q1-E1-F9
gaagagtagactggctgcaacatttacatttgcggaaggtaagcacatcatgtctaactatttgaggtcataggatcatgataggtcaaggagataggatggaccttatttaaagatgacacaagtcaatctgcctaaatctgagtaacatctattacttctcaaaatggctctgaagtatccaatcatgatggtctcagttcagtgtcatctaattaacatgtcactacgagatggtatgaaattactaacatgactcgccagtcgatttcgtctaagtcaggtgtatatatggaactatcaggtcgaatccatggtactgattggcaatcacagcttgcagctcaactggaagatgtttccgcaagttcaggaatagggaaatcagatagcacaaaggaaagatgtat

SEQ ID NO: 4751 - DNA, 447 bp, Bos taurus
  unsure (275): unsure at all n locations; Clone ID: 21-BOVMS1-021-Q1-E1-F1
ccacccactaataaaaattgtaaacaatgcattcatcgaccttccagccccatcaaacatttcatcatgatgaaatttcggttccctcctgggaatctgcctaatcctacaaatcctcacaggcctattcctagcaatacactacacatccgacacaacaacagcattctcctctgttacccatatctgccgagacgtgaactacggctgaatcatccgatacatacacgcaaacggagcttcaatgttttttatctgcttatatatgcacgtangacgaggcttatattacgggtcttacacttttctagaaacatgaaatattggagtaatccttctgctcacagtaatagccacagcatttataggatacgtcctaccatgaggacaaatatcattctgaggagcaacagtcatcaccaacctcttatcagcaatcccatacat

SEQ ID NO: 4752 - DNA, 362 bp, Bos taurus
  Clone ID: 21-BOVMS1-023-Q1-E1-F1
gtccgctagacttatcctatttatttctagggtgattttttttttttttttaaagacttgtgcaatacattttgaggtgaaatttagtggatttttttctgataaattagagcatttaattgactattttatccagattgatttgttgaatatttgctgaagactagttctttaagctctgacatatgataaatccaaatggcagtacctcattgtttacttagcttttgtacttatatttttcagaggaaaaaatactactgtaaattgtaaatagccaatacataactgtatcgtatgcaaatctgtgactgttggcaatatcatctcaagacagaaaaattaagtttatttactgtatg

SEQ ID NO: 4753 - DNA, 459 bp, Bos taurus
  Clone ID: 21-LIB188-001-Q1-E1-F1
tggccgcgcgatacacatactcctacccactttcggccaaggaaccgaggtggagatcaaaaggtctgatgctgagccatccgtcttcctcttcaaaccatctgatgagcagctgaagaccggaactgtctctgtcgtgtgcttggtgaatgatttctaccccaaagatatcaatgtcaagtggaaagtggatggggttactcagagcagcagcaacttccaaaacagtttcacagaccaggacagcaagaaaagcacctacagcctcagcagcatcctgacactgcccagctcagagtacttggagtcggtcccgcccagcatcagctcgcccccgggctgggctttcgggtccctgttcacgaagaatgagaagacgttcttgtccaccaacttctgctgcatcacgttgtcgaagacaggcagcacgttgttgacggagatgcgggggtaggcatg

SEQ ID NO: 4754 - DNA, 374 bp, Bos taurus
  Clone ID: 21-LIB188-003-Q1-E1-F1
gccgccggatccgattgctcaaagcacatccaggggcagcagaagaagccctttgagcagcactggaggaagcacacgctctcctacgttgacatcaagactgcctgcgcctcggtgcatggtgccaaccgtctgggtgcaaactcgctcctggacctggttgtcttcggccgggcgtgcgccctgagcatcgcagagtcctgcagacccggagataaagttccctcgattaaaccaaatgctggggaagaatctgtcatgaatcttgacaaattgagatttgccaatggaagcataagaacatcggaactgcgactcaacatgcagaagtcgatgcagaaccatgccgccgtgttccgttgtgggagtgtgct

SEQ ID NO: 4755 - DNA, 394 bp, Bos taurus
  unsure (64),(369): unsure at all n locations; Clone ID: 21-LIB188-003-Q1-E1-F9
cggatactgcgccaactcgtagagcacgttggtgcgtggcgggttggtgatgtccacgtagtangtgagggccgtgcggtaagaagtggggcatgggaatgggtgcttcttgttggactcctcatcaaagttgttcatggacatgatgatgttcaagtcggcacccaggatctcgccaagctggttcaccagggcagagtcattagccggataaacagccacatggtctccagactcatacctgattttggagtcccaaaatgtctaattccaggtgcatgacgtgccgctcggttccctggttcagcttccggttggtggtgacaacagccaggaatgggttcttggcgtcgaacggaggtttctggntctcgtagctcttcaagcgggccat

SEQ ID NO: 4756 - DNA, 422 bp, Bos taurus
  Clone ID: 21-LIB188-005-Q1-E1-F1
tggcggcgggattggtcgcggacgaagtggttaaggaggaggcatacaggggccgcagcaggtcagctaaagggcagcgcgatcaaaatactgcttcagtgggcgaagtggaactggtgcagaagggcatacattacagtgatgccgaaacgtgggaaaaagggagcggtggtcgaagacgcggaagagcccaagactgagccagaggcgaagaagagtaaggcaggagcgaaaaagaacgaaaaagaggcagtaggagagggcgcagttctgtatgaagaccccccagatcagaaaacctcacccagtggcaaatcagccacactcaagatctgctcgtggaatgtggatgggcttcgagcctggattaagaagaaaggtttagattgggtaaaggaagaagccccagacatcctgtgcct

SEQ ID NO: 4757 - DNA, 386 bp, Bos taurus
  Clone ID: 21-LIB188-006-Q1-E1-F1
tgggcccgggctacgatggaactacaacctataacccagccctgaaatcccggctcagcatcacgaaggacaactccaagagccaagtctctctatcactgaacaacgtaggaacggaagacacggccacatactactgtgcaagagtgatcagtgcctggggccaaggactcctggtcaccgtgtcctcggcctccaccacagccccgaaagtctaccctctggcatccagctgcggagacacatccagctccaccgtgaccctgggctgcctggtgtccagctacatgcccgagccggtgaccgtgacctggaactcgggtgccctgaagagcggcgtgcacaccttcccggctgtccttcagtcctccgggctctactctctc

SEQ ID NO: 4758 - DNA, 377 bp, Bos taurus
  Clone ID: 21-LIB188-007-Q1-E1-F9
gggatacattaaccatgcccatccatgggcatcatacgaactctttgaacatcaccggtggaatcacaggcactcctacgttgacatcacgagtgcatgcgcctcggtgcatggtgccagccgtctgggtgcagagacgcgcctgcgactggttgtcttcggccgggcgtgcaccctgagcatcgcaggttcctgcatacccggagataaagttccctcgattataccatatgctgtggaataatctgtcatgaatcttgacaaattgagatttgccaatggaagcataagaacatcagaactgtgactcattatgcacaagtcgatacagagccatgccgctgtgttccgtgtgtggagtgtgctgcacgaaggct

SEQ ID NO: 4759 - DNA, 140 bp, Bos taurus
  Clone ID: 21-LIB188-008-Q1-E1-F1
gccgcgggatacttgagctagacagagtcactcgagcccctccagggagctgtggctaaattcttctctgccagctgtgttccctgcattgatagacaagcattacccaacctgtgtcaactgttcaaaggggaggggga

SEQ ID NO: 4760 - DNA, 409 bp, Bos taurus
  Clone ID: 21-LIB188-009-Q1-E1-F1
acatgaacacagccatcgtcgcccctgatggctttgatatcatcgacatgacagccggaggtcagatcaattcggaccagaggagaaacttgggatcagtggccaaggtcctgcagcatgcagcctccaacaagctcttcgaaggagaaaacgagcacctctcctctatgaacagttatttatcagagacgtatcaggagttcaggaaatatttcaaagaagcatgtaatgtccctgaaccagaagaaaagtttaatatggataaatacacagatgtggtgacagtcagcaagccagtcatttatatttcaattgaagaaatcatcaacacacattcactcttgctggagcaccaagatgcgattgcacctgaaaaaaacgacttactgaatgaactgctggaactgct

SEQ ID NO: 4761 - DNA, 355 bp, Bos taurus
  Clone ID: 21-LIB188-009-Q1-E1-F9
ggccatggccctgtaagggccatttcttaacattctgagctgccctcatggatcgcggaccggttcgctggctccagctcaagcaaaatatctacactaactatcagcagggcctacaccgaggccgaggcccactattactgtcaatcaactgacagcagtcatgatgctgttttcggcaacgggaccatcttgaccgtgctgagtcaacctacgtccccagcctcagtcaccctgttcccgcgctccacgagctgaactcaaccgcaagaaggccaccctgttgtgtctcatcagcgacttcgagcctggtagcttgctcctgggctggtaggcagactggatcagcatcacc

SEQ ID NO: 4762 - DNA, 407 bp, Bos taurus
  Clone ID: 21-LIB188-010-Q1-E1-F1
acacttacaagcaccacactcgcagacgccgcggccattgcagatctgtccattcacggccatgcatgaagtggtatccagagaacagtcacaggcgctgccggtgtagttagggttgcactcacacactcgacacttgcaaacaccatttcctccacatattaagccattggatctatcacagttgaaattatcacactcgcagaatttgccagaataaatttcatttgtattgtccctcttcctacacacacactgtccacagacacactctccattgttgctacagatttctgaactgttttctttcctgcagtaggcatccatgtcttcgctgttcacctcatctgtgctacattcacagtgtctcccgacacgtccctcgttgcacctgcaggccccacact

SEQ ID NO: 4763 - DNA, 442 bp, Bos taurus
  unsure (393),(419): unsure at all n locations; Clone ID: 21-LIB188-011-Q1-E1-F1
cgccatgggcgcgggatacagaaagaagtggagtggcgtccgtgtcccctcatcccttgcctactactgctctgtctcaagaggttgataacaatgaagatcctagcatagaggaggaggatcttctcacactgaacagttctccgtccactgccaaagacactctggacaacggggattatggagaaccagactatgactggaccaccagcccccgggatgatgagtccagtgaagccttggaagaaaacaggggctacgtggaaattgagcagtcagagagaccttttaaaaaccccacctcaagtatagaagaggaagatagccatttcttttttcaccttagtacttttgctttttgtattgccattgtttatattacatatcacaacnaaaggaagattttccttctgggtcanagcaggaaatggcgtgatggttt

SEQ ID NO: 4764 - DNA, 373 bp, Bos taurus
  Clone ID: 21-LIB188-011-Q1-E1-F9
acctcaactccacggacgtggccgatggaattccctttgaggaggactggacccggatgaaggtcaagctgggctcctcgctggggggcccatacctgggcgtccacctgaggaggaaagacttcatctgggggcacagggaggatgtgcccagcctggacggggccgtgcggaagatccgcagcctcatgaaggcccaccagctggacaaggtgttcgtggccacagatgctgtcaggaaggagctggaggagttgcggaggctgctgcctgagatggtgcggttcgaacccacgtgggaggagctggagctctacaaggatgggggcgtggccaacgtggaccagttgatctgtgcgcacgcccggttttt

SEQ ID NO: 4765 - DNA, 176 bp, Bos taurus
  Clone ID: 21-LIB188-012-Q1-E1-F1
acacagtttagttataatgtttaaagagtaaccaccacagggatggctacctaaattgcgttcatgcgtctgctggccagccatgcctctcagtttatcacctacgattgcaataacagcattgcctacatggatgatgcaactggcatttctgtgaaatgctgtcattctgcaag

SEQ ID NO: 4766 - DNA, 356 bp, Bos taurus
  Clone ID: 21-LIB188-013-Q1-E1-F1
acccccatggggtcaggagatgtggtctggccagcctgagccactaggcctctcctctctgcataggataagccccagagccagggcctgatcagccctctcagtccccctttgtctagagggacaaaggtcatcctaaccaggctgagcctgtgacttattaaaccagtttagttctcaagctgtgcaggcaacagatgccagtgggctctactggtctgtctagttcgagcggcgcccgggcaggtacaaggacccgggggcctcagaaagcaagattttccctggtaacatggacaataattcccacaagaagaacatatttgagacgccgttccaggctcgcttcgtgcgga

SEQ ID NO: 4767 - DNA, 364 bp, Bos taurus
  Clone ID: 21-LIB188-013-Q1-E1-F9
accactacgtgggcggtttctacgggggctgcaatgaagccctgatgaagcttgagctggtccatcaggggcccatggccgtcgcctttgaagtctacgacgacttcctccactaccgcaagggcgtctaccaccacacggggctgcgagaccctttcaaccccttcgagctgaccaatcatgctgtgctgctggtgggctatggcactgacgcggcctctggactggattactggattgttaaaaacagctggggcaccagctggggtgagaacggttacttccgcatccgcagaggaaccgacgagtgtgcgatcgaaagcatagcgctggcggccaccccgattcctaagttgtagggtgt

SEQ ID NO: 4768 - DNA, 394 bp, Bos taurus
  Clone ID: 21-LIB188-014-Q1-E1-F1
ccgagccagcccggagcaggcgcggaactgccggcgcgccaaactctcactctcatcgtaacggtcccccattgtggtcagcagttctctcaggtaatcctcctgaatggtgccagttgcttcttcatcaaagcaagcaaaagcatttctgatgacatcttctggatctgtgccatttaacttttcaccaaacattgtgagaaacatggtaaaatttatgggacctggagcctcgttcatcatggcatccagatactcatcagttggattttttcccagggaagcaagcatgtcatgcaagtcttccttgtcaatgaacccatccctgttctggtcgatcatgttgaaggcctccttgaactcctgaatctgggactggtcaaacatggcgaac

SEQ ID NO: 4769 - DNA, 445 bp, Bos taurus
  Clone ID: 21-LIB188-015-Q1-E1-F1
gccataggcgcgggatactctgccaagccagatccaggagcccccatcttgcgcaggttggttatgtggtcacccaattctttgatggcttccacctgctcattcaggtaatgagtctcaatgaaatcacacagatggggatcatttttttcagtggccagtttgtgcagttccagtagtgactgattcacacttctctccaagcacagcgcacattccattgcagtcagcccattctcccagtcatcacggtctggtttcttgatatcctgaaggaagattcggccgcctcgctggttctgcagcttcatcaacctgcccgggcggccgctcgaactccatgccatcgctgacaccccacccggccacggagacgatgtggtttatgaaggcctggtcgttgtaatcggagtagatgccgccagtgtagttagacatcgttttc

SEQ ID NO: 4770 - DNA, 415 bp, Bos taurus
  Clone ID: 21-LIB188-015-Q1-E1-F9
acagcaccgagccgaataacctgaaagcgcgcaactcctttcgctacaatgggctcattcaccgcaagaccgtgggtgtggagccggcggcggacggcaaaggggtcgtggtggtgatgaagcggagatccggccagcgcaagccagccacttcctacgtgcggaccaccatcaacaagaacgcccgggccaccctcagcagcatccggcacatgatccggaagaacaagtacccctcaccagttactggtgacagagcagagctgggtgcagagagagcgtctggcaccccgctctctctaaatgggccactcgccacccattacgatgctgctcaatgcccaggtgccacaggagccgaggcacttagaatcccagcagcgaagaacaaggaaacacttttcagtgagcaaat

SEQ ID NO: 4771 - DNA, 363 bp, Bos taurus
  unsure (9): unsure at all n locations; Clone ID: 21-LIB188-016-Q1-E1-F1
acctggtcnctggccatacgcttaaacagagggtctgtgattccctgaataatccctctggggttaacggttactttagcaagccaggcaaccccaagtccccttcgggcaacgtcataatttccccgacggctttcggagctgcagccgctgtttgcgcccacttttccgacactatgctccagttcttgcatggatttactcttggcaacgtcgtgggaatgtatctggctcacaactaggacataccagacctggctaaaaaacttgaagaaattaacaacgacgtggacgccatgaagaaaccccctagttgctgaagccaactccagcactgccttctggataaactgagtctactgc

SEQ ID NO: 4772 - DNA, 400 bp, Bos taurus
  Clone ID: 21-LIB188-017-Q1-E1-F1
cgccaaggccgcgggatactatggctataccggggctttcaggtgcctggctgaggacgttggggacgttgcctttgtgaaaaacgacacagtctgggagaacacgaatggagagagcactgcagactgggctaagaacttgaatcgtgaggacttcaggttgctctgcctcgatggcaccaggaagcctgtgacggaggctcagagctgccacctggcggtggccccgaatcacgctgtggtgtctcggagcgatagggcagcacacgtgaaacaggtgctgctccaccagcaggctctgtttgggaaaaatggaaaaaactgcccggacaagttacctgcccgggcggccgctcgaacctgtaagtccgggtcatcgaaaaacgccattcacaaaaga

SEQ ID NO: 4773 - DNA, 453 bp, Bos taurus
  unsure (408): unsure at all n locations; Clone ID: 21-LIB188-017-Q1-E1-F9
catggtaggccggatacggccggcaagtgccatcctgtatgactactacaaccctgagcacaagtgttctgtgttttatggggcaccacgtaagagcaaactcttgtccacgttgtgctctgcggatgtctgccagtgtgctgaggggaagtgccctcgacagcgccgggccctggagcgtgggcagcaggacttggagggttaccggatgaaattcgcctgctactctccccgagtggactacggcttccaggttaaggttctccgagaagacagcagggctgctttccgcctctttgagacccgtatcacccaagtcctgcatttcaccaaggatgccagggccaccgctgatcagaccagaaacttcctggtccgagcctcttgccgccttcagttggaacctgngaaagaatatctgatcatgggtctggatggggccacttacgacct

SEQ ID NO: 4774 - DNA, 453 bp, Bos taurus
  unsure (388): unsure at all n locations; Clone ID: 21-LIB188-019-Q1-E1-F9
gccatgggcgcgggatacgtcgatacctggggccaaggactcctggtaaccgtctcctcagcctccaccacagccccgaaagtctaccctctgagttcttgctgcggggacaagtccagctccaccgtgaccctgggctgcctggtgtccagctacatgcccgagccggtgaccgtgacctggaactcgggtgccctgaagagcggcgtgcacaccttcccggctgtccttcagtcctccgggctctactctctcagcagcatggtgaccgtgcccggcagcagctcaggacagaccttcacctgcaacgtagcccaacccggcagcagcaccaaggtggacaaggctgttgattccagatgcaaaacaacctgtgactgttgcccancgcctgagctccctggagggacctctgtcttcatccttcccaccgaaacccaaggacaccctcac

SEQ ID NO: 4775 - DNA, 404 bp, Bos taurus
  Clone ID: 21-LIB188-020-Q1-E1-F1
acttcacgcacttggaaaatctacttgaagctgactacagaagtgaggaaagtgaaagcaaatcccatgaaagccaagatgagtcgggctggttttcgggtaaccgagccctcttctccttgcccctagacccccactcgaagtgggacgcactccaacgggtttccaacacgttcccggggcgcgggcaccttccaaccgaacgggtttccgcaagttaaccatcacgtccgcaggtggagttcggcctgtttgagaagcaaagcaacccgggatgaccggccccggggtgcaagtcagccagatgcgcgccctcccctgcgggttccgagggccgcgagcgcaagaatcaaagtgggtctaacgcgtcgttattcttacaaatactgtaaaaatcagtataa

SEQ ID NO: 4776 - DNA, 402 bp, Bos taurus
  unsure (253): unsure at all n locations; Clone ID: 21-LIB188-021-Q1-E1-F1
gatacttacgcaagaaactatagtgtatttatgggccagcatctgcctggggtcggactggaaagaagccgaccttccatgtgtattctaaatatttctcttcattgtctgggtgctagccacagcaaccctggctccaaacccagttacacaaggagttagcacccctgttttcaagcctgaaatccgcatcaccacaagaggagcttggagagcaggtaacactcatggcaaaatttcaggcatcacctanggggttacgtttcagaagcagctgcccatgctgcagctctggtaagacctctgttctcaaactctccactatagacaggagggaatgagggagggagacagagtctgcgggtctgagggatgtttcattctggagcccctggcccgcca

SEQ ID NO: 4777 - DNA, 389 bp, Bos taurus
  Clone ID: 21-LIB188-024-Q1-E1-F1
acgtgctgttgaactgctcctctcttggcttcgacctggccgtgtgcacctccacgtcatccacgaaccaggagaactgcacctcggggttatcgtggcccacgttcaccaccacacacgtgacctcgggcgttcctgtgatcatcagggtgtctttgggtttcggtgggaagatgaagacagatggttccctcacgcaaggctggttatgacacttggagcagtcaatggagaccccaacagccttgtccaccttggtgctgctggccgggtgggctacgttgcaggtgaaggtctgtcctgagctgctggcgggcacggtcaccatgctgctgagagagtagagcccggaggactgaaggacagccgggaaggtgtgcacgccgctc

SEQ ID NO: 4778 - DNA, 334 bp, Bos taurus
  Clone ID: 21-LIB188-024-Q1-E1-F9
gccggatacttctcaaacccaagagaacctagataaatcccacacgtaataaacatcagatgttgcatgagaaaccagaaggcagatcttcacagaagccccaagggctcactcctgcccagtgttaggagacagggttgttgacagctcctgtctcactgcagcctctagcacttggtcagtcactctccgccttagcactttgttcactgtcctgtgtcagagctctgagctcgctctacccttttctgaaaaagtatgtgggctgcaagtggtttcattttttgttttttaattgtatatctttttgtatgagaaaaactatattttgtaa

SEQ ID NO: 4779 - DNA, 426 bp, Bos taurus
  Clone ID: 21-LIB188-025-Q1-E1-F9
gggcgcgggctactgagtgtcctgaggcctccggaggaagaaccggtcctggaagagctcgtccatgatgctggacgcccgggtgaagctgtcctccatgacgtccatcacgtggctctgctcccggtcattctccatcagggaatcgatgcggtcaccgttaatccagaagtagaagggggagctctggtttaggaactcctcaagctggtggccaaccagtcccgatccgcttctgcacacccgcgcgtagaacttcatgcaggtctgcttgaggcagggcttacattcctcccaaagggctgtcatggtctcattgcacaccccctgggacgccttcagcttgttttcagaatccctggtgtcattcagggcgtcctctttcttcttcttggcttcctctagggagctgagcagtaatttgcg

SEQ ID NO: 4780 - DNA, 263 bp, Bos taurus
  Clone ID: 21-LIB188-026-Q1-E1-F1
tggccgcggcatacagacaggccacacagcctgcttgtttccaacagttaggggggcaccactggagatgtgaagcatgccctcttggccgctgggtccacttgtcgcgcgtcttagactgggggctgtggcctcaggcccgcagtgcaccatacccaacgctgtctttaataggttgatgggcgttgtaccaccgtttactaaggtggattctaagctgatgctccgcacctcttttaccatggttctccggcccatgccat

SEQ ID NO: 4781 - DNA, 370 bp, Bos taurus
  Clone ID: 21-LIB188-027-Q1-E1-F1
aagggattctcaaaaacccaagaacaaaatccttgaaaaacaaggtccttcgggccggttgaaaacccaaaaacctggaaactcccaaactgtttttttcaaattcccctgcccctgctgagaagcttccaaataaattcttccttgcaatccacacttcgggccacgacagcatgagaagggacctgggccaggtggcactccttgaacgcatccactggcgcccgactgttgttcaggcagagaagctcatactggtccctgtcagccttctctggcaagttctcaaacactgtcgtctctttaacaaaacccacgtctccagccccgtcctgcagacacttgaacgcaccagaataaccgaagtatg

SEQ ID NO: 4782 - DNA, 275 bp, Bos taurus
  Clone ID: 21-LIB188-028-Q1-E1-F1
acacaaaaggtggactcggcgcgaggcctgaccactccctcccctgcacgcaaggtcccgagaaaacgcaaccgcgcccagacgtgactggagccacgtgtcatatccgggcgcagggcttggacggcgtggacaggcttaggcaacttccaggaaagtggagcagagagcggtcctccggacaaggccctgtagttccccgagaagcaaaggaaccaggccctacccacggttctcccccaaattttccccattaaaacattttttaaatcggt

SEQ ID NO: 4783 - DNA, 192 bp, Bos taurus
  Clone ID: 21-LIB188-028-Q1-E1-F9
gcccttggacaggactgcaggctggaacatccccatgggcccggattgtcaaccagacaggctcctgcgcatttgatgaattctttagtcagagctgtgcccctggggctgacccgaaatccagactctgtgccttgtgtgctggcgatgaccagggcctggacaagtgtgtgcccaactctaaggagaagt

SEQ ID NO: 4784 - DNA, 302 bp, Bos taurus
  Clone ID: 21-LIB2809-002-Q1-E1-F9
catgggcgcgggatactacaaacctggtgtcctgttgttgtgcttcatcctgcccacactcgtgccatggtatctgtgggatgaaacgtttcaaaacagcctgttttttgccaccttattccgttatgcccttgggctcaacgtcacctggctggtgaatagtgctgcccatatgtatggataccgcccttatgacaagaccatcaacccccgagagaatattctggtttccctgggagctgcgggtgagggcttccacaactaccaccacacctttccttatgactactcagccagtgagt

SEQ ID NO: 4785 - DNA, 368 bp, Bos taurus
  Clone ID: 21-LIB2809-003-Q1-E1-F9
acttgtacgctcaccactagcaatggtattgatggtagggatttctgttttatcctgatttttctttggtggaatggccataaatgataaatgtgggtgtgggtgacgtgccatggtagttggctgggcttggcaggacttgacaggcacagtatttgacaaaacttgccattgaagaatttgggcaggtgacctaactgcagctggctttgcataatatgggtatggcagaaattgattattaattagtgcaactggtttctgttggtagtaattgagtccataactaggatacctactcagcacatactgaattgggatatatttggctattttgtctcttactcaaacccctgtggtggtgccgc

SEQ ID NO: 4786 - DNA, 415 bp, Bos taurus
  Clone ID: 21-LIB2809-005-Q1-E1-F1
acctggtgagattgtggaaagcctttcaagcagtgaggaatctattacacgcatcaataagaaaattgagaagtttcagagtgaggaacagcagcaaacagaggatgaactccaggataaaatccacccctttgcccagacacagtctctagtctatcccttccctgggcccatccataacagcctcccacaaaacatctctcctcttactcaaacccctgtggtggtgccgcctttccttcagcctgaagtaatgggagtctccaaagtgaaggaggctatggctcctaagcacaaagaaatgcccttccctaaatatccagttgagccctttactgaaagccagagcctgactctcactgatgttgaaaatctgcaccttcctctgcctctgctccagtcttggatgcaccag

SEQ ID NO: 4787 - DNA, 410 bp, Bos taurus
  Clone ID: 21-LIB2809-005-Q1-E1-F9
cgtatgtgtatgatacataaggttatgtattaattgtagccgcgttctaacgacaatatgtacaagcctaattgtgtagcatctggcttactgaagcagaccctatcatctctctcgtaaactgccgtcagagtcggtttggttggacgaaccttctgagtttctggtaacgccgtcccgcacccggaaatggtcagcgaaccaatcagcagggtcatcgctagccagatcctctacgccggacgcatcgtggccggcatcaccggcgccacaggtgcggttgctggcgcctatatcgccgacatcaccgatggggaagatcgggctcgccacttcgggctcatgagcgcttgtttcggcgtgggtatggtggcaggccccgtggccgggggactgttgggcgccatctc

SEQ ID NO: 4788 - DNA, 361 bp, Bos taurus
  Clone ID: 21-LIB2809-007-Q1-E1-F1
tacctggaaattagtggacagcaggaatttcgatgactacatgaagtcactcggtgtcggttttgctaccaggcaggtgggcaatatgaccaagcctaccacaatcatcgaagtgaatggggacacagtcatcataaaaacacaaagcaccttcaagaacacagagatcagcttcaagctgggagtcgagttcgatgagaccacagcagatgacaggaaagtcaagtccatcgtgacgctggatggcggcaaacttgtccacgtgcagaagtggaatggacaagagacatcacttgtgcgggaaatggttgacgggaaactcattctgacactcacccatggcactgcagtttgcactcgt

SEQ ID NO: 4789 - DNA, 401 bp, Bos taurus
  Clone ID: 21-LIB2809-007-Q1-E1-F9
gccatgggcccgggatactacatagtatttcgttgttctgtctccttattctcctctggtctgtaatgttttctcagaatttccttattgctcatgattttgacagctttgaggagtcctgatcaaggtattttctatttagatttgcttgatgttttattgcataataagactggggttgcaaagagcaccacagaagtgatatctcttctaattatatcatatacggtgatatgtgaatccatatggctcattgctgagtcagtaatgatgtggaattttgatcacttagttaagatgttatttgccagatttctccactgttcataccttccgctttggaagcgagtcccaaagttcagcacagactcaatagcgggtggacaaagttctacctcctg

SEQ ID NO: 4790 - DNA, 167 bp, Bos taurus
  unsure (103): unsure at all n locations; Clone ID: 21-LIB2809-008-Q1-E1-F1
acagtggcaaactcacaggggagaagagtttccatccatgtcagagtccaggtatcctgatgaagaaggtttgtttactgtgagagcttcagtgatgatcagnggacagctctatgaagaatgtgtcctgctggatccggaacctccttcttggccgggagaaagat

SEQ ID NO: 4791 - DNA, 441 bp, Bos taurus
  Clone ID: 21-LIB2809-011-Q1-E1-F9
gccatagcggcgggatgaccgcagaaaggcctgaatgggcatatctctctggggatagggcactgctttctggggaacaggcaggactttggactgagaaagggacagcacggactgaggaggaaacatgacagttggaggaagaggctggtgaggctggtgcatccaagactggagcagaggcagaggaaggtgcagattttcaacatcagtgagagtcaggctctggctttcagtaaagggctcaactggatatttagggaagggcatttctttgttcttagggaccaataccccccttcactttggagacccccattacttcaggctgaatgaaaggcggcaccaccacgggggtttgagtaagaggagggatgttttgtgggaggctgttacggatgggcccagggaagggatagactagagactgtgtctgggcaa

SEQ ID NO: 4792 - DNA, 416 bp, Bos taurus
  Clone ID: 21-LIB2809-013-Q1-E1-F1
acttcatcatcaggaacagctgcccaaatcaacgtgattccaccatctccgtggaagagaatggggtgtcagcagaaagccggttctcagttcagatgttcaagtttgctggaaattatgacctagttttcctgcattgtgaggtttctctctgtgatttcattaaagaagagtgccaaccgtcttgctcaagaagtcaactccgcagtgaaggggtggctattgatccagcccgagttctagatctgggacccatcactcgcaaaggtgcccagtctcttggtgtcatgagtggaacacccaacactgcagggttcctggtggcctggcccctggttctcctgcctgtcctcctggctgggctgttctgagagctcagctgggcaatctggccttgaagcttgtgttcttccctc

SEQ ID NO: 4793 - DNA, 288 bp, Bos taurus
  Clone ID: 21-LIB2809-015-Q1-E1-F1
caactagatttgaagttgatattaatagaaattattccaaaattattcttaggtcacaagtaactactatcccacatgaaaagggaaaaatcccacccaattaaggaaaaggtatcctgtgtacgtttccatggcaatgattttatgcattcgcacattttgtccggccagttatccaccctttatctgatggatttattccatctctcacagagaaccacttacattcttgactgcatccaatacatgtggctcgtggtggacacacttcatggtggatactgctac

SEQ ID NO: 4794 - DNA, 391 bp, Bos taurus
  Clone ID: 21-LIB2809-020-Q1-E1-F1
cgccatggccccgggacacctggagagattgtggaaagcctttcaagcagtgaggaatctattacacgcaccaataagaaaattgagaagtttcagagtgaggaacagcagcaaacagaggatgaactccaggataaaatccacccctttgcccagacacagtctctagtctatcccttccctgggcccatccctaacagcctcccacaaaacatccctcctcttactcaaacccctgtggtggtgccgcctttccttcagcctgaagtaatgggagtctccaaagtgaaggaggctatggctcctaagcacaaagaaatgcccttccctaaatatccagttgagccctttactgaaagccagagcctgactctcaactgatgttgaaaat

SEQ ID NO: 4795 - DNA, 420 bp, Bos taurus
  Clone ID: 21-LIB2809-021-Q1-E1-F1
gccatgagcccgggatgcccgagtagaaagggcaattcattaagtatatttagaatccaagctactactactgagaaattacagtatttattcagttcagttcagtttagtagctcagtcgggtccgactctttgcgaccccatgaatcgcagcacaccaggcctccctgtctatcaccaactcccggagtttacccaaactcatgtccatcgaatcggtgatgccatccagccatctcatcctctgtcgtccccttctcctccagcccccagtccctcccagcagcagggtctttcccaatgagtcaagtcttcgcatgaggtggccaaaatattggagttacagtgtttattagagattcaataagttgaaaattcagagtcctcagtttcaaagaaataacatgtgactgaaaacat

SEQ ID NO: 4796 - DNA, 332 bp, Bos taurus
  Clone ID: 21-LIB2809-022-Q1-E1-F1
gacttatcagtatgaaagagggaatccatgcccaacagaaagaacctatgataggagtgaatcaggaactggcctacttctaccctgagcttttcagacaattctaccagctggatgcctatccatctggtgcctggtattacgttccactaggcacacaatacactgatgccccatcattctctgacatccctaatcccattggctctgagaacagtgaaaagactactatgccactgtggtgaacactcaagtgaactctgatggactccacagttatggtctttgatggttctgaaaattccatgctctacatgtcgtttcacctatca

SEQ ID NO: 4797 - DNA, 346 bp, Bos taurus
  Clone ID: 21-LIB2809-023-Q1-E1-F1
gggataccaagtaaaaataagtggatcacgctcaagccacatctgtagaaactgaagtccattccattgtgaacatgttgaatttttaaaagtgctggtttttcgttcgaagtgtggaatttaatgatgtcttaataatccttttgaaagatatttgaaaatgtaaactaaatgactagcctatgaaccatttattatacatttctcaagtttttttttcctctacggaatcctttgtacaagcttttttttttttttttttttttttttttgttttttttttttttttttttttttttttttttttttttttttttttttttttttttttttttttttttttttt

SEQ ID NO: 4798 - DNA, 399 bp, Bos taurus
  unsure (119): unsure at all n locations; Clone ID: 21-LIB2809-024-Q1-E1-F9
atttcctttttaatttgaaagcaaacaactcggcctttatgaggctaacctcaggttcttatttcttctcctaatcttctttctcttctgttcccattatccttccctttgttttgtcnctgtcaccttcctttctccttctcctcattgccccccaggcaagcaggtggtcagtcattggtgggtttccagcttccaaagcctagacaaccctgctgtagtctcaaactagtggtctttgccccggctgaccctttccttgagctgtctgagctttaaggtggatggctcaagctagagatatgacagaatcttctgggaagggccttgatgatcttcagcccagacttttgctaaatgaaatgggaaaattactttaatttggaaccaaactgaaaa

SEQ ID NO: 4799 - DNA, 403 bp, Bos taurus
  unsure (394): unsure at all n locations; Clone ID: 21-LIB2809-025-Q1-E1-F1
gccatgggcgcgggatacagcagaaaggcctgaatgggcatatctctctggggatagggcactgctttctggggaacaggcaggactttggactgagaaagggacagcacggactgaggaggaaacatgacagttggaggaagaggctggtgaggctggtgcatccaagactggagcagaggcagaggaaggtgcagattttcaacatcagtgagagtcaggctctggctttcagtaaagggctcaactggatatttagggaagggcatttctttgtgcttaggagccatagcctccttcactttggagactcccattacttcaggctgaaggaaaggcggcaccaccacaggggtttgagtaagaggagggatgttttgtgggaagctgttanggatgggcc

SEQ ID NO: 4800 - DNA, 424 bp, Bos taurus
  Clone ID: 21-LIB2809-025-Q1-E1-F9
gccaagggcccgggacacttcataatcaggaacagctgcccaaatcaacgtgattccacaatctccgtggaaagaaaatggggtgtcagcagaaagccggttctcagttcagatgttcaagtttgctggaaattatgacctagttttcctgcattgtgaggtttctctctgtgatttcattaaagaagagtgccaaccgtcttgctcaagaagtcaactccgcagtgaaggggtggctattgatccagcccgagttctagatctgggacccatcactcgcaaaggtgcccagtctcttggtgtcaagaagtggaacacccaacactgcatggttcctggtggcctggcccctggttctcctgcctgtcctcccggctgggctgttctgagagctcagctgggcatctggccttgaagcttgtgt

SEQ ID NO: 4801 - DNA, 403 bp, Bos taurus
  Clone ID: 21-LIB2809-027-Q1-E1-F9
ttcataatcaggaacagctgcccagatcaacgtgattccaccatctccgtggaagagaatggggtgtcagcagaaagccggttctcagttcagatgttcaagtttgctggaaattatgacctagttttcctgcattgtgaggtttcgctctgtgatttcattaaagaagagtgccaaccgtcttgctcaagaagtcaactccgcagtgaaggggtggctattgatccagcccgagttctagatctgggacccatcactcgcaaaggtgcccagtctcttggtgtcatgagtggaacacccaacactgcagggttcctggtggcctggcccctggttctcctgcctgtcctcctggctgggctgttctgagagctcagctgggcatctggccttgaagcttgtg

SEQ ID NO: 4802 - DNA, 361 bp, Bos taurus
  Clone ID: 21-LIB2809-029-Q1-E1-F1
acaactagatttggagttgatattaatagaaattattccaaaattattcttaagtcacaaataactactatcccacataaaaagggaaaaatcccacccaattaaggaaaaggtatcctgtgtatgtttccatggcaatgagtttatgcattctcagattttgtccggctagttatccaccctttatctgatgcatttattccatctctcagagagaaccatatagattcctgacggcatccaggacacgtggctcgtggtggacacacttcatggtggatactgctactattaaaatactcagaacttaagagaattccaagatgctttataaaaagcattagtcatgcctcaaaactgc

SEQ ID NO: 4803 - DNA, 404 bp, Bos taurus
  Clone ID: 21-LIB2809-030-Q1-E1-F9
acagcagaaaggcctgaatgggcatatctctctggggatagggcactgctttctggggaacaggcaggactttggactgagaaagggacagcacggactgaggaggaaacatgacagttggaggaagaggctggtgaggctggtgcatccaagactggagcagaggcagaggaaggtgcagattttcaacatcagtgagagtcaggctctggctttcagtaaagggctcaactggatatttagggaagggcatttctttgtgcttaggagccatagcctccttcactttggagactcccattacttcaggctgaaggaaaggcggcaccaccacaggggtttgagtaagaggagggatgttttgtgggaggctgttatggatgggcccagggaagggatagact

SEQ ID NO: 4804 - DNA, 452 bp, Bos taurus
  Clone ID: 21-LIB2809-032-Q1-E1-F1
gcatgctccctaccgccaagggcccgggatactggatcgaattgtccatgagaaaaaacttggcgataaagttgctttttactgggagggcaatgagccagaggaaaccacccagatcacataccgagagcttctggtccaagtgtgtcggttcagcaatgttctccgaaaacagggcatttgcaagggtgaccgagtggccatctacatgcccatgatcccggagctcgtggtggctatgctggcgtgtgcccgccttggggctctgcactccattgtgtttgcggggttctcttcagagtctctttgtgaacggatcctggattccaattgtagccttctcatcactacagatgccttctacaggggggaaaagcttgtcaacctgaaggagctggctgacgaggccctggagaagtgtcacgagaaaggtttcccagtgaaatgctgca

SEQ ID NO: 4805 - DNA, 338 bp, Bos taurus
  Clone ID: 21-LIB3057-003-Q1-K1-F1
cggacgcgtgggcggacgcgtggggtctttaaaccctgcgtggcaatccctgacgcgccgccgtgatgcccagggaagacaggtcgacctgtaagtccaactacttccttaagatcatccaacttctggatgattatccaaaatgcttcattgtgggagcagacaacgtgggctccaagcagatgcagcagatccgcatgtccctccgctggaaggctgtggtgctgatgggcaagaacacgatgatgcgcaaggccatccgagggcatctggaaaacaacccggctctggagaaactggtgcctcacatccgggggaatgtgggcttcgtgttcacc

SEQ ID NO: 4806 - DNA, 331 bp, Bos taurus
  Clone ID: 21-LIB3057-004-Q1-K1-F9
ccgggttggaccaagccttccggcttcttaataggtttggaatggacaaaatttatgaagggcaagtcgaggtgactggagatgaatacaatgtggaaagcatcgatggtcaacctggtgccttcacctgttacctggatgcaggacttgccagaactactaccgggaataaagtttttggggccctaaagggagctgtcgatggaggcttgtctatccctcacagttccaaacggttccctggttatgattcagaaagcaaagaattcagtgctgaggtacaccgaaagcacatcattgggcaaaacgttgcacattacatgcgctacct

SEQ ID NO: 4807 - DNA, 306 bp, Bos taurus
  unsure (267): unsure at all n locations; Clone ID: 21-LIB3057-005-Q1-K1-F1
gaagaaaagtgaccgagaggccgctgaacatcctcgccccggcgcagcgggagccgcccgaggcagcttccccgtgacagagcctcagcctgcctggaagatgccgagactgtgcagcagtcgttcgggcgccctgctgctggccttgctgcttcaggcctccatggaagtgcgtggttggtgcctggagagcagccagtgtcaggacctcaccacggaaagtaacctgctggcgtgcatccgggcctgcaagcccgacctcttcgncgagacgccggtgttccccggcaacggcgatgagcagcc

SEQ ID NO: 4808 - DNA, 392 bp, Bos taurus
  Clone ID: 21-LIB3057-006-Q1-K1-F1
gttctagatcgcgagcggccgcccttttttatttatattattttttttttttgtgttgggttttttttttttttttttttttttttttttttttaattttaaatttaatatttttttttatttttattaaggaaaaggaaaaaaaatgaggttaaaaaaaaaaaaaaacccaaaaaaacaaaacagggaaaaaaaagaaaaaaagaacaaaaaaactacccagggaagggaccaaaaaaaacaaacaaaaaaaaggaaaagaaaaaaggggaataaaaaatgaaagaagaaaaagaagagcaaaacaaaaagctaaaaggaaggagaaacatgagaggaaaccaagaacaggcagggaaacagggtaaaaaaaggggaaaaaagggcacttg

SEQ ID NO: 4809 - DNA, 434 bp, Bos taurus
  Clone ID: 21-LIB3057-006-Q1-K1-F9
cacaggtgtcgtgaaaaccaccgttaaacctaagccaaaatgggaaaggagaagacccagatcaacatcgttgtcattgggcacgtagattcagggaagtctaccacgactggccatctgatctataaatgtggcgggatcgacaagagaacaattgaaaagttcgagaaggaggctgccgagatgggaaagggctccttcaaatatgcctgggtcttggacaaacttaaagctgaacgtgagcgtggtatcaccattgatatctccctgtggaaatttgagaccagcaagtactatgttaccatcattgatgccccaggacacagagacttcatcaaaaacatgattacaggcacatcccaggctgactgtgctgtcctgatcgttgctgctggtgttggtgaatttgaagccggtatctccaagaacgggca

SEQ ID NO: 4810 - DNA, 316 bp, Bos taurus
  Clone ID: 21-LIB3057-009-Q1-K1-F1
ggaaagaggacgagttcctttccgacggacagttactgcctgataacttcatagctgcctgtacagaaaagaaaatccctgttgttttcagattgcaagagggttatgatcacagctactactttattgcaacctttatcgctgatcacatcagacatcatgcaaaatatctgaatgcatgaaaaacttcagataagagaatctcttcaggattataaaattgtaataaacagaattgcaagaaaataagattttaaaactttggatttcataatgctaaaaatgcttcattctgtagttgaatcactcactgaat

SEQ ID NO: 4811 - DNA, 317 bp, Bos taurus
  Clone ID: 21-LIB3057-010-Q1-K1-F1
ttccgggtcgcccacgcgtccgatgattgacaagtcgactctgacattcaatcgcacccgccaagctgtcatcaccaaggagctgatagaaatcatctctggtgctgcggctctggactaatgaaaatcaagtttcatcctcagacaagaggtaacgacgaattcagcaagctgattttgattctagcttactgctgtccttgccagacgaatttattcggtccattgctcacattactaaagacagcacgatatttgtcaattatcttacattacatgactgaccatagagcagatccccatctgagaagggccgc

SEQ ID NO: 4812 - DNA, 345 bp, Bos taurus
  Clone ID: 21-LIB3057-010-Q1-K1-F9
cgagtattgaccaccagccactgaagttttgtattctaatgcattcatcgaccttccaggcccatcgaacatttcattatgatgaaatttcggttccctcctgggaatctgcctaatcctacaaatcctcacaggcctattcctagcaatacactacacatccgacacaacaacagcattctcctctgttacccatatctgccgagacgtgaactacggctgaatcatccgatacatacacgcaaacggagcttcaatgttttttatctgcttatatatgcacttatgacgatgcttatattacgggtcttacacttttttagaaacatgaaatattggagttat

SEQ ID NO: 4813 - DNA, 409 bp, Bos taurus
  Clone ID: 21-LIB3057-011-Q1-K1-F1
cttttcaggaaaaataggggaaaagtgcttccgaaaaaggacagttcgctttatttaaaaatagtgaaattgctttgtgtaaaaagaaataaattagaagaaagcgctttgtccataaaatcatctaccctaaaagcaccccttgttggaagaattccctgctaaaggaatcctttgccaaaggaatcgcatatttccttcaaggtgttcctggaatgctgcatttactgggtaggattcgcttttcgaaatcctccagggacacagcccattgcgagaagtgaggtatacctaagttgtgggtccaatcagcttgcggccatgcagccttcaacacagttggaaaagctccaactgccctgactcgtggacaaactgcgcccgcacccggctctcctcactgatcttg

SEQ ID NO: 4814 - DNA, 447 bp, Bos taurus
  unsure (348),(406),(414): unsure at all n locations; Clone ID: 21-LIB3057-012-Q1-K1-F1
ctcctttcataccccgtaccttggtgactaagtgatacagagggtcattccaagaaccccagatgctatcctatcgagggccatagagattgaggaagaaaacaaacgacttctggaaggcatggagatgatatttggccaggtaattcctggagccaaagagactgagccctaccctgtgtggtcaggaattccgtccctgcaaactaaaggtgaaaatgcacgttattccggtttttataacctggttcaatggcttggcaaggattcaagccagattgacacttaacttaaagttctgaattgcagaatcatctacaaacacaaactgctaaagccacattcatnctatccatttctgagatggttcttaatgatccattccctggcaaacttctctgagctntatagctntgtaatgcatgcttggctctaatgggtttcatc

SEQ ID NO: 4815 - DNA, 360 bp, Bos taurus
  unsure (3),(142),(327): unsure at all n locations; Clone ID: 21-LIB3057-014-Q1-K1-F9
ctnccgaagaaccaacggaccgaccagggctcttcttcaacctgaaggaaacctgaatcccgagggccaactgtctaattaatccctttactccggagcccagcagagctccactagacgcagatccccgccactagccctncccgcgcccactctcctagcttttcctgtttttactcctccttttcattcataacaaaagctacagctccaggagcccggcgccaggctgtttccgaagccaagcgtggaagaatgggtttcctttggaccggcacttggattgtggtattgatgctccacagcagcccaattcaggctttcccncaaaccggcaggtagcccaagacaaacccctac

SEQ ID NO: 4816 - DNA, 200 bp, Bos taurus
  Clone ID: 21-LIB3057-015-Q1-K1-F1
tttttttttttttttttttttttttttttttttttttttgtgtgtttttttttttttttttttttttttttttttttttttttttttttgtttttttttttttttttttttttttttttttttttttttttttttttttttttttttttttttttttttttttttttttttttttttttttttttttttttttttttttt

SEQ ID NO: 4817 - DNA, 428 bp, Bos taurus
  Clone ID: 21-LIB3057-015-Q1-K1-F9
ggatactgagactgctactagacttgtgtcctggtggctctgttgggtacgtttcaccggtgtgccaaaacgaagtgagtgattccagctatccacatttaagaaaggaccccaggacacgaccaagcccgggtctttccgaacattgcatcacagccctgaagaattgcgagtttggcagccgcgtgggtgccggatcaccagttacgcccttgcgatgtggcttcttgtggacaccagcggttcaggatacttcgtactgagcccgcgctgcctggtctcagccttttcctgattggacatgaatattcaaaatctcccgccgctctggaattcataggttctaggtttgcgccgctcactttggcgctgtgaaattcctgttatttcttggtttgtggatcatttttgcttttaattctcttttc

SEQ ID NO: 4818 - DNA, 426 bp, Bos taurus
  Clone ID: 21-LIB3057-016-Q1-K1-F1
agagcttcctggtgaagtgtgtttcttgaaatcatcaccaccatggacagcaaaggtgcgtcgcgagaaagggtcccgcctgctcctgctgctggtggtgtcaaatctactcttgtgccagggtgtggtctccacccccgtctgtcccaatgggcctggcaactgccaggtatcccttcgagacctgtttgaccgggcagtcatggtgtcccactacatccatgacctctcctcggaaatgttcaacgaatttgataaacggtatgcccagggcaaagggttcattaccatggccctcaacagctggcataccttcttcctttctacccctgaagattaagatcaagcccaacagacccaccatgaagtccttatgagcttgattcttgtgtttctgcgcttctggaatgaccctctttatcatct

SEQ ID NO: 4819 - DNA, 282 bp, Bos taurus
  Clone ID: 21-LIB3057-017-Q1-K1-F1
aaaagaattataaaaccatagctttataaatcagtggaaagtggcttacagagaaaactatcagttgtgtttacatcacatcttttttttttttttctttaactgctctaatgctttggcattgttgtgttcatatttatgtattcctaatttatagctctgatagctttaattttctaagcagtctgtccatcagatgtgcacatctgctgtgcctgggtgaactatagtggaacccatcagcagtaaatgtgtagttaagacttgtttacattttcatta

SEQ ID NO: 4820 - DNA, 202 bp, Bos taurus
  Clone ID: 21-LIB3057-017-Q1-K1-F9
tttaacacattgacacattagaaatttttcccaccaaatacatcatccactctaaagaagctttctaaaattatgaacatcatcacctaaaatcactttaacccatatctactctaacacttacaaaccacaaaattctacaaattctactcattctacaatatatcctttcttaatatctcttctgattatacatacctaa

SEQ ID NO: 4821 - DNA, 434 bp, Bos taurus
  unsure (311): unsure at all n locations; Clone ID: 21-LIB3057-020-Q1-K1-F1
ctgctgcgcgcagaccctccaaagacacatgtggcccatcaccccatctctgaccatgaggtcaccttgaggtgctgggccctgggcttctatcccgatgagatctcactgacctggcagcgtgacggggaggaccagactcaggacatggagcttgtggagaccaggccttcaggggatggaaccttccagaagtgggcggccctggtggtgccttctggagaggagcagagatacacgtgccatgtgcagcacgaggggcttcaggagcccctcaccctgagatgggaacctcctcagccctccatccncatcatgggcatcattgttggcctggttctcctcatggtcactggagctgtggtgactggagctatgatttggaggaagaagcactcaggtgaaaaaggaaggggctacacccagactgcaag

SEQ ID NO: 4822 - DNA, 391 bp, Bos taurus
  Clone ID: 21-LIB3057-021-Q1-K1-F9
agttattgcattgctatcagtggatacagatgcttaagctctttagaaagaacattttaaaattttatgtaaactgttgagtatttaaaatagcccacttcattttaagggtcttgtctaccttcattagtcttcaaagaacagacatttgctaccaaagtaaatccgtattttgaatgtgcttctcttgatttttgttattagccagttcctgtaagcatttccaccagatcttgaggcaaatcataaggaagctgtttcttttaaaataacaaaccaccaccaaaaatttaaatgtacataatagttaaatgtttggctgttcttattttttaaagggtataaacaccaaaaaaaaaaaaggtgggagggagcaacattgtatgacgat

SEQ ID NO: 4823 - DNA, 196 bp, Bos taurus
  Clone ID: 21-LIB3057-023-Q1-K1-F1
tcgccgggctccgccatgttgggacttgtgtgtcgtgttgttgcttcctcatcctcactgggcttacggggactcatcccttcatctcctctaccgcaagcccagcttttactgctggccgctcctgcatcgctccatcctgccagagactattccgctcaagcatcttcatctccaaaggccggctccaccactg

SEQ ID NO: 4824 - DNA, 370 bp, Bos taurus
  Clone ID: 21-LIB3058-001-Q1-K1-F1
gtggttatttcattcatggggaagagtgtgtagatttgtagttgttttctctgaaatggagagaaagattgcaaacagctggggctggctgtgctgtgtctccaggcagcagcactggggcaggggcgttggggtggggtggtatttttggtgattagacgtaaggaattccttgtggttgtgatggaatccagtgcagttgtgatttcagtcgatcccatctggttcccaggaatcgtgtgtgataaatcctgcttccaatctttgacaatgtgggggtgaatctgaacttgactgccaaaggtttctgacctggtgaccttccagaatcttcagcttgggggtgggattcacatggggagtggtggcc

SEQ ID NO: 4825 - DNA, 441 bp, Bos taurus
  Clone ID: 21-LIB3058-002-Q1-K1-F1
cccacgcgtccgcccacgcgtccgcggacgcgtgggaagcacttcaacattaccttgaccagatctaagtttgagtctcttgtgagcaatctcattgagaggactcgcatcccttgtgtgaactgcctcaaggatgctggcatctctgctaaggagattgatgaggtcctactggttggtggtatgactagagtaccaaaggtccaggaggttgtttctcagatattcaacaagccaccaagcaagggtgtcaatcctgatgaggctgttgccatgggagctgcaatccagggtggcattttgaggggtgatgtgaaggagctccttttgctggatgtcacacctctctcccttggtattgagacccttggtggcatcttcacaaggctaattaacaggaacaccacaattccaaccaagaagagccaggtcttctctacc

SEQ ID NO: 4826 - DNA, 427 bp, Bos taurus
  unsure (380): unsure at all n locations; Clone ID: 21-LIB3058-003-Q1-K1-F1
tgtaaatagaagaattgtctcttgcaggaatcaagcacttgtatattaatgatgaaagacacgaatgactagttgcataccctttgagacttgtacgagagactgacaattacacaggctgcaatttgtctcattacaaggcgcaaggtggactggctcacagagaaaatgcatgccagggacttcacagtttctgccctgcatggtgacatggaccagaaagaaagagatgttatcatgagggaatttcgatcagggtcaagccgtgttctgatcactactgacctgttggctcgtggaattgatgtgcaacaagtgtcattggttataaactatgatctacctaccaatcgtgaaaattatattcacagaattggcangaggggtcgatttgggaggaaaggtgtggctattaactttgttactg

SEQ ID NO: 4827 - DNA, 426 bp, Bos taurus
  Clone ID: 21-LIB3058-004-Q1-K1-F9
tctacagcagatctttccaacccagaaatcaaatggatttctcctcctttgcaggcagattcttcatcgactgagttatgagggaagtctatgggaaaagaatctgaaaataatagatatttttttatgtatatctaaatcactttgctatacacttaaaacgagtacagcattttaaatctctacttagtataaaatacaaaaaacaaaaaaaaacttggttcaacaagcagtgaataaattccagtacatcagtcgaaatggaataatatacagcaatgaaaaaagaaggaactacttatagcagtatggatggatctcacaggctgaaaatgtagagcaaagtaattgagacagaagagtgcaactctatgataatatttataggaagttcaaactagataaaattaatgttgggaaggaaag

SEQ ID NO: 4828 - DNA, 409 bp, Bos taurus
  Clone ID: 21-LIB3058-005-Q1-K1-F1
gcggcctgatccacaggaatcaattcagagagctgcggccaacttcttctctgccagctgtgtcccctgtgcggatcaatcatcatttcccaaactctgtcaactgtgtgcggggaaagggacagacaagggtgcctgctccaaccacgaaccatacttcggctactcaggggcctttaaatgtctgatggagggcgctggacatgtgacctttgtcaagcactcaacggtattcgacaacctgcctaacccagaagacaggaaaaactatgagctgctctgcggggacaacacccggaagtctgtatataattacgaagaatgctactcggcaatggttacttcccatgcagttagggctcgaactgtgggcgacacggaggatgcgatctgggaacttctcaatcac

SEQ ID NO: 4829 - DNA, 423 bp, Bos taurus
  Clone ID: 21-LIB3058-007-Q1-K1-F1
ctggatggaagcgagctttgtccagaccaccatggctctggggttgtcctccaagaaagcgtcttcccgcaatgtggccgtggagcgcaggaacctgatcaccgtgtgcaggttctccgtgaaaaccctgctggagaagtacacaacggagcccatcgatgactcatccgaggagtttgtgaattttgcagccatcttagagcagatcctcagtcaccgtttcaaagcaggtccggtgagctggttcagctcagatgggcagcgaggcttttgggactacatccgcctggcctgcagcaaagtgcccaacaactgtgtgagcagcattgagaacatggaaaacatcagtactgcccgggccaagggccgggcatggatccgggtggcactgatggagaaacgcatgtcggaatacattaccac

SEQ ID NO: 4830 - DNA, 127 bp, Bos taurus
  Clone ID: 21-LIB3058-009-Q1-K1-F9
gatgaaaatgaggaatagtcaacgtaacgcccaaacgtggctctttaatccccttctaattctgaatatttcgcgtgggtttactataatgtctattaatacatagcctcaatgatgagaggataag

SEQ ID NO: 4831 - DNA, 436 bp, Bos taurus
  Clone ID: 21-LIB3058-010-Q1-K1-F1
gtgatctgggcggtgaaggtgaatcaggccttgcgggatgccaccttctgcttcatcgtgtcactggcagtggctgatgtggcggtgggcgctctggtcatcccgctcgccatcctcatcaacattgggccgcggacctacttccacacctgcctcaaggtcgcctgccctgtcctcatcctcactcagagctccatcctggccctgctggcaattgctgttgaccgctacctccgtgtcaagatcccactcaggtacaagacagtggtgactcctcgaagggctgtggtggccatcactggctgctggattctctccttcgtggtgggcctgacgcccatgttcggctggaacaacctgagtgcggtggagcgggactggctggccaatggcagcgtgggcgagcctgtgattgaatgccagttcgagaaggtca

SEQ ID NO: 4832 - DNA, 361 bp, Bos taurus
  Clone ID: 21-LIB3058-011-Q1-K1-F1
ctagtttagatcgcgagcggccgccctttttttttttttttttttttttttttaggatgaacatgatttatttcattatcagtcttacaagttgctgaggttgggcaaagccaggagagtaacttcaggcgtttctatcaagtgacagcctgattagcagggccgttactgagcggagggcagtggagggcaccccaggaaccccagcttctacagcagtgttaaaacccctccttcagaggcactggatagggcgtggcccgtgacagccaggggccactccactggcttttggtgcccactgaccccttttagcagagacacaaaggccttcagaggcaccaaggaagcaggatgggct

SEQ ID NO: 4833 - DNA, 429 bp, Bos taurus
  Clone ID: 21-LIB3058-014-Q1-K1-F1
gtcgaggcagagccgcggaatcgccgcgagatccggtctcggtccacgctgcccgtcgcgcagccagtcggccaacccagcgtccgccgctaccgcagccatgggagtgcaggtggagaccatctctcccggagacgggcgcaccttcccgaagcgtggccagacctgcgtggtgcactacacggggatgcttgaagatggaaagaaattcgattcctcccgggacagatacaagccctttaagtttgtgctgggcaagcaggaggtgatccgaagctgggaagaaagggttgcccagatgagtgtgggtcagagagccaagctgactatctccccagactatgcctatggtgccactggccacccaggcatcatcccaccaaatgccactctcatctttgacgtggaacttctaaaactggaatgaca

SEQ ID NO: 4834 - DNA, 388 bp, Bos taurus
  Clone ID: 21-LIB3058-016-Q1-K1-F1
ttcaaaacacaacttttatcacaatccagaactgacaccaacaaaaatattaaaacaaaacaccccttgagaaacaaaatgaacgaaaatttatttacctcttttattacccctgtaattataggtctccctctcgtaacccttatcgtactatttccaagcctactattcccaacatcaaaccgactagtaagcaatcgctttgtaacccttcaacaatgaatacttcaacttgtatcaaaacgaataatgagtatccacaattctaaaggacaaacatgaacattaatattaatatctctgatcctatttattggatcaacaaacctactaggcctattaccccatttattgacagcaacaacaccactatcaataaacctaagca

SEQ ID NO: 4835 - DNA, 459 bp, Bos taurus
  unsure (318): unsure at all n locations; Clone ID: 21-LIB3058-018-Q1-K1-F1
agggctctggcgtccggcttggagacgcgtcgttttctgcgggtggtcttggagccaccttgggcgcccaacccgggctgctgagagggcagagccgtgtctccggccggggaggagcgggccggcgggtactgagcaggggctgaggcggcttgggacatggaggcgcccgagcccggcggagcagccggctcggcggccgaagagcacgaacccctacacgcgctcgcaggaggaggactggcggcggcggaacaagacggtcctcacctacatggccgcggcggcggtgggcatgctgggcgcgtcctacgccgncgtgcccctttaccggctctactgccagactactggacttggaggatcagcagtagcaggtcatgcgtcagaccagattgaaaacatggtacctgttaaggatcgcatcattaaaatcacctttaatgcagatgtgcatgc

SEQ ID NO: 4836 - DNA, 418 bp, Bos taurus
  unsure (384): unsure at all n locations; Clone ID: 21-LIB3058-018-Q1-K1-F9
cggacgcgtgggcggacgcgtgggttgcactctaaaaggttcagggaaccgttattatatatgtatcagaggcctataatgaagctttatacgtgtagctatatctatatataattctgtacatagcctatatttccagtgaaaatgtaagctgtttattttatattaaaataagcactgtgctaagaacagtgcagattcctttctatcatttttgtacagtctgctgcactagaggtctggttttgctattagactataggaagggtagcgtgcgtttttccccagctggctgtttcacggtgccgggatttctgggtgtccgaaaggaaggagtgtagcagtagccggctctccagtggccccctgctgcctcccagcagncacgccggggtgggggcagagcggggcccacgga

SEQ ID NO: 4837 - DNA, 429 bp, Bos taurus
  Clone ID: 21-LIB3058-019-Q1-K1-F9
gtgaataaatgcaaaatgaataaatataggcagtctacaaagtttattaagatttttactatcttattgtcatagtgtctggcttaggttttttaatatcctctaaggcatgaaatggcaacccaccccagtgttcttgcctggagaatcccagggacagcggagcctggtgggctgctgtccatggggttgcacagtcggacacgactgaagtgacttagcaccagaaggcatgaaatattaagcatctatctttttttttttcttttcttcttgaagatgaatttcaacttttttgccatcccaccacaaacataaaaaaaaaaaaaaaacagataaaaaaaatagaatagaattgaaactgaatccttaactagcctaaaacctaatgccaatctattaaaacttggcttttactataaataaaaa

SEQ ID NO: 4838 - DNA, 460 bp, Bos taurus
  Clone ID: 21-LIB3058-021-Q1-K1-F9
ggatcgagcgagctgagtggttgtgtgattgcgtcccggagaccggtatcgcttgcagcatggctgaccaactgactgaagagcagattgcagaattcaaagaagcttattcactatttgacacggatggtgatggaactataacaacataggaatagggaactgtaatgagatctctcgggcagaatcccacagaagcagagtttcaggacatgattaatgaagcggatgctgatggaaatggcacaatggacttaccggaatttgtgacaatgatggctagaaaaatgaacgatacagactgcgaagaagatattagagaagcattccgagtgtttgataaagatgggaatggctatattagtgcagcagaacttcgccatgtgatgactaacctcggagagaagtgaacagatgaagaggttgatgaaatgatcagggtagcagatattgacggtga

SEQ ID NO: 4839 - DNA, 381 bp, Bos taurus
  Clone ID: 21-LIB3058-022-Q1-K1-F1
gagcaagtgaacgcagggaccatagcccactaggctcctctgtccatggaattctccaggtaagaatgctggagtgggttgccatttccttctccaggggatcttcccaatccagggatcgaacctgagtctcctgtgcctcctacattgcaggcggattcttatcactgagctactggggatgcccctttggcatcttaatgaagccattaaaaaaaagtatcctatagatgctatattgttacatgtaactaccacattcttaagtattctagaaagcccaatgggtgtatgtttggagttatgagaaacaacaggtaacagttaaatcagcttctagacaaagacattcaagttcccagctcgagccttactgttccc

SEQ ID NO: 4840 - DNA, 411 bp, Bos taurus
  Clone ID: 21-LIB3058-023-Q1-K1-F9
cttgactagagagtaaaatttaacactaccataataggcctaaaagcagccatcaattaagaaagcgttgaagctcaacatctaaaattaaatagattccaacaacaaatgattaactcctagcctcaatactggactaatctattatagaatagaagcaataatgttaatatgagtaacaagaaaaattttctcattgcataagtctaattcagtgcctgataatactatgaccactaacagtcaataaaaataattcaacaataatacaatttattgattatactgttaacccaacacaggagtgcatctaaggaaagattaaaagaagtaaaatgaactcggcaaacacaaaccctgcctgtttaccaaatacatcacctactgcattcccagtattggaggcattgc

SEQ ID NO: 4841 - DNA, 372 bp, Bos taurus
  unsure (289),(351): unsure at all n locations; Clone ID: 21-LIB3058-027-Q1-K1-F9
cgccggaatgagctcttcctggatgtgctggagagtgtgaacctcctcatgtccccggagggcaggtcctgagcgcccatgtgtcaggccgggtagtgatgaagagctatctgagtggcatgcctgagtgcaagtttggaatgaatgacaagatcgtcattgagaagcaaggcaaaggcacagctgatgaaacaagcaagagcgggaagcaatcaattgccattgatgactgcaccttccaccagtgtgtgcgactcagcaagtttgattctgaacgcagcatcagctntatcccaccagatggagaatttgaactcatgaggtatcgcaccaccaaggacatcatccttncttttcgcgtgatcccactag

SEQ ID NO: 4842 - DNA, 354 bp, Bos taurus
  Clone ID: 21-LIB3058-032-Q1-K1-F1
cggagcgctcggagtttgccacttatcggtcatccttggtgtccgcagcactctctccctgtctctagggcggcgacctccggcggccggaaagtcaccatgtccatcctgaaggtccacgccagagagatctttgactctcgtgggaatcccaccgttgaggttgatctcttcaccgcgaaaggtctcttcagagctgctgtgcccagtggcgcttcaactggaatctatgaggccctggagctccgggacaatgataagacgcgctacatggggaaaggtgtctcaaaggctgttgagcacatcaataaaactattgcgcctgccctggttagcaagaagctgaacgtcttg

SEQ ID NO: 4843 - DNA, 431 bp, Bos taurus
  Clone ID: 21-LIB3058-034-Q1-K1-F9
aatggatctgcgttttcttcatttcaatgttatgtcaaagttgctaagtatttatgagaaaactgttcttcctggcagatagcttaaagagtggggtatataaaatcacaaaatgtttatttcacatggctgcaattggaaaaatacaattttgtgacctctcatttgcagatgatcaattaaaaatgaaatcaaaatgtttatccttgtgattgaaactgaatgcttgtcttgatattgtataactaacacacagactcttttaagagaaccatgaaaaaatatcaatttctcattgtcttaaatggaatgttaaagtagtatatattcaataggatttctgaccaaaaaaaaaagatcttaaatttttgtaaaatgtggtaaatctagacttcgtttgcattcaaatttaaagctacctttccctatat

SEQ ID NO: 4844 - DNA, 446 bp, Bos taurus
  unsure (438): unsure at all n locations; Clone ID: 21-LIB3058-035-Q1-K1-F1
ctgagactgttgagggaaaaaaaattttatacccttgatttatatagatatcttcatgcgcattgcagctttatagatgctaatacatgtgactatcgtccaatttgctttcttttgtagtgaagttaaatttgactataaaagatggactagatgtgatattcatatggacgttaatggaaaagaaagatcatttctcgaaagaattagtttcagagaaagcaggcaagatgtttttctgtgttaggaccgatgtgaaatggtttctgtcaccattgtttggatttgaaaatcttctgcagtggatataaacattgggccgtagtttgttaatctcaactaacgaaacctccattacatcctccttgattgttcttgttactatgctgttttgtgaacctgtagaaaacaagtgctttttatcttgaaattcaacanatgggaag

SEQ ID NO: 4845 - DNA, 418 bp, Bos taurus
  Clone ID: 21-LIB3058-035-Q1-K1-F9
atcgcgagcggccgcccttttttttttttttatatttattttttttttttttttttttgtttgtttttttttttttttttttttttttttttttttttttttttttttttttaaaaaaaaaaaaaaaaaacttaaaaataaaaaaaagaaaaaaaaaaataaaaaaggaaaaaaaaccgttaaaactcaaaaatgggaaaaaaaaaccggggctgtcttaaactttgggttaaacaagttattaaaaaaatttaacccaagattaaaaaaaacaagggattaaaaaaattaaaggaaaaaaaagggctgacaaaaaaactaaaatttaaaaatccaaaaatataaataaaatatttataatttgaaaaaaaaaatttaaatggaatattttaaaaaagaccttaaaaaaaaataaaag

SEQ ID NO: 4846 - DNA, 406 bp, Bos taurus
  Clone ID: 21-LIB3058-036-Q1-K1-F9
ccgcgggcctcgaccccgaaatggcgctgctggcgtagcacctgctgaggcccctgcctgcggacaagcagatcgagacggggcccttcctggaggcggtgtcccacctgccgcccttcttcgattgcctcggctccccagtgtttactcctatcaaggcggacataagtggcaacatcaccaaaatcaaagctgtctatgacaccaacccgaccaagttccggaccctgcagaacatcctggaggtggagaaggagatgtacggggccgagtggcccaaagtgggggccacgctggcactgatgtggctgaagagaggcctgcggttcatccaggtcttcctccagagcatctgcgacggcgagcgggatgagaaccaccccaacctcatccgcgtcaacgccac

SEQ ID NO: 4847 - DNA, 404 bp, Bos taurus
  Clone ID: 21-LIB3058-038-Q1-K1-F1
tccgacccacgcgtcgttgcggccggccactggaggactgtggttcgccgaaacatcgtgcgccacctcgtggaccccggaccccttgccagcccccggaacccgcctcagctgcagggcagtgccctgagtggaccgtcgtcttcgacctgtcggacgtggaaccagccgagcgcccgagccaggcccgcctggagctgcgcttcgaggctgcggaggcgacagcggggacgactggcggctgggaactgagcgtggcgccggcgggagcgggcctcgggccggtggggctccgccaggtggtgcccactctgggacagccggtgcgtgctgagctgctgggctccatctgggcccgcaacgcctcggcgccccgcacgctccgactgacgctggcgctgcgt

SEQ ID NO: 4848 - DNA, 243 bp, Bos taurus
  Clone ID: 21-LIB3058-043-Q1-K1-F1
caactgagcaatcttcacattctggccttcatagaggagtgttctcattgaatgatggtagagttcctggaaatgaagtctgactagaattttactgcagaggccaagtacatttagtatggcattgagttgtgatatagttttactttgatgtgcattttgaatttcagctacatctagatagacgtaaaatgataattaaaatgctgtaaccaacttatctaataaaatcggcacccagcc

SEQ ID NO: 4849 - DNA, 451 bp, Bos taurus
  Clone ID: 21-LIB3058-045-Q1-K1-F1
cgacccactcgtccggcgtcaattacccactcactcacatccttcggagtctgaatatctaacagtccttgcggtgcgggtatgctgacaacttatctggatgccttacatcttttctaaacagtgttgcctctgaacgtgctctgctccctccctgctccctctttggagcccctttgcaccccagagcctgcagaagtggctggtataaaagggggcctggctagagaatgatcagtgtagctgtttgcaggattcctttctgggcttcattttggaaactttgcttagggctatttttcttaattgcccacatttgatggagggtagaacgaattttgaatgtattcgatttattattattattattttttttttagattaaaggatggttgtagcatttaaaatggaaatttttcctcctggttagctagtatcctgagtgtattct

SEQ ID NO: 4850 - DNA, 364 bp, Bos taurus
  unsure (28): unsure at all n locations; Clone ID: 21-LIB3058-048-Q1-K1-F1
ggggcacagtgcgacgcaggagtgaccnttctctctgggggtcagagtgaagaagaggcatctctcaacctcaatgctatcaaccgatgcccccttccccggccgtgggccctcaccttctcctatgggcgtgccctgcaggcctctgcactcaatgcctggcgagggcaacaggacaatgctggggccgccactgaggagttcatcaagcgggccgaggtgaatgggcttgcagcccagggcaaatatgaaggcagcggagaagacggtggagcggcagtgcagtccctctacattgccaaccacgcctactgagtacccctctacaccacagcccttggcccaaccacctgcacccagtttt

SEQ ID NO: 4851 - DNA, 444 bp, Bos taurus
  Clone ID: 21-LIB3058-051-Q1-K1-F1
cagtgatatgcagacggctgccgataagtgcgaggagatggaagaaggctacacccagtgctcgcaatttctgtatggagttcaggagaaaatgggcataatgaataaagggatcatttacgcactttgggactatgaacctcagaatgatgacgagctgcccatgaaagaaggagactgcatgacaattgtgcgcagggaagacgaagatgagattgaatggtggtgggcccgcctgaatgacaaggaaagatatgttccacgcaatttgctgggactatacccaagaattaaaccaagacaaaggagcttggcctgaaactttgcagatgtttagatcatgaagaattcatctctgttaccactaataagaaacagtatgatcgtttgcggcagaaatttctcaagactgattttaatgacagaagtaacttgaaagccatt

SEQ ID NO: 4852 - DNA, 448 bp, Bos taurus
  Clone ID: 21-LIB3058-052-Q1-K1-F9
aagggcttccagcaccagcggatgaccaacggggccatgaatgtggagatcgggaatcccacctataagatgtatgaaggcggggagcctgatgatgtagggggtctactggatgcggacttcgccctggaccctgacaagcccaccaacttcaccaaccccgtgtatgccacactgtacatgggcggtcacggcagccgccactccctggccagcacggatgagaagcgagaactcctgggccggggccctgaggacgagataggggaccccttggcatagggtcctacaccatcggactttcccagagagcctactgcccccggccagagaagtccttcaaggagtccccctcttgcccagccaaccccttcccagccctgctgggatgtataaatgtaaaaaatgaaggaattactttttatatgtgagtgagcaagcgagccag

SEQ ID NO: 4853 - DNA, 401 bp, Bos taurus
  unsure (358): unsure at all n locations; Clone ID: 21-LIB3058-053-Q1-K1-F1
acgggtagctggagccgctagctgcaggctttagtttctgagatctcaaaaagtatttctgcgagggaccaggcgcggctgctgcttcagagccttggttacgatctccggagcccagccgccgctgtctgtggagagagaggccacccagccgggatcttactttaggagccctcccatggcttcccaggagagggtggagacagtgaccaaaggaacagggttctggcgctgtcccaagccgaccacttacaccccagggacctgcgagctgatcagagtgatgatgaaggaatccaaactgacgaactttcaacagcgccacatcacagacaccatgaaacgaggagacactctnccactgcggtgcaacccaactttcagccagagagtcttgcctt

SEQ ID NO: 4854 - DNA, 372 bp, Bos taurus
  Clone ID: 21-LIB3058-057-Q1-K1-F1
cggacgcgtggggttctagatcgcgagcggccgccctttttttttttttttttttttttggtttttttcgggggatgagcctacctggtctttttcagtgattctttttctgacttcaggtagtttccttatatgtttgtgctgctctgtactcagctgaagactcaaaagcaaaactcagcagatctctggaactctctctctgtatggtcctctcctgttaatgcagttatatcctcacatgcagctttttcttctctgatactctgctccatgaattcttgcagccctgacttctctggattctctggttccttaacattaatttttattaaaaatatcatgacagattagtattaaataatgaatttt

SEQ ID NO: 4855 - DNA, 448 bp, Bos taurus
  Clone ID: 21-LIB34-001-Q1-E1-F1
ggcacttatgtcacctacagctgtgaccgtgacttctcaatgttaggcaaagcctccatttcttgcagagtggaaaataagacaataggtgtttggagtccaagccctccttcttgtaaaaaagtcatttgtgttcaaccagtggttaaagatggaaaaataacctctgggtttggacccatctatacttatcaacagtctattgtatatgcctgtaataaaggttttcggcttgaaggcgatagtttaatccattgtgaagctgataatagctggaatcctcctcctcccacttgtgaactcaatggttgtcttggcttaccacacatccctcatgccttgtgggaaagatatgaccaccagacacaaacagaacagcaagtgtatgatattgggtttgtattgaaccacaagtgccattttggctataagccagaaacaaatggac

SEQ ID NO: 4856 - DNA, 349 bp, Bos taurus
  Clone ID: 21-LIB34-001-Q1-E1-F9
cggccccgacccgagagggagagaccgacagacatggcggcggccaagcccgggaacctccccctgttggtgcaccgacccggagacttgcgcttggaaaactatcctatccgtgaaccaggcccaaatgatgtgcttctgaagatgcattctgttggaatttgtggctcaaatgtccattactggcagcatggtcgaattgcagatattgttgtgataaagccaatggtgctggcgcatgaagcttcaggaacagtcgtaaaactgggatcattggtcatgcacctacatgcagctgatcatgtcaccatcgaagcctggtgctcctcgagaaactgatgagttctgc

SEQ ID NO: 4857 - DNA, 423 bp, Bos taurus
  Clone ID: 21-LIB34-002-Q1-E1-F1
ccgggtgcccccacgcgtccgaaaaggacgataaggacaagaaaaagaaatatgaacctcctgtaccaactcgagttgggaaaaagaagaagaagacaaagggaccagatgctgccagcaaactgcccctggtgacgcctcacactcagtgccggttaaaactgctgaagctagagagaattaaagactatctcctcatggaggaggagttcattagaaaccaggagcagatgaagccgttagaagaaaagcaagaggaggagaggtcaaaggtggatgacctccgggggacgccgatgtcagtagggaccctggaggagatcatcgatgacaaccacgccatcgtgtccacgtctgtgggctcggagcactacgtcagcatcctctcgttcgtagacaaggacctgctggagcccggctgct

SEQ ID NO: 4858 - DNA, 426 bp, Bos taurus
  Clone ID: 21-LIB34-002-Q1-E1-F9
cgcgtccatatagatgagactgtgaagaataatatcccaactaagcttcgtgtgctccgttcaattctggagaatttgagaagcaaaatacaaaaattagaatcggatgtctcaacgcagatggaatactgccgcaccccgtgtagtgttacttgcaagattcctgtggtgtctggcaaagaatgtgaggaaatcatcaggaatggaggtgaaacatctgaaatgtacctcattcagcctgaggattctagcaaaccatatagagtatactgtgatatgaaaacggaaaaaggacgatggacagtaattcagaaccgtcaagatggtagtgttgactttggcaggaaatgggatccatataaacaaggatttggaaatattgcaaccaatgcagaagggaaaaaatactgtggtgtaccacgtgag

SEQ ID NO: 4859 - DNA, 400 bp, Bos taurus
  Clone ID: 21-LIB34-003-Q1-E1-F1
gaacccagagcgaaaacagagcctggtgggctgggactcccatctttctagaatcttcctattgctgctatttgtagtctcagcccaggggctcaccccaaatcctgaagcctgtctggtgttctcctcggtcaatggcagctccatctcctgccagccacctgcccaaatcccccacagcctcccagctgacaccatctttctggctgtggagttcttcagcctgactcagctgcctgccgacttcctccagggcgtccctaacctccaggaactccacctttccagcaaccgactggaggacttctcccccaagttcctgctgcccgtgccccagctaaaggtgctcgacctgacccgcagttcgctgaccgggctgttccctggcttcttccgggtc

SEQ ID NO: 4860 - DNA, 394 bp, Bos taurus
  Clone ID: 21-LIB34-003-Q1-E1-F9
gcctgggtcttggacaaacttaaagctgaacgtgagcgtggtatcaccattgatatctccctgtggaaatttgagaccagcaagtactatgttaccatcattgatgccccaggacacagagacttcatcaaaaacatgattacaggcacatcccaggctgactgtgctgtcctgatcgttgctgctggtgttggtgaatttgaagccggtatctccaagaacgggcagacccgtgagcatgcccttttggcttacaccctgggtgtgaaacaactaattgttggcgttaacaaaatggattccactgagccaccctatagccagaagagatacgaagaaattgttaaggaagtcagcacctatattaagaaaattggctacaaccccgacacag

SEQ ID NO: 4861 - DNA, 418 bp, Bos taurus
  Clone ID: 21-LIB34-006-Q1-E1-F1
cgcctgagccagaaatttcccaaggctgagtttgtagaagttaccaagctagtgacagatctcacaaaagtccacaaggaatgctgccatggtgacctacttgaatgcgcagatgacagggcagatcttgccaagtacatatgtgataatcaagatacaatctccagtaaactgaaggaatgctgtgataagcctttgttggaaaaatcccactgcattgctgaggtacaaaaagatgccatacctgaaaacctgcccccattaactgctgactttgctgaagataaggatgtttgcaaaaactatcaggaagcaaaagatgccttcctgggctcgtttttgtatgaatattcaagaaggcatcctgaatatgctgtctcagtgctattgaaacctgccaaggaatatgaagccacac

SEQ ID NO: 4862 - DNA, 359 bp, Bos taurus
  Clone ID: 21-LIB34-006-Q1-E1-F9
tcgcgagcggccgcccttttattttttttttaaatcaaaagaagtaccgagtttacttgcaccaaaggtaaaacttgtcctgccatgggaatatggaatcccacaatctggagcaatggatctctgtctcacatgggaggcccagtagaagtgtaaggactcagggctgaccaagtccatctgtgtgtccaacgtcaaccacacacagctggagaagatcctgaacaagccagtgcttaagtacaagcccgtctgcaaccagctggaatgtcagccttatttcagtcacatcagactgttggatttctgcaagtcacatgatattgatcttgttgcctatggtgctctgggatcccaac

SEQ ID NO: 4863 - DNA, 342 bp, Bos taurus
  Clone ID: 21-LIB34-007-Q1-E1-F1
cagacacgtgggcagcgattgcctgccagaccccaacgtgtggtctgagatgctgaacaagtcacctatcaagtacacccctcaggtgaagacaccagtgttactgatgcttggccaggaggaccggcgtgtgcccttcaagcagggcatggagtattaccgtgccctcaaggcccggaacgtgcctgttcggctcctgctctatcccaagagcacccactcactctcagaggtggaggtggaatctgacagtttcatgaatgctgtgatctggatgtgtacgcacttgggccactgaagccctgcccctcggcacgagctgggtggcatatgccacactgg

SEQ ID NO: 4864 - DNA, 392 bp, Bos taurus
  Clone ID: 21-LIB34-008-Q1-E1-F1
actgtcttgagtttttgccttttaaatccaactgcctactagatatttccatctaatgccccataaattaggccaatgttgtgtaacttcttgtcacactatttacataaaatgaaatggggttgtgcataatggcagccctgccaacaattttaaactctactacgtccacaatggaactcagaatcacctgaatattgtgctccatcagtttcctctcccagtgatctcatttctattaaaggggaatgaaactgagactgttagtcactcagtcgtgtttgaatcgttgtgatgccatggactgcagaccaccagacttctctgtccatgggattctccacgcaaagaataccggagtgggtatccattcccttctccaagggatcttc

SEQ ID NO: 4865 - DNA, 394 bp, Bos taurus
  Clone ID: 21-LIB34-008-Q1-E1-F9
agaggattggcttggccccagttttgggctatttgattattgaagaagattttaatattgcattaggagtttttgctttagctgggctaactgacttgttggatggatttattgctcgaaactgggccagtcagaaatcagctttgggaagtgctcttgatccacttgctgataaaatacttatcagtatcttatatattagcttgacctatgcagatcttattccagttccacttacttatatgataatttcaagagatgtaatgttgattgctgctgttttttatgtcagatatcgaactcttccaacaccgcgaacactttctaagtatttcaatccttgttatgccactgctaggttaaaaccaaccttcatcagtaaggtgaacacagc

SEQ ID NO: 4866 - DNA, 344 bp, Bos taurus
  Clone ID: 21-LIB34-009-Q1-E1-F1
cccacgcgtccgagtcaacatgactgacaatgatcttatcgatattcttgaccctttttatcatctttcaactaaaagtttcaaaacacaacttttatcacaatccagaactgacaccaacaaaaatattaaaacaaaacaccccttgagaaacaaaatgaacgaaaatttatttacctcttttattacccctgtaattttaggtctccctctcgtaacccttatcgtactattcccaagcctactattcccaacatcaaaccgactagtaagcaatcgccttggtgacctccaaaaaatgaatacttcaacttggatcaaaacaaataatgagtaaccacaat

SEQ ID NO: 4867 - DNA, 418 bp, Bos taurus
  Clone ID: 21-LIB34-009-Q1-E1-F9
tctagatcgcgagcggccgccctttttttttttttttttttttttttttttttttttttttttttttttttaattggtgttgtgggggaaaattccaggtgccttactataaagtttgaagcttcatccaccaaagttaaatagagctattataaaaatgcactttatattttctgtggcttatctttggttttagagttttgtttccagtacaaattccagcagaatttaagcaaaagcagaatagacatgtatttttgttggctaaatgtagagtggatgaaaccattgcattcttgtacactgatttgaaatgctgtaaataggtcccgatttgtattgattccctttaaatataaaatgtaaaataaaatattccaaataaaaaaaaaaaaaaagggcgggccgcccaaaaggt

SEQ ID NO: 4868 - DNA, 373 bp, Bos taurus
  Clone ID: 21-LIB34-010-Q1-E2-F1
gtcgagagcttctctgattatcctcccctgggccgttttgctgtgcgtgacatgagacagacagtcgctgtgggtgtcatcaaagcagtggacaagaaggcagctggagctggcaaggtcaccaagtctgcccagaaagctcagaaggctaaatgaatattatccccaatacctgccaccccagtcttaatcagtggtggaagaacggtctcagaactgtttgtctcaattggccatttaagtttaatagtaaaagactggttaatgataacaatgcatcgtaaaaccttcagaaggaaaggagaatgtttttgtggaccatatgttttgtgtgtggcagtttaagttattagtttttagaatcagtactttt

SEQ ID NO: 4869 - DNA, 420 bp, Bos taurus
  Clone ID: 21-LIB34-010-Q1-E2-F9
ccacccctcccagagctgctgcctgaaccacccagaagctccttcctcctgcgctggcagagcctgggcaccgcgctcagggcatacacggcctccaggagccccaggggaggaggagttccttctgccacaagaacctggcattgaaggataatggcactctccatcacgcggggccttctgctgctggcagccctgtgctgcctggcccccatctccctggctggagttctccaaggacacgctgtccaagagacagatgatacatcccaccaggaagcagcatgccacaagattgcccccaacctggccaactttgccttcagcatataccaccatttggctcatcagtccaacaccagcaacatcttcttctcccccgtgagcatcgcttcagcctttgcgatgctctccctggga

SEQ ID NO: 4870 - DNA, 370 bp, Bos taurus
  Clone ID: 21-LIB34-011-Q1-E1-F1
agaatggtcctcgccgagcaggacaaacagcaatgtcacctacagccgcagaccccttccccagccccagtctgtagctgcctcgagcagggagctggtggctcttccatccccagaccagccaagcctgtgagtgacaccccagacagaggaaccagagccatgcggagtctcagcggactgctgttgttactgactgcctgcctggcggtaaacgccagctccgtgcccacattgcccgatgacattcaagtgcaggagaacttcgacctgtctaggatctatgggaagtggttcaatgtggccgtgggctccacctgcccatggctgaagaggttcaaggagaagatgaccatgagcacagtggtgt

SEQ ID NO: 4871 - DNA, 401 bp, Bos taurus
  Clone ID: 21-LIB34-012-Q1-E1-F1
acagtttgtattgtaccgcataaccgaggttgccagaatggataatcctgacacattttattccttgaagtaccaaatcaaggagggcgactgtccttttcaaagtaacaaaacttggcaggactgtgactacaaggactctgcacaagctgccacaggagagtgcacagcgaccgtggccaagagagggaatatgaagttctccgtggctatccagacctgcctgatcactccagccgagggccccgtggtgacagcccagtatgagtgccttggctgtgtgcatcccatatctaccaagagccccgacttggagcctgttctgagatatgccatccaatattttaacaacaacaccagtcattcccacctccttgatctgaaagaagtaaaaagagccc

SEQ ID NO: 4872 - DNA, 387 bp, Bos taurus
  Clone ID: 21-LIB34-013-Q1-E1-F1
gtcggcccacgcgtccgataaattgtccatgttgctgaaaaaggaggctatgtttaacacagattctccttaatattgtacagttaaatggtggctctaatttctgatattgcaagccattttgttctttcattgtacatagacacattgtctctttaagatgctgctgaaattgtagagaatgtagccaaaacagtaataaacaatgacagttaaaatttaaagactatgaaattacatttgaagggagctttcaagacttaggacattgactgggctcctttacttaagaatcagctgagtaaattcttgaagtatacttcaagataagtatgaaggggtttcaagctgttaaagtatacctaataaccattatcaaggctaatc

SEQ ID NO: 4873 - DNA, 395 bp, Bos taurus
  Clone ID: 21-LIB34-015-Q1-E1-F1
tgcaggagaaggaggtgatacaggacgtggtggcagaaaaatgaagaggatcctggttttcctccttgctgtagcctttgtgcatgctctagagagaggccgagattatgagaaagataaagtctgcaaggaccttgccagcctgggaagagatgacttcacatctttgtcaatggtcctatacagcagaaaatttcccagtggcacctttgaacagatcagccatcttgtgaatgaagttgtttccttaacagtaacctgctgtgcggaaggggccgatcctgactgctatgacaacaggacttcagcattgtctgacaagtcctgtgaaagcaactctccattcccagtgcaccctggaactcctgagtgctgcacccatgagggccttgaaa

SEQ ID NO: 4874 - DNA, 374 bp, Bos taurus
  Clone ID: 21-LIB34-017-Q1-E1-F1
gtcggacaggactcagcaactgagcacacactcaatgaattcctcccttgtggcatggaagtggttctttcatcagtttgtgtaacactgccatctgctgttgaaaaataggtactgcttctgagaacctgaccaaatctcaccataagggcaacagtgtttagtttcagtgcaagtcgctcagttgtgtccggctgtttgtaaccccatggactatacagtgtggggttttccatgccggaatactggggtgggtggccgttcccttctccgggggttcttcccggcccgggggtcgagcccaggtctcctgcattgcaggcccattctttgccagctgagccatcggggacaccccataagagcaacagatg

SEQ ID NO: 4875 - DNA, 370 bp, Bos taurus
  Clone ID: 21-LIB34-018-Q1-E1-F1
gacccacgcgtccgggattccaagatgcaacatcaccagtcatagaagaactacttcactttcatgaccacacgctaataattgtcttcttaattagctcattagtactttacattatttggaggatacgaacgacaaagctgacccatacaagcacgatagatgcacaagaagtagagacaatctgaaccattctgcccgccatcatcttaattctaattgctcttccttctttacgaattctatacatgatatatgaaatcaataacccatctcttacagtatagaccatatgagatcagtgatactgaagctatgggtatacagattatgatgacttaagcttcggctcctacataattccaacatc

SEQ ID NO: 4876 - DNA, 315 bp, Bos taurus
  Clone ID: 21-LIB34-018-Q1-E1-F9
ctgaagcttgggcgtgagtaatgggacttggcacaccaggcgcgatgagacctgcagtgaatggaactatttcctggggcgcaccatgcccggcagtactatcacctgtgacaccggtcgctccgattacgtaagtgctgggacttgcaacggcagacgcctggagccctatattgctgtgatttacaaccacggacgaccacagccctgtaatgatggcacttggaatactggatgctctgaatattcaagttttatgacagatagctcatgtcataggaagtttaagccttcgactccagactgcggcacctt

SEQ ID NO: 4877 - DNA, 429 bp, Bos taurus
  Clone ID: 21-LIB34-019-Q1-E1-F1
cgatgagtcccatgcacggctgtgaaaagtcacttcacactctctttggagatgaattgtgtaaagttgcatcccttcgtgaaacctatggtgacatggctgactgctgtgagagaaaagagcctgaaagaaatgaatgcttcctgagccacaaagatgatagcccagacctccctaaattgaaaccagaccccaaatatttgtgttatgagtttaaggcagatgaaaagaagttttggggaaaatacctatacgaaattgctagaagacatcccctacttttatgcaccagaactcctttactatgctaataaatataatggaatttttcaagaatgctgccaaactgaaaataaaggtgcctgccttgcaacaaagattgaaaatatgaaagaaaaagttctgacttcattctgcagacagagactc

SEQ ID NO: 4878 - DNA, 374 bp, Bos taurus
  Clone ID: 21-LIB34-020-Q1-E1-F9
agtgaaaacagtcgacttgttggagacaaccagctgccaggatctgtccttggtgaccaactgcatggagcacgccctgactgcctgccacccccgcacccgatactcacctggctgggatgccaagttcatctaccttcccatgagctacctgcccagcttcctggtggatctcatggtgtactggagaaaccccaggcctgcgaaggccctgtaacccaagactggggtgcattgtatggggtagttgcgtacagaatggggagaggatgcatcgggggagggaaatatagtggagagtggagttttcatgtcaccaggacacctttccatctcactcccatctcctccccagtctcccttttggacattac

SEQ ID NO: 4879 - DNA, 403 bp, Bos taurus
  Clone ID: 21-LIB34-020-Q1-E2-F1
aatgtgtccgctaacaatggacaatcagctggggcgttaacgtcctgttatataaaacctcggaaagcaacagaaacaaatcagtcagattactcagtggcacaacaaagaatggatcgcaaaggccatagagtgaagcttaaagatggccacttcattccagtcctgggatttggaacctttgcacctcgagatgttcctaagaatgaagctctggaaatcaccaaatttgccatataggctgggttccgccatattgacagtgctcagatgtaccataatgaagagcacgttggccatgccattcgaagcaagagtgccgatggcactgtaaagagagaagacattttctacacttcaaagctttgggccagttcacttcgtccataattggtccgaccag

SEQ ID NO: 4880 - DNA, 281 bp, Bos taurus
  Clone ID: 21-LIB34-020-Q1-E2-F9
tgaaatcactcaacttgttggacacaaccagctgccagcatctgtccctggtgatgaaatgcatggagcacgccctgaatgcctgccacccccgcaaccgacactcacctagctgggattcccatcttcatctaccttctccataatctacgtgcccagcttcctgatggatctcatcgtgtagcggataaaccccatgcttgccatggccctgtactccctgactggggttcactatagggggtctttccatacaacatgtggagaggatgcaccggggg

SEQ ID NO: 4881 - DNA, 350 bp, Bos taurus
  Clone ID: 21-LIB34-022-Q1-E1-F1
cataaacctaggagtcctatttatattagccatatcaagcctagccgtatactccattctctgatcaggctgagcttccaactcaaaatacgcactaatcggagccctacgagcagtagcacaaacaatctcatatgaagtaacgctagcaattatcctgttatcagtactcctaataagtgggtcctttagcctctccacattaattactagacaagaacagatatggttaatcctcgcagcatggcctctagcaataatatgatttatctcaacactagcagaaacagaccgagctccatttgatttaactgaaggagaatcagagctagtctcgggcttcaacgtag

SEQ ID NO: 4882 - DNA, 401 bp, Bos taurus
  Clone ID: 21-LIB34-023-Q1-E1-F9
gagaagagcctgtaagtctgtaattcacatctcctgccagcagagaaaagaagaaacatgagcacggcaggaaaagtaataaaatgcaaagcagctgtgctgtgggagctcaataaaccattttccattgaggaggtggaggttgcaccccctaaggcccatgaagttcgtattaagatggtggccacaggaatctgtcgctcagatgaccatgtggttaatggatctctggtcacacgtcttcctgtggtcttaggtcatgagggagccggcattgtggagagcattggagaaggggtgactacagtaagaccaggtgataaagtcatcccactctttattccccagtttggaaagtgcaatgtttgtaaacacccataaaccaccctttgcctgaaatg

SEQ ID NO: 4883 - DNA, 359 bp, Bos taurus
  Clone ID: 21-LIB34-025-Q1-E1-F9
caaatacagaggtcaagataaaatcacttatgagtgtaaaaagggtttttttcctgagatccgtggaactgatgcaacatgtaccagagatggctgggtacctgttccgagatgtgcctggaaaccttgtagttatccagtaataaaacatggacggctatattattcatacagaggatactttccagcacgtgtaaatcaacagtttgtctatagctgtgatcatcattttgtacctccttcacaacgttcctgggaccacctgacttgcacagcagaaggatggtctccagaagaaccatgcctcagacaatgtattttcaattatttggaaaatggacataccccatatcgtgaag

SEQ ID NO: 4884 - DNA, 332 bp, Bos taurus
  Clone ID: 21-LIB34-026-Q1-E1-F9
cccacgcgtccgatttttttttttttttttttttttttttttttttttttttttttttttttttttttttttttttttttttttttttttttttttttttttttttgtttttttttttgggtttgtgttttttttctttttttcctgtttttttgaaaaaaaaacccgtttccccccaacccccggtggccaaaaaagggcggggggggcccccccacaggggggacccgggggccccccaacggccggggcgcggacagaaaaaaccccccgggaaaagggggccccccccccccacaggcccacacagggggcagggggccccccccacc

SEQ ID NO: 4885 - DNA, 247 bp, Bos taurus
  Clone ID: 21-LIB34-028-Q1-E1-F1
aacaatccaaaagagtatagaagatttacgtaatactgtggactctgtttcccggacctcttcttccacctttcaatatataactctgctaaaaaacatgtggaaaggaaggcagaatcaagtacaagataatgaaaatgtagtagacgagtactcctcagatctggaaaagcaccagttatatatagatgagactgtgaagaataatatcccaactaaagcttcgtgtgctccgttcagttctgga

SEQ ID NO: 4886 - DNA, 417 bp, Bos taurus
  Clone ID: 21-LIB34-029-Q1-E1-F1
gtgccctgctgccccgcgtccgcgccccgctgcggccctggctcttctgcccggtgcagcgctccttcgcctcgagcgcagcctttgagtacatcatcacagcagagaagggaaggaacagcaacgtggggttgatccagctgaaccgccccaaggccctcaatgcgctctgcaacggcctgatcgtggagctcaaccaggcactgcaggccttcgaggaagacccagccgtgggggccattgtcctcacaggcggggagaaggtatttgcagctggagccgacatcaaggaaatgcagagcctcacgttccagaactgttactctggcgggtttttgagccactgggaccagctcacacgtgtcaagaagccagtcatagctgctgtcaatggccaagcccttggtggtggctgtg

SEQ ID NO: 4887 - DNA, 413 bp, Bos taurus
  Clone ID: 21-LIB34-029-Q1-E1-F9
caacttaatattaaacatatcatcacatcacttcaaagaacaccatttaccgttctcaatcaaaattttatgacaatcatttattcatatattttgtgatgtgtgaatcaaattttagaatttgattctaaagtttaaccactggatgaaatttcaaaacaccgccctaaataaaataaaaaaaatttttatgtttaaagtcatcttgttagctaactgcacaacttcttcagttaaaaaaatacttttcttgctaaaattctacacttgaataaatataaacaattaataattgtacaattcttaaatgatgtaatattaatttcaaaactaaaattaaataagttgattttacatgtgaaaatcagtaacatggattttaaaattgatactaattttgcaacaaaataatt

SEQ ID NO: 4888 - DNA, 383 bp, Bos taurus
  Clone ID: 21-LIB34-030-Q1-E1-F1
ggcataactgaattcaagggaaaaagttacagatttatggtaatggaaagactgggaatagatttgcagaagatctcagaccagaatggtacttttaaaaagtcaactgtcttgcagctaggtatccgaatgttggatgttctggagtatatacatgaaaatgaatatgttcacggtgatataaaagcggcaaatctactcttgggttacagaaatccagatcgggtttatcttgcagattatggactttcctacagatattgtcccaatgggaaccacaaacagtatcaggaaaatcctaaaaaaggccataatgggacaatagagtttaccagcttggatgcccacaagggagtaaccctgtccagacgaagtgaccttga

SEQ ID NO: 4889 - DNA, 306 bp, Bos taurus
  Clone ID: 21-LIB34-031-Q1-E1-F1
aaggagacagggccatagaggggcggcaagacccggaccctccagtgtggagtgagaccaagcctggcgtggtgccaccaaagaaagcaagtgcaagcccagccaaggagaacagtaaggaatcagatttctggaagatgcttcacgagccagaggaacagcccccagaaagggaggagacacaggccgaggagcaggaaccaaaccttgaggccacagacccaccgccaacctctcccgatgattttcagaagaacgtacaggtcaaagtcattctgagtcctgcagacttgattcgattgatag

SEQ ID NO: 4890 - DNA, 419 bp, Bos taurus
  Clone ID: 21-LIB34-031-Q1-E1-F9
gatggagaaacctctgaagaacttgaccttgtgtctccgagcctatagtgatctctcccggggctacagcctcttctcctacaacatccacagcaaggataacgagctactggtttttaaaaacggaattggagagtacagtctatacattggaaaaaccaaagttactgttagagctaccgagaagttccccagcccagtgcacatctgtaccagctgggagtcttccacaggcattgctgaattctggatcaacgggaagccactggtgaaaaggggcctgaaacagggttatgctgtgggagctcaccccaagattgtcttgggacaagagcaggattcctatggaggagggtttgataagaaccagtcctttatgggagagattggggatttatacatgtgggactctgtcctgt

SEQ ID NO: 4891 - DNA, 414 bp, Bos taurus
  Clone ID: 21-LIB34-032-Q1-E1-F1
ccagatccagggaggccagcggaggttgctgcagagggagcgcccagctctgagccgctcttcctgggagcgggcagggtcgctcggcctgcccactggcaagagggacgggactgacccacttgttcccatcagcttctgaaggggcctgtgtttgttcgacaaatactgctaggcctgccacccctttagctccaaagtcagaggtgcagagagccaggaccaagagaagagctgctcaccagggatgaacaaattgccagagatgtggtgcattgtcctgttttcccttgtggcctgggtttatgccgagcctactatgtatggagagattctatcccccaactaccctcaggcataccccaacgaggtctagaagtcttgggacatagaagtccctgcagggtacgggat

SEQ ID NO: 4892 - DNA, 429 bp, Bos taurus
  Clone ID: 21-LIB34-033-Q1-E1-F9
taagtatgaaagtaaccacataatttataaggcaaaaatgagaaggcttcaaagatttgagtaaatctggttaggtttctgtttttcccaggtggaatggattgggtctattaaggactgaggagaagaagaagatactggtaaaaatcgtcagtgactaaatattctaaaagaaacgcaaaaaaaatttttttcaagcctttggctattcagagaagcaaaattggctcctaaatgcatgtcatttgtgagaatttctaatgaatatcatgaataattgatttggggctaagctttccattaacttaatatgacgtctaggaaagtattctttcatggccaaaacctgttgcagtagtatggcctccttaagcagtgaaatcttaagatgaaattttcccctttaaagtggttcgtaaggttggggtg

SEQ ID NO: 4893 - DNA, 448 bp, Bos taurus
  unsure (434): unsure at all n locations; Clone ID: 21-LIB34-035-Q1-E1-F1
cgacccacgcgtccgttttgaaccttaaacagtacaactggagtatttgtgtgaatgtaccactgggaaaatctaacatgttgatgttaatcaatgtccttctcaccttgtggttttacactgctcatggacaggggaaacattgtaattatccagtaataagacatggacggctatatcagtcatacagtggatactttccagcacgtgtaaatcaacagtttctctataactgtgatcagtattttgtgcctccttcactatattcctcggattacctgacttgcacagcagaaggatggtttccagaagaaccatgccttagagaatgtattttcaataatttggaaaatggatataccccaagtagtgaaagaaaagctgtacaaggtgaaacagtaagggttcgctgctattatggctacagtcttcanaataatcagaacac

SEQ ID NO: 4894 - DNA, 411 bp, Bos taurus
  Clone ID: 21-LIB34-035-Q1-E1-F9
acgagggcggctggcggtgaccacaagcgggtcccgctgccttgcctggagcagcgagcaggccaaggccctgagcaaggaccaggacttcaacccggccgtgcccctggcggagaacttctgccgcaacccagacggggacgaggagggcgcctggtgctacgtggccgaccagcctggcgactttgagtattgtgacctgaactactgcgaggagccggtggatggagacctgggagacaggctgggtgaggacccggacccggacgcggccatcgagggacgcacgtctgaggaccatttccagcccttcttcaacgagaagacctttggcgccggggaggccgactgtggcctgcgacccctgttcgagaagaagcaggtgcaggaccaaacggagaaggagctttt

SEQ ID NO: 4895 - DNA, 454 bp, Bos taurus
  unsure (405): unsure at all n locations; Clone ID: 21-LIB34-036-Q1-E1-F1
ggtcgcaaattccgggtagaccacgcgtccgacttgatccatttctactttcagtagtactctttccattccctatcccaatctttgaagtattaaatatcagcatatttccaaaaagtgctgtgaattttttgacaacatccgtaaaaaagataaaagaaagtcgcctcaaagatactcaaaagccgcgtgtggactttcttcagctgatgattaactcccagaattccaaagaaacagacaatcataaagctctctctgaccaagaactcatggcccagagtattatctttatttttggtggctatgagaccactagcacttctctttccttcattatatatgaattggccactcaccctgatgtccagcagaagctgcaggaggagattgatgcgactttcnccaataaggcgcctccgacctatgatgtcctggcacagatggagtatct

SEQ ID NO: 4896 - DNA, 388 bp, Bos taurus
  Clone ID: 21-LIB34-038-Q1-E1-F1
cggacgcgtgggtttggcagtggctgctgttgattgcagtggaacttcccgctcctgatgcaagcctggaaactgggcccagccttggcgacgggaaacgtggttgtgatgaaggtggctgagcagactccactcactgccctctagtgtggccatcctgattaaggaggctggctttcctccgggtgtggtcaatgttattcctggatttggccccacggcgggagctgccatcgcctcccatgaggacgtggacaaagtggctttcaccggctccactgaggttggccaactaatccatgttgctgcggggaatagtacactcagagagtgacgctggagctaggaggaacgagtccaagatcaccatgtcatatgctgatatgga

SEQ ID NO: 4897 - DNA, 381 bp, Bos taurus
  Clone ID: 21-LIB34-039-Q1-E1-F9
aaacaacagacaatttcccagtggcacctttgtacagatgaaccatcttgtgaatgaagttggttccttaacagtaacctgctgtgcagaacgggccgatcccgactgccatgacaacaggacttcagcattgtctgacaggtcctgtgaaagcaactctccattcccagtgcaccctgcaactcctgagtgctgcatccatgacggccttgagaataagctctgtatggctgccctgaagcaccagccacaagaatttccaacttacgtacagccaactgatgacgagatctgtgacgcattcaggaaagatcccaaagactttgctgatcgacttatgtaggaatattccattcattatggccaagctcatctgacacc

SEQ ID NO: 4898 - DNA, 402 bp, Bos taurus
  Clone ID: 21-LIB34-040-Q1-E1-F1
acccacgcgtccgatgatttcttgcaacgtcgaaccatttaaaaccatgatacatctattactgctacttttctgtgcgtttatacttcatgcccaagttcctactgactatgacgaaggacaatatgacacacctaacgtaagtttgggtgcacgcggtcatcggccctatgactagaagaatgaagatgcccccaccctgaaacctgtgccccctcccatcaacagatgttgctatcgggctcgtcccgccacatcaactgtaggccatatcacagtgcagatatatccccctgaccctgatggctgcctgcacgcggacaccgatctgggtgtgttgtgtcctacatgatgtaagttgcataatactttggtaagacaggagagacctatccgcaagag

SEQ ID NO: 4899 - DNA, 379 bp, Bos taurus
  Clone ID: 21-LIB34-040-Q1-E1-F9
cttaaaataaacaaaattctttaatattatccaatatcaattattactcccctgctactgctgctgctgggtcacttcagtcgtgtccggctctgtgtgaccccgtggacggcaaccacgaggctcccccatccctgggattcgccaggcaagaacgctggagtgggttgccatttccttctccagtgcatgaaagtgaaaagtcaaagtaaagtcactcagtcgtgtccaactcgtacgctcctccatccatgggaatttccaggcaaagtactggagtggggtgccattgccttctccgactattcccctacgtggtgcctaaacctaaaaaatttttttctgaattaggatgcattgtacacacaatgtcggtgca

SEQ ID NO: 4900 - DNA, 438 bp, Bos taurus
  Clone ID: 21-LIB34-041-Q1-E1-F9
cgggtcgagcacgcgtccatgccgactgtgaaaagtcacttcacactctctttggagatgaattgtgtaaagttgcatcccttcgtgaaacctatggtgacatggctgactgctgtgagaaacaagagcctgaaagaaatgaatgcttcctgagccacaaagatgatagcccagacctccctaaattgaaaccagaccccaatactttgtgtgatgagtttaaggcagatgaaaagaagttttggggaaaatacctatacgaaattgctagaagacatccctacttttatgcaccagaactcctttactatgctaataaatataatggagtttttcaagaatgctgccaagctgaagatagaggtgcctgcctgctaccaaagattgacactatgaaaaaaaaattatgactttatctgcaagacagagactcaagtg

SEQ ID NO: 4901 - DNA, 230 bp, Bos taurus
  Clone ID: 21-LIB34-043-Q1-E1-F1
tggaaacccagtccagtgttcttgcctggggaatcgcagggatggcagagcctggtgggctgccgtctctggggtcgcacatattcggacacaactgaagtgcgacactagcagcagcagcattcaacaatgagtgcgttacagtatagagttggtttctgctgcacactatgatgaaccacccattagacacataacggtgtgcatctcccctctccaaatcatcacag

SEQ ID NO: 4902 - DNA, 364 bp, Bos taurus
  Clone ID: 21-LIB34-043-Q1-E1-F9
ccccaatactttgtgtgatgagtttaaggcagatgaaaagaagttttggggaaaatacctatacgaaattgctagaagacatccctacttttatgcaccagaactcctttactatgctaataaatataatggagtttttcaagaatgctgccaagctgaagataaaggtgcctgcctgctaccaaagattgaaactatgagagaaaaagtactgacttcatctgccagacagagactcaggtgtgccagtattcaaaaatttggagaaagagctttaaaagcatggtcagtagctcgcctgagccagaaatttcccaagggtgagtttgtagaagttaccaagctagtgacagatctcacaaaa

SEQ ID NO: 4903 - DNA, 436 bp, Bos taurus
  Clone ID: 21-LIB34-045-Q1-E1-F1
atcacaatgctattaacagaccggaacctaaatacaaccttcttcgacccggcaggaggaggagaccctattctatatcaacacttattctgattctttggacaccccgaagtctatattttaatcttacctgggtttggaataatctctcatatcgtgacctactactcaggaaaaaaagaaccattcggatatatgggaatagtttgggctataatgtcaatcggatttctaggtttcatcgtatgagcccaccatatattcactgtcggaatagacgtcgacacacgagcctacttcacatcagccactataattattgctattccaaccggggtaaaagtcttcagctgattggcaacacttcatggaggtaatatcaaatggtctcctgctataatgtgagccctaggctttattttcttatttacagtag

SEQ ID NO: 4904 - DNA, 423 bp, Bos taurus
  Clone ID: 21-LIB34-045-Q1-E1-F9
catttgaactgtcaaaactttcatggtgggaaatgcaaataaaactggcaaatataggcagaagatttttattaacaaacaaaagagtgtgtgacagtgctatcacaaacaaggagttactcagcaggctacaggcagctaagttcgacgtctgtattgctgaccctttaagtttttgtggggaattggtggctgaactcctgaatattccatttgtatacacttttcgacttttctatgggaatgtcattgaaagactgtgtgctgggcttcctatgccttcttcatatgttcctggtgtcacatcaagactgacagacaagatgacttttatacagaggctggagaactggttactgtatacagtgagtgacatgatatattcatattatagagttccagaatgggatgagtattacagca

SEQ ID NO: 4905 - DNA, 332 bp, Bos taurus
  Clone ID: 21-LIB34-047-Q1-E1-F1
ttatgaaaccctagaggacgcaactgtgagtgtctctgtcctaacctctcaacttgctttcctgtgtccaatagcactgcagactccagtactagcctgtccagagcagcaagtgagaggaaacaagccagcattgtaagaggacatgcttctcctccctctctccgtgctgctcctgctcacacagccctggagatccctgggagcagaaatgacaaccttttctcagaaaatactggccaatgcctgtaccctggttatgtgtagccccctgcagagtggcttgcctggtcatgatggacaagatggcagagaatgtccccatggagaga

SEQ ID NO: 4906 - DNA, 430 bp, Bos taurus
  Clone ID: 21-LIB34-047-Q1-E1-F9
gagtcagtgggatctgcagctaccctcaagctttgccctcatgaagaattcctgaaactgtgtaaagaaagggctggagagatctatccaataaaggagagaaaggaccgcactcgtctggctctcatcatatgcaacacagagtttgatcatatgcctcccaggaatggggctgcccttgacatccttggaatgaagcagctgcttgagggtcttggctacactgtggaagtggaagagaaactcacagccagggacatggaatcagtgctgtggaaatttgctgcacgtgaagaacacaaatccctcagacagtacattcttggtgttcatgtctcatggcatcctggatgggatctgtgggactatgcacagtgaggaagaaccagatgtgttaccttatgataccatcttccggacattcaacaac

SEQ ID NO: 4907 - DNA, 357 bp, Bos taurus
  unsure (272): unsure at all n locations; Clone ID: 21-LIB34-048-Q1-E1-F1
gctgtacacaacaagatgtagagttacatgttcaaaagatttatgtgatcagttcagctgaaccccgcctgcccctgcagctggacgatgctgttcggcctgaagtggaaggagaagaggaaggaagagctactgttaaccaggatacgagattagacaacagagtcattgatcttaggacatcaactagtcaggcaatcttccgtctccagtctggcatctgccatcttttccgagaaactttaactaacaagggttttgtggagattcanactcctaaaattatctcagctgccagtgaaggaggagccaatggtattactgtgtcatattttaaaaataatgcatacctggctc

SEQ ID NO: 4908 - DNA, 404 bp, Bos taurus
  Clone ID: 21-LIB34-049-Q1-E1-F1
attcaaacctctttgatctgaaagaagtaaaaagagcccaaagacaggtggtgtctggatggaactatgaagttaattactcaattgcacaaactaattgttccaaggaggaattttcattcttaactccagactgcaagtccctttcaagtggtgatactggtgaatgtacagataaagcacatgtagatgtcaagctaagaatttcttccttctcgcagaaatgtgacctttatccaggggaggattttttaccccccatggtttgtgtcggctgccccaaacctatacctgttgacagcccagacctggaggaagctctgaaccattccatcgcaaagcttaatgcagagcatgatggaaccttctatttcaagattgacactgtgaaaaaagcaacagta

SEQ ID NO: 4909 - DNA, 403 bp, Bos taurus
  unsure (227): unsure at all n locations; Clone ID: 21-LIB34-050-Q1-E1-F1
tagctgactaatctcaagcaaccataaagatattggtgccctttatctactagttggtgcttgggccggtatagtaggaacaggtctaagccttctaattcgcgctgaattacgccaacccggaactctgctcggagacgaccaaatctacatcgtacttgtaagcgcacacgcatttgtaataatcttcttcatagtgatactaatcataattgcaggattcggtnactgacttgttccccgaataattggatctcgcgatagagcatttcctcgaatatatcatatgagcttctgactcctccctccctcattcctaataatcgctgcagtctcaacagttgaacctggggcatgaacatgctgaaccgtgtaccctcccttatcaagcaacctagcccat

SEQ ID NO: 4910 - DNA, 232 bp, Bos taurus
  Clone ID: 21-LIB34-051-Q1-E1-F1
caacttcctggtttggctgcttggaggctgcttctcctttactgggaagtctttgctagtcatggacccatatgtgattcagatgcaggatcacggcagcctcccctcagttctggatgtgcatgtcaacgttgctgggagaagctctgtgctgggaaaagtgaaaagcaggaaggccagatggtccgtgaggccctcggacatgtccaacaaaactttcaatcccatccgg

SEQ ID NO: 4911 - DNA, 245 bp, Bos taurus
  Clone ID: 21-LIB34-051-Q1-E1-F9
cgggatgctgccggccagtcccaaaatggaacataaggcggtggtgttcctacttctcttatttctgaaatcaggtctcggagacctcctggatgactatgtaaacacccagggggcttccctgcttagtttgagtcggaagaacctggcgggaagaagcgtagaggactgtgcagccaagtgtgaggaggagacagacttcgtttgcagggcattccagtaccacagtaaagagcaacaatgcg

SEQ ID NO: 4912 - DNA, 240 bp, Bos taurus
  Clone ID: 21-LIB34-052-Q1-E1-C8
ctgaaggaatgctgtgataagcctttgttggaaaaatcccactgcattgctgaggtagaaaaagatgccatacctgaaaacctgcccccattaactgctgactttgctgaagataaggatgtttgcaaaaactatcaggaagcaaaagatgccttcctgggctcgtttttgtatgaatattcaagaaggcatcctgaatatgctgtctcagtgctattgagacttgccaaggaatatgaa

SEQ ID NO: 4913 - DNA, 240 bp, Bos taurus
  Clone ID: 21-LIB34-054-Q1-E1-F1
agctgcctcgagcagggagctggtggctcttccatccccagaccagccaagcctgtgagtgacaccccagacagaggaaccagagccatgcggagtctcagcggactgctgttgttactgactgcctgcctggcagtaaacgccagctccgtgcccacattgcccgatgacattcaagtgcaggagaacttcgacctgtctaggatctatgggaagtggttcaatgtggccgtgggctcc

SEQ ID NO: 4914 - DNA, 353 bp, Bos taurus
  Clone ID: 21-LIB34-055-Q1-E1-F1
cgaagaacgcggttggccaatcgcaagccagaagatgaaggttctgtgggttgccgtggtggtcgcgcttctggcaggatgccaggcggatatggagggagagctggggcccgaggagcccctgactacccagcagccccgggggaaggacagccagccttgggagcaggcgctgggccgcttctgggattacctgcgctgggtgcagaccctgtctgaccaggtgcaggaggagctgctcaacacccaggtcattcaggaactgacggcgctgatggaggagaccatgaaggaggtgaaggcctacaaggaggagctggagggacagctaggccccatggcccaggagacac

SEQ ID NO: 4915 - DNA, 345 bp, Bos taurus
  Clone ID: 21-LIB34-055-Q1-E1-F9
ggatcccaaaggccagagagtgaagcttaatgatggccacttcattcctgtcctgggatttggaacctttgcacctcgagaggttcctaagagtgaagctctggaagtcaccaaatttgctatagaggctgggttccgccatattgacagtgctcatttgtaccaaaatgaagagcaggttggccaggccattcgaagcaagattgccgatggcactgtaaagagagaagacattttctacacttcaaagctttggtccacttcccttcgtccagaattggtccgaccagccttggaaaagtcactgaataatcttcaactggactatgtcgatctttatattat

SEQ ID NO: 4916 - DNA, 349 bp, Bos taurus
  Clone ID: 21-LIB34-056-Q1-E1-F1
gctggacaaattcatgaaagatgccgatgctttttacgcctctgaggtttgatccatcaacttcacggattctgaagctgccgtaaagcgtatcaatgaacatgtgaagaatagcacgcatggtaaaagtgagaagctcttatatgatcttgacgtgctcagaaatttaatcttgttgaattagatcatcgttaaagcccactggtagacgcgatttaagcataaccatacttaccaatcagagttccacgtgagcaatgactagagggtgaaggctaccatgatgattcttccactgcaaaccccttacctccgggacgatgagctgggctgcacgctggtggatctc

SEQ ID NO: 4917 - DNA, 222 bp, Bos taurus
  Clone ID: 21-LIB34-057-Q1-E1-F1
gtagctttttaagcccttatgacttgagattcctggcgcgtgactggctttgcttttgaatctagggcgcgtcttaaccctcactgctgcttagctttcgtatgagtcagttctaaattaggatactgagactgctactagacttgtgtcctggtggctctgttgggtacgtttcaccggtgttccaaaacgaagtgagtgattccagctatccacatttaa

SEQ ID NO: 4918 - DNA, 226 bp, Bos taurus
  Clone ID: 21-LIB34-057-Q1-E1-F9
cctttactatgctaataaatataatggagtttttcaagaatgctgccaagctgaagataaaggtgcctgcctgctaccaaagattgaaactatgagagaaaaagtactgacttcatctgccagacagagactcaggtgtgccagtattcaaaaatttggagaaagagctttaaaagcatggtcagtagctcgcctgagccagaaatttcccaaggctgagtttgta

SEQ ID NO: 4919 - DNA, 225 bp, Bos taurus
  Clone ID: 21-LIB34-058-Q1-E1-F1
aggaggagaacttctcggtgaggtgccccaagcacaaggatggggcaggcagccagttgtctcagaaatgttcattaagggattatttctcttcaggtgagactgtggagatgagaaggtggtggatactcgtgatggaatggaaacggtcctcctgtgcagccacaccccaccccgccccaccccgcgtgcctgcccgcgccagcacttccttcctaagttctt

SEQ ID NO: 4920 - DNA, 208 bp, Bos taurus
  Clone ID: 21-LIB34-059-Q1-E1-F1
ccaagagggctctcctggaagtgtacaacatgatgagcagggaagtaaaccagttcaaagagacctggaaccgcacgcgccacgtcatcatcatcatgactgacggtttgcacaacatgggtggggatccagtcactgtcattcacgatattcggtacttgctagacattggtagaaatcgcaaataaccccaggggaggattatctg

SEQ ID NO: 4921 - DNA, 342 bp, Bos taurus
  Clone ID: 21-LIB34-061-Q1-E1-F1
aacccagattaattaggatttattctctgagctagggagtcagatcctttcctgaaggatggctttctcaaggtaataggggataatagggactctgctaacaaacatggctggtaagcagtcaaccatacaaccaagaccagtggttttggaatttctcagattagctcttgaacataagtggggagttcttgaggcttgtggtgtttttattcttgaaaattttatttagctcttctctccatgtgttgaattaaggcagagcgaaacacttccactgcaaaatcaacttctggtttagtgatgcacattgagggcgcaatgcggaaagtctgagaaaaa

SEQ ID NO: 4922 - DNA, 159 bp, Bos taurus
  Clone ID: 21-LIB34-062-Q1-E1-F1
ctgccccaggccttcagcagccgctcctacaccagtgggcccggctcccgcatcagctcctcggccttttcccgagtgggcagcagcagcagctttcgcggcggcctgggcaccggcatgagcatggctggaagctacggtggggccccaggtttgggg

SEQ ID NO: 4923 - DNA, 315 bp, Bos taurus
  Clone ID: 21-LIB34-063-Q1-E1-F1
accaatgattaagacaagtccatgctgacctagaagaatatttcctgtctatatatcaatgttttcatactaaaacaacaaatcattcatcattcatatctttttatctgccttacaattttttggtaaaaagcaagcagacttgattatttcatgtaaattatatcccttttaatcttggagagtgttcatgcaaaacaaaaatagcatctttagttttcatccctctggttcacctcaaggttcagaggccagaaaaaaacagatttcttgtatctccaaacttatgcaaaacgaggcctctttaatggatgt

SEQ ID NO: 4924 - DNA, 352 bp, Bos taurus
  Clone ID: 21-LIB34-064-Q1-E1-F1
gaattaaggaaccaccaggaatccctggacctcattaaccctcagaatttaatggattacttccggattaaaatggaaaagggaaaacaataaacattcgaattaccaggcaactgataccacgtatgggagtgttagtgctggaacagagacaacaagcctcactctgagatatggactccggctcctgctgaagcacccagaggtcacagctaaagttcacgaagaaattgatcgtgtggttggcagaaaccgaagcccctgcatgcaggacaagagctgcatgccctaaacagatgctgtgctgcatgagatccagagatacattgaccttgtccccagcagtatgccc

SEQ ID NO: 4925 - DNA, 259 bp, Bos taurus
  Clone ID: 21-LIB34-066-Q1-E1-F1
gtcgggacccctggggcccggctccacaggcctcctcgtgggccagaagttccccaagaacccggcggctgaactcatcaaaatgcacaggtgcactttccctggctgcagcaagatgtacaccaagagcagccacctgaaggcgcacctgcgccggcacacgggcgagaagcccttcgcctgcacctggccaggctgcggctggaggttctcgcgctcggacgagctgtcgcgacaccggcgttcgcactcgggcgtg

SEQ ID NO: 4926 - DNA, 168 bp, Bos taurus
  Clone ID: 21-LIB34-070-Q1-E1-F1
gggcaacacaggatctcagcctacctgagagtaagaggaaaaaagagaaatgaaaactcagagcttattcatctgttttccttttctgttggtgttaaaccaacactctcactaaagaacgtaaatttctttaaatattttgcttcttttgtttgtgctacaattaat

SEQ ID NO: 4927 - DNA, 359 bp, Bos taurus
  Clone ID: 21-LIB34-071-Q1-E1-F1
ctagttccagatcgccagcggccgcccgcgatctagaactactccagatttgtagtcatctgacatgtggttgcagcgtttggttaccatgtctttcgttttctttttcgagtattcgacttgcgttaatggtaacagagtcgtaaactataatctaggggtttctgttggatggttggcaactaagagtggaggaagaacaacatagacatgttctccactttcttatttctcaaaacagtgttatcttcgtcttgttaatcttaggtttttaacatatttcacctttaagtgcaagagagtgaattctgtcttttcagacccacattctacacatgattactttgctatgattacat

SEQ ID NO: 4928 - DNA, 377 bp, Bos taurus
  Clone ID: 21-LIB34-072-Q1-E1-F9
ataaacccaagcccttgacctcttacaggagctttgtctgccctcttaataacatccggcctaaccatgtgatttcactttaactcaatgaccctgctaataattggcctaacaacaaatatactaacaatataccaatgatgacgagatgttatccgataaagcaccttccaagggcaccataccccagctgtccaaaaaggcctccgttatggaataattctttttattatctccgaagtactattctttaccggatttttctgagctttctaccactcaagcctcgcccccacccctgaactaggcggctgctgacccccaacaggcattcacccactaaaccccctagaagtcccactgctcaacaactctgt

SEQ ID NO: 4929 - DNA, 434 bp, Bos taurus
  Clone ID: 21-LIB34-074-Q1-E1-F1
acagaagcttcacactgagaggtaggcagagagcagcacacacagctgaaaggaaactcagaggagggaatcaccaagaaagtggccatggagctaatcccaagcttttccatggaaacctgggttctcctgtctatcagcctggtgctcctttatctatatggaacttattcacacggactatttaagaagctgggagttcctgggccaagacctctgccttattttggaaatgttctgtcctaccgaaagggtgtttgtgagtttgatgaagaatgttttaaaaagtatgggaaaatgtgggggatttttgaaggtaaacatcctctgttggttatcacagatccagatgtgatcaaaacagtactagtgaaagaatgttattctgtcttcacaaaccggaaggtttttggtccaaggggaattatgaaaaa

SEQ ID NO: 4930 - DNA, 416 bp, Bos taurus
  Clone ID: 21-LIB34-077-Q1-E1-F1
cctatagtaagtcgtattaaagagctccatgggctcaccacagaggacaaatttgtagagggactatacaaagtggaattagacaccaaatcctactggaagtcacttggcatctccccgttccatgaatttgcagaggtggtgttcacagccaacgactctggcccccgccactacaccatcgccgccctgctcagcccctactcctactctaccaccgccctggtcagcagtcccaaggcgtgagggtgcctgcctcggcggacctgaacggataagggcatgatttggtgttaccgagagtattccatttttattaaagcagtgttttcaatttataagctatgttagaaaataagccagaacaataaaacatgcctaataaagcaaacaaaagaaagggagctagacaagat

SEQ ID NO: 4931 - DNA, 438 bp, Bos taurus
  unsure (109),(309): unsure at all n locations; Clone ID: 21-LIB34-077-Q1-E1-F9
taaacagtacaactggagtatttgtgtgaatgtaccactgggaaaatctaacatgttgatgttaatcaatgtccttctcaacttgtggttttacactgctcatggacangggaaacattgtaattatccagtaataagacatggacggctatatcagtcatacagtggatactttccagcacgtgtaaatcaacagtttctctataactgtgatcagtattttgtgcctccttcactatattcctcggattacctgacttgcacagcagaaggatggtttccagaaagaacatgccttagagaatgtantttcaataatttggaaaaatggatatacccaagtagtgaaagaaaagctgtacagggtgaaacagtaaaggttcgctgctattatggctacagtcttcaaaataatcagaacacaatgacctgcacaga

SEQ ID NO: 4932 - DNA, 410 bp, Bos taurus
  Clone ID: 21-LIB34-079-Q1-E1-F1
ccccctccttcaggtcttcatcaccaccaccacaggcacaagggtccccaaagacagggtcactcagataactgtgatacaccagtaggaagtgaaagtttacaaccttctcttccacaaaagaagctctgacgaaagagatgcataaatcagttactctgacagtttcccaaagattcagaatctgctttgagtagctgctgttgccactgtcgacatctggtatttgaaaaaacagggtctgcaatcacctgacagtgtacagaaaagctcccctctttgtgtagctgacagggccttttggcggaggagaatgtcattgaatcttgacagtgacgtttgcctccagctgcctgacaggcagcaggtcagcagctcaaccccacaggagccagcaccaagtgaagctg

SEQ ID NO: 4933 - DNA, 423 bp, Bos taurus
  Clone ID: 21-LIB34-080-Q1-E1-F1
ggtgattcaggggtgtggaggggtacattacctcggagaagtaggttgcaggaggatttggggatgctttcattttcacatgaaaatgctacctgctctcctcacagcaagctctggctgcgctggactaggggaggacctttggggagggacactgacgcacagtgaatttggaaggggcaggatttctgggtgggaagccctcagttggggtaaaaggcacctgtcctgagctccatcctgtgcccagggggtagacgaaggccccaaggggctgaagctcatctctgaagtgattggggagcgccttggcatccccatgagcgtgctgatgggggccaacattgccaacgaggtggctgatgagaagttctgtgagacaaccgggttcctgcctggagatcctgaagcagcccacaacct

SEQ ID NO: 4934 - DNA, 420 bp, Bos taurus
  Clone ID: 21-LIB34-080-Q1-E1-F9
gctccgagcagaagatccctggggccaccaaccggcgggtctgggaactgtccaaggccaattcccactttgccactgccttctatcagcatttggcagactccaagaataacaatgacaacattttcctgtcacccctgagtatctccacagcttttgctatgaccaagctgggtgcctgtgacaacacactcaagcagttgatggaggtttttaagtttgataccatctctgagaaaacttctgatcagatccactttttctttgccaaactgaactgccgactctatcgaaaagccaataaatcctctgagttggtatcagccaaccgtctttttggagacaaatccattacattcaatgagacctaccaggacatcagtgaggtggtatatggggccaagctccagcccctggact

SEQ ID NO: 4935 - DNA, 443 bp, Bos taurus
  Clone ID: 21-LIB34-081-Q1-E1-F9
gacccacgcgtccacggacgcgtgggtggtgacctacttgaatgcgcagatgacagggcagatcttgccaagtacatatgtgataatcaagatacaatctccagtaaactgaaggaatgctgtgataagcctttgttggaaaaatcccactgcattgctgaggtagaaaaagatgccatacctgaaaacctgcccccattaactgctgactttgctgaagataaggatgtttgcaaaaactatcaagaagcaaaagatgccttcctgggctcgtttttgtatgaatattcaagaaggcatcctgaatatgctgtctcagtgctattgagacttgccaaggaatatgaagccacactggaggaatgctgtgccaaagatgatccacatgcatgctattccacagtgtttgacaaacttaagcatcttgtggatgagcctcagaa

SEQ ID NO: 4936 - DNA, 402 bp, Bos taurus
  Clone ID: 21-LIB34-082-Q1-E1-F1
cccgcccgtccgaccctctcatcctggctggttgagagtttaccccgccgagctgcgcaatgcggaggctgcaggtggtgctgggtcacctgaagggccggcccgcttcggacccggagccgcaggccaccccgtgttggagcggcgcgcggcgggcgtccgcagaggatgtcgtggtggtgcacgggcggcgcacggccattggccggtcgggccgcggcggcttcaaggacaccacccccgacgagcttctctccgccgtcatgaccgcggttctccaggacgtcaagctgagcccggcccagctgggagatatctgcgtgggaaacgtgcttcagcctggggccggagcgaccatggcccgaattgcccagtttctgagtgacatcccggagactgtgc

SEQ ID NO: 4937 - DNA, 301 bp, Bos taurus
  Clone ID: 21-LIB34-083-Q1-E1-F1
agagagaagtcgcgactatgcgagagatcaagtgtgcaatgaccgtgcgatgtgggaacagatgacttcacatcatgtcagtggtcctaggcagcaggatgtttcccaatggcaccttagaatggatccaccatcctgtgcgttgggttgtttccttaagggtaacctgctgtgctgatggggacgatcctgactgcaatgtgcgcaagacttcaccaatgtctgacaagtccagtgccagcaccacgccaatcacatatgaacctggttcccctgatgtgctgcactcatgagggccttg

SEQ ID NO: 4938 - DNA, 381 bp, Bos taurus
  unsure (290): unsure at all n locations; Clone ID: 21-LIB34-084-Q1-E1-F1
atctcaaatcgtgacctactactcaggaaaaaaagaaccattcggatatatgggaatagtttgggctataatgtcaatcggatttctaggtttcatcgtatgagcccaccatatattcactgtcggaatagacgtcgacacacgagcctacttcacatcagccactataattattgctattccaaccggggtaaaagtcttcagctgattggcaacacttcatggaggtaatatcaaatggtctcctgctataatgtgagccctaggctttattttcttatttacagtanggggtttaactggaattgtccttagcaactcttccctcgataatggtcttcacgacacatactacgttgtcgcacattttcactatgtttt

SEQ ID NO: 4939 - DNA, 408 bp, Bos taurus
  unsure (309),(330),(373)...(374): unsure at all n locations; Clone ID: 21-LIB34-084-Q1-E1-F9
agttggaggttaaatggacgggggagtgaagtttcaattgttcctgctgtgttcctctcccagctccatctctttccctagggaccaggcactctgaaggtggggtggagtcctagcctcagtttggaatgggggttgatgggggggtgggacagggcatgatcaaaggggccatttctcacttttctttctcatcttcactgccccttgagctaggtggattttctcttcttgacgagagtatttgatagggaaggcaagttttaaaagtaaataaaacccaacccctaccctctgtttcccttctcncatcagtctggtaacaggaangaaacacaccatcaacaccaacaaatttccacgttccttttanncacaaaaggacttgactttttatataaccaaatg

SEQ ID NO: 4940 - DNA, 381 bp, Bos taurus
  Clone ID: 21-LIB34-085-Q1-E1-F1
agtcagagcaggcactgactgcatgatttgggatcaacatcttacgcatggatccgctcagcaccccttttgacaaccagtactacaatggactctgtgaccgagtttgggacggcaacaccttgacgtactaccgcaggccctgcaacgtggcttcgctgacctatgacacgaaagctgacacgaatttcagaactgaaaatcatgaagaaagcattcagatactcataactattatcgaggagaagaaattaaattttaatgcacgtttagctgtagaatatacacctgttgacgcacttgacaagaatatatgtgtacaattagaacattctgcacaaggaagcacctcaagtccttcaaagttggctgctgaggcta

SEQ ID NO: 4941 - DNA, 490 bp, Bos taurus
  unsure (257): unsure at all n locations; Clone ID: 21-LIB34-086-Q1-E1-F1
ccgggtagacccacgcggcccatgaattcttgcaacttcgaaaaatttaaaaccatgaaacatctattactgctacttttctgtgcttttatagttcaggcccaatttcctactgactatgacgagggacaagatgacagacctaaggtaggtttgggtgcccgcggtcatcggccctatgacaagaagaaggaagaggcccccagcctgagacctgtgccccctcccatcagcggaggtggctatcgggctcgtcncgccacagcaactgtgggccagaagaaagtggagagaaagccccctgacgctgatggctgcctgcacgcggacccggatctgggtgtgttgtgtcctacaggatgtaagttgcaagatactttggtaagacaggagagaccaatccgaaagagtatagaagatttacgtaatactgtggactctgtttcccggacctcttcttccacctttcaatatataactctgctaaaaa

SEQ ID NO: 4942 - DNA, 401 bp, Bos taurus
  unsure (341): unsure at all n locations; Clone ID: 21-LIB34-086-Q1-E1-F9
gcgtcaagcaagatggcgggtgaaaaggctgagaagccagatactaaggagaaaaaacctgaagccaagaaggctgatgctggcaagaaggctaaaaaggtggaaaaggtgaagaaagttaagaaggggaagccccactgcagccgaaatcctgtcctggtcagaggaattggcagatattcccgatcagccatgtactccagaaaggccttgtacaagagaaagtattcagcagctaaatccaaggtcgaaaagaaaaagaaggttcgtgttcttgctactgtcacaaaaccagttggtggagacaagaatggtggtacccgagtggtcaaacttcgcanaatgcctaagtattaccctactgaagatgtgcctcgaaaactgttgagtcatggcaaaaa

SEQ ID NO: 4943 - DNA, 360 bp, Bos taurus
  Clone ID: 22-BOVMS1-002-Q1-E1-F5
aaaaaaaaaaaaaaaaaaaaaaaaaaaaaaaaaaaaaaaaaaaaaaaaaaaaaaaaaaaaaaaaaaaaaaaaaaaaaaaaaaaaaaaaaaaaaaaaaaaaaaaaaaaaaaaaaaaaaaggggcggccccccaaaaggttcaaaccttacttacccttgaatgcaacttcaaacccctccaaaagtgccaccaaaattcaattcacgggccgtcgtttaaaaacttcttaacgggaaaaaccctggctttaccaaacttaacccccttgaaaaaaacccccctttcccaagctggcgtaaaaccaaaaaggccccaaccattcgcccttccaaaaatttgcccaccctaaattgcaaatgg

SEQ ID NO: 4944 - DNA, 440 bp, Bos taurus
  Clone ID: 22-BOVMS1-003-Q1-E1-F5
acagagggcaagagaaagccctaccacaagaagcgaaagtatgagctgggacgccccgctgccaacacaaagattggcccccgccgcatacacacagtccgtgtgcggggaggcaacaagaagtaccgggccttgaggctggacgtggggaacttctcctggggctcggagtgttgtacacgcaagacaagaataatcgatgttgtctataatgcatccaacaacgaactggtccgtaccaagaccctggtgaagaactgtattgtgcttatcgacagcacaccgtaccgacagtggtacgagtcccactatgcactgcccctgggccgcaagaagggggccaagctgactcctgaggaggaagagattttaaacaagaaacgatcaaagaaaattcagaagaaatacgatgagaggaaaaagaacgcgaaaatcagcag

SEQ ID NO: 4945 - DNA, 131 bp, Bos taurus
  Clone ID: 22-BOVMS1-006-Q1-E1-F5
ccttgaatgcaacttcaaagctcttcaaaagtgtcaccaaaattcaattcacgggccgtcgttttaaaacgtcttgacggggaaaaccctggggttacccaatttaatcgccttgcagaaaatcccccttt

SEQ ID NO: 4946 - DNA, 219 bp, Bos taurus
  Clone ID: 22-BOVMS1-006-Q1-E1-F9
cgcgtccgtagtacgcgagcggccgcccttttttttttttttttttttttttttttttttttttttttttttttttttttttttttttttttttatattatttactggttaaggatttaaaagagggaggggggacccaaggcaaacaacaaacaacaaggccaaggtccgggatagacaatagtccacaaaacacgacagcagcaggacccaccaaaa

SEQ ID NO: 4947 - DNA, 426 bp, Bos taurus
  Clone ID: 22-BOVMS1-007-Q1-E1-F5
atgcgacgtcatagctcttctatagtgtcacctaaattcaattcactggccgtcgttttacaacgtcgtgactgggaaaaccctggcgttacccaacttaatcgccttgcagcacatccccctttcgccagctggcgtaatagcgaagaggcccgcaccgatcgcccttcccaacagttgcgcagcctgaatggcgactgggacgcgccctgtagcggcgcattaagcgcggcgggtgtggtggttacgcacagcgtgaccgctacacttgccagcgccctatcgcccgctcctttcgctttcttcccttcctttctcgccacgttcgccggctttccacgtcaagctctaaatctggggctcactttacggttccgatttactgctttacggcacctcgaccccagaagacttgattacggtgat

SEQ ID NO: 4948 - DNA, 477 bp, Bos taurus
  Clone ID: 22-BOVMS1-009-Q1-E1-F5
agcatatgggcccagtctgccccttccgctgtcagtgccatctgcgagttgtccagtgttctgatctgggtctggaaaaagtaccaaaagaccttcctcctgatactgcgctgctggacctgcaaaacaacaaaataactgagatcaaagatggagactttaagaacctgaagaaccttcatacactgattctcatcaacaacaaaattagcaaaatcagccctggggcatttgctcctttggtgaaattggaacgactttatctttccaagaatcaactgaaggaattgccagagaaaatgcccaaaactcttcaggagctgcgtgtccatgagaacgagatcaccaaagtgcgaaagtctgtgttcaatggattgaaccagatgatcgtcgtagaacttggcaccaacccgctgaagagctcaagcattgaaaatggagcctttcagggaatgaagaaactctcctacatccgca

SEQ ID NO: 4949 - DNA, 453 bp, Bos taurus
  Clone ID: 22-BOVMS1-010-Q1-E1-F5
aaaattggttagttaattgtattttagaaattataattttaggtgatattaatttcattaatgttttacaaagaaatctttccagtttaaaagatgttgaatattcacatgttctaacattttctttactgtaaaacatctagatttggagatacggaaagccttgttttctctgtgtggttcagctactttccatctggtattatgcgttcaaatttacaattatccattaaaattgccattttgttagacatttttcacgcacaatagatttaagttgtgtctgaaagtatctcttgtgcttttttgattttgctgactttaaaaggattaatctgggcagacattatgaaaaggaaaggttgcatttaatatattttttggatttagtaggacaaaagttaactggttaaccttgaagtgactgttgtacagtggttgtgcacatccttc

SEQ ID NO: 4950 - DNA, 366 bp, Bos taurus; identical to SEQ ID NO: 1154
  Clone ID: 22-BOVMS1-010-Q1-E1-F9

SEQ ID NO: 4951 - DNA, 304 bp, Bos taurus
  Clone ID: 22-BOVMS1-012-Q1-E1-F9
gtcagcataaagggctcatttgtacacctgcaactcactttccttagaattgacatataagtgcagaaacaacagagatttgtttgactgaggtttatatttccttgtaggagtaaagagttttatatgtaaattctaggttgataattttctgtctgaaattcttctttcacagatacacggatatgtttttattaagaaccttgatttatttgaattcattattaattcctacttttcttgtttgatatttggatgcaaaatttcttctccactttcctttcagcatgatggtgtccataaa

SEQ ID NO: 4952 - DNA, 387 bp, Bos taurus
  Clone ID: 22-BOVMS1-014-Q1-E1-F5
cgccaagttatgggactccagtcgagatatcagtcggtgacgatctgtccctgggcacccctgtgtctcttaacagcagtgggtgtccagtccaggacactggtgcttttttatacaagagaacagagccggagctcactccttcctcctggctccctatgtacctgtgaatatgtgaaatagtgtaaatatgaaagaacttgtaccaccgcttcaacccctgccttgtacataatgctattccatctcacactcttcccaccctcacctgccccttcaacagctgagttggatctgggcagaatgaggtaaccagaaggcatctacaccatgttttataaggaattttgtacagtctttgtgaaataaaatgatgtgcttcacccg

SEQ ID NO: 4953 - DNA, 460 bp, Bos taurus
  Clone ID: 22-BOVMS1-014-Q1-E1-F9
cggacgcgtgggaaaaaaaaaaaaaaaaaaaaaaaaaaaaaaaaaaaaaaaaaaaaaaaaaaaaaaaaaaaaaaaaaaaaaaaaaaaaaaaaaaaaaaaaaaaaaaaaaaaaaaaaaaaaaaaaaaaaaaaaaaaaaaaaagggggggcccccctaaagtttcaaaccttatttacccttgaatccaatttcaaaccccttcaaaattttcccctaatttaatttcacggcccttctttttaaaatttcttaactggaaaaaccttggctttaccaaatttaacccctttgaaaaaaatccccttttcccaatctggcttattaccaaaaaggcccccaccttttgcctttccaaaaatttccccaccctaattgccaaatggaaccccccctttaccggcccattaaccccggcggttttggtggttaccccacattttacccctaaattttcaaaccc

SEQ ID NO: 4954 - DNA, 435 bp, Bos taurus
  Clone ID: 22-BOVMS1-017-Q1-E1-F5
agcaaatctgcagaaggtaccaggaattatgtggagtttgaggaattaactgtgagccagctcctgcattgtctaagggaaggaaaccagaaggtggagagacttgaagttgccctcaaggaagccaaagaaagaatttctgattttgaaaagaaagccaaggatcattctgagactgagacccagacagaggagcacacagaacaagagaaagaagaggagaaagacaccaaaactattggaagtgaagtggaaacactgaaccttcaggtgacaaccctgtttaaggagcttcaggaagctcacacgaaactcagtgaagctgagctaatgaagaagagacttcaagaaaaatgtcaggcccttgaaaggaaaaattctgcaagcccatcagaactgaatgaaaaacaagagctggtttataaaaacaaaaag

SEQ ID NO: 4955 - DNA, 338 bp, Bos taurus
  Clone ID: 22-BOVMS1-017-Q1-E1-F9
ccggaggctgtggagcccagagatgatcagagcgggtttgtaaacccagatgccaccgagattctgcacgtcaataggaggaaggccccactgttctgagtgggcagcgtcgacccttggctcttgggagagaagctggggaggagatctgcaggccagagacatggcttcagtcagagccagctgtgaaaacggcgcccctgccctaaccctcccttagtaaaataccagctccctgagttaaaaataagaatggttcataaaaccctgctggatggcaaagaaatggttcatgaaaccttgcaaacatggggcgggagccctaaaggatccaacct

SEQ ID NO: 4956 - DNA, 439 bp, Bos taurus
  Clone ID: 22-BOVMS1-018-Q1-E1-F9
tttacttcgaccgcaagagacggagtgaccccaacttcaagaacaggctgcgagaacgaagaaagaaacagaagcttgccaaggagagagctgggctttccaagttacctgaccttaaagatgctgaagccgttcagaaattctttctagaagaaatacagcttggtgaagaattactagctcaaggtgaatatgagaagggtgtggaccatctgacaaatgcgattgctgtgtgtggacagccacagcagttactgcaagtattgcaacaaactcttccgccaccagtgttccagatgcttctgactaagctcccaacaattagtcagagaattgttagtgctcagagcttggctgaagatgatgtggaatgagaaacaaatgtcaacataatgatctcaattaaaacatatttttaaaatcttatctcaaaagatga

SEQ ID NO: 4957 - DNA, 423 bp, Bos taurus
  Clone ID: 22-BOVMS1-019-Q1-E1-F5
cccacgcgtccgcccacgcgtccgatcataggtgccacaaatttcccagaggcattagataatgccttaatacgccctggtcgctttgacatgcaggttacggttccaaggccagatgtgaaaggtcgaacagaaatcttgaagtggtacctcaataaaataaagtttgatcagtctgttgatccagaaatcatagctcgaggtactgttggcttttctggagctgagttggagaatcttgtgaaccaggctgcattaaaggcagctgttgatggaaaagaaatggttactatgaaggaactagagtttttcaaagataaaatcctaatgggccctgaacgtagaagtgtggaaattgataacaaaaacaaaacgatcacagcgtatcatgaatctggtcatgctattattgcatattacact

SEQ ID NO: 4958 - DNA, 179 bp, Bos taurus
  Clone ID: 22-BOVMS1-020-Q1-E1-F5
caaagacatcctcatccagtatgaccggaccctgctggtagccgatccccgtcgctgcgaatccaagaagtttggaggtcctggtgcccgtgcccgctaccagaaatcctaccgataagcccgtcatgaagcccagcgtttccctttacagcacctttataataaatgttgtgggattt

SEQ ID NO: 4959 - DNA, 385 bp, Bos taurus
  Clone ID: 22-BOVMS1-020-Q1-E1-F9
aaaaataccacaaataagatcttttatttgtcaccattaagagtctgcattttaaaccgattcttggactggtggctcgtatccatcagctcgttcaactttagcacctgtctcatccccagtagcttttccagaactactaccttcaccatgtagctccatgagttttcccaattcaaatttggccacttgaaccctcaataaaggctgttgcctaagcatggcatacttcatctgttcccgttcgtgccatctgctgtgatgtcgtcacttatatggcgttaatttcctgccactccagatcttttgaagattgatggaatactggtgtctgttagaatgcttcagactacaagatgtaattaaaggctttccttaatatgtt

SEQ ID NO: 4960 - DNA, 407 bp, Bos taurus
  Clone ID: 22-BOVMS1-021-Q1-E1-F5
atgcgacgtcatagctcttctatagtgtcacctaaattcaattcactggccgtcgttttacaacgtcgtgactgggaaaaccctggcgttacccaacttaatcgccttgcagcacatccccctttcgccagctggcgtaatagcgaagaggcccgcaccgatcgcccttcccaacagttgcgcagcctgaatggcgaatgggacgcgccctgtagcggcgcattaagcgcggcgggtgtggtggttacgcgcagcgtgaccgctacacttgccagcgccctagcgcccgctcctttcgctttcttcccttcctttctcgccacgttcgccggctttccccgtcaagctctaaatcgggggctccctttagggttccgatttagtgctttacggcacctcgaccccaa

SEQ ID NO: 4961 - DNA, 424 bp, Bos taurus
  unsure (403),(407)...(408): unsure at all n locations; Clone ID: 22-BOVMS1-022-Q1-E1-F5
ggcaggcctggcagctggggctgatgctgcgtatatttttgaggaccccttcaccattcgagacctgcaggtgaatgtggagcatctggtgcagaagatgaaaacgactgtgaagaggggcctggtgttaaggaacgagaagtgcaatgagaactacaccactgacttcatcttcaacttgtactctgaggaggggaagggcatcttcgacagcaggaagaacgtgctgggccacatgcagcagggtgggagcccaactccattcgacaggaattttgccactaagatgggtgcaaaggctatgaactggatgtcagggaaaatcaaagagagttaccgtaatgggcggatctttgccaattccccagactcgggctgtgttctggggatgcgttagagggcnctgnngtctcaacagtgactg

SEQ ID NO: 4962 - DNA, 317 bp, Bos taurus
  Clone ID: 22-BOVMS1-022-Q1-E1-F9
cgcgtccgaaaaaaaaaaaaaaaataaaaaaaaaaaaaaaaaaaaaaaaaaaaataaaaaaaaaaaaaaaaataaaaaataaaataaaaataactaaaaaaaaaatataaaaaatcaaaaaaaattgtaaaattaaaattaaacaaaaataatcagggggggcccccttagggtttccaactttagtcatccttgcaaccaatcccaaacccctccaaatttgccaccaattttcattccaggggccttctttttacaatcccctgtctgggaaaatcccgggttttaccaattttaacccctctgaagaaaacccc

SEQ ID NO: 4963 - DNA, 459 bp, Bos taurus
  Clone ID: 22-BOVMS1-023-Q1-E1-F5
acgcgaccgggacagcatgggcacctgcgagcaaggtccttccatcgtgacgccccccaaggacatctggaatgtcactggtgcccaggtgtatttgagctgcgaggtcatcggaatccccacccctgtcctcatctggaacaaggtaaaaaggggtcactatggagttcagagaacagaactcttgcctggtgaccgagacaacctgcccattcagacgcggggtggtccacaaaagcatgacgttactggctgggtgctggtatctcctcttagtaacgaatatgccggagaatatgagtgccatgcatccaattcccaatgacaggcttcaacatcagcaaaaattacagtggttgatgccttacatgaaataccagtgaaaaaatgtgaaggtgccgagctgtaaacctgcagaatgtaatagtctgcatagctaaagtaatcatgggtaactac

SEQ ID NO: 4964 - DNA, 392 bp, Bos taurus
  Clone ID: 22-BOVMS1-023-Q1-E1-F9
atgcgacgtcatagctcttctatagtgtcacctaaattcaattcactggccgtcgttttacaacgtcgtgactgggaaaaccctggcgttacccaacttaatcgccttgcagcacatccccctttcgccagctggcgtaatagcgaagaggcccgcaccgatcgcccttcccaacagttgcgcagcctgaatggcgaatgggacgcgccctgtagcggcgcattaagcgcggcgggtgtggtggttacgcgcagcgtgaccgctacacttgccagcgccctagcgcccgctcctttcgctttcttcccttcctttctcgccacgttcgccggctttccccgtcaagctctaaatcgggggctccctttagggttccgatttagtgctttacg

SEQ ID NO: 4965 - DNA, 357 bp, Bos taurus
  Clone ID: 22-LIB188-001-Q1-E1-F9
accacattgtatttcgttgttctgtctccttattctcctctggtctgtaatgttttctcagaatttccttattgctcatgattttgacagctttgaggagtcctgatcaaggtattttctatttagatttgcttgatgttttattgcataataagactggggttgcaaagagcaccacagaagtgatatctcttctaattatatcatatacggtgatatgtgaatccatatggctcattgctgagtcagtaatgatgtggaattttgatcacttagttaagatgttatttgccagatttctccactgttcataccttccgctttggaagcgagtcccaaagttcagcacagactcaa

SEQ ID NO: 4966 - DNA, 425 bp, Bos taurus
  Clone ID: 22-LIB188-002-Q1-E1-F5
acttacagagtgcgactgcgactttcgaatggcacattgatgcctggggtcacgggctcgtggtcactgtctcctcagcctccaccacagccccgaaagtctaccctctgagttcttgctgcggggacaagtccagctccaccgtgactctgggctgcctggtgtccagctacatgcccgagccggtgaccgtgacctggaactcgggtgccctgaagagcggcgtgcacaccttcccggctgtccttcagtcctccgggctctactctctcagcagcatggtgaccgtgcccggcagcagctcatgacagaccttcacctgcaacgtagcccacccggccagcagcaccaaagtggacaaggctgttgatcccagatgcaaaacaacctgtgactgttgcccaccgcctgagctccctggagga

SEQ ID NO: 4967 - DNA, 396 bp, Bos taurus
  Clone ID: 22-LIB188-002-Q1-E1-F9
acatacaaatttgtgtcttttttcactcagcacaattattttatgattcatccatgctactactatttatcaacagttcatttttgctgctgagtagagtcagatacgactgagcgagttcactgtcacttttcactttcatgcgttggagaaggaaatggcaactcactccagtgttcttgcctggagaatcccagggatgggggagcctggtgggctgccgtctatggggtcgcacagagtcggagtattagcagtaacagcagtatcattgtatggccacatcattcacttgatggacatttggttgcttccagtttctggccattacaaacaaaactgttaagattatctgtgcttaagtccttgtgtggacatatgctttcatttcctgag

SEQ ID NO: 4968 - DNA, 414 bp, Bos taurus
  Clone ID: 22-LIB188-004-Q1-E1-F5
ccatggcggcgggatacaagaataattaagtattttgcacaaaggaaatttgttgatgatccagtagaactgatgcccatagaacgcagtttcttaaggattttgttttgcttctttgagggaggcggccatcgtcattgtcagttcagctgggggttccttccttcatgctgaggacctgtgtctttgaagttgctgacgtcctcggaatcccaggcaggctggtgaatgctcaggggctcccatggaggcatctggtggcctcgggccccctttgcttgtaggaggcttagcaagttccttgtcgcttcttcccactgggcatactcgctcagctgctccttcaggctctcctcctcatgaagttgtggggactctgccacactcttttttcccattaagtgtccgacagcc

SEQ ID NO: 4969 - DNA, 427 bp, Bos taurus
  Clone ID: 22-LIB188-004-Q1-E1-F9
acttcattgtggaagagttagcactaagcaggaaacctttccatgctgtgaagaagctgggacagaaggttcttccttgagtgtgaccatcttcacttcagctcaggagccctgttggctgaagtgtagggcgtcctttctgattcctgaagtagatgaagagccccacggcaaggaagagcagacccagaacgaagcccccgactccactcatcatcttgctctgagcagagtcagaccgtgccctccattctactgtgatagggctcgtccggctggggtgatccacttggcaggtgtagacctctccactctgaggaactgtttcaagcatcaccatggtctggaaggtccagtctccattctggatcaggcctgtggagatcaccccagcctcctcttcatggccgttccggaaccacctgac

SEQ ID NO: 4970 - DNA, 411 bp, Bos taurus
  Clone ID: 22-LIB188-006-Q1-E1-F5
gccatgggcccgggatacacaggttcttcgaaggtctggttacttagtttcttatcgcttcctgtctctgcatgaaactccctgacaaggggattgtttggggcgttgttaagtgggggttgtttcaaataagacttaaaaaacaaaacccctcctgaacgattcatatctcagactgttacacaaaagccctctgtgttctgtctgttgaagtcagttcagagcatgggaagttcggtggggctgtgacttacctggttgaggaagttacccatccgtattctgggtccctgggaaggttttcaaagcttcaggtgctttgaaaccagtgttagcagaaggcttgttttccctctgagacgagacgggtgtctctgcgtctgaaaggcatttcctttctttggcatcaaa

SEQ ID NO: 4971 - DNA, 413 bp, Bos taurus
  Clone ID: 22-LIB188-006-Q1-E1-F9
gggatacacagggatgtggagcaaacctactgcctctatctatacagcaggtcctgttcttccaacaggaagggagcaaatctctcccttgggaataaccaatgccatacgtggtaaccttgtctaatacagacagctggtgtcctgttgacacctggggccacatacaaagagagcagcctggctgatgctgctaagagaaactgctcaagatcggctggacacatcccagcggggggtgcccttcacgtggattgcagagagtccacctggtagacattctggttggagggggtggtgaaatagagctgctgtgtggggacgcggttgtcacaggggctgctcagtcccagcgtcctctcgaagtccagcagctggcccatgaagttgaagttgggggagatgttggattt

SEQ ID NO: 4972 - DNA, 383 bp, Bos taurus
  Clone ID: 22-LIB188-007-Q1-E1-F5
gccatgggcgcgggatactatggcaataccggggctttcaggtgcctggctgaggacgttggggacgttgcctttgtgaaaaacgacacagtctgggagaacacgaatggagagagcactgcagactgggctaagaacttgaatcgtgaggacttcaggttgctctgcctcgatggcaccaggaagcctgtgacggaggctcagagctgccacctggcggtggccccgaatcacgctgtggtgtctcggagcgatagggcagcacacgtgaaacaggtgctgctccaccagcaggctctgtttgggaaaaatggaaaaaactgcccggacaagttttgtttgttcaaatctgaaaccaaaaaccttctgttcaatgacaacac

SEQ ID NO: 4973 - DNA, 413 bp, Bos taurus
  Clone ID: 22-LIB188-008-Q1-E1-F5
accattcaaaaggtaaagagaaatgtgtatgacctcacgagtatccctgttcgccatcagttatgggagggctggccaacttctgccacagatgactccatgtgtcatgctgaatcagggctctcttatccctgccatcgacttacagtgggaagaagatcttcacctgcacagacccgggagcagtctgaagagcaaagcaccgatgttcatatggttagtgatagtgatggagatgactttgaacatgcttccgaatttggggtggatgatggataagtattcggcatggcgtcatctgccctgagaaaatctccaatgatgccagaaaacgcagaatatgaatgagatgccttattacaatttacagcacagttttcttcagcatatggtgactgccatcctgtagtttt

SEQ ID NO: 4974 - DNA, 364 bp, Bos taurus
  Clone ID: 22-LIB188-008-Q1-E1-F9
acaagcttttttttttttttttttttttttttttttaaaaaccaagccatttaattgtgtctttgaaggtaaacactatcttgatcccaagccctgagaataccagagctacgggtctgataagtcccgcagggcattattctcacagagtcctgagggtcagacctcaaagtgttccaaggcagagcacttaaggaattcatgcattccattctgcaattttgcagacagccagaaacagaccccaagagtctcttgagatgggaagaattcaactcctggtctcatagataaaaggagggatagtacaagctttttttttttggttgtatactttttttggactacaaggtggtttattgag

SEQ ID NO: 4975 - DNA, 419 bp, Bos taurus
  Clone ID: 22-LIB188-009-Q1-E1-F5
gcgggatacagggaggcgctggagaagggtgatgttacagctcagatagctctgcagcctgcgttgaagttcaacggtgggggccatatcaatcacagcatcttctggacaaatctgagccctaacggtggtggagaaccccaaggggaattgctggaagccatcaaacgtgactttggttcctttgccaaatttaaggaaaagttgactgctgtatctgttggtgtccaaggctccggttggggttggctcggcttcaataaggagcagggacgcttacagattgctgcttgttctaaccaggatcccctgcaaggaacaacaggtcttatccccctgctggggattgacgtgtgggagcatgcttattaccttcagtataagaatgtcagggccgattatctgaaggccattttgga

SEQ ID NO: 4976 - DNA, 407 bp, Bos taurus
  Clone ID: 22-LIB188-010-Q1-E1-F5
acctgccgatggacagttccaccagggacaggcccatgctccagatgtctgactgcaccgagtagtgtgtgccttgtagccgctccggagacatgtaggaccgcgtccccacgaaggagttggccatggagtcgatgagctggccgctcaccccgaagtcacacagcttgatctccccccgggagttgaccaggatgttggacggcttcacgtctcggtgcatgatctggtgtttctcccggaggtatgccaggccccgcagaaccgcaatgctgaccttgcccaggatctcttcagggattctcttggcttctttcaacacctggtccagggagccgccatccatgtgctccatgcagatgctgatctcgccgtcgctgtagaaggccccgtagaagcccacaatg

SEQ ID NO: 4977 - DNA, 406 bp, Bos taurus
  Clone ID: 22-LIB188-010-Q1-E1-F9
accaacagaagccgggccagggccctgtaagggtcatttataaagatagtaagcggccctcagggatctctgaccggttctctggctccagctcaggcaaaacagccacgctaaccatcagcggggcccagaccgaggacgaggccgactattactgtcagtcagctgacagcagtcataatgctgttttcggcagcgggaccatattgaccgtcctgagtcagcccaagtccccaccctcggtcaccctgttcccgccctccacggaggagctcaacggcaacaaggccaccctggtgtgtctcatcagcgacttctacccgggtagcgtgaccgtggtctggaaggcagacggcagcaccatcacccgcaacgtggaaaccaccggggctccaaacagagcaac

SEQ ID NO: 4978 - DNA, 427 bp, Bos taurus
  Clone ID: 22-LIB188-011-Q1-E1-F5
acctgcagggaagattgctattgacagaggctatgacatcgcccagatatcccgacacctggacttcatcagccttttgacctatgactttcacggagcctggcgccagacagtcggacaccacagccccctgtttcgaggccaggaagatgcaagttctgacagattcagtaacgctgactacgctgtgagctacatgctgaggctgggggctccagccaataagctggtgatgggtatccccacttttgggaggagctacactctggcctcttccaagacagatgtgggagcccccatctcagggccaggaattccaggccagttcaccaaggagaaagggatccttgcctattatgagatctgtgacttcctccacgggagccacacccacagattccgtgaccagcaggtcccctatgccaca

SEQ ID NO: 4979 - DNA, 426 bp, Bos taurus
  Clone ID: 22-LIB188-012-Q1-E1-F5
acctgcagggaagattgctattgacagaggctatgacatcgcccagatatcccgacacctggacttcatcagccttttgacctatgactttcacggagcctggcgccagacagtcggacaccacagccccctgtttcgaggccaggaagatgcaagttctgacagattcagtaacgctgactacgctgtgagctacatgctgaggctgggggctccagccaataagctggtgatgggtatccccacttttgggaggagctacactctggcctcttccaagacagatgtgggagcccccatctcagggccaggaattccaggccagttcaccaaggagaaagggatccttgcctattatgagatctgtgacttcctccacggagccaccacccacagattccgtgaccagcaaggtccctatgccac

SEQ ID NO: 4980 - DNA, 432 bp, Bos taurus
  Clone ID: 22-LIB188-012-Q1-E1-F9
acagcgccgaatctaccttcgaggggatcctcaaaaacccaagagcagagtctttgaacagcaggtccctctggccgggtggagagccaaagagctggaagctccgagacttgttttttccaaatttctcctgcgccttgctgagaagcttccagatcaagtcttccttgccatccacacttcgggccacgacagcatgagaagggacctgggccaggtggcactccttgaacgcatccactggcgcccgactgttgttcaggcagagaagctcatactggtccctgtcagccttctctggcaagttctcaacactgtcgtctctttaacaaaagccacgtctccagccccgtcctgcagacacttgaaggcaccagaataaccgaagtatggttcccgggaggagcaggcacactggttctccccctcccc

SEQ ID NO: 4981 - DNA, 404 bp, Bos taurus
  Clone ID: 22-LIB188-013-Q1-E1-F5
acagaatttggaggatcaatttatcagaaagtatgtgaagatcttgacacttcagtaaaccttgcttggacatcaggaaccaactgcactcgctttggaattgcagctaaatatcaactggatcccactgcttccatttctgcaaaagtcaacaactctagtttaattggagtgggctatactcagactctgaggcctggtgtgaagcttacactgtctgccctggtagacgggaagagcattaatgctggaggccacaaacttgggcttgccctggaattggaggcttaattcagctgaaagaaacctctggaaatgggtatcagaagatttggccttaatatatttccagtgtgaccagcaggcttccccaccccaccccccgaaggtgatcaaaacaaagg

SEQ ID NO: 4982 - DNA, 424 bp, Bos taurus
  Clone ID: 22-LIB188-014-Q1-E1-F9
acagcgccgaatctaccttcgaggggatcctcaaaaacccaagagcagagtctttgaacagcaggtccctctggccgggtggagagccaaagagctggaagctccgagacttgttttttccaaatttctcctgcgccttgctgagaagcttccagatcaagtcttccttgccatccacacttcgggccacgacagcatgagaagggacctgggccaggtggcactccttgaacgcatccactggcgcccgactgttgttcaggcagagaagctcatactggtccctgtcagccttctctggcaagttctcaacactgtcgtctctttaacaaaagccacgtctccagccccgtcctgcagacacttgaaggcaccagaataaccgaagtatggttcccgggaggagcaggacactgggtctccc

SEQ ID NO: 4983 - DNA, 260 bp, Bos taurus
  Clone ID: 22-LIB188-015-Q1-E1-F5
acaatcattacggttcctccatcgtcttatcgcaaatgcgtctaggcggattgttagcagcgttatacccgattttcttgacaaagcctacattgcgcagatgatgagatgacattggcatggcttcatccgtcatgttttcttgtcattatagagttattactgtgttggtgctcgaaccacgattgacagtctgcatgcgtgcatgttactgcagtccgttcgatacagcattcgcacaatccgaccacttggccgag

SEQ ID NO: 4984 - DNA, 387 bp, Bos taurus
  Clone ID: 22-LIB188-016-Q1-E1-F5
acttcagaaggactctggaaacattctccagctgatcatctcagcttatgaagaactgcggtctgaggtggagctggaagtgttaggagacacggaaggactaaacctctcatttacagccatctgtaacaccgggatccccgttccacaccaaaagaaatgctctcacatgaaggtgggagacacagcttcattcaatgtgactgtgagtttaccaaactgtgagagaaggagcaggcacattatcctaaagcccgtggggctgggggacgctttggaaatcctcgtcagcccggaatgcagctgtgactgccagaaagaagtggaggtgaacagctccaagtgcaacaacggcaatggttccttccagtgcggggtgtgtgcctg

SEQ ID NO: 4985 - DNA, 392 bp, Bos taurus
  Clone ID: 22-LIB188-016-Q1-E1-F9
acagcgccgaatctaccttcgaggggatcctcaaaaacccaagagcagagtctttgaacagcaggtccctctggccgggtggagagccaaagagctggaagctccgagacttgttttttccaaatttctcctgcgccttgctgagaagcttccagatcaagtcttccttgccatccacacttcgggccacgacagcatgagaagggacctgggccaggtggcactccttgaacgcatccactggcgcccgactgttgttcaggcagagaagctcatactggtccctgtcagccttctctggcaagttctcaaacactgtcgtctctttaacaaaagccacgtctccagccccgtcctgcagacacttgaaggcaccagaataaccgaagtat

SEQ ID NO: 4986 - DNA, 379 bp, Bos taurus
  Clone ID: 22-LIB188-017-Q1-E1-F5
acagatcggattattccttatcgttataggactaagcctcgacagacatgaatgctctcatctacactccggaatctactggcagccatgtcatcgatcaagtggacagactacatgaatgatgagttcgaccgcatctatggtgtggagaataatgggaccactaacgagtcacttaatccaattacatgtcacttgtaggtacatcaaccagaatctttagatatacatcaattcggtaatcgctttgctcataactgatattattccatcaagtcagatcaaaataacggcctgatccatgcactctgtattcgacattcaccggcctagcaggagggtccttcagctacggcttggtcccagcctaatcatccgg

SEQ ID NO: 4987 - DNA, 429 bp, Bos taurus
  Clone ID: 22-LIB188-018-Q1-E1-F5
acattttacattcttcctttcagtatcctaataaaaaaaaacccatgtttctgcttacttaaaaaaaaaaaaaaaaacaacaaacagaaaacatcacttttgtgatgggaaaggaggcaacaggattcaacataagcaaagaaaactacacctggagcaaagaaagagatcgaagaggaaccgactcgggtggaggccagaccacctgcactgcacagactgcttttgtcggagccagtggtgacggctcccacctgtttacagaccttttttttttctccttcagactttaaaaataaaaaattttaaaaaggaatttaaagaaaaaaagaaaaaaaaaaaagacttctgtcgtaaagaaacctattttcagaacgcagatccgctgcttcagagctctgggatggaacagcgttgctttcccctccg

SEQ ID NO: 4988 - DNA, 149 bp, Bos taurus
  Clone ID: 22-LIB188-019-Q1-E1-F5
acctggtccctggtcatacccttaaacagagggtctgtgattccctgaatagtctctctggcgttacttatcactttagcagcccaggcgccccccggtcccctttgggcagcgtcatagtttccgcgggcatggaagtatttgtctgt

SEQ ID NO: 4989 - DNA, 421 bp, Bos taurus
  Clone ID: 22-LIB188-020-Q1-E1-F5
gccatgggcgcgggatacacgcgcagcaaccactgggctgtcggacacttatgggaaaaaagaatgtggcagagtccccacaacttcatgaggaggagagcctgaaggagcagctgagggagtatgcccagtgggaagaagcgacaaggaacttgctaagcctcctacaagcaaagggggcccgaggccaccagatgcctccatgggagcccctgagcattcaccagcctgcctgggattccgaggacgtcagcaacttcaaagacacaggtccccagcatgaaagaaagaaaccccagactgaactgagacagtgacaatggccgcctccctcaaaggcgcaacacaatccctttaaaaaactgctttatatggacatcatttctagggtatcatcaacaaatttcctttgtgcaaaata

SEQ ID NO: 4990 - DNA, 341 bp, Bos taurus
  Clone ID: 22-LIB188-020-Q1-E1-F9
acaacttgactaagctggacaggaggaattcggggtatgtcctgaggctgtgagctttgggtcccatgcagctgggggagtccatacaaacctggaagtaaaccgtgtctggtttgtaaccttcgcttccgtgaatagagagggtggattaaatggttcccaggaagccctctgcgattgttgctcagtcactcagttgcatccagctctttgcggctccatggactgcagcacaccaggtttcctggtccttcaccgtctcctggagctggctcaaactcaggtccattgagttggtgatgccatccagtcatctagtcctctgtcatccccttctgcct

SEQ ID NO: 4991 - DNA, 441 bp, Bos taurus
  Clone ID: 22-LIB188-021-Q1-E1-F5
acatgctgctgtaagaaaattgcctttaatcatttaacaagcctaaccttgactcaagcagtgaatgcctataaacataataaatgaaaaaagctagtatttttataacataaaacagtatcatttatagcttgtcaattgcatactgtcatccagcaaaaataaaaagcccagtagagaattaagttatcttcatacctgcaaatgatggaggctatttttgttaaggctgtcgaatttactaaccacaattatgatatatagtccaaagaatgtagtaacctccttatcatgttaattaattgttctcttttgaagatctgttgcattgactaattgaacgataattcaagtagagtgtcccagaaaaaactgcttgggctccctcttcggagtctggctggcagccctgagcattgccaatgggcccaactcgccctg

SEQ ID NO: 4992 - DNA, 414 bp, Bos taurus
  Clone ID: 22-LIB188-022-Q1-E1-F5
acttctccttagagttgggcacacacttgtccaggccctggtcatcgccagcacacaaggcacagagtctggatttcgggtcagccccaggggcacagctctgactaaagaattcatcaaatgcgcaggagcctgtctggttgacgatcaggcccatggggatgttccagcctgcagtcctgtccacggtggtgtggcacgacttcttgtctttcagagaattccatgtgagcccctcatttgctttcttgacaactgccacggcaaggtacagcgccgaatctaccttcgaggggatcctcaaaaacccaagagcagagtctttgaacagcaggtccctctggccgggtggagagccaaagagctggaagctccgagacttgttttttccaaatttctcctgcgccttgctga

SEQ ID NO: 4993 - DNA, 359 bp, Bos taurus
  Clone ID: 22-LIB188-022-Q1-E1-F9
actgtccctatgggtcgtgtggagactggtgttctcaaacctggcatggtggtcacctttgctccagtcaatgtaacaactgaagtgaagtctgtagaaatgcaccatgaagcattgagtgaagcccttcctggggacaatgtgggctttaatgtcaaaaacgtgtctgtcaaagatgtccgtcgtggcaatgtggctggtgacagcaaaaatgatccacccatggaagctgctggcttcacagctcaggtgattattttgaaccatccaggccaaatcagtgctggatatgcacctgtgctggattgtcacacagctcacattgcttgcaagtttgctgagctgaacgagaagattga

SEQ ID NO: 4994 - DNA, 292 bp, Bos taurus
  Clone ID: 22-LIB188-023-Q1-E1-F5
acatctccttaaagttgggcacagacttgtacaggccctagtcatcaacatcacacaaggaacacagtccggatctcgggtcacacccaggggcatagctctgaccaaagacatcaccatatcggcaggaaccagtctggttgactatcaggcccatggggatgttcaaccctgcactcctatcgacggccgtgtggcacgacttcctttctttcagacaattccatttcatccccccaattgccttcttgacaatcgggaaggcaatgttcaagccgtcgcccgggcatgt

SEQ ID NO: 4995 - DNA, 418 bp, Bos taurus
  Clone ID: 22-LIB188-023-Q1-E1-F9
actgtgtcaaacagctgttggaagatttaatagtgaagtatctgcctgatgagctgtctgagagaaaaaaaatatatgatgaagaaactgctgaactctcacacttgaccaagaatgttccaatatttgtttgcactatggcctatcccactgtgccttgccctcttcatgtatttgagccaagatacagattgatgattcgaagaagtatacagactggaactaaacagtttgggatgtgcgtcagtgatacacagaatagttttgcagactatggctgtatgttacaaattagaaatgttcgagcggccgcccgggcaggtacaagaatagttaagtattttgcacaaaggaaatttgttgatgatccagtagaactgatgcccatagaacgcagtttcttaaggattttgttttg

SEQ ID NO: 4996 - DNA, 379 bp, Bos taurus
  Clone ID: 22-LIB188-024-Q1-E1-F5
gatacaaccctaaagtgattcgtctgaaaaacattgctaggtaagctcaggacactgagggcgtctacaccacttccctctgccaacctgcaggcgatgaagctcttttccaggcaaccctggcgtttccaggcctgacttcttccaactggtactcctggttctgccgctcggtgtcagctcgcacgtcactcagctgggcttcgataccactgatcagcgcctggatctgcgccagctgggctccgaagcgagcctccgtttccgccagtgtgccttccagggcggctttcatgctgagctgagactgcagctcgatctccagaccctggagggtgcgccgcaggtcggtgacctccgtcttgctgatttgcagctg

SEQ ID NO: 4997 - DNA, 421 bp, Bos taurus
  Clone ID: 22-LIB188-025-Q1-E1-F5
accaggacccgtagcacacttccccggccatgaacttctccaggaagctgtcccaggtgccagggtcagggtgcaccttggccatgcgatagaagtggtaataggagacggccacatccttggcgttgcgggcgatgtagatcaccttgactttctgatccagcagggtcttcggaagcagggccagaggcaagtgtgtcttgaggagccgtggggctggtgtatctttcagaagctcaacacctgtgggaaccccaggggcgctgaactcaaggaagggcacccgcaagaagacaggggctctctgacacttctccaggtcaccctcctggtagatcaggtccaggatctcgcttacccaggtggtgcccgacttggggtaggtgctgatgagcaagtcatcaggccaggcttcaaagct

SEQ ID NO: 4998 - DNA, 243 bp, Bos taurus
  Clone ID: 22-LIB188-026-Q1-E1-F5
cgccatggcgcgggatacggtagttgttttctgtgaattccatcgtggggaagtggtagggagtcctctgcaggtgggcgtccatggcctgctgggcctggtggatcatgtcgtagaagggctgaaacacatcgtggaagttgaagggttccaacaaggggaaaggcatcacgttccgggcaaagcgggacttgggattgaagaagagtgaccccctcgggaacgagctgaagggggagtagt

SEQ ID NO: 4999 - DNA, 405 bp, Bos taurus
  Clone ID: 22-LIB188-026-Q1-E1-F9
gccctgggcccgggatacaagtgatgtccaatggggcccaggtgctccagtgggccatgtccagtgtctgccctatctcttctcccagcctccccaagggatggctcaaggaggtcagagaggatcccatccacagggccagctgggtgggcggcaggggcttctcggataggagcaggaacgaggcatgagagcgtgtccggggaagggagggcatcagctccctgggaagcccagcccaccttcagccacactgcctctcagaggtgaagggaggtcaggatggagaatggactgggggtgccgtaagctcctcttgtttagtgccactaccctcccctgaatcccccggatggcggccgctgattgtcgtgagtcacactgtgttgaccgcatcttctgcca

SEQ ID NO: 5000 - DNA, 279 bp, Bos taurus
  Clone ID: 22-LIB188-027-Q1-E1-F5
accgcgtgatcagcgccctgcccatccagcaccaggactggactggaggaaaggagttcaagtgcaaggtcaacaacaaaggcctctcggcccccatcgtgaggatcatctccaggagcaaagggccggcccgggagccgcaggtgtatgtcctggacccacccaaggaagagctcagcaaaagcacgctcagcgtcacctgcatggtcaccggcttctacccagaagatgtagccgtggagtggcagagaaaccggcagactgagtcggaggacaagt

SEQ ID NO: 5001 - DNA, 411 bp, Bos taurus
  Clone ID: 22-LIB2809-001-Q1-E1-F5
acagcaggtcaggaaagtagaagaactctgtcagatccgcagcaaacgttggacagacaattacattggcctcgtagtagcaaagggccagagtaaccagcagggcagtcacagacagcctcatggtttattttgctttgagttttcagccttggtgaatgacaagcaatcccagcaaggagaacctttgctccacattctgcaaggaagttgtaacgaacgcaaatgaagaggaatattctatcggctcatctagtgaggaatctgctgaagttgccacagaggaagttaagattactgtggacgataagcactaccagaaagcactgaatgaaatcaatcagttttatcagaagttcccccagtatctccagtatctgtatcaaggtccaattgttttgaacccatggg

SEQ ID NO: 5002 - DNA, 145 bp, Bos taurus
  Clone ID: 22-LIB2809-001-Q1-E1-F9
actgttgcattaaaagcgccatcagggacatcgagcaagggtcaaaagtccagagcgccattcatgcacccctggagattagtccttacatgtccattgtcactacagggcccagggctcagagacgagttagcttcaagggggt

SEQ ID NO: 5003 - DNA, 403 bp, Bos taurus
  unsure (350),(387): unsure at all n locations; Clone ID: 22-LIB2809-002-Q1-E1-F5
acccaactctctgtgatcctatggatatagccctccaggctcctctgttcatggaattctcaaggtaagaatactagagtgggttgccatgccctcctccaggggactttcccaacccagtgatcaagcctgagtctcctgcattggtagaggggttccttaccactagcaccacctgggaagccccatttgttttctgatttttgcaaattaaatcagaatattggatgaagggaaaaatgatgtttctgatactagccacatttaccgagggcttacttcgcaattcaaaatggctcagacggtaaaccgtctgtctacagtgcgagagacctgggttcgactcctgngttgggaaaatcctctgcagaaggaaatgttgcctgnaaaaatccatgaacag

SEQ ID NO: 5004 - DNA, 478 bp, Bos taurus
  Clone ID: 22-LIB2809-003-Q1-E1-F5
ggcgatacctggtgagatatgtggaaagcctttcaagcagtgaggaatctattacacgcatcaataagaaaattgagaagtttcagagtgaggaacagcagcaaacagaggatgaactccaggataaaatccacccctttgcccagacacagtctctagtctatcccttccctgggcccatccctaacagcctcccacaaaacatccctcctcttactcaaacccctgtggtggtgccgcctttccttcagcctgaagtaatgggagtctccaaagtgaaggaggctatggctcctaagcacaaagaaatgcccttccctaaatatccagttgagccctttactgaaagccagagcctgactctcactgatgttgaaaatctgcaccttcctctgcctctgctccagtcttggatgcaccagcctcaccagcctcttcctccaactgtcatgtttcctcctcagtccgtgctgtccct

SEQ ID NO: 5005 - DNA, 430 bp, Bos taurus
  Clone ID: 22-LIB2809-004-Q1-E1-F5
tcgacactagaggatcgcccggtaccgagctcgaattccgtgtattctatattgtcacctaaatcgtatgtgtatgatacataaggttatgtattaattgtagccgcgttctaaccacaatatctgcaggcctaattgtgtagcatctggcttactgaagcagagcctatcatctctcgcgtaaactgccgtcagagtcggtttggttggacgaaccttctgagtttctggtaacgccgtcccgcacccggaaatggtcagcgaaccaatcagcagggtcatcgctagccagatcctctacacgtgacgcatcgtggccgggatcagcggggccacacgtgcagttgctggcgcctatatcgccgacatcaccgatggggaagatcgggctcgccacttcgggctcatgagcgcttgtttcggcgtgggt

SEQ ID NO: 5006 - DNA, 466 bp, Bos taurus
  Clone ID: 22-LIB2809-004-Q1-E1-F9
acagcagaaaggactgaatgggcatatctctctggggatagggcactgctttctggggaacaggcaggactttggactgagaaagggacagcacggactgaggaggaaacatgacagttggaggaagaggctggtgaggctggtgcatccaagactggagcagaggcagaggaaggtgcagattttcaacatcagtgagagtcaggctctggctttcagtaaagggctcaactggatatttagggaagggcatttctttgtgcttaggagccatagcctccttcactttggagactcccattacttcaggctgaaggaaaggcggcaccaccacaggggtttgaataagaggagggatgttttgtgggaggctgttagggatgggcccagggaagggatagactagagactgtgtctgggcaaaggggtggattttatcctggagttcatcctctgtttgctgctg

SEQ ID NO: 5007 - DNA, 389 bp, Bos taurus
  Clone ID: 22-LIB2809-007-Q1-E1-F5
catgctccaagaaaccatggccggggcatacctggaagttagtggacagcaagaatttcgatgactacatgaagtcactcggtgtcggttttgctaccaggcaggtgggcaatatgaccaagcctaccacaatcatcgaagtgaatggggacacagtcatcataaaaacacaaagcaccttcaagaacacagagatcagcttcaagctgggagtcgagttcgatgagaccacagcagatgacaggaaagtcaagtccatcgtgacgctggatggcggcaaacttgtccacgtgcagaagtggaatggacaagagacatcacttgtgcgggaaatggttgacgggaaactcattctgacactcacccatggcactgcagtttgcactcgt

SEQ ID NO: 5008 - DNA, 450 bp, Bos taurus
  unsure (395): unsure at all n locations; Clone ID: 22-LIB2809-008-Q1-E1-F5
cgccatgggcccgggatacagcagaaaggcctgaatgggcatatctctctggggatagggcactgctttctggggaacaggcaggactttggactgagaaagggacagcacgggctgaggaggaaacatgacaggtggaggaagaggctggtgaggctggtgcatccaggactggagcagaggcagaggaaggtgcagattttcaacagcagtgagagtcaggctctgactgtgaggggggggctcaactggagagttagggaagggcaggtcgttgtgcttaggagcgaggaggtccttcactttggagactcccattacttcaggctgaaggaaaggcggcaccaccacaggggtttgagtaagaggagggatgttttgtgggaggctgttanggatgggcccagggaaaggatagactagagactgtgtctgggcaaagggtggatt

SEQ ID NO: 5009 - DNA, 418 bp, Bos taurus
  Clone ID: 22-LIB2809-010-Q1-E1-F5
aatggggccgggatacttctagaaagtgcaccaactgaaaaacaacgcctagaatgggtgggcttggtggaatcaaaaatccgaatcctggttggaagtttggagaagaatgagtttattacactggctcatgtgaatccccagtcatttccagcacccaaagaaaatcccgacaaggaagaatttcgcacgatgtgggtgattgggttagtgtttaaaaaaacagaaaactctgaaaatctcagtgttgatctcacctatgatattcagtctttcacagatacagtttataggcaagcaataaacagcaagatgtttgaggtggacatgaaaattgctgcgatgcatgtaaaaagaaagcaactccatcaactactgcctagtcatgtgcttcagaaaaagaaaaagcattcaacag

SEQ ID NO: 5010 - DNA, 380 bp, Bos taurus
  Clone ID: 22-LIB2809-010-Q1-E1-F9
accccagctggaaattgttcccaatagtgctgaggaacgacttcacagtatgaaagagggaatccatgcccaacagaaagaacctatgataggagtgaatcaggaactggcctacttctaccctgagcttttcagacaattctaccagctggatgcctatccatctggtgcctggtattacgttccactaggcacacaatacactgatgccccatcattctctgacatccctaatcccattggctctgagaacagtgaaaagactactatgccactgtggtgaagagtcaagtgaattctgagggactccacagttatggtctttgatggttctgaaaattccatgctctacatgtcttttcatctatcatgtcaaacca

SEQ ID NO: 5011 - DNA, 451 bp, Bos taurus
  Clone ID: 22-LIB2809-011-Q1-E1-F5
gcatgactccgaccgccatggcgcgcgggatacattgagatcttccagctctcttgcaagggccagagccaccaggcaggcaaggatgaggaccttcatggctcttgtcttccttttaggaaacgaggacaaagtaaacatgaagttcttcatctttacctgccttttggctgttgcccttgcaaagaatacgatggaacatgtctcctccagtgaggaatctatcatctcccaggaaacatataagcaggaaaagaatatggccattaatcccagcaaggagaacctttgctccacattctgcaaggaagttgtaaggaacgcaaatgaagaggaatattctatcggctcatctagtgaggaatctgctgaagttgccacagaggaagttaagattactgtggacgataagcactaccagaaagcactgaatgaaatcaatcagttttat

SEQ ID NO: 5012 - DNA, 445 bp, Bos taurus
  Clone ID: 22-LIB2809-012-Q1-E1-F5
actttgactgttcatcttatctaaattacccaggaatttgtggctaaaatcagtttaccacagataagctatgatgtgtctggttaattagcatttttatcttgaatgtaaattaatgtcataaaactaacaatacatgttttttattttttaaggaaattgttcccaatagtgttgagcagaagcacattcaaaaggaagatgtgccctctgagcgttacctgcgttatctggtaaaattttattaaaagttaatcaaagaccaatgtatcagggaatgagcaagaatgttgtattgataaattatctctccttttcaatatctgctaaacttaaagtaagcagtcaaacagattctagcagtatactgatcccttctgaaaataaaactgacaacttttttaatcccagatatttaattcatactctcatttgacaaattgtg

SEQ ID NO: 5013 - DNA, 416 bp, Bos taurus
  Clone ID: 22-LIB2809-012-Q1-E1-F9
acagcagaaaggcctgaatgggcatatctctctggggatagggcactgctttctggggaacaggcaggactttggactgagaaagggacagcacggactgaggaggaaacatgacagttggaggaaggggctggtgaggctggtgcatccaagactggacaagcagagaaggtgcagattttcacatcatgaaataggccggcttcagtaagggctcaactggatatttagggaagggcatttctttgtgcttaggagccatagcctccttcactttggagactcccattacttcaggctgaaggaaaggcggcaccaccacaggggtttgagtaagaggagggatgttttgtgggaggctgttatggatgggcccagggaagggatagactagagactgtgtctgggcaaaaggg

SEQ ID NO: 5014 - DNA, 401 bp, Bos taurus
  Clone ID: 22-LIB2809-014-Q1-E1-F9
catgactccgatcgccatggcggcgggataccgctggcacatcaactttaccacgttcttcattgattgcatggctgccatcggtctggcttatgaccggaagaaagtatccaaggctgccatcttggccaggataaacagaactggagaggaaagctacaagagtggctgaatttgtggtcccttgggttccttttccaaaagccatctgggcagaggtttaatgttctgtttactaactactgaattatgctaccaggatgctaaagatgacgttaacccattaaagaatactgtacagtattccttaaaattttctttttaacttgaaagccaacgactctgcctttacgacgccaagctcatgttcttatttcttcacctatctcctttctcttctg

SEQ ID NO: 5015 - DNA, 354 bp, Bos taurus
  Clone ID: 22-LIB2809-015-Q1-E1-F5
gatacaaaacaaaaacagcacagaatatggactcttccagataaataataaaatttggtgcaaagacgaccagaaccctcactcaagcaacatctgtaacatctcctgtgacaagttcctggatgatgatcttactgatgacattatgtgtgtcaagaagattctggataaagtaggaattaactactggttggcccataaagcactctgttctgagaagctggatcagtggctctgtgagaagttgtgaacacctgctgtctttgctgcttctgtcctctttctgttcctggaactcctctgccccgtggctacctcgttttgcttctttgtacccccttgaagctaactcat

SEQ ID NO: 5016 - DNA, 389 bp, Bos taurus
  Clone ID: 22-LIB2809-016-Q1-E1-F5
ggatacaccataaaggcccgaatgggcatacctctctggggaaagggcactgctttctggggaccctgtacgactttggactgagtacgggatagcacgcgattgaggaggaaacatttcacttggacgaataggctggtcatgctggtgcatccacgactggagcagatgcacgacgactgtgcagattttcaagatcactgagagtcacgctctggctttcactacatggctcaactggatatttcaggaagggcatttctttgtgcttaggagccataccctccttcactttggacactcccattacttcaggctaaatgaaaggccgcaccaccacatgggttctagtcataggagggatgttttgtcggatgctgttacggatg

SEQ ID NO: 5017 - DNA, 386 bp, Bos taurus
  Clone ID: 22-LIB2809-018-Q1-E1-F9
actgtccatgtgggtcgtgtggagactggtgttctcaaacctggcatggtggtcacctttgctccagtcaatgtaacaactgaagtgaagtctgtagaaatgcaccatgaagcattgagtgaagcccttcctggggacaatgtgggctttaatgtcaaaaacgtgtctgtcaaagatgtccgtcgtggcaatgtggctggtgacagcaaaaatgatccacccatggaagctgctggcttcacagctcaggtgattattttgaaccatccaggccaaatcagtgctggatatgcacctgtgctggattgtcacacagctcacattgcttgcaagtttgctgagctgaaggagaagattgatcgtcgttctgggaaaaagctggaaga

SEQ ID NO: 5018 - DNA, 416 bp, Bos taurus
  Clone ID: 22-LIB2809-019-Q1-E1-F9
gcgggatacactatactttaaaattttctttttaaattgaaagccaacaactctgcctttatgatgctaagctcatgttcttatttcttctcctatcttctttctcttctgttcccattatccttccctttgttttgtccctgtcaccttcctttctccttctcctcattgccccccaggcaatcaggtggtcagtcattggtgggtttccagcttccaaagcctagacaaccctgctgtagtctcaaactagtggtctttgccccggctgaccctttccttgagctgtctgagctttaacgtggattgctcaagctagagatatgacagaatcttctgtgaagggccttgatgatcttcagcccagacttttgctaaatgaaatggaaaaataactttattttggcaccaaactg

SEQ ID NO: 5019 - DNA, 275 bp, Bos taurus
  Clone ID: 22-LIB2809-020-Q1-E1-F5
gccatgggcgcgggatactatgaattgtgtgtcataaccactggtatgaaacgtggtacagacccattcaggcaaactgacacctccgtagcccttcaagtctttcagctcccggaacacctcacattttgttaactgttcagcctgggtggcatggaagaggatgcctaccacgagcagagagacaacggacatgtgaggagcgaagcgctaggggtgcatgaatggcgctctggacttttgacccttgctcgatctccctgatggcgctttta

SEQ ID NO: 5020 - DNA, 414 bp, Bos taurus
  Clone ID: 22-LIB2809-021-Q1-E1-F5
acctcacatagggaataacctttgtcttaggttgaatccatggcttcatagctttctgatgctgataaacagtcttgagatactggggcaaggcgaatttctggtaacgctggctgatttttttcagaaaatttaggcgattcttttcttcttcagtcagtttagttttcttagtgaatacttctgttgattccatgtcaacggtcttctttgaattttcctcactggtggagagctgctctctgttcagagtgggagtaatgggaacagcatttctcttaacctgatcccatgggttcaaaacaattggaccttgatacagatactggagatactgggggaacttctgataaaactgattgatttcattcagtgctttctggtagtgcttatcgtccacagtaatcttaactt

SEQ ID NO: 5021 - DNA, 394 bp, Bos taurus
  Clone ID: 22-LIB2809-025-Q1-E1-F5
tggcctagccatagtgggtgcaatatgtgacttctgcgaagcttgggtctgtcatggtaggaagtgtctcagcacacacgcctgtgcctgcccgcttaccgatgctgagtgtgtggaatgtgaacggggtgtgtgggaccatggaggcagaattttcagttgttctttttgccataactttctctgtgaagatgatcagtttgaacatcaagccagctgccaggttttagaagcggaaacatttaaatgtgtttcatgcaatcggcttggtcagcattcctgtctccgttgtaaggcttgtttctgtgatgatcatacaaggagcaaagtgtttaagcaagaaaaaggaaaacagcctccgtgccctaaatgtggacatgaaactcacggaact

SEQ ID NO: 5022 - DNA, 246 bp, Bos taurus
  Clone ID: 22-LIB2809-026-Q1-E1-F9
actccttggccatggcggccagcgacatctccctgctggacgcccagagtgcccccctgagagtgtaagtggaggagctgaagcccacccctgagggcgacctgtagatcctgctgcagaaatgggagaacggtgagtgtgctcataagaagatcattgcataaaaaaccaagatccctgcggtgttcaagatcgatgccttgactgagaacaaagtccttgtgctggacaccgactacaaaaagt

SEQ ID NO: 5023 - DNA, 396 bp, Bos taurus
  unsure (378): unsure at all n locations; Clone ID: 22-LIB2809-029-Q1-E1-F9
acagcaaaaaggcctgaatgggcatatctctctggggatagggcactgctttctggggaacaggcaggactttggactgagaaagggacagcacggactgaggaggaaacatgacagttggaggaagaggctggtgaggctggtgcatccaagactggagcagaggcagaggaaggtgcagattttcaacatcagtgagagtcaggctctggctttcagtaaagggctcaactggatatttagggaagggcatttctttgtgcttaggagccatagcctccttcactttggagactcccattacttcaggctgaaggaaaggcggcaccaccacaggggtttgagtaagaggagggatgttttgtgggaggctgttanggatgggcccaaggaaag

SEQ ID NO: 5024 - DNA, 391 bp, Bos taurus
  Clone ID: 22-LIB2809-031-Q1-E1-F5
accccagatggaaattgttcccaatagtgctgaggaacgacttcacagtatgaaagagggaatccatgcccaacagaaagaacctatgataggagtgaatcaggaactggcctacttctaccctgagcttttcagacaattctaccagctggatgcctatccatctggtgcctggtattacgttccactaggcacacaatacactgatgccccatcattctctgacatccctaatcccattggctctgagaacagtgaaaagactactatgccactgtggtgaagagtcaagtgaattctgagggactccacagttatggtctttgatggttctgaaaattccatgctctacatgtcttttcatctatcatgtcaaaccattctatccaaa

SEQ ID NO: 5025 - DNA, 402 bp, Bos taurus
  Clone ID: 22-LIB2809-031-Q1-E1-F9
acagcaaaaaggcctgaatgggcatatctctctggggatagggcactgctttctggggaacaggcaggactttggactgagaaagggacagcacggactgaggaggaaacatgacagttggaggaagaggctggtgaggctggtgcatccaagactggagcagaggcagaggaaggtgcagattttcaacatcagtgagagtcaggctctggctttctgagaacagtgaaaagactactatgccactgtggtgaagagtcaatgggattagggatgtcagagaatgatggggcatcagtgtattgtgtgcctagtggaacgtaataccaggcaccagatggataggcatccagctggtagaattgtctgaaaagctcagggtagaagtaggccagttcctga

SEQ ID NO: 5026 - DNA, 258 bp, Bos taurus
  Clone ID: 22-LIB3057-002-Q1-K1-F5
gccatggctgcgaagactgctggtggcttgcgcttagagctccttaataattgggggaggctttatttactatttcagtgctcttacactatctatatactaacagcttctaaaccttctaattctctctataattattccaacccaaaactcttctccaatactaccaaatctacaccctatttataaccttacactcctttgtaataatcttcttcatactacttccattcataatcttattattctctatcttac

SEQ ID NO: 5027 - DNA, 359 bp, Bos taurus
  Clone ID: 22-LIB3057-003-Q1-K1-F5
cttggtccctgggagctttgagtctcatttggaatttgtgaagtccctgtgtttggggccagcactgatccacacagccaaatttgcacttgtcttccctctcatgtatcacacctggaatgggatccgacacttgatgtgggatctaggaaaaggcctgacgatttcccagctacaccagtctggagtggctgtcctggttcttactgtgttgtcctctgtagggctggcagccatgtgaagagccgaagttcccagtgtcatcatcctacaaattatcacattgacctgtcttcctgtttgttactcttgtctttggccagggcaaagttatttctgatattgtttagaacccttct

SEQ ID NO: 5028 - DNA, 403 bp, Bos taurus
  Clone ID: 22-LIB3057-004-Q1-K1-F5
cgattcccagattcgacccacgcgtacgcaatgctttagcaccaggctccccactatacgttctttgctttactttctattttctggtctatgttccgcctcacaaatttattcttaacataatgcacaaaaccatagattcaggctcccattcatagaccttcctcccttccttttcctccaactcaccctcctttttaaatgccatggaaaacacagttcaaggaaacattcaatcacaaacaatgatcaactttaaaaacaaaaagtttgctccaaaagaactcaacataattaatccaattaccgtgaaaagcttcactgagtaggattaatatattgcaaatgtagtgtttccacagggcggcttttcagtacaccaggggggccttctttaaggata

SEQ ID NO: 5029 - DNA, 453 bp, Bos taurus
  unsure (376): unsure at all n locations; Clone ID: 22-LIB3057-005-Q1-K1-F5
gcgaccgagcgcggcgacgccgggtgagtgtggtgtaaaggaattcgttagccatggatgttttcatgaaaggactttcaaaggccaaggagggagtcgtggctgctgctgaaaaaaccaagcagggtgtggcagaagcagcaggaaggacaaaagagggtgttctctatgtaggatccaaaaccaaggaaggggtagttcatggtgtgacaacagtggctgagaagaccaaagagcaagtgacaaacgttggcgaggcagtggtgacaggggtgactgcagtagcacagaagacagtagaaggagcagggagcattgcagctgccactggctttggcaaaaaggatcatatgggcaagggtgaagaaggagcctnccaggaaggaattctggaagatatgcctgtggatcctgacaatgaggcttatgaaatgccttctgaggaagggtatc

SEQ ID NO: 5030 - DNA, 390 bp, Bos taurus
  Clone ID: 22-LIB3057-005-Q1-K1-F9
gttctagatcgcgagcggccgccctttttttttttttttttttcgtgaaacttgaaaggttttatttcttaactacagacagctttaagagtcggcccaggcctttcccctcgaattcaagagggagctgaccggggagaggctcgagcaggcgcgcggccccgaggcccaggctgagagtgcggccgcccgggctgagctggagtatggcctggtggcggaggcggaggctgaggcggccgagaagaaggactcggggccctataagatggaacacttccgctggggcagcccgcccaaggacaagcgctacggcgggttcatgacctccgagaagagccaaacgccccttgtcacgctgttcaaaaacgccatcatcaagaacgccca

SEQ ID NO: 5031 - DNA, 430 bp, Bos taurus
  unsure (388),(391): unsure at all n locations; Clone ID: 22-LIB3057-006-Q1-K1-F5
ccgtccaacatcctagtgaacagccgtggagagatcaagctctgtgactttggggtcagcgggcagctcatcgactccatggccaactccttcgtgggcaccaggtcctacatgtcgccagagcgactccaggggacccattactccgtgcagtcggacatctggagcatggggctctctctggttgagatggctgtcgggaggtatcccatccctcctccagatgccaaggagctggagctgatgtttgggtgccaggtggagggagatgcggctgagaccccgcccaggccaaggacccccgggaggcccctcagctcttatggaatggacagccgacctccaatggcaatttttgagttgttggattacatagtcaatgagcctnctncaaaactgcccagtggagtattcagtctggaatttcaag

SEQ ID NO: 5032 - DNA, 386 bp, Bos taurus
  Clone ID: 22-LIB3057-007-Q1-K1-F5
cggacgcgtggggtaaaaggttaagttttgttctgcactgcagtaattattaacctgttaaaaaaaaatcttggattgtcttgacgtttggattaaatcaatcttttcattttccctaattcaaggtaaaaccagtgggttggttggctacctttagattcttaccgggttccccttgcaagttcagaattgcctttggagacctaccagttaacttaccggacccgaattgaaccaatcagtttttgtgcaggttaccttcttaaacccagtggggcctgaaggagaagtaggtggatgccatgggtggaagctgccagcaagcaggcccttcattcattgatttccttcccccaaataatggatctcaaatctatatgtaccta

SEQ ID NO: 5033 - DNA, 390 bp, Bos taurus
  Clone ID: 22-LIB3057-007-Q1-K1-F9
cccacgcagtccgcccacgcgtccgaaaaaaagaaagatcgagatggcacgtacaaagcaagctgataaataagtacacaagaggaaaggcacctatgaagcatctcgcaaccaaagctgctcgtaagtctgcaccaactactgtttgtgtgaagaatccacatcgttatcgtcctggtacctgcaatcttagtcagattaggaactaccagaagagtaccgagcttttgatcaggaagctcccctttcagaagctggttcgtgaaattgctcaagacttcaagactgatctgcgtttccagagccatgctgtgcttgcattgcaagaagctgctgatgcataccttgatggactctttgaggatactaatctgtgtgccattcacgcta

SEQ ID NO: 5034 - DNA, 424 bp, Bos taurus
  Clone ID: 22-LIB3057-008-Q1-K1-F5
gcgagcggccgcccttttttttttttttggccgcgggtgcagaggtttctgggagcggagagtcatgatggcgtctgtatgatctccgggggtagcggcgtcggagttcggccaaacataaaagatgacaacagcagctcggccaacttttgaacctgcaagaggtggaagaggaaaaggtgagggtgatttgagccagctctcaaagcagtattcaagcagagacctaccctctcatacaaagataaaatatagacagaccactcaggatgcccctgaagaggttcgaaaccgtgacttcaggagagagttggaggagagagagagagctgctgcaagagaaaaaaacagagatcggccaacccgagaacatacaacctcctcttcagtgtcaaagaagcctcgactggaccagattcctgct

SEQ ID NO: 5035 - DNA, 433 bp, Bos taurus
  Clone ID: 22-LIB3057-009-Q1-K1-F5
cggcagcattccaggttgctgactctttcagcagagccgggcctacgcttttgcaaccatgtctaaaggacctgcagttggcattgatcttggcaccacctattcttggtgggtgtcttccagcacggaaaggtggaaataattgccaatgatcaggggaaccgaaccaccccaagctatgtcgcctttactgataccgaacggttaatcggtgatgcagcaaagaaccaagtcgcaatgaatcccaaccaacacggtttttgatgccaaacgacttattggacgaagatttgatgatgctgttgtccagtctgatatgaaacattggcccttcatggtggtgaatgatgctggcaggcctaaggttcaagtagaatacaagggagagacaaagagtttttacccaagaggaggtgtcatccatggtcctgac

SEQ ID NO: 5036 - DNA, 201 bp, Bos taurus
  Clone ID: 22-LIB3057-009-Q1-K1-F9
gcaagattgacacttaccttaagctcctgaattgcagaatcatctacaacaacaactgctaagcccacattcatcctatccatttctgagatggttcttaatgatccattccctggcaaacttctctgagctttatagctttgtaatgcatgcttggctctaatgggtttcatcttaaataaaaacagactctgtagcgat

SEQ ID NO: 5037 - DNA, 277 bp, Bos taurus
  Clone ID: 22-LIB3057-010-Q1-K1-F5
acgcttgcgagacctaactggcaggcatctaacaagctaatcaggcaccatcaagctgtcatcacggaagggctgatagaaaacatctctagagctgaggctctggactaatgaaaatcaagttgcatcctcagacaagaggtaaagaagaattcaacaagctgattttgtttttagcttactgctgtccttgtcagaagaatttattggtccattgctcagattactaatgacagcaagatatttgtaaattatcttacaataaatgactcaacat

SEQ ID NO: 5038 - DNA, 435 bp, Bos taurus
  Clone ID: 22-LIB3057-011-Q1-K1-F5
agggagcttttcccgtctttcagctactgcggctctttcggcagcagcggcggcgcggtggtcggagaagcggcctaaaacttcggcgttaggtaaaagaaaatggctcgaaccaagcagactgctcgtaagtcaacgggtgggaaagcgccccgcaagcagctggccaccaaagcggccaggaaaagcgccccctctactggcggggtgaaaaaacctcatcgctacaggcccgggactgttgcgcttcgagaaatccgtcgttaccagaaatccaccgagcttctgatccggaaactgcctttccagaggttggtgagggagatcgcccaggatttcaaaaccgacttgaggttccagagtgccggcatcggtgcgctgcaggaggctagcgaagcgtatctggtgggtttggttgaagatactaatctgggt

SEQ ID NO: 5039 - DNA, 441 bp, Bos taurus
  unsure (358): unsure at all n locations; Clone ID: 22-LIB3057-011-Q1-K1-F9
gtcggattctggccgaagtggctctgttacctgggagagctgaaggagtgtgcacagaggtactgtgccagcgccctggaccggagatctacacaatctaaacattaaacagaacagtcgcttcaaatccctgagaatttcagaatgactgacacttctgaagctgttccaaattttgaagagatgtttgccagtagattcacagaagatgacaaagaataccaagaatacttaaaacgccctcctgattcccctccgattgttgaggaatggaatagcagagctggtggcagcctgagaaatagaggcaatcggttgcaagataacagacagtttagaggtagggatagcagacggnggtggccaagtgacaatcgatccaatcaatggcatggacgatcctggggtaacaattacccgcagcacagacaagaaccttac

SEQ ID NO: 5040 - DNA, 418 bp, Bos taurus
  Clone ID: 22-LIB3057-012-Q1-K1-F5
caaccttcaggaagctgcgtggattcctggtctcctagcaacgagggcccagccgcggactggtcccggccgcggactgagccagccgcgtagctgtccaagcatttggggcgctatccagaatccctaagccggacccaaacgggagccgaaaccccgagcttggaaaaataagcaggaaatggcggacgaggcgttgtttttgcttctgcataacgagatggtgtctggagtgtacaagtccgcggagcatggggaggtggaaaatggacgctgtataactaaactggaaaacatggggtttcgagtgggacaaggattgatagaaaggtttacaaaagatactgcaaggttcaaggatgagttagatatcatgaagttcatttggaaagatttttggactacagtattcaagaaa

SEQ ID NO: 5041 - DNA, 445 bp, Bos taurus
  Clone ID: 22-LIB3057-012-Q1-K1-F9
gcccagggcaaagggttcattaccatggccctcaacagctgccatacctcctccctggctacccctgaagataaagaacaagcccaacagacccaccatgaagtccttatgagcttgattcttgggttgctgcgctcctggaatgaccctctctatcacctagtcaccgaggtgcggggtatgaaaggagccccagatgctatcctatcgagggccatagagattgaggaagaaaacaaacgacttctggaaggcatggagatgatatttggccaggttattcctggagccaaagagactgagccctaccctgtgtggtcaggactcccgtccctgcaaactaaggatgaagatgcacgttattctgctttttataacctgctccactgcctgcgcagggattcaagcaagattgacacttaccttaagctcctgaattgcagaa

SEQ ID NO: 5042 - DNA, 424 bp, Bos taurus
  Clone ID: 22-LIB3057-013-Q1-K1-F5
gccccacgaacgtgcggtgcgtgacgggcgagggggcggccgcctttccggccgcgcgccgtgtcccgggacgaagggctctccgcaccggaccccggtcccgacgcgcggcgggggcgcgccgcgccgcgccccgggggacgcgggcgacggcccgccggcggggacggcgggggaccggctatccgaggccaaccgaggctcccgcggcgctgccgtatcgttccgcctgggcgggattctgacttagaggcgttcagtcataatcccacagatggtagcttcgccccattggctcctcagccaagcacatacaccaaatgtctgaacctgcggttcctctcgtactgagcaggattaccatggcaacaacacatcatcagtagggtaaaactaacctgtctcacgacggtctaatcccagc

SEQ ID NO: 5043 - DNA, 295 bp, Bos taurus
  Clone ID: 22-LIB3057-013-Q1-K1-F9
gcgcatgaatataggtcttattaccgtttcgacctcaacctattatcaaactgcaaatgtgtaacaagccgggttggctagcctgcacccgctcgtccaatgcgactgcctatcatgccacttttggtacccagaactgctacttcgatatgaacacaaacgccgccttaaggcgcccgatgcccacgctcatcatcaccccagacaacgtgttggttgatctatacaccatgacgctggccatataagtcctaatccgctaaggactgtgtaacatctcacctgacgaatcaac

SEQ ID NO: 5044 - DNA, 359 bp, Bos taurus
  Clone ID: 22-LIB3057-014-Q1-K1-F5
cggacgcgtgggcggcagcatgtctcacaggaagttctctgctcccaggcatgggtccgtgggcttcctgcctcggaagcgcagcagccggcaccgcgggaaggtgaagagcttccccaaggatgactcttccaagcctgtgcacctcactgcctttcttggctacaaggctggcatgacccacattgtgagggaggtcgataggccagggtccaaggtgaacaagaaggaagtggtggaggctgtgaccatcgtggagactccgcccatggtgattgtgggcatcgtgggctacgtggaaacaccccgaggccttcggacctttaagaccattctttgctgagcatatcagcgacgag

SEQ ID NO: 5045 - DNA, 406 bp, Bos taurus
  Clone ID: 22-LIB3057-015-Q1-K1-F5
gcgagctgagtggttgtgtgattgcgttccggagaccggtagcgcttgcagcgtggcggaccaactgactgaagagcagattgcagaattcaaagaagctttttcactatttgacaaggatggtgatggaactataacaacaaaggaattgggaactgtaatgagatctcttgggcagaatcccacagaagcagagttacaggacatgattaatgaagtggatgctgatggtaatggcacaattgacttcccggaatttctgacaatgatggcaagaaaaatgaaagatacagacagtgaagaagaaattagagaagcattccgtgtgtttgataaagatggtaatggctatattagtgcagcagagcttcgccatgtgatgacaaaccttggagagaaattaaca

SEQ ID NO: 5046 - DNA, 327 bp, Bos taurus
  Clone ID: 22-LIB3057-016-Q1-K1-F5
atcacaaaatccaaaatctggaatcgtccaatatgacgattagcatgaacagctaaagaaactgtactaccttcgtacaatgaaacatcactcattcatgaagacagataacattcttcaacatgtgacaatacatataagcccctaagacacttttctacatgaaataatccagacctgataagccaaatactgcacgattctactcacacatatgtctaatacactattcaaatttacataatcaaattctataattattattgccagaggtctattaatgcagtcatttattcactaaccattatgcatttcattcaatcacta

SEQ ID NO: 5047 - DNA, 398 bp, Bos taurus
  Clone ID: 22-LIB3057-016-Q1-K1-F9
tgagacccaactaaacattgctccttttttccctatcggatacatttcaccggggttgcaaatcttaaggagtggttacacctatccacatttaataaagtaccccattacactaccaatcccatttctttcctaacatttcatcacatccctgaacaatttctagtttttcatccacttatattcctaatcaccaattactccctatctatttttcttcttatatacaccatcttttcattatacttcttacttatccatctccttcttatttcatcctttcccttattttacatgtagggttataaattcttccatcattctttaatttattatattctaattttattccttttcatatttaacatctttttaatttcatttatttctattttttt

SEQ ID NO: 5048 - DNA, 348 bp, Bos taurus
  Clone ID: 22-LIB3057-018-Q1-K1-F5
ccggaaaactggcaaacttgtttcactgagtgagcaaaacctggtggactgctctggggggcaaggcaatcagggttgcaatggtggcctaatggataatgccttccagtatattaaggacaacggaggcctggactcagaggaatcttatccatatcttgcaacggacacaaatagctgtaactataagcctgagtgttctgccgccaatgacactggcttcgttgacatccctcagcgggagaaggcccttatgaaggcagtggcaactgtgggccccatctctgttgctattgatgcaggccatacatccttccagttctataaatcaggtatttattatgatcc

SEQ ID NO: 5049 - DNA, 338 bp, Bos taurus
  Clone ID: 22-LIB3057-019-Q1-K1-F5
gttctagatcgcgagcggccgcccttttttttattttttttttcttcagttacgctgggggcaggaatgggcttgtttttcacggtcttgggaaatacaccaggttttcttggtgcttcctctggcgggttattaagaaactcaatagcttttgcagcttgttcttttgtttcaaattccacgaaggcaaatccctttgggtccccagtagatttataatgtggtatacttatataaacaacattgccacatttcccgaagactctctcaatccagctgtggttaacatttttgggaagtaattccacatacactgtccgctcatcctcatcctttgg

SEQ ID NO: 5050 - DNA, 458 bp, Bos taurus
  Clone ID: 22-LIB3057-019-Q1-K1-F9
aacgtgtttgggttggatcttaaagagaacaaaacactgcagaagaaagaaccttctaaatccagtatgaagaaaaaagtgaccaagattgcagaagcaaaaaaagtaatgaagagaaattttaaagtaaataagaaaataacatttactgatgaaggagagttggttcagcagtggccacaagtgcagaaatctgtttccaaggatactgaggaagaggacgacgctggtggtatcaacctagataaagcaaaggaaaggcttcaagaagaggacaaatttgacaaagaagaatataggaagaaaattaaggcaaagcatcgggaaaaaagactgaaagaaagggaagccagaagagaagccagtaagagacaagcaaaggctagagatgaagaggaagcctttctggattggagcgatgatgatgatgatggatttgatccaagcacacttccaga

SEQ ID NO: 5051 - DNA, 425 bp, Bos taurus
  Clone ID: 22-LIB3057-020-Q1-K1-F9
gtttgccgccaggacacaggtgtcgtgaaaaccaccgttaaacctaagccaaaatgggaaaggagaagacccacatcaacatcgttgtcattgggcacgtagattcagggaagtctaccacgactggccatctgatctacaaatgtggcgggatcgacaagagaacaattgaaaagttcgagaaggaggctgccgagatgggaaagggctccttcaaatatgcctgggtcttggacaaacttaaagctgaacgtgagcgtggtatcaccattgatatctccctgtggaaatttgagaccagcaagtactatgttaccatcattgatgccccaggacacagagacttcatcaaaaacatgattacaggcacatcccaggctgactgtgctgtcctgatcgttgctgctggtgttggtgaatttgaa

SEQ ID NO: 5052 - DNA, 429 bp, Bos taurus
  Clone ID: 22-LIB3057-022-Q1-K1-F5
gacgggcgagggggcggccgcctttccggccgcgccccgtgtcccgggacggagggcggtccgcaccggaccccggtcccgacgcgcggcgggggcgcgccgcgccgcgccccgggggacgcgggcgacggcccgccggcggggacggcgggggaccggctatccgaggccaaccgaggctcccgcggcgctgccgtatcgttccgcctgggcgggattctgacttagaggcgttcagtcataatcccacagatggtagcttcgccccattggctcctcagccaagcacatacaccaaatgtctgaacctgcggttcctttcgtactgagcaggattaccatggcaacaacacatcatcagtagggtaaaactaacctgtctaacgacggtctaaacccagctcacgttccctattagtgggtgaacaa

SEQ ID NO: 5053 - DNA, 414 bp, Bos taurus
  Clone ID: 22-LIB3057-023-Q1-K1-F9
cccggtcgcccagcgtccgccgtggagcgggaccgattgtcaagtggtgcggagccaatcctttctaagaagtcagcactcaggtatccaccatggtgttgggtcctgaacagaagataccagatgaagatgcttctggagaccatggagactctgccagtcttggtgccatcaaccctgcatacagtaactcctcaattccgcagtcccccggggcgggctcagaggaccccttcaccacctactttgatgagaagattgccattcctgaggaggagtactcttgttttagctttcgtaaactctgggccttcacgggaccaggatttcttatgagcattgcttacctggatccaggaaacattgagtctgatttgcagtctggagcaatggctggatttaagttgctctggg

SEQ ID NO: 5054 - DNA, 228 bp, Bos taurus
  Clone ID: 22-LIB3057-025-Q1-K1-F9
aacgaagggaagaaaagtgaccgagaggccgctgaacatcctcgccccggcgcagcgggagccgcccgaggcagcttccccgtgacagagcctcagcctgcctggaagatgccgagactgtgcagcagtcgttcgggcgccctgctgctggccttgctgcttcaggcctccatggaagtgcgtggttggtgcctggagagcagccagtgtcaggacctgaccacggaa

SEQ ID NO: 5055 - DNA, 374 bp, Bos taurus
  Clone ID: 22-LIB3058-001-Q1-K1-F5
gcgtaaatggcggtgccgacagggagcctatggctcatggcccaactggggatccccccggtggtgctgctggccatggacctggccggaggctcgggaaccgcttcagctgaagcgttagactcggtcttgactgatacggcgttttgtcaccggtcctgtcagacgacgtatcccttgcacacgtacccgaaggcgactggcactttgtacacagtgcatcacacatgctaagcatcgcacccgtcgtagataggcctgggctcgtctgaaccacacagttgacctgatgaaggaatagatttaaatcggaccatattgcaatgtgaatctgcatgttcaaaggcatatttccaatgtgatgagcaatatgc

SEQ ID NO: 5056 - DNA, 392 bp, Bos taurus
  Clone ID: 22-LIB3058-001-Q1-K1-F9
gttctagatcgcgagcggccgcccttttttttttttttttttacaactaacatttgtatgcaattttgttctctcaactcagaaggcaacaaaggaccacataaaaaagggagcactttatgtacacatgaagttggtctgtgtatctgggtttagtagaaaactgacatcccaactacataaatgttctatttattgagcttctacaacagtcatttctaggccctatagtcattacattttcatttaaggtacttatttcatgactacataatgaggcactcatacaaaacagatggaaatgaaaacagatgtatcctatctttaggttgcattaaatgcccaagaatgtgttggggagcatctggaaaaagctactgtttactcattat

SEQ ID NO: 5057 - DNA, 385 bp, Bos taurus
  Clone ID: 22-LIB3058-002-Q1-K1-F5
cccacgcgtccgcccacgcgtccggaaacttacgaggattcccctagtaacggcgagcgaaccgggagcagcccagcttgagaatcgggcggcctcgccgcccgaattgtagtctggagaggcgtcctcagcgacggaccgggcccaagttctctggaaagggacgcctgggagggtgagagccccgtccggcccggaccctgtcgcaccacgaggcgccgtcaacgagtcgggttgtttgggaatgcagcccaaatcgggcggtaaactccgtccaaggctaaatacaggcaagagatgtccagtccagcagtgtggaacgttaaaaaaaaaaattaagtaaaaaatgattaaatatatatggaaacttttagttgaataattt

SEQ ID NO: 5058 - DNA, 345 bp, Bos taurus
  Clone ID: 22-LIB3058-003-Q1-K1-F5
cgacgccacgcgtccggcttgctgcaactttcgagtagatgaggcttcaaccagtggagtttaacacgcggatgctgggcatggttcttacctacgctggtgagagtcggacggtggcccttcgaggacgctctgtgactggaggatgattctgtgggctcggtgcactggctgactgagcaactgcttgtgctctgaccgctcagctcgcgacctgaaaacttcatggaccacaaattgaagagcttaatggacaagaagtcagtaccaaggtgtacttgatgaatcagaccattggcaactcctgctgaaccatcggactcattcatgcagtggtcaattatc

SEQ ID NO: 5059 - DNA, 421 bp, Bos taurus
  Clone ID: 22-LIB3058-003-Q1-K1-F9
caagagtgaaaaggtttacactcgccatggggtccccatctcagtcactggcattgcccaggtaaagatccagggccagaacaaggagatgctggccgccgcctgccagatgttcctggggaagacggaggctgagatcgcccacatcgcgctggagacactggagggccaccagagggctatcatggcccacatgaccgtggaggaaatctataaggacaggcagaaattctcagagcaggttttcaaagtggcctactcagacctggtcaacatgggcatcagcgtgagtcagctataccctgaaggacattcacgacgatcaggactatttgcactccttggggaaggctcgaacagctcaggtccaaaaagatgctcggattggggaagcagaggccatatgagatgccgggatccg

SEQ ID NO: 5060 - DNA, 460 bp, Bos taurus
  unsure (444): unsure at all n locations; Clone ID: 22-LIB3058-005-Q1-K1-F9
gaagaaccggaagctctttgaccttctggatgtccttgaattcaaccaggtggtgatatttgtgaagtctgtgcagcgttgcattgccctggcccagctcctggtggagcagaacttcccagccattgctatccaccgtgggatgccccaggaggagaggctttctcggtatcagcagtttaaagattttcaacgacggattctcgtggctaccaacctgtttggccgaggcatggacatcgagcgggtgaacattgcctttaactatgacatgcctgaggattcagatacctacctgcatcgggtggccagagcaggccggtttggcaccaagggcttggccatcacatttgtgtcagatgagaatgatgccaagatcctcaatgatgtgcaagatcgctttgaagtcaatataagtgagctgcctgacgagatagacatctncttctacattgaacag

SEQ ID NO: 5061 - DNA, 403 bp, Bos taurus
  Clone ID: 22-LIB3058-007-Q1-K1-F5
atcgcgagcggccgccctttttttttttttttttgggtaccaaattactttatttgaaggaatggtactaaagaaagaacttaagtagatgttttgttacaacttatagaaaagatgaaggtaacccaaatatgcatgcactgccttggtgaccagggaagtcacccctgtggctgtgggaaaccagcctgaggcttagctctcactgtgtcccagggtgtgcttgtcaaagaggtactctgccatgccagatccaggagcccccatcttgcgcaagttggttatgtggtcacccaattctttgatggcttccacctgctcattcaggtaatgagtctcaatgaaatgacacagatggggatcatttttttcagtggccagtttgtgcagttccagtagtgac

SEQ ID NO: 5062 - DNA, 394 bp, Bos taurus
  Clone ID: 22-LIB3058-008-Q1-K1-F5
ttctagatcgcgagcggccgcccttttttttttttttttcttatcctctcatcattgaggctatgtattaatagacattatagtaaacccacgcgaaatattcagaattagaaggggattaaagagccacgtttgggcgttacgttgactattcctcattttcatcctaaggggggttgtgacgccagtgtggggacttcgtgggggtctggtggaagagatgctgaaatcaaaaggtgggaatcagtaggttatgggggaagcacgggagatgtcagctggggttagaaaagagtgggatagaggacccctccccgtcctcactggggccggcacccagtccggcagcgattcgggaaaagcgagtgtactggtcagtgggtttctgggagga

SEQ ID NO: 5063 - DNA, 361 bp, Bos taurus
  Clone ID: 22-LIB3058-009-Q1-K1-F5
tgatgccattgattggaagtggaacctgagacaggatggaatttgtcatacatagcagatagcccggttgacttggtgaataagtctgatgaagctttcataaggagtgttgaaaagcagttttaccaggccataggcctggcagaattgtagtctctgttcaggttatgataaacctatttggatactagtaaagaattcttgctgttcagcatttaatatgtgcttataatttgtaccaattgacctttcctgaaatcatgcagtattgagtcatgtcattaaatctgtttccatgccagaatcttaccaatatgtattatatttagaaagactaggtgccaaaatacccagctcaata

SEQ ID NO: 5064 - DNA, 383 bp, Bos taurus
  Clone ID: 22-LIB3058-010-Q1-K1-F5
cgcgagcggccgtccttttttttttttttttttaatgaataataaatattaagctcttgtttttaccttaatgttttgtcagctaatgaaaatgttatgaaaaagccttgactatgcatgctgctttcatttttataaacttttcatttttaactatagctttattagtaattccaaaatgctgcaatttagctgatttcttcactcagacagctggctttgtgggtggctttttcatactactgttaactttttaaagagaagcaatgtaaagactgtaacaatttaatgcactaaactgttctttcttttacacgtttaaaaacttcttaaagcactctgtattataaagattaaattgctcccttttttaaaccattaat

SEQ ID NO: 5065 - DNA, 410 bp, Bos taurus
  Clone ID: 22-LIB3058-011-Q1-K1-F9
gctggactggatatgaaggaatgtaccattgaagatatgtcggtactgagtataacagggagtttacaggtgaatcgacaaggtcttttaagtgcagctgatgcagcaaaggtgattctgcgcgtggacaacatcatcaaggcatcaccaaggaagcgtgtccctgatcaccacccctgttaagcattgccgtatgctgttgagctctggaccagttcatagtaaaggtgtgcatgaaagactttgacttgctgaaagaagaatatagaattgaagtttatcatgggctgtgatgtgcttaaatttggacatttaactgaccttctattttaacatgggtccaatttatgcgctgatatattgctataaaattcagaggatgtaacagttcattcctcatactgtgcatg

SEQ ID NO: 5066 - DNA, 292 bp, Bos taurus
  Clone ID: 22-LIB3058-012-Q1-K1-F9
gtagatcaagtttgtattccacactaagatgcgaggaaattgtgatttggtctctccaccacaacataattacacaattatcttctgtcattttgaaacactgcactttacacatgggacactgtatatatttcttgccataatggtaaatgactgattgatatatttaagacttaataaatttgtgatttctggtgaaaaaaaaacagaacattaaagcgtctttaagggaggatgcaaactgaaagagagattgactgtctccgcctttgtgacactgaggcgcagacgt

SEQ ID NO: 5067 - DNA, 424 bp, Bos taurus
  Clone ID: 22-LIB3058-014-Q1-K1-F5
cggacgcgtgggcggcgttgtcttgaattcccgtcgtaacttaaagggaagctttcacaatgtccggagcccttgatgtcctgcaaatgaaggaggaggatgtcctcaaattccttgcagcaggaacccacttaggtggcaccaaccttgacttccaaatggaacagtacatctacaaaaggaaaagtgatggcatctacatcataaatctgaagaggacgtgggagaagcttctgttggccgctcgggccattgtcgccattgaaaacccggctgatgtcagtgtcatatcctccaggaatactggccagcgagctgtgctgaagtttgctgctgccactggagccactcctatcgctggccgcttcactccgggaaccttcactaaccagatccaggccgcattcaaggagccaaggctttt

SEQ ID NO: 5068 - DNA, 450 bp, Bos taurus
  unsure (342),(380): unsure at all n locations; Clone ID: 22-LIB3058-015-Q1-K1-F5
cggcggccatcagacccttgggctcaggctcgaggggctgggagctgcgcgctccgctcaggcagagcgacaccgccctccccgcgcgctcctccccgaggagccgagtccgcgcccggcccgcccgcccgcccggcgctgccccggccctctcggcccgcgtgaggccgcccgcgcccggccccgccgccgccgccgccgccatgggctgtctcggaaacagcaagaccgaggaccagcgcaacgaggagaaggcgcagcgcgaggccaacaagaagatcgagaagcagctgcagaaggacaagcaggtctaccgggccacgcaccgtctgctgctgctgngtgctggagaatctggtaaaagcaccattgtgaagcanatgaggatcctgcatgttaatgggtttaatggagagggcggcgaagaggacccgcaggctgcaaggagca

SEQ ID NO: 5069 - DNA, 229 bp, Bos taurus
  Clone ID: 22-LIB3058-016-Q1-K1-F5
tcggtgcctcctgcaattaaccagttcacgcaggccttggaccgacaaacagctactcaactgcttaagctggcccacaagtacagaccagagacaaagcaagagaagaagcagaggctgctggcccgagctgagaagaaagccgcgggcaaaggcgatgtccacaccaagaggccacctgtccttcgagcaggggtcaacacggtcaccaccctgggtggagaacaag

SEQ ID NO: 5070 - DNA, 354 bp, Bos taurus
  Clone ID: 22-LIB3058-017-Q1-K1-F9
acgcagttattataggcttatttggacagagcactgtgatattacaatggtttatctgataaccagtatggctactaaatgactaataggcagttgggcaggtagcatatcccatgtggagcgcttggacataggattgattcatgacccaagtgggtagagtgtgtcggctagaaacttaatcacacttgctcagacaggcatgcaattaaaaatgtatgaatcgattatctctggaattatctatttaatattattcagccatatttaaactcatgtaactgaaactctaggggataaaaagttaacagacagcaggggactgcttatattgttcaagctaattacgcacac

SEQ ID NO: 5071 - DNA, 462 bp, Bos taurus
  Clone ID: 22-LIB3058-019-Q1-K1-F5
cggacgcgtggggagaaacataagaaagcctgtgtgcatggtgggaagacatactcccatggggaggtgtggcacccggccttccgctccttcggacccctgccctgcatcctgtgcacctgtcaggatggccgccaggactgccagcgggtgatctgccccactgcgtacccctgccatcaccctgagaaagtagccgggaagtgctgcaagatttgtccagaggacaaggcagactcgtgccacagtgagatcagtgccaccaagtgtccgaaggcgccaggtcgagttctcgttcacacgtcagtatccccaagcccggacaacctgcgtcgctttgccctagagcgtgaggcctctgagcaggtggagatctacctctggaagctggttaaaggaatcttccacttaattcagatcaagaaagtcaggaagcaagacttccagaaagaggctcagaac

SEQ ID NO: 5072 - DNA, 248 bp, Bos taurus
  Clone ID: 22-LIB3058-020-Q1-K1-F5
ctagttctagatcgcgagcggccgcccttttttttttttttttttttttttacaacagaaactgaattttatactttatatgtctgatacaatgaaaagtaaattttgttcagtaaagataaagcatttccgatactgatggcacgaaaagtcgactttagtagtttcatgagaccttctaactggaccattagctctctccgggtcttctggagggcaaacattctctgctccagctcgttcttgcg

SEQ ID NO: 5073 - DNA, 427 bp, Bos taurus
  Clone ID: 22-LIB3058-020-Q1-K1-F9
ccgtggtgaagcagatgaagatcctgcacagcggcggcttcaacctggaggcctgccgcgagtacaagccgctcatcgtctacaacgccatcgactcgctgacgcgcatcgtgcgcgccctggccgcgctcaagatcgacttccacaaccccgaccgcgcctacgacgccgtgcagctgttcgcgctcacgggcccggccgagagcaagggcgagatcacgcccgagctgctgggcgtcatgcggcggctgtgggccgaccccggcgcgcaggcctgcttcggccgctccagcgagtaccacctggaggacaacgcggcgtactacttgaacgacctggagcgcatcgccgcgcccgactacgtgcccaccgtggaggacatcctgcgctcccgggacatgaccacgggcatcgtggagaacaagtt

SEQ ID NO: 5074 - DNA, 432 bp, Bos taurus
  Clone ID: 22-LIB3058-021-Q1-K1-F5
gttctagatcgcgagcggccgccctttttttttttttattttcagaactacatgagagtttaattagactctaactaaaaacagagagaggtgtgattactatttccagccagtttccgcatcacgatagtcatgtaacaaaccaaggcaatgtcggtcttgagccagactcacagagtcccctgaccctggcccaggcctcagtacagtgtctctgcattgctgctacagggccttttgatcttatcaatatttttcaggatcatgtcatgtacagtgacatattgattgattagctctgatatgatgagccgaaggctgatatattctttctcgtgaatatctgtcacggtgcgacgatagtcattcacatggggatatttagctattttagaaaccaatttggctcttgaaatataacatctagaaatc

SEQ ID NO: 5075 - DNA, 349 bp, Bos taurus
  Clone ID: 22-LIB3058-022-Q1-K1-F5
cagccacttaatacacactatttgcgactgagggccttatatgcatagcaagacatattagacaggcatttctgtgatagccatatatactaatgagtccatgttaagcctcagtattcctgcacttggatcgcattctactcacaacttactcacagtgcaagcctggcttattcagatgaaggaacgtgtgagaagaactgagagagagtaacacattatataattcatcatactgatgcatgtaatgctagtgtatcttcaactatgtgagcctgatgcatcacatgttctgggtgacactttgattcacttagatgacgcatgatccagtatgaaaatctactct

SEQ ID NO: 5076 - DNA, 392 bp, Bos taurus
  Clone ID: 22-LIB3058-022-Q1-K1-F9
ggacgtacctggcgcgactgccctgaactgctccactgaccgcagatctgacgctctatgccgggaactctggataggatggtatgttccgctactactgcttccacttccgggactttgtagacgactctgaagaccagctgtaagaactggcggtgagacacacgggcgaccacaagccggtctacgactgacaggatttcatcttgatcctgtgctttgtagacaaagcacttaataaggactgccgacaagaaggtcaaacctttgcaaaacagacttgttgctccgaaggcggagcacagccataactgcctgggctaaggccagacctagtgtgtagactgggatccttgaagcttgcagcttgctcagatccgttggcatcatga

SEQ ID NO: 5077 - DNA, 414 bp, Bos taurus
  unsure (375),(377),(380): unsure at all n locations; Clone ID: 22-LIB3058-023-Q1-K1-F5
gtttggaattgatcctcaaaacatgttcgagttctgggattgggtgggaggccgctactcgctgtggtcagccatcggactctccattgccctgcacgtgggatttgacaacttcgagcagctgctctcaggagctcactggatggaccagcacttccgcacaacgcccctggagaagaacgcccccgtgctgctggctctgctgggcatatggtacatcaactgctttgggtgtgagacgcacgccatgctgccctatgatcagtacctgcaccgctttgctgcctacttccagcagggtgacatggagtccaatgggaagtacatcaccaagtctggcacccgcgtgaacctaccagacgggccccaattggntnggnttggggggagccagggaccaatggccagcacgcc

SEQ ID NO: 5078 - DNA, 409 bp, Bos taurus
  Clone ID: 22-LIB3058-024-Q1-K1-F9
gttctagatcgcgagcggccgccctttttttttttttttttaagatagaaagattttgtttattaatgaccccaaccgtatttctttagatacaggagttttgaactcaaatacttagagaaaacaagttaagattgcattatcctgcaactcattaccagtaacatattgcaaagcaaaacagcttggaaaagaaggggcaggaaaggggagtgagggagggaagataaagaaaaggaattaagttgatcaagtggaattcttttttttcttttaattcttgggaaccatgaagtccttgcaagcacagctcgtttttgcagattattttccaaacgtgtacaaaatggaaccaaaacggagaatcccttaagaacctgaagaggtgcaacattaaaagctacgatta

SEQ ID NO: 5079 - DNA, 407 bp, Bos taurus
  Clone ID: 22-LIB3058-025-Q1-K1-F5
cagaataacgtggaggtggtacacgccttccgacaccacgtgatgagcgacatgaaccatggtaacttgcagctgatcatcaacgcctacaacagtcggtgagacctggagatcgagcggtcgatgcctggagcatacactgtcactctgcagtgtcctgctctgttggtcgttggggacagtactgctgctgctgactctgcggtggagtgcaactcaaaactgtgaccaacgaataccactctactcaagatggcagattgccgtggcctgtcgcagatctctgaaccggtcaagctgagacgagccttcaagtacttcgtgcagggcatgtgatacatgcgcttcgccagcatgacccgattgatgaggtctcgtacagcgttaggctccagcgtcacgtacct

SEQ ID NO: 5080 - DNA, 415 bp, Bos taurus
  Clone ID: 22-LIB3058-026-Q1-K1-F9
cggacgcgtgggaaaggagctcagaaatttggcatcatagatagcagtcttcaaactggctttctagaagtgggtcacatgggcaggtacttcttcaggggcagcttggtgcagggagagacactgggcttctgacttacgtggatctaggacaagatgtgagcccatcctactttatttgaaaggtcaccagaattcaactattaatacatccccaaaactagactcttattaatatgcataaaacatctgacttccctagtggctcagcagtaaagaatccgcctgctaatgcaggagatgtgagtttgatctctgggtgaggaagatcccctggagaaagaaacggcaacccactccagtattcttgcctgggaaattccatggacagaggagcctggcagtagagtccatg

SEQ ID NO: 5081 - DNA, 420 bp, Bos taurus
  Clone ID: 22-LIB3058-027-Q1-K1-F5
ggcggagctgcgcactagtggtggggctccgcgcctaaagatcgtgtccgtggtctccggccggccgccgagagcgcagcgccaaggcatctttgcagagggccacccctcgccccctgggataggggtgaagagtcagcgagttccttgtgacagcccggagcataaaagatgacaacagcagctcggccaacttttgaacctgcaagaggtggaagaggaaaaggtgagggtgatttgagccagctctcaaagcagtattcaagcagagacctaccctctcatacaaagataaaatatagacagaccactcaggatgcccctgaagaggttcgaaaccgtgacttcaggagagagttggaggagagagagagagctgctgcaagagaaaaaaacagagatcggccaacccgagaacat

SEQ ID NO: 5082 - DNA, 241 bp, Bos taurus
  Clone ID: 22-LIB3058-028-Q1-K1-F5
cccgatccagctcctcagccagcgcttgtaccctgagatcttctatggcagcccggggcctcccagtgctcaggtctcaggaggagccatagactctcaattacatcccaacagtggaggcttccgtcctgggacaccctcactgcactcttacagatcacagcccctgtaccttcccacgggcccagcccctccctcggcactgctcttaggggtagctgtcaagggccagtttctggat

SEQ ID NO: 5083 - DNA, 162 bp, Bos taurus
  Clone ID: 22-LIB3058-028-Q1-K1-F9
cccacgcatccgctcaatccttaatactatcaattttgttctataaaaaaaaaaaaaaaaaaatagaatagaaaaaaaaaaaaggagagaagaaaaacaataacaaaaaaaaaaaaccataatataaaacaaaactaaaaataacttaaacaaataataaca

SEQ ID NO: 5084 - DNA, 443 bp, Bos taurus
  Clone ID: 22-LIB3058-029-Q1-K1-F5
ctggcggtcactgccccaccgtgtgaggcatctgcagcaggagtcagggtagctgtcgcttcatctgctagttaatttccccagaattgagttcccacccaatccagttgctcctcttcctgctccatctctatgccagcttgccaccctaggctccagcagcattaagcctgtcagacagcacccaccctacacccagcaacactaacagggcactcaccccaaagggtggcctggaagggcatggccagcagcttgggctagaattgggagggaggagagaaagcagggagggcagagagacctcataaatcaccctgccctccatatcccgaacctctgttgtcatggcaactgttgccagagctggaggtgtctggggcctccagaatggggccttcgagtttccttgagctgctaaaggaaaactgagagtctgagac

SEQ ID NO: 5085 - DNA, 426 bp, Bos taurus
  Clone ID: 22-LIB3058-030-Q1-K1-F9
cggacgcgtgggattttaatcttacctgggtttggggtgtccaaagaatcagaataagggttgatatagacttcggggtgtccaaagaatcagaataagtgttgatatagaatagggtctcctcgaagtctatattttaatcttacctgggtttggaataatctctcatatcgtgacctactactcaggaaaaaaagaaccattcggatatatgggaatagtttgggctataatgtcaatcggatttctaggtttcatcgtatgagcccaccatatattcactgtcggaatagacgtcgacacacgagcctacttcacatcagccactataattattgctattccaaccggggtaaaagtcttcagctgattggcaacacttcatggaggtaatatcaaatggtctcctgctataatgggagccct

SEQ ID NO: 5086 - DNA, 275 bp, Bos taurus
  Clone ID: 22-LIB3058-032-Q1-K1-F5
ctgggcgggaaacacgagccggatccgtgcctggagccagccccgggccgccgagtggccatgcggagcctgccatcaaatggagagctggacccagatgtcctggagagcatggcgtcactgggctgcttcagggaccgcgagcggctgcaccgggagctgcgcagtgaggaggagaaccaagagaagatgatatactacctgcttttggatcggaaggagcggtaccctatctgtgtggatcatgacctgtctttttttaattgatgtttatt

SEQ ID NO: 5087 - DNA, 376 bp, Bos taurus
  Clone ID: 22-LIB3058-032-Q1-K1-F9
ccaggtcagtcatgttggggaaggtctttattcaggtgaatgagatgccactgaggagggatgatatgacgacaaattcggttacatgatatttgtaataatattattttattaatttacattgatttttaattatttttaatattttgatttataatattttattttttatttattatttttgttatttattttttatattttatttattttatttattttttaattttttttattttttattatatttaattttttttatttttttttatttttattattttattattttatttttttttattttttttttttattatttgttattttgttatattttttattttttttatttttctttttttattatttttta

SEQ ID NO: 5088 - DNA, 374 bp, Bos taurus
  Clone ID: 22-LIB3058-037-Q1-K1-F5
gaaaatcgccctggagtacattttgctctgtctgcacgaggtcggcttctggtgacctggataacttcctgggcgaggtggtgggcgactgcgtcctggagcgcgtgaagcagctgcactgcaacggggccctgcgggacggccagctggccgggccccgcgccggcgtctccaagcggcacctgcggggtgatcagatcacgtggatcgggggcaacgaggaaggctgtgaggccatcaattacctcctgtccctcatcgataggctggtcttgtactgcgggagccggctgggcaaatactacgtcaaggaaaggtccaaggcgatggtggcttgctacccaggaaatggaacaggttatgttcgacatgtg

SEQ ID NO: 5089 - DNA, 430 bp, Bos taurus
  Clone ID: 22-LIB3058-038-Q1-K1-F5
ggaagttgaggaacgcggttcggtttcttgtcaactgggcgtttcggttgctggtgtctggccgcaggagctatattgaagacgatgtctggaagcttctactttgtcatcgttggtcaccatgataatccagtttttgaaatggagtttttaccagctggaaaagcagaatccaaagacgatcaccgccatctgaaccagttcatagctcacgctgccctcgacctcgtagatgagaacatgtggctgtcgaacaatatgtacttgaagactgtggacaaattcaatgaatggtttgtctcagcatttgtcactgctggtcatatgagatttattatgctgcatgatgtcaggcaagaagatggaatcaagaacttctttactgatgtctatgatttatacataaagtttgcaatgaatccattttatg

SEQ ID NO: 5090 - DNA, 432 bp, Bos taurus
  Clone ID: 22-LIB3058-039-Q1-K1-F5
caggcttcagcaatacgtgaaccgcgatcttccagttgttcaagctggttttagaaaaggcagaggaaccagagatcaaattgccaacatccgctgaatcatcgaaaaagcaagagagttccagaaaaacatctatttctgctttattgactatgccaaggcctttgactgtgtggatcacaataaactgtggaaaattctgaaaaagatgggaataccagaccacctgacctgcctcttgagaaatctgtatgcaggccaggaagcaacagttagaactggacatggaacaacagactggttccaaataggaaaaggagtacgtcaaggctgtatattgtcaccctgcttatttaacttctatgcagagtacattatgagaaactctgggctggaagaagcacaagctggaatcaagattgccgggagaaa

SEQ ID NO: 5091 - DNA, 432 bp, Bos taurus
  Clone ID: 22-LIB3058-039-Q1-K1-F9
gtaaaggaaatggtggcagtttcagattattacacgaatttggtaggagcatttgtgtgccagtcaactattattccttctgaaagtaagggtttccgagcagccttatcatcacaatccatcattctggcagatacatttttgggagtaacagttgaaaccacattgcaaaatattaatataaaagaagatatgttcccagtttcaccaagccaaataccagatgtgcatttcttttataagtcttctacaactacaacctcttgtgtaaatggccgatcaactgctgtgaaaatgaggtgtaatcctgctaaaccaggagcgggagccatttctgtccccagcaagtgtccagcaggcacctgtgatggatgtacattctatttcctgtgggagagtgtggaagcttgccctctgtgcactgaacatgac

SEQ ID NO: 5092 - DNA, 390 bp, Bos taurus
  Clone ID: 22-LIB3058-040-Q1-K1-F5
ccgcacgcgtccgaccacgcgtcctgtctatcgggtgaagaatgatctttcattcgaaaacgcttttggaaggtacatggaagaacataaaagctttcttaaaaggcagggagaggcgagatggctgcagatcacgctacctctacaccctatgaccgggtttatagcatacccatccattctacgctccctatgacacttaattctaaccatctcagtctgactccgtcatacggacctatactcactcatctcatactcctctgccatcctcataacacccgatgtctacgccatccttatccagacaccttgaagcatcatacgaacaaccagccttatgaatgcccacggactcacatactgcatacttatctgactaacacactc

SEQ ID NO: 5093 - DNA, 215 bp, Bos taurus
  Clone ID: 22-LIB3058-041-Q1-K1-F5
ccggcccgacccactcgtccggttgtagatcgcgagcggccgtccttaatattttttcttttttttttttttttgttttgattaaatttaaaaaaatttaatacaaacaaaaaaaaaataaaaaaaaaaaaaaaaaaaaaaaaaaaaaaaaaaaaaaaaaaaacaaaaaacacaaaaacaaacaaaaacaaaaaaacaaaacaaaaataacacat

SEQ ID NO: 5094 - DNA, 277 bp, Bos taurus
  unsure (17),(37),(41): unsure at all n locations; Clone ID: 22-LIB3058-042-Q1-K1-F9
ccactcgtccggtatcnttctcagtggaatgagaggnatanatactctcttcctcaactgatcttgaacgttggtgcccttttcatgttttaatatgctccatcttagtgccatatagaggttaaagactttcttattttaaaataattaatatttgacattgataataatttatttattttttttttatatttttaaattttttttatatttttatttttttttaattttttttaatattattttttttattttaatttatttattttttttttta

SEQ ID NO: 5095 - DNA, 414 bp, Bos taurus
  unsure (46): unsure at all n locations; Clone ID: 22-LIB3058-043-Q1-K1-F5
cgacccactcgtccgcttggacagcatagatatcaaacttggttancctaacggaaatcaacacttaatagcaggggaaagactgatactgaagctgaagctccaatggaatcggaatccaatactttggccacatgatgcaaacagtcaactcactggaaaagaccctgatgctgggaaagactgaaagcaaaaggtggcagaagatgagatggttagatagcatcatcaactcaatggacatgaatttgagcaaactctgagaaatagtggaggacagatgagtctggcatgctgttgtccatgggatcacaaagagttggatgtggcttagtgactgaacaacaataaaatgtgtaatatatctaataactatactcaaatatagtcccatttctccctattaatagctgc

SEQ ID NO: 5096 - DNA, 425 bp, Bos taurus
  Clone ID: 22-LIB3058-046-Q1-K1-F5
tggacctgaactggtgtgtcatttccttcatggaagtcattgagctgaataaatgcacttctggtcagtcctttgaagtcatcctgaagccaccctcctttgatggggtgcctgagttcaatgcctccctccccagacggcgagacccatcactggaagaaatccagaagaaactggaagcagctgaggagcggaggaagtaccaggaagcagagctcctgaagcacctggcagagaagcgagaacacgagcgggaggtgatccaaaaagccatcgaggaaaacaacaacttcatcaagatggcaaaggaaaaactggcccagaagatggaatccaataaggagaaccgggaggcccaccttgctgccatgttggaacggctgcaagagaaggacaagcacgcggaggaagtgcggaaaaacaag

SEQ ID NO: 5097 - DNA, 412 bp, Bos taurus
  Clone ID: 22-LIB3058-046-Q1-K1-F9
tctagatcgcgagcgttcgcccttttttttttttttttttttttttggtttttttttaccataaacgaagtgcatttattaggagggtaaacaccacaccattacaagtgggcacttggcaacttcacaggaaaaagacaccttgacagagtccacaggattttgcttataccacagaaggagctttaaggcagatgaattcgaggctacgaaaactacatctgtgatacaggcacaacattcagaaataagtcaggctccaaatgtccccattcccaacaaatctctgaacgagtcggtcaacagccacggtcagggactcagacgcagagtctcaaaagcaattcaatacgacaccaacgcaaagggggtcgtcctgagacctcccaaatctcgtggataacactgaccc

SEQ ID NO: 5098 - DNA, 358 bp, Bos taurus
  Clone ID: 22-LIB3058-048-Q1-K1-F5
cgacccacgcgtccggtgaggcccaagcttacggctgaggcctactctccccatgaggacagccctagctaggtgtcccttaaaactgtacatgcctatccaacatacacagctctcaataaacctatatgaacatccacaagcacccataacaacttcacattgcacaacacacagtttgcaaataacatatatagtcccatataaactcataatgccaccctacttattcaacttatctacacagtacatcatgacaaaccctgaactggaagatcccaaatcttgagtcaaaattccccagaaagatatcactaacctcatatatgcacatgacaccacacttatagcacataat

SEQ ID NO: 5099 - DNA, 427 bp, Bos taurus
  Clone ID: 22-LIB3058-049-Q1-K1-F5
ccagactcggctggaggagacccatactctgctgcggaagaaggagaaagagtttgaggagaccatggatgcacttcaggctgacatcgaccagctggaggcagagaaggcagagttaaagcagcgattgaacagccagtccaagcgcacgattgaggggctccgggggccccctccctcgggtattgccaccctggtctctggcattgctggggaagagcaacagcgaggaggtgcccctggacaggctccggggtctgtgccaggccccgggctggtgaaggactcaccactgctgcttcagcagatctctgccatgaggctgcacatctcccagctccagcacgagaacagcaccctcaagggagcccagatgaaggcatccttagcagccctgccccctctgcacgtggccaaactctctctc

SEQ ID NO: 5100 - DNA, 420 bp, Bos taurus
  Clone ID: 22-LIB3058-049-Q1-K1-F9
ccctcacgtctacttttgtggcaactctgtctggtcttcggggccttggatgattttagagccaaagctgggggtgttgccacaaaagtagacgtgagggcactccggaaagataaatgggtcggttttatagaaagggtaacaacctagggtgtcaggggctgtggggctgatgtgccggacttgcagcgtccactccaggatctccaagtgatcctccatgctgctgtatcggaagatgtcactcacgttctgtcccgacgtccagacagtgttgttggtggctgtcccagacttcagcaccacccagaccgcctgtctcgtgaacctgcgcagcctggcctgccagcccatcagcttctcaggcttcggggcagaggatgaagacctgggaggcctgggtctgggtccctgactcac

SEQ ID NO: 5101 - DNA, 448 bp, Bos taurus
  Clone ID: 22-LIB3058-051-Q1-K1-F5
ggtgccgggaacaactgggccaatggccactacacagagggcgccgagctggtggactcggtcctggacgtggtcaggaaggagtccgagagctgtgactgtctgcagggcttccagctgacccactcgctggggggcggcacggggtctgggatggggacccttctcattagtaagatccgcgaggagtaccccgaccgcatcatgaacaccttcagcgtcatgccctcgcccaaggtgtccgacacggtggtggagccctacaacgccaccctgtccgtgcaccagctggtggagaacacggatgagacctactcgattgacaacgaggcgctgtatgacatctgctttcgcaccctgaaactgaccacccccacctacggggacctcaaccacctggtgtcggccaccatgagcgtgggcaccacctggctgctctttccgggcc

SEQ ID NO: 5102 - DNA, 375 bp, Bos taurus
  Clone ID: 22-LIB3058-054-Q1-K1-F5
ggagtttcgtgtggaccgtgttggctttccagtgctgctcaactgccttatgtacaagatgtgttactaccgatttggacaggtttacacagaagccaagcgtccactaggctatgaccgtgtccggaatgctgagattgggaataaagacttcgagcttgatgtcctagaagaagcatacaccacagaacattggctggtcaggatatacaaggtgaaggacctggataatcgaggcttgtcaagaacataaatgttacgtctggttctgatctgcttcgcactgagtgcgtcccatttagggcgctgaagatggtttaaaaaatatgcagttgatatgaacagagcgcgatgagattagaattgtccggaggt

SEQ ID NO: 5103 - DNA, 427 bp, Bos taurus
  Clone ID: 22-LIB3058-056-Q1-K1-F5
ccaggctcccccgtccctgggattctccaggcaagaacactggagtgggttgccatttccttctccaatgcatgaaagtgaaaagtgaaagtgaagttgctcagtcgtatctgactcttcgcgaccccatggactgcagcctaccaggctcctctgtgcatgggatttgccaggcaagagtactggagtggggtgtcatcgctttctccaagaggttaagtaacagatccaaaatacgtggtggtgccagcatcaactcataaaagccatttcttcttctgtgacctattctatccgttaacaaaaagggctggacctcctcaaagttcactgacattgttagagttctactgtttctttccacttaaatgaagaactggtatattctggatgcagaggatatggacatttgaaagatgcagcacct

SEQ ID NO: 5104 - DNA, 443 bp, Bos taurus
  Clone ID: 22-LIB3058-058-Q1-K1-F5
tttggtcataggggagccactgggacccgacactgacttgaagagttaggatgaataataaacaggcaagggtcacaggccctgtgttgcagcagccccaaccaagcatgtcactcaactgccctgccatccaacttcctctgtgcccagtcacccctgagctgaggctcccacatctccatcagagcctgcatgcgaacgctgttctcttcctgcccgcgtgcccctgcccctcaccggctgcctggagttcttctgcagctggggtgctgggcctgcagcctcctgggagctgctctgaggcaggggggtgatgtggagaagccaggcagtattcagcacaacactggggagtgacccttccctcaagccttccctaccaactgggcttgtcactggaaagacaaaaaatatgaaacccagcaacgacgacaaaaactagt

SEQ ID NO: 5105 - DNA, 392 bp, Bos taurus
  Clone ID: 22-LIB3058-058-Q1-K1-F9
atcgcgagcggccgccctttttttttttttttttttttttttcagaagttacacttttagttaacatttagaggattaacatatagttacaaggtcgatatgagccttccaatggaagcactttatttggtttaattccatctctagagacaaatgggcaattccagaacctttacaatggcagtgggccgttacaacactgaaacgcctccgaagtttagaattagtgcaacacacactgataaacccagaagtttaaaggtgctggacaccaggttaaaatagaattctggatcactttttaaagttttttttttttaattttatctttagatgatataagcccatgaggcagagccattaggaagtatgaaatttgacttctttggaaa

SEQ ID NO: 5106 - DNA, 419 bp, Bos taurus
  Clone ID: 22-LIB34-001-Q1-E1-F5
ccgggtcgcccacgcgtccgtggagcttgcaaagctttaaagcccaaatttgcagaatctacagaaatttcagaactttcccataattttgttatggtaaatcttgaggatgaagaggagcccaaagatgaagatttcagccccgatgggggttatattccacgaatcctgttcctggatcccagtggcaaagtgcgtcctgaaatcatcaatgagaatggaaaccccagctacaagtatttctacatcagtgctgagcaagttgttcaggggatgaaggaagctcaggaaaggctgacgggtgatgccttcagagagaaacatctggaagatgagttgtaacatgaatgcacgccttctttcctcaaagttattgttctggaagacagcagcacggatacggaatacttaggaatcag

SEQ ID NO: 5107 - DNA, 413 bp, Bos taurus
  Clone ID: 22-LIB34-002-Q1-E1-F5
gactgcccttgcttctgtgtagagattaataattgattagtgcatagctcggaattttagtaaaagggaatcggttactttgggctgccatttttttaaactgggtaacctgcaggagaaggaggtgatacaggacgtggtggcagaaaaatgaagaggatcctggttttcctccttgctgtagcctttgtgcatgctctagagagaggccgagattatgagaaagataaagtctgcaaggaccttgccagcctgggaagagatgacttcacatctttgtcaatggtcctatacagcagaaaatttcccagtggcacctttgaacagatcagccatcttgtgaatgaagttgtttccttaacagtaacctgctgtgcggaaggggccgatcctgactgctatgacaacaggac

SEQ ID NO: 5108 - DNA, 413 bp, Bos taurus
  Clone ID: 22-LIB34-004-Q1-E1-F5
gataaatacagtgcatgtctgcttcagttagcagatgccgcaaatccacacagtgtgtaaaatattatacaaccaaaaatcagcttttgcaggtctttatttcttctataaaacagtaggtaacttttcctaggtttcactctttttagtgtactagatccagaaatttagtgtaatgccctgctttatatttctttgacttaacattggtttcagaaagaatctttgctacctagaatctacagtccctattttatggcaacactggataatggctttgtgaaattgggaaaaaaaaaaaatgggagtgactgtaaacagaaatgccaaattattgatggttactgttgctgcttcaaataagtataaaattaatgtgtaagaaagcccattctttcatgataatacttggg

SEQ ID NO: 5109 - DNA, 258 bp, Bos taurus
  Clone ID: 22-LIB34-004-Q1-E1-F9
ctttgagaacaggcagttctacgtcaccatcattagtgccccaggacacgagaacgtcatccggaacatgattatagggacatcccaggcttactgtgctagcctgatctctcgggcaggtgttggtgagtgttaatcgtgtatcattcagaacgggcaaagccctgaacaggccactttagcttacagcctggcgtgtgagacaactacctgttggagtgacgtatacggcatcgactgaaccaccagatgcccaga

SEQ ID NO: 5110 - DNA, 407 bp, Bos taurus
  Clone ID: 22-LIB34-005-Q1-E1-F5
cgccggcagctcacttctttgaggctgcgcaccgcgaggagttcccacggtcccgcagcagatttctgcagcggaactcccgggggcaggatgatttgggaagtcaccgtgttgctcagcttggtcctgggaactggtgctgtccccctggaggaccctgaggacggaggcaagcactgggtggtgatcgtcgcaggatcaaacggctggtataattacaggcaccaggcagatgcatgccatgcctaccagatcgttcaccgaaacgggattcctgatgagcagatcatcgtgatgatgtatgacgacatcgccaactccgaagacaatcccaccccgggaattgtgatcaacaggcccaacggctcagacgtgtaccagggcgtgctgaaggactacacgggcga

SEQ ID NO: 5111 - DNA, 356 bp, Bos taurus
  Clone ID: 22-LIB34-005-Q1-E1-F9
gaataagcttcaactggactatgtggatctttatgatagtcatttcccagtggctctaacaccatcggagacacgtttcccaacagatgatgatggaacaccaagatttggcacagtggatcgctgtcgcacatgggaagccctgcagaaatgtatcgactcagggtcgctcaggtccagcggggtgtccaacttcaaccacacgcagctggtaaagatacagagcatgccagcgcttagatacaagcccgtctgcaaccaggtggcatgtcacccttatttcattcagagcaaactgtcgcatttctgcaagtcagatgaaattgttcgtgttgcctatggtgcgcagggatccc

SEQ ID NO: 5112 - DNA, 410 bp, Bos taurus
  Clone ID: 22-LIB34-006-Q1-E1-F5
gctctgacacctgatgaaacatatgtacccaaagcctttgatgagaaattgttcaccttccatgcagatatatgcacacttcccgatactgagaaacaaatcaagaaacaaactgcagttgttcctctgttgccttgggcttgtgtttcaacagctcaaggcaacagaggaacaactgaaaaccgtcatggagaattttgtggcttttgtagacaagtgctgtgcagctgatgacaaagaagcctgctttgctgtggagggtccaaaacttgttgtttcaactcaaacagccttagcctaaacacgacacaaccacaggcatctcagcctaccctgagagtaagaggaaaaaagagaaatgaaaactcagagcttattcatctgttttccttttctgttggtgttaacca

SEQ ID NO: 5113 - DNA, 392 bp, Bos taurus
  Clone ID: 22-LIB34-007-Q1-E1-F5
aaaagggtttagattacttgaagagagcatataatgccggcatcagaaatatcgaaatggaatctacagtgtttgcagccatgtgtagactttgtggtctaaaagctgccgtggtctgtgtgacacttctcaacagacttgaatgtgaccagatcaactctccccacgatgttcttgtggagtaccagaaacggcctcagctcctaatctccaaattcattaaacagcggcttggattatgtgaccagacatcatacgtgggcagctcaatccttctctgcaaattcacagttccagtcataatgttgaagtcatatatgaattgtggcatttttatagacttctcatccacatggtacaatcataattgaatgaatttataaaaccctttc

SEQ ID NO: 5114 - DNA, 413 bp, Bos taurus
  Clone ID: 22-LIB34-008-Q1-E1-F5
ggtcttcgagaacctcaacaccgacaagctcaatagcataatgcggcaggattcgctagagcccgtactgcgggacccctgctacctgatcaacgagggcatctgcaaccgcaacatcgaccagaccatgctttccattctgctcttcttccacagtgcctccggagccagtgtggtggccatagacaacaagatcgagcaggccatggatctagtgaagaatcatctgatgtatgctgtgagagaggaggtggagatcctgaaggagcagatccgggagctggtggagaagaactcccagctggagcgggagaatactctcttgaagaccctggcgagcccagagcagctggagaagttccagtctcgtctgagccccgatgagccagctcacgaaaccccagaaacccccg

SEQ ID NO: 5115 - DNA, 387 bp, Bos taurus
  Clone ID: 22-LIB34-010-Q1-E1-F9
agccacccctcccagagctgctgcctgaaccacccagaagctccttcctcctgcgctggcatagcctgggcaccgcgctcagggcatacacggcctccaggagccccaggggaggaggagttccttctgccagaagaacctggcattgaaggataatggcactctccatcacgcggggccttctgctgctggcagccctgtgctgcctggcccccatctccctgactggagttctccaaggacacgctgtccaagagacagatgatacatcccatcaggaagcagcatgccacaagattgcccccaacctggccaactttgccttcagcatataccaccatttggctcatcagtccagcacaagcaacatcttcttctgccccgtga

SEQ ID NO: 5116 - DNA, 377 bp, Bos taurus
  Clone ID: 22-LIB34-011-Q1-E1-F5
aggaagagcctgtaagtctgtaattcacatctcctgccagcagagaaaagaagaaacatgagcacggcaggaaaagtaataaaatgcaaagcagctgtgctgtgggagctcaataaaccattttccattgaggaggtggaggttgcaccccctaaggcccatgaagttcgtattaagatggtggccacaggaatctgtcgctcagatgaccatgtggttaatggatctctggtcacacgtcttcctgtggtcttaggtcatgagggagccggcattgtggagagcattggagaaggggtgactacagtaagaccaggtgataaagtcatcccactctttattccccagtgtggacagtgcaatgtgtgtaaacaccc

SEQ ID NO: 5117 - DNA, 384 bp, Bos taurus
  Clone ID: 22-LIB34-012-Q1-E1-F5
agcggcggctctggatccactgcccacaccccgctctcgcaggcagacatgaggacagagagaatgtcccccctcctggctctggggatcctggtggctgggctctgctccagggtccactgcctcccagagaatgtgaccccagaagaacagcacaaagtgacatctgtggatggccactcattagcctccagcaacactgacttcgccttcagcctctacaagcagttggctttgaaggaccccaataagaacgtcatcttctcccctctgagcatctccatagccttggccttcttgtccctgggggctcatggccccactgtgacagagatcctggaaggtctcaagttcaacctcacagagacccccgagacagaaatc

SEQ ID NO: 5118 - DNA, 409 bp, Bos taurus
  Clone ID: 22-LIB34-012-Q1-E1-F9
atggaaggaagatggtatgtttagttttggatatgttagattcaagatatctgggagatacaaataaatcagttggaaatactgagctgaaccttgagatttattagaacaaattttaaaaacattttttttcttaagaaatctaagaagtggttgccaggggctcggggatgggaaaaacaaggagagtttggtaaaagggtataaattttcagctataagatgaaggtttaaggatttaatgtaaaacatggtggtaatactgtaacatacaattgaaatttgccaagacaatagaacttaaatgtcattcctagaaagaaaaggtagacttctttgtggaatctaaaacaaaacaaaaaaccaaaaccgtccaaaacaaatttatagaaaaagagattagatttgt

SEQ ID NO: 5119 - DNA, 423 bp, Bos taurus
  Clone ID: 22-LIB34-014-Q1-E1-F5
aggaaaatacctatacgaaattgctagaagacatccctacttttatgcaccagaactcctttactatgctaataaatataatggagtttttcaagaatgctgccaagctgaagataaaggtgcctgcctgctaccaaagattgaaactatgagagaaaaagtactgacttcatctgccagacagagactcaggtgtgccagtattcaaaaatttggagaaagagctttaaaagcatggtcagtagctcgcctgagccagaaatttcccaaggctgagtttgtagaagttaccaagctagtgacagatctcacaaaagtccacaaggaatgctgccatggtgacctacttgaatgcgcagatgacagggcagatcttgccaagtacatatgtgataatcaagatacaatctccagtaaactgaa

SEQ ID NO: 5120 - DNA, 423 bp, Bos taurus
  Clone ID: 22-LIB34-014-Q1-E1-F9
aggacgcgtgggccaggctcggagccccgggcccgccgacaccatgagttggtcctcgcaccctccgagtgtaatcttctacattctttcattgctttcttcatcatgcctgccatatgttgctacccgagacaactgctgcatcttagatgaaagatttggtagttattgcccaactacctgtggaattgcacatttcctgaataattaccaaaccagtgtagacaaagatctacgaactttggaaggcatcttatatcaagttgagaacatgtcatcagaagccagagagctggtcaaagcaatccaaatcagctataaccctgatcatccatcaaagccaaataacatagagagtgctaccacaaattcctagagtatgatggaagaaattatgatatatgaaacactgattacaacaca

SEQ ID NO: 5121 - DNA, 109 bp, Bos taurus
  Clone ID: 22-LIB34-015-Q1-E1-F5
gataagcctttgttggaaaaatcccactgcattgctgaggtataaaaagatgccatacctgaaaacctgcccccattaactgctgactttgctgaagataatgatgtgt

SEQ ID NO: 5122 - DNA, 418 bp, Bos taurus
  Clone ID: 22-LIB34-016-Q1-E1-F5
gaaatagaattcagctgttcagaagggtatgtcttaattggctcagccaacagttattgtcagctacaagataaaggagttgtctggagtgatcctctcccacaatgtataattgccaagtgtgaacctcctccaaccattagtaatgggagacacaatggtggcgatgaagacttctacacatatggctcttctgtcacctacagctgtgaccgtgacttctcaatgttaggcaaagcctccatttcttgcagagtggaaaataagacaataggtgtttggagtccaagccctccttcttgtaaaaaagtcatttgtgttcaaccagtggttaacgatggaaaaataacctctgggtttggacccatctatacgtatcaacagtctattgtatatgcctgtaataaaggttttcggc

SEQ ID NO: 5123 - DNA, 404 bp, Bos taurus
  Clone ID: 22-LIB34-016-Q1-E1-F9
tttaaatgtctgatggagggcgctggggatgtggcctttgtcaagcactcaacggtattcgacaacctgcctaacccagaagacaggaaaaactatgagctgctctgcggggacaacacccggaagtctgtagataattaccaagaatgctacttggcaatggttccttcccatgcggttgtggctcgaactgtgggcggcaaggaggatgtgatctgggaacttctcaatcacgcccaggaacattttggcaaagataaaccagacaatttccagcttttccaatcccctcatgggaaggacctgctgtttaaggactctgctgatgggtttttaaagattccttctaagatggattttgagctgtacttgggatatgaatatgtcactgctcttcaaaatct

SEQ ID NO: 5124 - DNA, 409 bp, Bos taurus
  Clone ID: 22-LIB34-017-Q1-E1-F9
gtgagtcttgggccctggcagttgaggaagaagagcgggaggaaggagtcaggacccagacccacagtgttgattggccttggtcctcatagctccaaaaagaaacaagatctcgataagctctatgagctaaagtccaaagcaagacagattatgaaccagtttggtccctcagccctaatcaacctgtccaatttctcatcaataaaaccggaaccagcgagcacccctccacaaggctccatggccaacagcactgcagtggtgaagatcccaggcactcctgggacaggagggcgtctcagccctgaaaacaatcaggtattgaccaagaagaagttacaggacttagtaagagaagtggatcctaatgagcaattggatgaagatgtggaggagatgctgctgc

SEQ ID NO: 5125 - DNA, 413 bp, Bos taurus
  Clone ID: 22-LIB34-018-Q1-E1-F5
agcacactcacccgcgggaagagccttgcaagggaccctttggcctctgacctgatcgtccaaagagaaagggaacctcggcatccgtgccccccagcccagctctgcagagatgcctcctcagctctcagacggcctcaactactcagccaaaatcgtccggggctccctggacagcctgccccaggccgtgagggagttcgtggagagcagcgccaagctgtgccggcctgaccaagtccacatctgcgatggctccgaggaggagaaccggcagctgctgagccacatggaggaggagggtgtgatcaagaggctgaagaagtatgacaactgctggttggctctcactgaccccagggatgtggccagaattgaaagcaagacggtcatcatcactcgagagcaaagag

SEQ ID NO: 5126 - DNA, 148 bp, Bos taurus
  Clone ID: 22-LIB34-019-Q1-E1-F5
caatatacagccttgacatactccttttcttgtttggaaccagtctgttgttccatgtccagttctaactgttgcttcctgacctgcatacagatttctcaagaggcaggtcaggtgggtcggtaattccatctcttttagaatttcc

SEQ ID NO: 5127 - DNA, 389 bp, Bos taurus
  Clone ID: 22-LIB34-019-Q1-E1-F9
gccatggtgacctactttaatgcgcagatgacatggcagatcttgccaagtacatatgtgataatcatgatacaatctccagtaaactgaacgaatgctgtgataagcctttgttggaaaaatcccactgcattgctgatgtagaaaaagatgccatacctgaaaacctgcccccattaactgctgactttgctgaagataacgatgtttgcaaaaactatcaggaagcaaaagatgccttcctgagctcgtttttgtatgaatattcaagaaggcatcctgaatatgctgtctcagtgctattgagacttgccaaggaatatgaaaccacactggacgaatgctgtgccacacatgatccacattcatgcgattccacagtgtttgac

SEQ ID NO: 5128 - DNA, 416 bp, Bos taurus
  Clone ID: 22-LIB34-021-Q1-E1-F5
cccggactcctcaaaggatgagtgcatggtgaagtggtgtgcaattggtcaccaggagaggacaaagtgtgatcggtggagtgggttcagcggcggggcaatagagtgtgaaacagcagagaacactgaagagtgcatcgccaagatcatgaaaggagaagctgatgccatgagcttggacggaggctacctctacatagcacgcaaatgtggcctggtgcctgtcctggcagagaactacaaaactgagggtgaaagttgcaagaacacaccagaaaaatggtatcttgctgtagctgtggttaaaacatcagatgctaatatcaactggaacaatctgaaagacaagaagtcctgccacactgcagtagacagaaccgctggctggaacatccccaaggggtttgccctacagc

SEQ ID NO: 5129 - DNA, 409 bp, Bos taurus
  Clone ID: 22-LIB34-022-Q1-E1-F5
cgcaaagattccgttccccaagtcttactccccgaggaggagaaactcatcgttgaagaaaccagaagcaatggccagaccatcattgaagaaaagagccttgtcgatactgtttatgccttgaaggatgaggtcaaagagctgaaacaggtaatgaaatttctcagatcctaacagcctccttcttccctgccacacatgggtaaacaccctcaggagaaagccgggaacaaggtggtgaggtgggcattcttatttcccgtgtgtcatccaggtgggttttgtagattttaccatgtggccttggatttcaatttctgaagcctgattatatacctgtttagcagttaaaatagggtcccaaacttaatttaaactttcaggttccctgacatttgcaaacagagtt

SEQ ID NO: 5130 - DNA, 344 bp, Bos taurus
  unsure (281): unsure at all n locations; Clone ID: 22-LIB34-022-Q1-E1-F9
tatttgtgaccccatggactgtagcccaccaggctcctcttccccatggagttttccaggcaagaatactatcgtggcttgccatttcttactccaagggatttttttctgacccatgaactgaacctgcatctcccaagattcctgcattagcaggtgtattctttaccactgagtcacctggcatgccctgataaccatgatgatgccaatataaaatcctaataaagttcacacatcagatttattatttttgtcagaatataaaccttgaaagtcanggactgtgtcttagtcatagatgcttcccagtgtcaaacacactgtctaaaacttgatcacta

SEQ ID NO: 5131 - DNA, 343 bp, Bos taurus
  Clone ID: 22-LIB34-023-Q1-E1-F5
cgtttttgtatgaatattcaagaaggcatcctgaatatgctgtctcagtgctattgagacttgccaaggaatatgaagccacactggaggaatgctgtgccaaagatgatcgacatgcatgctattccacagtgtttgacaaacttaagcatcttgtggatgagcctcagaatttaatcaaacaaaactgtgaccaattcgaaaaacttggagagtatggattccaaaatgcgctcatagttcgttacaccaggaaagtaccccaagtgtcaactccaactctcgtggaggtttcaagaagcctaggaaaagtgggtactaggtgttgtagaaagccggaatc

SEQ ID NO: 5132 - DNA, 262 bp, Bos taurus
  Clone ID: 22-LIB34-025-Q1-E1-F5
ctccatacttttctgtctagcaaagtatggaggatgtgaggccgtcggcacgcataatgggggttggtcccaggtagcgtcacagtttccgcaaaaggatggcgacgagggcgagtgctatgtggcttacagacgagtatgcgatgagtgattttaggtccgtttgacggaggcagattgagctggttataattatgcctcatacggagactagaatgaatgggtacgcgatagggtcggtcacagggtttagaattagtgt

SEQ ID NO: 5133 - DNA, 418 bp, Bos taurus
  Clone ID: 22-LIB34-026-Q1-E1-F5
gcgagaggatggccctggagacggtgccgaaggatctgcggcatctgcgggcgtgtctgctgtgttcgctggtcaagactatagaccagtttgaatatgatggctgtgacaattgtgatgcataccttcagatgaagggtaaccgagagatggtttatgactgcaccagctcttcttttgatggaatcatcgcgatgatgagtccagaggacagctgggtctccaagtggcagcgagtcagtaactttaagccaggcgtgtatgcagtgtccgtcactggtcgcctgccccaaggaatcgtacgggagctgaagagtcgaggcgtggcctacaagtccagagacacggccataaagacctaggaaggcgcatggctgccagcatcttgcctcctcatctctgccgccgtgtgttttct

SEQ ID NO: 5134 - DNA, 375 bp, Bos taurus
  Clone ID: 22-LIB34-027-Q1-E1-F5
gctcttccatccccagaccagccaagcctgtgagtgacaccccagacagaggaaccagagccatgcggagtctcagcggactgctgttgttactgactgcctgcctggcggtaaacgccagctccgtgcccacattgcccgatgacattcaagtgcaggagaacttcgacctgtctaggatctatgggaagtggttcaatgtggccgtgggctccacctgcccatggctgaagaggttcaaggagaagatgaccatgagcacagtggtgttgaaagcggggccgacgatcaaggagatcagcgtcaccatcactcacaggcggaaaggtgtctgtgaatcgatctctggtacttatgagaaaagcagcactgatg

SEQ ID NO: 5135 - DNA, 397 bp, Bos taurus
  Clone ID: 22-LIB34-028-Q1-E1-F9
gaaggaggtgatacaggacgtggtggcagaaaaatgaagaggatcctggttttcctccttgctgtagcctttgtgcatgctctagagagaggccgagattatgagaaagataaagtctgcaaggaccttgccagcctgggaagagatgacttcacatctttgtcaatggtcctatacagcagaaaatttcccagtggcacctttgaacagatcagccatcttgtgaatgaagttgtttccttaacagtaacctgctgtgcggaaggggccgatcctgactgctatgacaacaggacttcagcattgtctgacaagtcctgtgaaagcaactctccattcgcagtgcaccctggaactcctgagtgctgcacccatgaggggcttgaaaagaagctct

SEQ ID NO: 5136 - DNA, 410 bp, Bos taurus
  Clone ID: 22-LIB34-029-Q1-E1-F5
ggtacttcaagatagcaaatacctatctgatattaaatgacaaatgaaccacgtgcttttaaggaaacaaaactatttttttaataatcaaatttatactagctatatgggaattagcatatctggtaattatgaaactagaatttttttacgtatttttataatattgttacctcagtgattggatgagtagcaaataatcatgttggttttaatggtgttgatttttgtaaaattaaacttcaaacactttttactttataaaatatctttaggcagcacttcaatatcgaatggtaacgggagtgacactcctcagtgtcactactttgtctacttgtcattaagtatatattttcactgctggagtaggaagtgactactcactccagtactcttgcatgggaagt

SEQ ID NO: 5137 - DNA, 417 bp, Bos taurus
  Clone ID: 22-LIB34-030-Q1-E1-F5
cggcatcgtcaccaactgggacgacatggagaagatctggcaccacaccttttacaacgagctgcgtgtggcccccgaggagcaccccgtgctgctgacggaggcccctctgaaccccaaggccaaccgtgagaagatgacccagatcatgttcgagacgttcaacactcctgccatgtatgtggccatccaggctgtgctgtctctgtacgcctctggccgcaccactggcattgtcatggactctggggacggggtcacccacacggtgcccatctacgaggggtacgccctcccccacgccatcctgcgtctggacctggctggccgggacctgacagactacctcatgaagatcctcacggaacgtggttacagctttaccaacacagccgagcgggaaattgtgcgtgacat

SEQ ID NO: 5138 - DNA, 410 bp, Bos taurus
  Clone ID: 22-LIB34-030-Q1-E1-F9
cagggcgcgatgagctgggagctgctgctctggttgctggcgctgtgcgcgctgctggcgctcgtggtgcagctactgcgcttcctacgtgccgacgcggacctcaccctgctgtgggccgagtggcaggggcgacgaccagaatgggagctgactgatatggtggtgtgggtgactggagcatcaagtgggattggagaggaactggcttaccagctgtccaaactaggagtttctcttgtgctgtcagccagaagaatgcatgagttggaaagggtgaaaagaaagtgccttgagaatggtaatttgaaagaaaaagatatactcattttgccccttgacctgactgacagaagttcccatgaaatggctaccaaagcagttctccaggagtttggcagaattgacat

SEQ ID NO: 5139 - DNA, 430 bp, Bos taurus
  Clone ID: 22-LIB34-032-Q1-E1-F5
ggttcaggggtcgagggacgagtcagcctccgcagatgcgtggagagacgcaccacatgtcaagtgacttgcaatattcctgtggtgtctggcaaagaatgtgaggaaatcatcaggaatggaggtgaaacatctgaaatgtacctcattcagcctgaggattctagcaaaccatatagagtatactgtgatatgaaaacggaaaaaggaggatggacagtaattcagaaccgtcaagatggtagtgttgactttggcaggaaatgggatccatataaacaaggatttggaaatattgcaaccaatgcagaagggaagaaatactgtggtgtaccaggtgagtattgggtcggaaatgacagaattagccagcttaccaatatgggacccacaaagcttttgattgaaatggaggactggaaaagcgata

SEQ ID NO: 5140 - DNA, 425 bp, Bos taurus
  Clone ID: 22-LIB34-032-Q1-E1-F9
ccaaaccaaccgcacccccgaatttctccgtaaatttcctgctggcaaggttccagcctttgagggtgacgatggattctgtgtgttcgagagcaatgccattgcctactatgtgagcaacgaggagttgcggggaagtactcccgaggcagcagcacaggtggtgcagtgggtgagctttgctgatagcgacatagtgccaccggccagcacctgggtgttccctaccttaggcatcatgcaccacaacaagcaggccacagagaatgcaaaggaggaggtgaggcgaattctggggctgctggatgctcacttgaagacgagaacttttctggtgggcgaacgcgtgacgctggctgacatcacagttgtctgcaccctgttgtggctttacaaacaggttctggagccttctttccgccagg

SEQ ID NO: 5141 - DNA, 411 bp, Bos taurus
  Clone ID: 22-LIB34-033-Q1-E1-F5
cggagccccgggcccgccgacaccatgagttggtcctcgcaccctccgagtgtaatcttctacattctttcattgctttcttcagcatgcctggcatatgttgctacccgagacaactgctgcatcttagatgaaagatttggtagttattgcccaactacctgtggaattgcagatttcctgaataattaccaaaccagtgtagacaaagatctacgaactttggaaggcatcttatatcaggttgagaacaaaacatcagaatccagagagctggtcaaagcaatccaaatcagctataaccctgatcaaccatcaaagccaaataacatagagagtgctaccaagaattccaagagtatgatggaagaaattatgaaatatgaaacactgatatcaacacatgaatca

SEQ ID NO: 5142 - DNA, 382 bp, Bos taurus
  Clone ID: 22-LIB34-034-Q1-E1-F5
ctgaagataaaggtgcctgcctgctaccaaagattgaaactatgagagaaaaagtactgacttcatctgccagacagagactcaggtgtgccagtattcaaaaatttggagaaagagctttaaaagcatggtcagtagctcgcctgagccagaaatttcccaaggctgagtttgtagaagttaccaagctagtgacagatctcacaaaagtccacaaggaatgctgccatggtgacctacttgaatgcgcagatgacagggcagatcttgccaagtacatatgtgataatcaagatacaatctccagtaaactgaaggaatgctgtgataagcctttgttggaaaaatcccactgcattgctgaagtagaaaaagatgccat

SEQ ID NO: 5143 - DNA, 424 bp, Bos taurus
  unsure (410): unsure at all n locations; Clone ID: 22-LIB34-034-Q1-E1-F9
aactgctgtgagtccacaagccgctttctctgctgtctgacccgctcggctccgcgatgccggtggaccttagcaagtggtccgggcctctgagcctgcatgaagtggatgagcggccgcagcacccgctgcaggtcaaatacggcggggcggatgtcgacgaagtgggcaaagtgctgacacccacccaggttaaaaaccggcccaccaacattacatgggatggccttgatccacgtaaattgtacaccttggtcttgacagatccggatgctcccagcaggaaggaccccaaatacagggaatggcaccatttcctgatggtcaacatgaagggcaacatcatcagcagtggcacggttctctccgattatgtgggctctgggcctcccaagggcacatgcctgcancgctatgtctggct

SEQ ID NO: 5144 - DNA, 428 bp, Bos taurus
  Clone ID: 22-LIB34-035-Q1-E1-F5
cacacagcacttcttgactggctccctgccttacgtggtggcctgccctggggtctgctggacacaagccacagtgttggggtagacaaggaagataaacgaggggcttctccctctccacagagactctggattttcattgttcctccagttttattgtagggcttaacattcccctcaaaaagctcatcttctaatgcttggtctttgtttcaagaaaagccagttttcttctaccacattttccagcatcaactttaagaaaaatgcaacctccattgcaaaaagaaagtggggtgtatgcctgtggtttaatttcaggttgcttttgagtttaagtggtatcgaatttcagtatatttctgtcttatgttaaagaaatatattactaaaatgtaagtgagcaataatgtcagctgtcgagcact

SEQ ID NO: 5145 - DNA, 380 bp, Bos taurus
  Clone ID: 22-LIB34-036-Q1-E1-F9
cgcgctgctgggggaccgctggatcctcacggccgcgcacaccatcaaccccaaggaccacgaggcgcagggcagccccaacatagacgtgttcctgggccacatcaatgtggaagatatcaccaagctgtccaaccacccggtccgtagggtcataatccacccagactaccgccaggaagagtcccacaatttcgagggggacatcgccctcctggagctggaaaatagcgtcaccctgggccccaacctcctgcccatctgcctcccagacaacgagaccctctatgacccgggtctcatgggctatgtcagtggctttgggatcatggacgagagaatttctcacaacctcagatttgtccgtctgccagtagcta

SEQ ID NO: 5146 - DNA, 424 bp, Bos taurus
  Clone ID: 22-LIB34-037-Q1-E1-F4
cggacgcgtgggttcgaaagtcccacccactaataaaaattgtaaacaatgcattcatcgaccttccagccccatcaaacatttcatcatgatgaaatttcggttccctcctgggaatctgcctaatcctacaaatcctcacaggcctattcctagcaatacactacacatccgacacaacaacagcattctcctctgttacccatatctgccgagacgtgaactacggctgaatcatccgatacatacacgcaaacggagcttcaatgttttttatctgcttatatatgcacgtaggacgagacttatattacgggtcttacacttttctagaaacatgaaatattggagtaatccttctgctcacagtaatagccacagcatttatatgatacgtcctaccatgaggacaaatatcattctg

SEQ ID NO: 5147 - DNA, 408 bp, Bos taurus
  Clone ID: 22-LIB34-037-Q1-E1-F9
aaagacgcgtgggggagcagttttcatggatgcccctgtttctggtggtgtgggagccgctcggtcggggaacctcacatttatggtaggaggagtcgaagaagaatttgctgctgcccaagagttgctggggtgcatgggctccaatgtggtgtattgtggagctgttgggacagggcaggctgcgaagatctgcaacaacttgctgttagctattagtatgattggaactgctgaagctatgaatctgggaatcaggttagggcttgacccaaaactcttggctaaaatcctaaatatgagctcaggacgatgttggtcaagtgacacttataatcctgtacctggggtgatggatggagttccctcggctaataactatcagggcggattcggaacaacactcat

SEQ ID NO: 5148 - DNA, 409 bp, Bos taurus
  Clone ID: 22-LIB34-038-Q1-E1-F9
ggcgaagaacgcggttggccaatcgcaagccagaagatgaaggttctgtgggttgccgtggtggtcgcgcttctggcaggatgccaggcggatatggagggagagctggggcccgaggagcccctgactacccagcagccccgggggaaggacagccagccttgggagcaggcgctgggccgcttctgggattacctgcgctgggtgcagaccctgtctgaccaggtgcaggaggagctgctcaacacccaggtcattcaggaactgacggcgctgatggaggagaccatgaaggaggtgaacgcctacaatgaggagctggatggacagctaggccccatggcccaggagacacaggcccgcgtgtccaatgagctgcaggcagcccaagcccggctaggctccgaca

SEQ ID NO: 5149 - DNA, 439 bp, Bos taurus
  Clone ID: 22-LIB34-039-Q1-E1-F5
ggacaccatccccatggacaccacccccatggacaccatccccatggacaccacccccatggacatcacccctatggacatcatcctcatggacatcatccccatgacaatgatttctatgaccatggaccctgtgacccaccaccacataggcaagatccccaagaccaccatcgccaaggccgtgacccaccacctaggcactccaaagaaagaggtccaggtaaaggacactttcgcttccactggagaccaactggatatattcaccgacttccttcactaaagaaaggtgaagttctccctcttccagaagccaattttcccagcttctcattgccaaaccacaataatcccctacagccagagattcaggccttcccccagtcagcctctgaatcatgtcccgggacattcaacattaagtttctacatatat

SEQ ID NO: 5150 - DNA, 423 bp, Bos taurus
  Clone ID: 22-LIB34-040-Q1-E1-F5
cagacgcgtgggtcgggacagtagcacctggctcacagcctttgtgctgaagatactgagtttggcccaggatcaggtgggcggctctgctgaaaagctgcaggagacagccacgtggctgctgtcgcagcaacgggatgatggcccattccacgacccctgtcctgttatccacagggaaatgcagggaggcttagtgggaagcgatgagactgtggcgctcaccgccttcgtggtcatcgcccttcaccacgggctggcggtcctcccagacaagaattctgagcagttgaggagagttggaaattccatctcaagaacaaacaccttcttgggggcgaaagcaacctctgggctcctgggctcccacgcctccgccatcacggcctacgccctgtcgctgaccgaggcccccgaggacct

SEQ ID NO: 5151 - DNA, 402 bp, Bos taurus
  Clone ID: 22-LIB34-041-Q1-E1-F5
cgtgcacgtgatgagcaagtctgcggcaaaggtggtggcggatgcccggagagatgggaaggtggtctacggagaacccatcgcagcaggtctcggcacggatggcactcaccactgggatagagaatggctccatgccgcccatcacgttatgggtccacccctgcgaccagacccttcaacgcctgacttcctcatgaatctgttggctaacgatgacctaaccaccacagggtctgacaactgtactttcaacagctgccagaaagctcttgggaaggatgattttactaagattcccaatggagtgaatggtgttgaggaccggatgtcgataatatgggaaaaaggcgtgcacagtggcaaaatggatgaaaaccggtttgtggcagttaccagcac

SEQ ID NO: 5152 - DNA, 401 bp, Bos taurus
  Clone ID: 22-LIB34-042-Q1-E1-F5
cagaggctgaagctagttaacatcagtgtcttggctcccaactggctcccaattcctggtgaaactcctaaagggagactgttaaatcatgaaattaatcaccatccttttcctttgttccaggctgctaccaagtttaacccaagagtcttctcaagaaatcgactgcaacaaccaggatgtatttaaagctgtggacgctgctctgacaaaatacaacagtgaaaacacgagtggcaaccagtttgtattgtagcgcataaccgaggttgccagaatggataatcctgacacattttattccttgaagtaccagatcaaggacggcgactgtccttttcaaagtaacaaaacttggcaggactgtgactacaaggaatctgcagaaactgccacaggag

SEQ ID NO: 5153 - DNA, 419 bp, Bos taurus
  Clone ID: 22-LIB34-042-Q1-E1-F9
gggcaggcggcggctctggatccactgcccacaccccgctctcgcaggcagacatgaggacagagagaatgtcccccctcctggctctggggatcctggtggctgggctctgctccagggtccactgcctcccagagaatgtgaccccagaagaacagcacaaagtgacatctgtggatggccactcattagcctccagcaacactgacttcgctttcagcctctacaagcagttggctttgaaggaccccaataagaacgtcatcttctcccctctgagcatctccatagccttggccttcttgtccctgggggctcatggccccactgtgacagagatcctggaaggtctcaagttcaacctcacagagacccccgagacagaaatcgaccaaggcttccagcacctcctgcagacg

SEQ ID NO: 5154 - DNA, 389 bp, Bos taurus
  Clone ID: 22-LIB34-043-Q1-E1-F5
atggacggtcagaagaaaaattggaaggacaaggttgttgacctcctctactggagagacattaagaagactggagtggtgtttggtgccagcttgttcctgctgctctcgctgacagtattcagcattgtgagtgtaacggcctacattgccttggccctgctctctgtgactatcagctttaggatatataagggtgtgatccaggctatccagaaatctgatgaaggccacccattcaaggcatatttggaatctgaagttgctatatctgaggagttggttcagaagtacagcaattctgctcttggtcatgttaactgcacaataaaagaactcagacgcctcttcttagttgatgatttagttgattctctgaagtttgcagt

SEQ ID NO: 5155 - DNA, 187 bp, Bos taurus
  Clone ID: 22-LIB34-044-Q1-E1-F5
actcgccggccgacgcacgcatccagtcagcgtcacaccactgagtgtctccatagccctggccttcctgtctccgggggcccgtggctccaccctgacacatatcctgcaaagtctcaagttcaacctcacaggcatccactaaaaagaaagacatgatagctttcaccacctcctgcatgcgctc

SEQ ID NO: 5156 - DNA, 311 bp, Bos taurus
  Clone ID: 22-LIB34-045-Q1-E1-F5
aagatatctcagctaagtccacagcgaaggatcatttcatgcaactacgatctgttcatcaccatgaaacatctactactgctgacctctctgtgcgttgagatttcatcccgatttgtccgaatgacttcacatatggacgtgatgacagacccaaagtacgttgcggtgccctcggtcatcggaccaattactggaagaaggaataagcacctaccctgataccagttccccctctcatcagctgaggtagctactgggtcagtagcttcacagcatccgtgggccatcccagactggatagttagccc

SEQ ID NO: 5157 - DNA, 409 bp, Bos taurus
  Clone ID: 22-LIB34-046-Q1-E1-F9
gccccgggcccgccgacaccatgagttggtcctcgcaccctccgagtgtaatcttctacattctttcattgctttcttcagcatgcctggcatatgttgctacccgagacaactgctgcatcttagatgaaagatttggtagttattgcccaactacctgtggaattgcagatttcctgaataattaccaaaccagtgtagacaaagatctacgaactttggaaggcatcttatatcaggttgagaacaaaacatcagaagccagagagctggtcaaagcaatccaaatcagctataaccctgatcaaccatcaaagccaaataacatagagagtgctaccaagaattcgaagagtatgatggaagaaattatgaaatatgaaacactgatatcaacacatggagtcaa

SEQ ID NO: 5158 - DNA, 443 bp, Bos taurus
  Clone ID: 22-LIB34-047-Q1-E1-F5
cacacagcctcacacacacacgtgcagtgtcacagcctcacacacacacgtgcagtgtcacacacacgtgaagtgtcccacagtcacacacgtgcagtgtcacacaggatgacagtgtcacagtttcatagtgtaacagtcacacagccacttacatagtatctcactttcacagtcacagtctcacacactcacacacctctcctcctcccctctctccctctccccctccccccctccaatcagcaggtcgggcaggccgcacccctcgcagcctgcacctgcgctctgccgtcaccaagtggcagcagtgcctcggtgatcacccccgacgccccctgcgcccaaaacataccctcccgactcctttcgcctcttttaagaatgaaatgcaacttttctactcagcggctaccaatctcacagacgaacaccctgtttag

SEQ ID NO: 5159 - DNA, 431 bp, Bos taurus
  Clone ID: 22-LIB34-048-Q1-E1-F5
catccttttcctttgttccaggctgctaccaagtttaacccaagagtcttctcaagaaatcgactgcaacaaccaggatgtatttaaagctgtggacgctgctctgacaaaatacaacagtgaaaacaagagtggcaaccagtttgtattgtaccgcataaccgaggttgccagaatggataatcctgacacattttattccttgaagtaccaaatcaaggagggcgactgtccttttcaaagtaacaaaacttggcaggactgtgactacaaggactctgcacaagctgccacaggagagtgcacagcgaccgtggccaagagagggaatatgaagttctccgtggctatccagacctgcctgatcactccagccgagggccccgtggtgacagcccagtatgagtgccttggctgtgtgcatcccatat

SEQ ID NO: 5160 - DNA, 291 bp, Bos taurus
  Clone ID: 22-LIB34-048-Q1-E1-F9
atagtgagtcgtattagccactttgctagaacacatccctacttttatgcaccagaactcctttactatgctaatacatacaatggagtttttcaagaatgctgctaagctgactatagaggtgcctgcctgctaccaaagattgagtgtatgagacagcgcgtactgacttcatcagccacacagacacgcacgtgtgccagtactcgctcgtctggagaaggacctttaagtgcatggtcagtctctcgcctgagccagagatttcccactgctgagtttgtggaagtt

SEQ ID NO: 5161 - DNA, 405 bp, Bos taurus
  Clone ID: 22-LIB34-049-Q1-E1-F5
catggatgaggcctgtcaggagggcaacatctttgtcaccaccacgggctgtactgacatcattcatggccagcactttgaacagatgaaggatgatgccattgtgtgtaacattgggcactttgacgtggagatcgatgtcaagtggctgaacgagaacgctgtggagaaggtgaacatcaagccccatgtggatcactacctgttgaagaacggacgccgcatcatcctgctggccgagggccggctggtcaacctgggctgtgccatgggccatcctagccttgtgatgagcagctccttcaccaaccaggtcctggcgcagatcgagctctggacccacccagacaagtaccccgtcggagtccacctcctgcccaaggaactggaagaagcagtggctga

SEQ ID NO: 5162 - DNA, 415 bp, Bos taurus
  Clone ID: 22-LIB34-049-Q1-E1-F9
cattgtctttaagattgaaaggcaattattctttgtgattggggcatttagaatatatatgtctatatatgtgtatatgtgtatttcaaagtaccatattgaaaattagacaaatgaaaattagatctttaaccaaatttagcatgttatctaaatgtaatatcttaatagtctgcattatatattatgaatctgcattaaaaatagcattttaaatggtgaatccataattttggattcccaaaaccatatttgtgatgtatcctgactaagacaggttgttggaggagtattagaagcagaatgaaaccgcttattttggtttcataatatgtacatattgactcccactcattcttatattaattaaattataattctgtccttttgaaattttgattataaaaattttaat

SEQ ID NO: 5163 - DNA, 427 bp, Bos taurus
  Clone ID: 22-LIB34-050-Q1-E1-F5
cagacgcgtgggtactgattgccttttctcagtatctccagcagtgtccatttgatgagcatgtaaaattagtgaacgaactaactgagtttgcaaaaacatgtgttgctgatgagtcccatgccggctgtgaaaagtcacttcacactctctttggagatgaattgtgtaaagttgcatcccttcgtgaaacctatggtgacatggctgactgctgtgagaaacaagagcctgaaagaaatgaatgcttcctgagccacaaagatgatagcccagacctccctaaattgaaaccagaccccaatactttgtgtgatgagtttaaggcagatgaaaagaagttttggggaaaatacctatacgaaattgctagaagacatccctacttttatgccacagaactcctttactatgctaataaatataa

SEQ ID NO: 5164 - DNA, 228 bp, Bos taurus
  Clone ID: 22-LIB34-051-Q1-E1-F5
ctttggcacaatgaagtgggtgacttttatttctcttctccttctcttcagctctgcttattccaggggtgtgtttcgtcgagatacacacaagagtgagattgctcatcggtttaaagatttgggagaagaacattttaaaggcctggtactgattgccttttctcagtatctccagcagtgtccatttgatgagcatgtaaaattagtgaacgaactaactgagtt

SEQ ID NO: 5165 - DNA, 106 bp, Bos taurus
  Clone ID: 22-LIB34-052-Q1-E1-F5
ggggggggggggggggggtgggggtggagcgaggggggggggggggggggggaggggggggggggggggggggagggggggggggggggggggggggggggggggg

SEQ ID NO: 5166 - DNA, 241 bp, Bos taurus
  Clone ID: 22-LIB34-052-Q1-E1-F9
cgaagctgttggtgctcaccctcttgggactggggctggcattcttcagggattaccggtcttcttatctagcaagaatgaacgcttcccgagaagtaaaatcggtagaacttcctaactgtaaattaataaaaggaatagaaactggtgctgaagacctggagatacttcctaatggactcgctttcattagttccggattacgatatcctggagtaaaaagctttgaacctgataagcc

SEQ ID NO: 5167 - DNA, 238 bp, Bos taurus
  Clone ID: 22-LIB34-054-Q1-E1-F5
gcaaaaagctttattgtttccatatggtccaaggcttgagagagggctccagggtgttaaaaaaaagctgcctagtagctgcagagaggggcttcaggcagccctgatgttaggtgggttcttcaatggccactggtctccagaagctcctagtcgtgcttgagggtgagcctttcgaagagatactcgcccaacccagcctggggaccagccagcctgcggaggttggtcagatggt

SEQ ID NO: 5168 - DNA, 352 bp, Bos taurus
  Clone ID: 22-LIB34-055-Q1-E1-F5
cagaaggctcaggcggaggcatccgagttccggacacggtcggcgtgaggaccaggcgggcgcggggcgatgctgcgggtgcggtgtctgcgcggcgggagccgcggtgccgaagcgctgcactacatcgggtctcggcttggaagaactgtaacgggatgggtgcagcgaactttccagagcacccaggcagctacggcttcctcccggaattcctgtgcagctgatgacaaggccactgatcctctgcccaaggactgccctgtctcctctttcaacgaatgggaccccttagaggaagtgatcgtgggcagagcagaaaatgcctgtgttccaccgttcactgtggagg

SEQ ID NO: 5169 - DNA, 367 bp, Bos taurus
  Clone ID: 22-LIB34-056-Q1-E1-F5
gccgatcttgctgcagggccatgagcggtccattactcagattaagtacaaccgcgagggagacctcctcttcacggtggccaaggaccctattgtcaatgtatggtactctgtgaatggtgagagactgggcacctacatgggccataccggagctgtgtggtgtgtggacgctgactgggacaccaagcatgtcctcactggctcagctgacaacagctgtcgtctctgggactgtgaaacagggaagcagctggccctgctcaagaccaattcagcagtccggacctgtggctttgactttgggggcaacatcatcatgttctccacagacaagcagatgggctaccagtgcttcgtgagcttc

SEQ ID NO: 5170 - DNA, 342 bp, Bos taurus
  Clone ID: 22-LIB34-056-Q1-E1-F9
ggttctgaaaccctagaggacgcaactgtgagtgtctctgtcctagcctctcaacttgctttcctgtgtccaatagcactgcagactccagtactagcctgtccagagcagcaagtgagaggaaacaagccagcattgtaagaggacatgtttctcctccctctctccgtgctgctcctgctcacacagccctggagattcctgggagcagaaatgacaaccttttctcagaaaatactggccaatgcctgtaccctggttatgtgtagccccctggagagtggcttgcctggtcatgatggacaagatgggagagaatgtccccatggagagaagggggat

SEQ ID NO: 5171 - DNA, 219 bp, Bos taurus
  Clone ID: 22-LIB34-057-Q1-E1-F5
ctaacgatggctggcatgtcggctctgaagcgactggcgccgttcgctcacgttggaggccacctcttcagaggccgctgcgcgagggcggctggagcccgtggcgtccgtcgggctggcggaggtgcgcacattgagccccggtacagacagttcccgcagctgtccagatcccaggtgatccaggccgagttcttcagtgcgaccatgtggttctgg

SEQ ID NO: 5172 - DNA, 222 bp, Bos taurus
  Clone ID: 22-LIB34-058-Q1-E1-F9
cgagagggtgattgtacccatgatgaccctttacctgtaaaccccttacttccgggacgaggagctgggctgcacgctggtggagctcacgtacaccagcaacgacagcgccctcttcatcctccccgatgagggcaaaatgcaggacctggaagccaagctgaccccggagacgctgacgcggtggcgaaactccctgcagcccagacttatacatcgact

SEQ ID NO: 5173 - DNA, 204 bp, Bos taurus
  unsure (197): unsure at all n locations; Clone ID: 22-LIB34-059-Q1-E1-F5
aaacaactgcacaagcgcgcacccatcgtaccggagcgttgccccagatccgcgcccgccccgtccgtgcggcgcgcgggcggagtcgccgtggcagcgccggagcccgggccgggggccaccatcgaggcgggggccgcgcgagggccggagcggagcggcgccgctaccgccgcacgcgcaaacttgggctcgcngctttcc

SEQ ID NO: 5174 - DNA, 236 bp, Bos taurus
  Clone ID: 22-LIB34-060-Q1-E1-F5
gtcggaagcactatttgaaagtattcaatcccataaagaaactggaattttcccttctgtttcttgtttttgatgagaatgaatcttggtacttagatgacaatatcaaaacatactctgatcaccctgagaaagtagacaaagccaatgaggaattcatggaaagcaataaaatgcatgctattaatggaagaatgtttgggatctctttagtggattaattggcccactgattg

SEQ ID NO: 5175 - DNA, 355 bp, Bos taurus
  Clone ID: 22-LIB34-061-Q1-E1-F5
acaagcaacatgccgcccggcatcgagcccagccctgacaaaatgctccagggccgcctttttgcctatcctgacactcaccgccaccgcctgggacccaactatctccagatacctgtgaactgtccctaccgtgctcgagtggccaactaccagcgtgacggccccatgtgcatgatggacaatcagggtggggctccaaattactaccccaatagctttagtgctcccgagcatcagccttctgccctggaacacaggacccacttctctggggatgtacagcgcttcaacagtgccaacgatgacaatgtcactcaggtgcggactttctatttgaaagtgctgaatgagg

SEQ ID NO: 5176 - DNA, 152 bp, Bos taurus
  Clone ID: 22-LIB34-062-Q1-E1-F5
tggctgccgaggatgtggcggcgactggtgcacacacgagcgagctctatagcggtgggctgctgcaagagattttcacgtctccgctcaacctgctgctccttggcctttgcatcattctgctccacatgatcgtccgcggggatcaaccg

SEQ ID NO: 5177 - DNA, 425 bp, Bos taurus
  unsure (72),(80),(99),(253),(285),(291),(296): unsure at all n locations; Clone ID: 22-LIB34-064-Q1-E1-F5
aggagatcatgcctgtgttaccggcccttctgcggcccggcccccggcttcagaggcgggtgcaggaaatanagtatgcngagcgaagttatgtatcanaacccactttgaatgaagtggtcatagtaagtgctataagaacacccattggatcctttctaggcagtctttcctctctgccagccactaaacttggtttcattgcaattcaaggagccattgaaaaggcaaggattccaaaagaagaagtganagaagcatacatgggcaatgttctacaaagangtgaangacangcccctacaaggcaagcagtactgggagcaagcttacctatttctactccatgttacactaaaaacaaagtttgtgcctcaagaatgaaagccatcatgatggcctctcagaatcttatgtgtggacat

SEQ ID NO: 5178 - DNA, 141 bp, Bos taurus
  Clone ID: 22-LIB34-065-Q1-E1-F9
ctgtgagctgtacacgtgcattctaccagaacatcttgcttctagggctgtgaagaggatttctgtacttggtagacgtgcttaaaaaaactgtcttccacttcaaaaacttgcctttcctttattaaaaaatattttatg

SEQ ID NO: 5179 - DNA, 255 bp, Bos taurus
  Clone ID: 22-LIB34-066-Q1-E1-F5
accaattcgaaaaacttggagagtatggattccaaaatgcgctcatagttcgttacaccaggaaagtaccccaagtgtcaactccaactctcgtggaggtttcaagaagcctaggaaaagtgggtactaggtgttgtacaaagccggaatcagaaagaatgccctgtactgaagactatctgagcttgatcctgaaccggttgtgcgtgctgcatgagaagacaccagtgagtgaaaaagtcaccaagtgctgca

SEQ ID NO: 5180 - DNA, 234 bp, Bos taurus
  Clone ID: 22-LIB34-067-Q1-E1-F5
aaatggcaacccactccagtactcttgcctagaaaatcccatggacggaggagcctggtgtccatggggttgcaaagagtgggacacgactgagtgacttcactttcactttggggaattacaaaggaaatagaaatcatggcttttgccctccagggtttataagacaaatacagaaaaatacataaccccaaatgacaaagtttgatataaaaacataaacacaagtcacaa

SEQ ID NO: 5181 - DNA, 201 bp, Bos taurus
  Clone ID: 22-LIB34-067-Q1-E1-F9
cctatggtggtgctggacagccccagctcatcagccgcaactggtttggtctgccgggacgactggatgcggccatggccggccacatctatgtctcaggctcagctcccagcttcccccgggccaagatgactaagtctgcacgccgccatcgcaaacgctaccgctcgctccgaagccgtggtcgaggccgcggccgaa

SEQ ID NO: 5182 - DNA, 217 bp, Bos taurus
  Clone ID: 22-LIB34-068-Q1-E1-F5
aaacctctataatgtgtcgtattagtttgaatctcttccgggtgacctggtgggcctgtccccggatggacctccatgccccctgcacattgccactggtcacgggctggccccgcgggacatggctgatgcccatgggctcttgtccgctgaggctgatcgggaagacttgctaaatctgctgcaacaagatgagggccctccttccctgccgggt

SEQ ID NO: 5183 - DNA, 209 bp, Bos taurus
  Clone ID: 22-LIB34-069-Q1-E1-F5
ctttgttggaaaaatcccactgcattgctgaggtagaaaaagatgccatacctgaaaacctgcccccattaactgctgactttgctgaagataaggatgtttgcaaaaactatcaggaagcaaaagatgccttcctgggctcgtttttgtatgaatattcaagaaggcatcctgaatatgctgtctcagtgctattgagacttgccaag

SEQ ID NO: 5184 - DNA, 406 bp, Bos taurus
  unsure (385): unsure at all n locations; Clone ID: 22-LIB34-071-Q1-E1-F5
gccatcttcaaagcctttgctatgatcattgataaactggaagaggacatcagcagctctatgaccaatagcacagctgccagtagacccccagtcaccctgaggctggtggtccctgctagtcagtgtggctctctcattgggaaaggtggttgcaagatcaaggaaatacgagagagtacaggggctcaggtccaagtggcaggggatatgctccccaactcaactgagcgggccatcactattgctggcattccgcaatccatcattgagtgtgtgaaacagatctgcgtggttatgttggagactctctcccagtcccccccgaagggcgtgaccatcccgtaccggcccaagccgtccagttctccggtcatctttgcangtggtcaggcctataccattc

SEQ ID NO: 5185 - DNA, 402 bp, Bos taurus
  Clone ID: 22-LIB34-071-Q1-E1-F9
actttaggggacaggaccaccaaccaatacatgagttttccgatataaatacttgtcctaccttaacgataaggaagcacttagtgggctcctggcaggcccgtctgctcatgattaatcacactgttcgggctggccagtttttcatgcatgcagcttgacaattgagcacagtcaggcgtttgtattaaaaacgcatgcatgacaattgagcacagtcaggcgtttgtattaaaaacgaaaaagtgaaaaaaacaaattcaaaacctactcagaggggttctagttcaaattgttagtgtaaattgtagccggtttactgagaagaggcgtttaaaattggctcgcctcaagatgccgtgtgggtaactgtccaggcggagcgcccctgctgccgggcgg

SEQ ID NO: 5186 - DNA, 415 bp, Bos taurus
  Clone ID: 22-LIB34-073-Q1-E1-F5
acactaataaaaattgtaaacaatgcattcatcgaccttccagccccatcaaacatttcatcatgatgaaatttcggttccctcctgggaatctgcctaatcctacaaatcctcacaggcctattcctagcaatacactacacatccgacacaacaacagcattctcctctgttacccatatctgccgagacgtgaactacggctgaatcatccgatacatacacgcaaacggagcttcaatgttttttatctgcttatatatgcacgtacgacgaggcttatattacgggtcttacacttttctagaaacatgacatattggagtaatccttctgctcacagtaatagccacagcatttataggatacgtcctaccatgaggacaaatatcattctgaggagcaacagtcatca

SEQ ID NO: 5187 - DNA, 393 bp, Bos taurus
  Clone ID: 22-LIB34-074-Q1-E1-F5
gtccaggggccatgccgaagctacatccagctctgggcatttgatgctgtcaaggggaagtgcgtccgcttcagctatgggggctgcaagggcaatggtaacaaattttactcggagaaggagtgtaaggagtactgtggcattcctggtgaagcggatgaggagttgctgcgcttctccaactgaccggtccgcaggcctgaagtccacaaggcagcaggaagtgggagggtcagagtctgccccagagccctgctgcaggttccaataaaaaccaaattgtagactcctgaaaaaaaaaaaaaaaaaaaaaaaaaaaaaaaaaaaaaaaaaaaaaaaaaaaaaaaaaaaaaaaaaaaaaaaaaaaaaaaaaaaaaaaaaaaaaaggggggc

SEQ ID NO: 5188 - DNA, 263 bp, Bos taurus
  Clone ID: 22-LIB34-076-Q1-E1-F5
aatccgcgtaagcgtcacttgtctggtgacagttcctttgccagcctgtccgcgccccgcccgtcccagccatgctttccgccctcgcccggcctgccggcgccgctctccgccgcagcttcagcacctcggcccaagacaatgctaaagtagccgtgccgggggcctctggaaggaatgggcagccgctttcgcttcttcggaagaacagcccgttggtgatccgtctgaccctctacgatatcgctcatacgcccggaatg

SEQ ID NO: 5189 - DNA, 471 bp, Bos taurus
  Clone ID: 22-LIB34-077-Q1-E1-F5
cgggtggcccacacgtccggtaagaagccggaatcagaaagaatgccctgtactgaagactatctgagcttgatcctgaaccggttgtgcgtgctgcatgagaagacaccagtgagtgaaaaagtcaccaagtgctgcacagagtcattggtgaacagacggccatgtttctctgctctgacacctgatgaaacatatgtacccaaagcctttgatgagaaattgttcaccttccatgcagatatatgcacacttcccgatactgagaaacaaatcaagaaacaaactgcacttgttgagctgttgaaacacaagcccaaggcaacagaggaacaactgaaaaccgtcatggagaattttgtggcttttgtagacaagtgctgtgcagctgatgacaaagaagcctgctttgctgtggagggtccaaaacttgttgtttcaactcaaacagccttagcctaaacacgacac

SEQ ID NO: 5190 - DNA, 429 bp, Bos taurus
  Clone ID: 22-LIB34-078-Q1-E1-F5
tgcgtgctatgcataacgaagatggcggccacggcgggaaggttgtttcgggcttcgctcatccgacatgtgagtgccattccttggggcatttctgcctctgcagcccttaggcctgctgcttctcgaagaatgtgcttgacaaatgcattgtggtctggttccgatcaagcaaaattcgcctttagcaccagttcctcataccatgcccctgccgtcacccagcatgcaccctattttaagggtacagctgttgtcagtggagagttcagagaaattagccttgatgactttaaggggaaatatttggtgctcttcttctatcctttggatttcacctttgtgtgtcctacagaaatcattgctttcagtgacaaaaccagtgaatttcacgatgtgaactgcgaagttgtggcagtgtcagtggac

SEQ ID NO: 5191 - DNA, 430 bp, Bos taurus
  Clone ID: 22-LIB34-078-Q1-E1-F9
gagatcctggaaggtctcaagttcaacctcacagagacccccgagacagaaatccaccagggcttccagcacctcctgcagacgttcaatcagcccagcaaccagctgcagctgagcgtgggcaacgccatgtttgtgtcagaggagctgaagctgctggacaaattcaggaaagatgccgaggctttttacgcctctgaggttttatccactaacttcaaggattctgaagctgccgtaaagcttatcaatgaatatgtgaagaataaaactcatggaaaaattgagaagctcttcaatgatcttgacgtgctcacaaatttaatcttgttgaattatatcttctttaaagcccagtggaagacgccatttaatcctaaccatacttacgaatcagagttccacgtgagccagaacgagacggtgattg

SEQ ID NO: 5192 - DNA, 385 bp, Bos taurus
  Clone ID: 22-LIB34-079-Q1-E1-F5
aataaaatagtggtgaacttcaccctttagtacagttaacagtgactcggggtaactgttcaagttgatcttttttttagctggatacaggatagtggtctgtgacttcaggaagcttattctatcgtctgcttccatggtctgcttaaaaaattggcttcatgagtatagaccaagtttaccacttctgatgaacagaccaattgagattcattcctcattctgtttcgatagtgtgggagcagaagcctcatggaataagatgaagctaatttcatgccttagcgtgtgttttctcccttgtgcagaatttagcagtttgtaggaaactcagtgtttcctaaatgtttccttcctcccaaatggggaatctggcaagaacttt

SEQ ID NO: 5193 - DNA, 420 bp, Bos taurus
  Clone ID: 22-LIB34-080-Q1-E1-F5
aggactatccattttacacttgctttatttttcattacctgtagcttcaggcagatttgcaacagcaaattaatgtgtaaaattggattatcaccacaaaactgtttagtcatgtctatccattcagatcttcttttgagaggatttgatgtgagtttttgacaagcctcagcaaacccaaagatgctaacagtattttgagaagttgctgcagattcctttggccactgtatttgctaatttcttgcaatttgaaggtacgagtagggacttaagaaaaaatcagtttttgttcttacaaatgcatttaagttgtaaacgtctttttaagcctttgaagtgcctatgattctatgtaactcgttgcagactggtgttaatgagtatatataacagttaaaaaaaaagttggtattttat

SEQ ID NO: 5194 - DNA, 407 bp, Bos taurus
  Clone ID: 22-LIB34-082-Q1-E1-F5
aagtggacattgatattaagatccgatcttgcaaagggtcatgcagtagagctttagaacataaggtagatctggaggactataaaaatcagcagaagcaacttgaacaggttattgccataaacctacttccctctagagacattcaatacttaccattgataaaaatgagtacaattacaggccctgttcccagagagttcaagagccagctccaagaggcccctctagaatggaaggcactgctggaaatgcagcagacgaaaatggtgttggaaactttcggtggcgatggacatgccagaggagactctgtatctcaaggaacaggattagcaccaggaagtcccagaaagcctggaaccagtagtattggaaatgtgaaccctgggagctatggacctgga

SEQ ID NO: 5195 - DNA, 418 bp, Bos taurus
  Clone ID: 22-LIB34-082-Q1-E1-F9
agctcaggtgtgccagtattcaaaaatttggagaaagagctttaaaagcatggtcagtagctcgcctgagccagaaatttcccaaggctgagtttgtagaagttaccaagctagtgacagatctcacaaaagtccacaaggaatgctgccatggtgacctacttgaatgcgcagatgacagggcagatcatgccaagtacatatgtgataatcaagatacaatctccagtaaactgaaggaatgctgtgataagcctttgttgggaaaatcccactgcattgctgaggtagaaaaagatgccatacctgaaaacctgcccccattaactgctgactttgctgaagataaggatgtttgcataaactatcaggaagcaaaagatgccttcctgggctcgtttttgtatgaatattcaag

SEQ ID NO: 5196 - DNA, 378 bp, Bos taurus
  Clone ID: 22-LIB34-083-Q1-E1-F5
aatagaaacgcgagtgcttagtactgagtctcagggccgactcggttcgggtctcggaggcagcaccagtgatcgttaagcaaagagagcctagggtagttggccaagatgccgaatatcaaaatcttcagcggcagctcccaccaggacctatcccagaagattgccgaccgcctgggcctggaactgggcaaggtggtgactaagaaattcagcaaccaggagacctgtgtggaaatcggagaaagtgttcgtggagaagatgtctacattgttcagagtggctgcggtgaaatcaatgacaatctcatggaacttttgattatgattaatgcctgcaagattgcttcagccagccgggttactgcagtcatcccg

SEQ ID NO: 5197 - DNA, 363 bp, Bos taurus
  unsure (265): unsure at all n locations; Clone ID: 22-LIB34-083-Q1-E1-F9
agcacaaaactttggcacaatgaagtgggtgacttttatttctcttctccttctcttcagctctgcttattccaggggtgtgtttcgtcgagatacacacaagagtgagattgctcatcggtttaaagatttgggagaagaacattttaaaggcctggtactgattgccttttctcagtatctccagcagtgtccatttgatgagcatgtaaaattagtgaacgaactaactgagtttgcaaaaacatgtgttgctgatgagtcncatgccggctgtgaaaagtcacttcacactctctttggaaatgaattgtgtaaagttgcatcccttcgtgaaacctatggtgacatggctgactgctg

SEQ ID NO: 5198 - DNA, 426 bp, Bos taurus
  Clone ID: 22-LIB34-084-Q1-E1-F5
caaagttctgcatcgccactcagacatcatggcggacaaccgggatccagccagcgaccagatgaaacactggaaggagcagagggccgcgcagaaacctgatgtcctgaccactggaggtggtaatccagtaggagacaaactcaatagtctgacggtagggccccgagggccccttctcgtccaggatgtggttttcactgatgaaatggctcactttgaccgggagagaattcctgagagagtcgtgcatgccaaaggagcaggggcttttggctactttgaggtcacacatgacattaccagatactccaaggcgaaggtgtttgagcatattggaaagaggacgcccattgcagttcgcttctccactgttgctggagaatcgggctcagctgacacagttcgtgaccctcgtggctttgc

SEQ ID NO: 5199 - DNA, 411 bp, Bos taurus
  Clone ID: 22-LIB34-085-Q1-E1-F5
agatgaatgtcacgtcatggactatgtcatatataaggcaggaggaatggctaccatcgggaatgaaactgtgctggacattgttcccactggcatccatcagaagtcgcccatcatcatggggtctcctgaagatgtgactgagttcctgcagatatacaagaagcatgctgccagatgaagagtgggcccatcctacaccatatggaattgccttttatctggaccttttatctcacatagtgttaccacattccgactgttcaccatacattcctagtcatagtcataaagtatatggctgttttcaccatcaaatgctctgtaatgcactacctaaccatgcatgctaaatcagtattgctacagggtcacgatatattctgaatggctacataagaactgaacata

SEQ ID NO: 5200 - DNA, 395 bp, Bos taurus
  Clone ID: 22-LIB34-085-Q1-E1-F9
ccgggccgacccaagcgtcaggtgaagcttaggccatggatttgaaggttagcaacggccccggccctggggacgagcgcaccacgagcctgctgctgctgggcttcctgcagagctgcccccactcctgcttccagagggagctggaggcgctgggtcacgagctgcctgggcacctgttccatgatgacgagctgcagacggacggcaaccgctgcagccacttccccttggcagcggaagcggagacagattctgagcgtcaggaggaggcagtccgcgaagtcgcccggcagctcgcccagattggggacaggctggagggcagcatccgcccagggatggtggccggcctggcctcacgcttcagtgtcaggagcctgtcggaggaggac

SEQ ID NO: 5201 - DNA, 355 bp, Bos taurus
  Clone ID: 22-LIB34-086-Q1-E1-F5
gcgagttggagccggagtctacggttccgctgttgccccagctgctggccctcggagtcaggttttttttttttttggcatctgttatctttaaatcttgtatcgagagtaggctgtaaaccgggaaccatgacggctgcggagaacgtctgctataccttaattaacgtgccaatggattcagaaccaccgtctgaaattagcttaaaaaatgatctaggatcataccatcaaaaaattacttctggtattttgggaaattgttcctaaaacaactccagatgggaggcttttacatgaaatgatccttgtttgtgatgcatatagaaaggatcttcagcatcctaatgaattt

SEQ ID NO: 5202 - DNA, 407 bp, Bos taurus
  Clone ID: 23-BOVMS1-001-Q1-E1-F3
atcccaccaatgcagaggtcaacaaggtgctgggaaaccccagcaatgaaaagatgaatgccaagaaaattgagtttgaacaatttctgcccatgttgcaagctatttccaacaacaatgaccacggcacttatgaagactttgttgagggtctgcgtgtcttcgacaacgaaggcaatggcaccgtcatgggtgctgaacttcgtcatgttctagccatactaagtgaaaagatgaatgaacaagaagtggaagcgctgatggcaggtcatgaagactccaatggctgcatcaactatgaagcttttgtcaagcacatcatgtcgaactaaatggagctctcaagatcaagcattgtttatgaagactggctgaaccttattttaagaacacccatgactaactgt

SEQ ID NO: 5203 - DNA, 314 bp, Bos taurus
  Clone ID: 23-BOVMS1-003-Q1-E1-F11
atgcgacgtcatagctcttctaaagtgtcaccaaaattcaattcactggccgtcgttttacaacgtcatgactgggaaaaccctggcgttacccaacttaatcgccttgcagcacatccccctttcgccagctggcgtaataccgaaaaggcccgcaccgatcgcccttcccaacagttgcgcagcctgaatggcgaatgggacgcgccctgtagcggcgcattaagcgcggcgggtgtggtggttacgcgcagcgtgaccgctacacttgccagcgccctagcgcccgctcctttcgctttcttcccttcctt

SEQ ID NO: 5204 - DNA, 413 bp, Bos taurus
  unsure (372): unsure at all n locations; Clone ID: 23-BOVMS1-003-Q1-E1-F3
tagccttcatgcgaactcaaagctcctccatagtgtcacctaaattcaattcactggccgtcgttttacaacgtcgtgactgggaaaaccctggcgttacccaacttaatcgccttgcagcacatccccctttcgccagctggcgtaatagcgaagaggcccgcaccgatcgcccttcccaacagttgcgcagcctgaatggcgaatgggacgcgccctgtagcggcgcattaagcgcggcgggtgtggtggttacgcgcagcgtgaccgctacacttgccagcgccctagcgcccgctcctttcgctttcttcccttcctttctcgccacgttcgccggctttccccgtcaagctctaaatcgggggctcnctttagggttccgatttagtgctttacggcacctcgacccc

SEQ ID NO: 5205 - DNA, 414 bp, Bos taurus
  Clone ID: 23-BOVMS1-004-Q1-E1-F3
gtccgagaaaacatccgctcccgaaggtgaacaaggcggggctgaataaatgccgggttaacaaccccaacaacaaccgggttaatcaaccaacaagaagaaatggatatgaaaatccaacaattaggaaatgaccaaaagattggagctgaagaccttaagtgcttgctttttgcctgttgacaagataactagaactatctgcattatctatgcagcatggggtttttattatttttacctaaagacgtctctttttggtaatgacaaacgtgttttttaaaaaaaaaaaaaaaacctgttttttctcaatacacctttaaaggtttttaaattgtttcatatctggtcaagttgagaattttaagaaactcatttttaaatttgaaaaaaagtttaaagcctgaatttttc

SEQ ID NO: 5206 - DNA, 411 bp, Bos taurus
  Clone ID: 23-BOVMS1-005-Q1-E1-F11
atgcgacgtcatagctcttctatagtgtcagctaaattcagattcactggccgtcgttttacaacgtcgtgactgggaaaaccctggcgttacccaacttaaccgccttgcagcacatccccctttcgccagctggcgtattagcgaataggcccgcaccgatggcccctctcaacagttgcccagcccgaatggtgaatgggacgcgccctgtcacggcgcattaagcgcggcgggtgtggtagttacgcgcaacgtgacagctacacttgacagcgacctatcgcacgctcctttcgctttcttctcttcctttctcgctacgttcgacggaatttcccctccaactccaaatccggggtaccccttaaggtttcgatttaatgctttaccggaactttaacccaaaaa

SEQ ID NO: 5207 - DNA, 316 bp, Bos taurus
  Clone ID: 23-BOVMS1-006-Q1-E1-F3
aatgcgacgtcatagctcttcaaaagtgtcacctaaattcaattcactggccgtcgttttaaaacgtcgtgactgggaaaaccctggcgttacccaacttaatcgccttgaagaaaatccccctttcgcaagctggcgtaataccgaagaggcccgcaccgattcccccttccaaaaagttgccacccctaaatggggaatgggaacccccctgttacggggcaataaacccggggggttttggggttaaccccaactttaccggtaaaatttgcaaggccctaacccccggccctttccctttcttcccttcctt

SEQ ID NO: 5208 - DNA, 429 bp, Bos taurus
  Clone ID: 23-BOVMS1-007-Q1-E1-F11
gtccgcttaattattattctactaaccattatactatgaactattattgtcataatcagttctcactgactacttgtctgaatcgggtttgaaataaatatactcgccatcatccccatcataatagaaaatcacaacccacgagctacagaagcatcaactaaatattttttgactcaatcaacagcctcaatactactaataatagccgtcatcattaacctaatattctcaggccaatgaaccgtaataaaactatttaacccaataacctcaatacttataacgatagccctagctataaaactaggaatagccccatttcacttctgagtcccagaagtaacacagggcaatcccctatcctcaggccttatcctaatgagatgacaaaaactagcaactatatctgttacttaccaaatcttc

SEQ ID NO: 5209 - DNA, 444 bp, Bos taurus
  Clone ID: 23-BOVMS1-007-Q1-E1-F3
ggcacttatgaagactttgttgagggtctgcgtgtcttcgacaaggaaggcaatggcaccgtcatgggtgctgaacttcgtcatgttctagccatactaggtgaaaagatgaaagaagaagaagtggaagcgctgatggcaggtcaggaagactccaatggctgcatcaactatgaagcttttgtcaagcacatcatgtctaactaaatggagctctcaagatcaagcattgtttatgaagactggctgaaccttattttaagaacacccatgactaactgtccaaatctgtttaccatcatttagaaaaacaaaacaatttgtactattctaaactgaaggactccctgaatttttatacattttatgtttctctctgaattatattcataccacacaaactaagtgtctgctgatccagacaagaatggtgaaatactgaca

SEQ ID NO: 5210 - DNA, 465 bp, Bos taurus
  Clone ID: 23-BOVMS1-008-Q1-E1-F3
atttagaagcaacactagtcccaacactcattattattacccgatgaggaaaccaaacagaacgcctaaacgccggactctatttcctattctatacactagctggctccctacccctattagtcgcactaatttatatccaaaacacagtaggatccctaaatttcctaatattacagtactgagtacaacctgttcataactcttgatctaatgtcttcatatgactagcatgtataatagctttcatagtaaaaataccactatatggcctccacctttgactacctaaagctcacgtagaagcccccatcgcaggctccatagtccttgcagcagttctactaaaactaggggggtacggtatgctacgaatcacactaattctaaaccctatgaccgactttatagcatacccattcattatactctccctatgaggcataattataaccagctcaatct

SEQ ID NO: 5211 - DNA, 475 bp, Bos taurus
  unsure (7),(423): unsure at all n locations; Clone ID: 23-BOVMS1-009-Q1-E1-F11
cgggtcngtccacgcgtccggccaaagcaacccttaaccgattcttcgctttccattttatccttccatttatcatcatagcaattgccatagtccacctactattcctccacgaaacaggctccaacaacccaacaggaatttcctcagacgtagacaaaatcccattccacccctactataccattaaggacatcttaggggccctcttactaattctagctctaatactactagtactattcgcacccgacctcctcggagacccagataactacaccccagccaatccactcaacacaccccctcacatcaaacccgagtgatacttcttatttgcatacgcaatcttacgatcaatccccaacaaactaggaggagtactagccctagccttctctatcctaattcttgctctaatcnccctactacacacctccaaacaacgaagcataatattccgaccactcagcca

SEQ ID NO: 5212 - DNA, 351 bp, Bos taurus
  unsure (11)...(12),(129),(236): unsure at all n locations; Clone ID: 23-BOVMS1-009-Q1-E1-F3
aaaaaccacannaaacaaaaaaaaagactgtcattcataccattcacacctaaagactgaattttatctgttttgaaaatgaactactcctgctacacagaagtaacaatatggtagtcagttttgtanttagaaatgtattggtagcaaggatgttttcataattttcagagattatgcattcttcatgaatacttttgtattgctgcttgcaaatatgcatttccaaacttganatataggtgtgaacagtgtgtaccagtttaaagctttcccttcatttgtgttttttaattaaggatttagatgttccccctattacaaactgggtttaaatattgggcataatat

SEQ ID NO: 5213 - DNA, 436 bp, Bos taurus
  Clone ID: 23-BOVMS1-010-Q1-E1-F3
tactatattccctcaaaacctgtgtttccaaggaaacctaaaaaaaggcaaaaaaatttgctgcaacctgttgataccaagtggatttttccctaattcagaaacatctgttactctgaagggcttcatgcatcttattgaaggtaaaattgaaaggccttctccacatatacggtttagatgaaaaacatcctggtacaccaaaatcatcatgactagaatgagagtcctttacgaaaggtgagacatttagcagcatgtagtagatgctatgcatagtcagggcccaaattgttacaggtggttggatagatcacatggttattcatatttgttctctctgctttaaatatagcctcaagtttgccagtggcttgcctgtgaaatagtgcaaagctgtcctgtatctgggcataagataaaagttatgtgtgtt

SEQ ID NO: 5214 - DNA, 382 bp, Bos taurus
  unsure (375): unsure at all n locations; Clone ID: 23-BOVMS1-011-Q1-E1-F11
aaaaaccataggaataaaattattgaatttcaacaaaggatcgagagcttgaggcttaaataagccaacatatgaatatatgtttttgtcttgctgtactgcacatatgctatccagtaacaggtaatattttgtctgctagtagtgttctagattataatgtctttccaaagtgctgaggcagtgcacctattttgtagttgcagctgatgcctgaatgtatcctagctgacaaattattgattaataagaactttctgaaatttctgaaagattcatactattaaccaaaatctgagcagagagtctcaagtgtaattctaaccagaattacatgttaatgaacttgtgtaactttttaacaatgtaaatganagaacat

SEQ ID NO: 5215 - DNA, 446 bp, Bos taurus
  Clone ID: 23-BOVMS1-012-Q1-E1-F3
gtcaagaaggtgctgggaaaccccagcaatgaagagatgaatgccaagaaaattgagtttgaacaatttctgcccatgttgcaagctatttccaacaacaaggaccagggcacttatgaagactttgttgagggtctgcgtgtcttcgacaaggaaggcaatggcaccgtcatgggtgctgaacttcgtcatgttctagccacactaggtgaaaagatgaaagaagaagaagtggaagcgctgatggcaggtcaggaagactccaatggctgcatcaactatgaagcttttgtcaagcacatcatgtctaactaaatggagctctcaagatcaagcattgtttatgaagactggctgaaccttattttaagaacacccatgactaactgtccaaatctgtttaccatcatttagaaaaacaaaacaatttgtactattctaaactg

SEQ ID NO: 5216 - DNA, 466 bp, Bos taurus
  Clone ID: 23-BOVMS1-014-Q1-E1-F3
cccggcgtcccttccactcactgatgagccttgttcatgtacctgactgcctgcgactttcctcaggcatgaaacatgtgcatatagcacggataagaccgcgtcagtatgtcgaaacagccagtttccaatgtcagagccatccatgcaaatatcaatatcccaatgggagcctttcggccaggagctgggcaaccccctagaagaaaagaatgtactccggagatagaggagggtgctcctcccacttcggacgatgagaagaagccaattccaggagctaagaaacttccaggacctgcagtcaacctatcggagattcagaacattaaaagtgaactgaagtatgtccccaaagctgaacagttgttggaagaaaaaacgcttgatgtgaagaattgaacagttagagaatggattcaaacaaaaatggctcactaaaaagttttatatatgtgtatgaaga

SEQ ID NO: 5217 - DNA, 416 bp, Bos taurus
  Clone ID: 23-BOVMS1-015-Q1-E1-F11
cggacgcgtgggaaagaaacaagggaagaacgaatcattacaggtcctgaaataaaatacactaggatttcaactacaggtggagaaacagaagaaactctgaagaaattgttgcaagaagaggtcaccaaggtcaccaaattcattgaaggtggtgatggtcatttatttgaagatgaagaaattaaaagactgcttcagggagacacacctgtgagaaagatacaagccaacaaaagagttcaagcatctagaagacgatccagggaagatcgtcctcaatgaaaatccagacaccagacctcaaagtttatacaaccctaaaccaacaacctggtcttacaggaaaaatatgaaagccactttgaagtgaagaatgagtcaagacaaaagagcaattgttgaacaattctgaa

SEQ ID NO: 5218 - DNA, 448 bp, Bos taurus
  unsure (341): unsure at all n locations; Clone ID: 23-BOVMS1-016-Q1-E1-F11
ccaactcctgcacacccagaacaccagcctgatcaacaccaagaagaagctagagacagacatcacgcaaatccagggagagatggaggacattctccaggaagctcgcaacgcagaagagaaagccaagaaggccatcactgatgcagccatgatggctgaggagctgaagaaggagcaggacaccagcgcccacctggagcggatgaagaagaacatggagcagacggtgaaggacctgcagaaccgtctggatgaggctgagcagctggccctgaagggcgggaagaagcaaatccagaaactggaggccagggtgcgtgagctggaaggagaggtanagagttagcagaagcgcaatgtggaagctgtcaaaggtctgcgcaaacacgagaggagagtgaaggaactcacttaccagacggaagaagatcggaaaaatattctc

SEQ ID NO: 5219 - DNA, 417 bp, Bos taurus
  Clone ID: 23-BOVMS1-016-Q1-E1-F3
gccgaacgccggcgccctcgccgcaaaactcgctgcccaaacctaacaactaacctacgaaaagccttggactcctcctgggacgggccggtgacccccgtgaaagatttatcgagcggcagcatgccaagaacaagtattactactaccaccgtgagttccgccgcgtgccagacatcacagagtgccaggagaaagacgtcttgtgcatgtttgaagcagacatgcagtggagaagagattacaaagttgatcaagaaatcgtcaacattatccaggaaaggctcaaggcctgtcagcagatggaacgtgagagccacaggcagaactgtgccaaggagctggagcagttcacccaggtggtcataggcctacaaggacgctatcacgacctgggagcccattaatctgccagga

SEQ ID NO: 5220 - DNA, 415 bp, Bos taurus
  Clone ID: 23-BOVMS1-019-Q1-E1-F11
ggtgggggctccagcgtgtggtgatgtcatgaaattacaggtggaggaagccttgaccatcaaaaacacagacatcgccaaggagctgtgcctcccgcctgtgaaactgcactgctccatgctggctgaagacgccatcaaggccgccctggctgattacaaactgaaacaagaacccaaaacaggagaggccgagaagaaatgaacgcctggtgatggatgcctcaaagggcccacaggctgccagcgtccccagccacgcggtcacatgggtgttcagaagccctcgcactacaataaaagcgctctgagatcacacaacctttgctgctcacgttgcgaatctaactcaagcaaaatacacagcctagttgttctgaaccctgaggtttcctgcagctcactttcatcgcct

SEQ ID NO: 5221 - DNA, 428 bp, Bos taurus
  Clone ID: 23-BOVMS1-020-Q1-E1-F3
cgagacgtgaactacggctgaatcatccgatacatacacgcaaacggagcttcaatgttttttatctgcttatatatgcacgtaggacgaggcttatattacgggtcttacacttttctagaaacatgaaatattggagtaatccttctgctcacagtaatagccacagcatttataggatacgtcctaccatgaggacaaatatcattctgaggagcaacagtcatcaccaacctcttatcagcaatcccatacatcggcacaaatttagtcgaatgaatctgaggcggattctcagtagacaaagcaacccttacccgattcttcgctttccattttatccttccatttatcatcatagcaattgccatagtccacctactattcctccacgaaacaagctccaacaacccaacaggaatttcctc

SEQ ID NO: 5222 - DNA, 291 bp, Bos taurus
  Clone ID: 23-BOVMS1-021-Q1-E1-F11
atgcgacgtcatagctcttctatagtgtcacctaaattcaattcactggccgtcgttttacaacgtcgtgactgggaaaaccctggcgttacccaacttaatcgccttgcagcacatccccctttcgccagctggcgtaatagcgaagaggcccgcaccgatcgcccttcccaacagttgcgcagcctgaatggcgaatgggacgcgccctgtagcggcgcattaagcgcggcgggtgtggtggttacgcgcagcgtgaccgctacacttgccagcgccctagcgcccgct

SEQ ID NO: 5223 - DNA, 448 bp, Bos taurus
  Clone ID: 23-BOVMS1-021-Q1-E1-F3
tttctttggctgtcaacgtccacttacaatctcccatggaaatcatactggtggagacataactcgattttctcctggaatgtcaatcctgtacagctgcaaccaaggctatctgcttgtgggagaggcactccttctttgcacacatgaaggaacctggaaccaacctgctccatattgtaaagaggtgaactgtagcttcccagaacatataaatggaatccagaatgggctggagcctggaagaatgtatcaatatggagctgttgtcactttaatgtgtgaagacgggtataccctagaaggcagtccccagagccagtgtcaggaagatcaccgatggaaccctcccttggctgtttgcaaatcacccagttcacttgctcctcttattgctggtttttctgctggggtaatagctcttttctgcttgggtgctgtcgcctta

SEQ ID NO: 5224 - DNA, 445 bp, Bos taurus
  Clone ID: 23-BOVMS1-023-Q1-E1-F3
cgtccggtatatttatcatgtgcactgctgaagatgtgtatccctaatccatcataaagaatcagctagagttgtcatgataaagtcaacacacacaaaaagacttcctatacatacttgtctttaacagtgtgtagagctttttttttttaaacaaaacaaaacacacttttgaccatcttaaatcaagaaaaattgcatacttctgttctggtctttctgggccaggtttttctattggttttcggtaaatgtctatctatgatatttcattatagagtccagtagcttaatactgatactgacttgatacagcatgacgtttctagtgccacacacagtatttagcaaacctttagcctgactcctgtgggatagaaacatgatgtttatatatctcacaaatgcatgtgaaatgtataattacaccttaagaatttaaaaa

SEQ ID NO: 5225 - DNA, 453 bp, Bos taurus
  unsure (398),(421),(445): unsure at all n locations; Clone ID: 23-LIB188-001-Q1-E1-F3
atggccgcgcgatactggatgaagctgatgaaatgttaagccgtggattcaaggaccagatctatgacatattccagaagctcaacagcaacacccaggtggttttgctgtcagctacaatgccttctgatgtgcttgaggtgaccaagaagttcatgagggacccaattagaattcttgtcaagaaggaagagttgacgctggagggtatccgtcagttctacatcaatgtggaacgagaggagtggaagctggacacactgtgcgacttgtatgaaaccctgaccattacccaggcagtcatcttcatcaacacccgaaggaaggtggattggctcaccgagaagatgcatgcccgagacttcaccgtctctgccatgcacggagacatggaccanaaagaacgagacgttatcatganggagttccgctctggctctagcanagtattga

SEQ ID NO: 5226 - DNA, 421 bp, Bos taurus
  Clone ID: 23-LIB188-002-Q1-E1-F3
acccgattaccaccccccaatcatgggccccaggattatccaccttcctctgctgcaagagacttaccgccctccggctccagagatgagcccccgcctgcctctcagggcgctagccaggactactcaccggctttaaaacagagcccataactgaccttggacattcagtctgagagaaagtagactgtgcactattcgttacagttaaggttttcattggcttcagaatccaaaagctgattttaaaaggtttgtttttaaatctaagctgccctggcagtgtgcatttttgagccaaacaattaaaaaaatatcatttcgcccctaaaatataaaaccatcttgtaagctggagcctccttacaactttgaaatgtgcaataaaaaaatacctgtgttttagttcatgtagcatatg

SEQ ID NO: 5227 - DNA, 434 bp, Bos taurus
  unsure (208): unsure at all n locations; Clone ID: 23-LIB188-003-Q1-E1-F11
gccatggcggcgggatactcctggttggaggtcaaggccacgatgcggtccaggtcttccaccagctgcttgaaggtgggtctctgagaggggaccgcgtgccagcaatctctcatcatcatgtagagctcgttggtgcagttactgggcttgtccatacgatgaccctccttcagcagcttgaaaagctcctccacggggaccccanggtatggggagccgcccagagtgaagatttcccagaggagcaccccaaaagaccacacgtcgctctggtgggtgtagattcggtcaaacaaagcctcccggtgccatcattttgacggcagtcggccgttggttgtctttttatagtagtcgatgtggtggatgtctcgagcaagaccgaagtccgcgatcttcatcacgttgtcctccgttcacaggacgttcct

SEQ ID NO: 5228 - DNA, 411 bp, Bos taurus
  Clone ID: 23-LIB188-003-Q1-E1-F3
gccgccggatcaccataaccttcccaatggccccaccagcataagcccccatggctgggtctgtgcccacaaagggttggcctgttttgactgagataccctgtggatttagtccaacaaatgcatttgcctgatttcaaggctgaatttctgcttgacccaagtgtcaggcataactgggtggcctcagctgactggcggtggacacgctgcacgatgggccgaaagtgcattactacagatgaccacggttgaagacacctatttcccaggacccatggctatgtgaccacactggccgtaaatgactgattgttgaggatgactactctttagcatacctattgtgtgtctgtacaagctgtttgatgattaatacaatggctacctcctgttttggcagatgcttga

SEQ ID NO: 5229 - DNA, 390 bp, Bos taurus
  Clone ID: 23-LIB188-004-Q1-E1-F3
gaaaacttggcaaaagccacggttcggaaaggggaacaatcctgatttggcccgttgaaaagcccaacaacaagttaacaatgaaagggtcctcaatcaccccggggcgatgagacaacatgaagccccaaccgttgtgctggggcaactttgaagcctggaagggacccggtaaaaaaccaaaccgggttcactttaagcaggaggcatttgcacgatttttcgctcacggccttggggatccgcttggggttggtcaccgtgaggtcatcccccatcaactggatccctgcgctggcaatgaacttctgccaagcttcccagtcatcctggtcgaaggggtcctcgatagacaacactgggtagtccctgattaacgacttgtatcac

SEQ ID NO: 5230 - DNA, 400 bp, Bos taurus
  Clone ID: 23-LIB188-005-Q1-E1-F11
tcccgagcgctatgggcgcgggatactttgcgaaaggattccagatgctgggccccttcaccatcatgatccagaagatgatttttggcgatctgatgagattctgctggctgatggccgtggtcatcctgggctttgcctcggccttctttatcatcttccagacagaggaccccaatgagctgggccatttctacagttaccccatggcactgttcagcacctttgagctgttcctcaccatcatcgacggcccccccaactacgacgtggatctgcccttcatgtacttcatgccagacacaatctctcggttcacccggaaggagatttttatccgatattccacaccctccttcagcacaaaggactgcttcttgaagctctccagatcacctgt

SEQ ID NO: 5231 - DNA, 372 bp, Bos taurus
  Clone ID: 23-LIB188-007-Q1-E1-F3
gccaagggcgcgggatcaccgatttaaaaaatgttttaatggggaaaatttgggggagaaccgtgggtagggcctggttcctttgcttctcggggaactacagggccttgtccggaggaccgctctctgctccactttcctgaaagttgcctaagcctgtcaacgccgtcaaagccctgcgcccggatatgacacgtggctccagtcacgtctgggcgcggttgcgttttctcgggaccttgcttgcaggggagggagtggtcaggcctcgcgccgagtccaccctttctgtacaaaaaccatggatgctcaagtctcttatataaaaatggtgtagtaattgcataaaacctaggtttatcctcccatata

SEQ ID NO: 5232 - DNA, 379 bp, Bos taurus
  Clone ID: 23-LIB188-008-Q1-E1-F3
gccgcgggatacctgcacggaagatagctattgacagaggctatgacatcgcccagagatctcgacacctggacgtcatcagccttttgacctatgactttcacggaacctgacgccagacagtccgacaccacagccccctgtttcgaggccaggaagaatccagttctgacagattcagtaacgctgactacgctgtgagctacatgctgaggctgggggctccagccaataagctggtgactggtagccccacatttgggaggagctacactctggccacttccaagacagatgtgggagcccccatctcaaggccaggaattccaggccagttcaccatggagaaacggatccttgcctattatgagatctgtga

SEQ ID NO: 5233 - DNA, 415 bp, Bos taurus
  Clone ID: 23-LIB188-009-Q1-E1-F11
tggcggcgggaacttgtcctcagacacagtctgccggtttctctgccactccacggctacatcttctgggtagaagccggtgaccatgcaggtgacgctgagcgtgcttttgctgagctcttccttgggtgggtccaggacatacacctgcggctcccgggccggccctttgctcctggagatgatcctcacgatgggggccgagaggcctttgttgttgaccttgcacttgaactcctttcctccagtccagtcctggtgctggatgggcacggcgctgaccacgcggtactgtcaggtcatccgtgtcattgcccacacccagatgcgcctgcttcctctgcgccagaagaaggcccacctcatggaggtccaggtgaacggaggcactgtggccgagaaactggactgggcc

SEQ ID NO: 5234 - DNA, 261 bp, Bos taurus
  Clone ID: 23-LIB188-009-Q1-E1-F3
acatacggcacctgctgctgcaacacagtccgaacagccccattgccctggtcatcactgatgggcgctcagacacccacacggacaccaacccactcaccctgctctgacgccctgacatccaggtgggctccgtcggcatcgacgatgtctttggattcgccgctggctccgcccagctcatcatgaacgcctgtttgagacagtcaacccagggatgggagattatcgcactggtcatggcaaactacgccgggcttc

SEQ ID NO: 5235 - DNA, 270 bp, Bos taurus
  Clone ID: 23-LIB188-010-Q1-E1-F3
acttctccttagagttgggcacacacttgtccaggccctggtcatcgccagcacacaaggcacagagtctggatttcgggtcagccccaggggcacagctctgactaaagaattcatcaaatgcgcaggagcctgtctggttgacgatcaggcccatggggatgttccagcctgcagtcctgtccacggcggtgtggcacgacttcttgtctttcagagaattccatgtgagcccctcatttgctttcttgacaactgccacggcaaggt

SEQ ID NO: 5236 - DNA, 390 bp, Bos taurus
  Clone ID: 23-LIB188-011-Q1-E1-F11
catgcgccggacgccatggacgccggatactctgagcagggcagtgtcatgaagctgccgaggctggaaggggctttcctgctgtcctgggccggtaaactgttttgggagttgcggctgctctgagttaccccatcactttccaattgacattggaatcattgggggtaaaatcaatccccaagcacacgacaataaacattcccggcctcagctgctcatcaaatggtttgataaggaagacggatggctcagcatcagaaccttttgatctctaccgtggctccttggccgaaagtactcatgtgtgtctgttgttttctataaattaacacgataacagttcacctgcatctttctctttaaagaagctgtggattcagtctccgt

SEQ ID NO: 5237 - DNA, 277 bp, Bos taurus
  Clone ID: 23-LIB188-012-Q1-E1-F3
acagttccagctcatgtggagacagtggttttatttttcccggatgtttggcattgccttctcacccgctcacagtgggaaaccctctctcgaggatacaagcagcatctggtcgagaaacttcatggtgaacgcaaggaggctgatggacaacaggatgaataatataacgatgatggtgaagctaaagaaatttccactcctagccattggtctaaacttgacccagatactatgaatgtaaatgatctccgaacagaattataacatcgaactc

SEQ ID NO: 5238 - DNA, 405 bp, Bos taurus
  Clone ID: 23-LIB188-013-Q1-E1-F3
acatcgccctggacgagtgggccggctgcttcggcatcaaggagaaggacatcgacaaggacctcgtgatctaaagccatgcctcctcctgcagaaccagattctctctctttgaccttccccctcctgttttccccaatgtttaaaatgtttggatggtttgttgttctgcctggggtcaaggtgctaatatagacttaaacgaatacattaacggtgctaaacacagacattttaacccaagtcacgacattcttagctgtaactcagctctcacggcctcttgctcacccatgaatggtcccgttttcctcttgccgcgtgcacctccacccattgtcttggtggcacatgggtggaacacttgatctgctcgagtctgccttcaacacacattgcatcttc

SEQ ID NO: 5239 - DNA, 309 bp, Bos taurus
  Clone ID: 23-LIB188-015-Q1-E1-F11
atgctgccgaacgccatggaggccggatacgtctcatagacaattggaatgctgaaaacgagtagttcagcaagaatcaaaagggtgatcccattgaaaacggcaccaacataggtcatcagccacatgaagacagcaagctttaaggagtcaactagatcctccaccagaaagagacgaatgatgagtttcagggccctgttgatgtgcaccatggcagcgttcacataattatggaaagcttctgaggacagagtgatgtcgacatccaggtaggctttgaatggatggccttcttctgatttctgt

SEQ ID NO: 5240 - DNA, 401 bp, Bos taurus
  Clone ID: 23-LIB188-015-Q1-E1-F3
gccaaggccgcgggatacgagagctggagctgctctatgcccgggcccagctggagctggaagtgagcaaggcccagcagctggctgaggtggaggtgaagaagttcaagcagatgacagaggccctggggcccagcaccatcagagacatggctgtggcagggccggagatgcaggtaaaattgctgcagagcctgggcctaaaatccaccctcatcaccgatggttccacgcccatcaacctcttcaacacagccttgggtttgctggggctcggggctgaggcccagcccccagccaagaagcccaccgggggacccagcgtccaagagggcttgcttcgcatctccactgctgcccccctaactcttggaaacaaccaggttgtgccttagctctgt

SEQ ID NO: 5241 - DNA, 410 bp, Bos taurus
  Clone ID: 23-LIB188-016-Q1-E1-F3
gcgggatacaggaggctagtccgccgtcgatgcctgggggcaaaggaccctgggcaacgtcccctcaaccttcaacaaaacccccaaagtccaacctccgaattcctgccgcgggaaaatcaactcaacgttacctggctgctggggtcaactaaagcccaccggttacggttactggaactcggggtgcctgaaaaacggcgtgcacaccttcccggctgtccttcagtcctccgggctccaccctctcagcagcatggtgaccgtgcccggcagcagctcatgacagaccttcacctgcaacgtagcccacccggccagcagcaccaatgtggacaaggctgttgatcccagatgcaaaacaacctgtgactgttgtcaccgcctgagctccctggaggaccctctgt

SEQ ID NO: 5242 - DNA, 258 bp, Bos taurus
  Clone ID: 23-LIB188-017-Q1-E1-F11
acgacactaaataagtattttgcacaatggaaatttgttgatgatcaattccattggatgccaatacaaccaatttccttaaggatttggtttggcttcttttcggaaggtggcaatctccattgtcatttaacccgggggttccatccttcaagctaaggacttctttcttagaatttgttgaggtcaccggaatcccagacaggctgttgactactcaggggctcctatggaggcatctggtggcctcaggccccc

SEQ ID NO: 5243 - DNA, 354 bp, Bos taurus
  Clone ID: 23-LIB188-017-Q1-E1-F3
aagctttatttttttttttttttgttttttttttttggttttttttatttttcttcaacttagcattgtggctttatctgagattagcggtcttgcgattcaagttctcccggatatgcccaggcgcaggcaccttttggccttcatgtggctctagcagaagggaacgagaacgggtcatgcaagctcaaggctccgagctggcactctagccgacatcacagcagatctcgacacgggcctcaagctcatctcaggagcaagtggtgtgccaccaccagctgcatgcaaaagcaacgttcacgccacactgcgcctgcctcttccggccgtagtgcctcactgcattctctg

SEQ ID NO: 5244 - DNA, 389 bp, Bos taurus
  unsure (230): unsure at all n locations; Clone ID: 23-LIB188-018-Q1-E1-F3
caaaccaccaaattaccgaaattaaagaatgaaaacttaaaaaaccgaaaaaaccttaaaaaacggattcccaaccaacaacaaatttaccaaaatcagccctggggcatttgccccttgggtaaaattggaacgactttacctttcaaaaaatcaactgaaagaattgccagagaaaaatgcccaaaaactcttcaagagctgcgtgtccatgagaacgagattcacanagtgcgaaagtctgtgttcaatggattgaaccagatgatcgtcgtagaacttggcaccaacccgctgaagagctcaagcattgaaaatggagcctttcaggggaatgaagaagctctcctacatccgcattgctgacacaaatataactaccatccctc

SEQ ID NO: 5245 - DNA, 433 bp, Bos taurus
  unsure (402): unsure at all n locations; Clone ID: 23-LIB188-019-Q1-E1-F11
ggccgcgggacactatggctataccaggggctttcaggtgcctggctgaggacgttggggacgttgcctttgtgaaaaacgacacagtctgggagaacacgaatggagagagcactgcagactgggctaagaacttgaatcgtgaggacttcaggttgctctgcctcgatggcaccaggaagcctgtgacggaggctcagagctgccacctggcggtggccccgaatcacgctgtggtctctcggagcgatagggcagcacacgtgaaacaggtgctgctccaccagcaggctctgtttgggaaaaatggaaaaaactgcccggacaagttttgtttgttcaaatctgaaaccaaaaaccttctgttcaatgacaacactgagtgtctggccaaacttgganggcagacaacgtatgaagaatatttggggac

SEQ ID NO: 5246 - DNA, 390 bp, Bos taurus
  Clone ID: 23-LIB188-019-Q1-E1-F3
gccaaggccgcgggatactgggggactcccatgaggtcgtaagtggccccatccagacccatgatcagatattctttcccaggttccaactgaaggcggcaagaggctcggaccaggaagtttctggtctgatcagcggtggccctggcatccttggtgaaatgcaggacttgggtgatacgggtctcaaagaggcggaaagcagccctgctgtcttctcggagaaccttaacctggaagccgtagtccactcggggagagtagcaggcgaatttcatccggtaaccctccaagtcctgctgcccacgctccagggcccggcgctgtcgagggcacttcccctcagcacactggcagacatccgcagagcacaacgtggacaagagtttg

SEQ ID NO: 5247 - DNA, 383 bp, Bos taurus
  unsure (11): unsure at all n locations; Clone ID: 23-LIB188-020-Q1-E1-F3
cttctccaaanaattgggcacacacttgtccaggccctggtcatcgccagcacacagggcacagagtctggatttcgggtcagccccaggggcacagctctgactaaagaattcatcaaatgcgcaggagcctgtctggttgacgatcaggcccatggggatgttccagcctgcagtcctgtccacggcggtgtggcacgacttcttgtctttcagagaattccatgtgagcccctcatttgctttcttgacaactgccacggcaaggtaaaaaaccccccccttttttccaacaattgcaatttccaaggtcaaccgttttccccgtgagcaaaaaaaatctgggtctcaccccacaacaccagggtctcctgaacaccctg

SEQ ID NO: 5248 - DNA, 393 bp, Bos taurus
  unsure (370): unsure at all n locations; Clone ID: 23-LIB188-021-Q1-E1-F11
tggccgcgggatacagtggcttccagctctgtcaggcgcttctcgagttctgccactttggcagcttgagagaacttgtcctgctcaggccgagaatgcagttcataagtgaccaagctgctatctgggggggttccactggtggtcttgccccctgaaccagtccctttgctgttctttgttgcttccagctgcagcagtaggcgcttagccagagctccatcggggtcagtaaggttgattgccgcatctggtcccagcagcttctccagatgggaagcaaccagctgctgcttcagggcggccagctgtttagccagcaccacgggggtcagcttctcctcagtggctgattccttcactgtcgtcntgattttttcaacttcagttgtc

SEQ ID NO: 5249 - DNA, 409 bp, Bos taurus
  Clone ID: 23-LIB188-022-Q1-E1-F3
agacatgaacaaaaatttctagatttggggagaaacaaatgctgctccgatcatctgctctgcttcttccgttccttgagtcatgcttagaaaacctgtgggggtttgggcctgctgaacctgcccacttgaagaggctgcctgctgtgctgctttctgctttaacattgtccaatcaaatgtgtagtcatattggtgattcaaggtcctgaaaagaatgcggaatagctgcctcaggtactctgtttccctgaatgtcgttctctatactggattgacatgttccccatgggtcatcagtgtggctttcttcttcagcattgtaggttgagcgagtgccaccgcagagcggagactccgtcccacggctggcactcctggacacgcagtcactgtatcgggagcaatc

SEQ ID NO: 5250 - DNA, 443 bp, Bos taurus
  Clone ID: 23-LIB188-023-Q1-E1-F3
catggcagcgcgatacgggtcttctaccagcaaccaaattaggtagcctgtttatcttgagctgacttcctgctccagggctggcttcctaatccagtcatattgctgaagtgtggctgaggtgagcccaggcctctctccgcgggtgagggttgctcctcacttaggttgtggggagaaccccccccacagtaaatggaagcagttgcctgcctgcctctggagtcccttttgcaacactcctttctttccctgggctgaagccaggacctggtggtgttccttacaggatagtcagtgacgatgccgggcacagctttccggagtgaaggccattgggcccgagcaccctttcacttggctccccccaccctctctaggaatcacattatgactgaatgctaagggtgggggctggagatgaggtccagattgtcctttac

SEQ ID NO: 5251 - DNA, 414 bp, Bos taurus
  Clone ID: 23-LIB188-024-Q1-E1-F11
ccaaggccgccggatacacaaaccttacataaattaaaaggatgaataaatttacaggtgtgaatgcaaactgtttccaactcaaggcaagtaaccagaacagtgctctggtgggaaatcttcagtaagaaaggaaagcaggtcctacggcttggagcttcccaaccccgtgtaagaccggccaagacagaaatgacaactgtttcaatgactcttgccagcctctagagaaatcctggaatatgcagctctgacacattaataccctgcacatactgagagactcagtctcccagattcttatcaagccattggatttctcttccataaacattctcacctcagctcgaggtgatagagccgcatataactatgggtttaaatcatagatatgcacagggtattaaacatata

SEQ ID NO: 5252 - DNA, 174 bp, Bos taurus
  Clone ID: 23-LIB188-024-Q1-E1-F3
gctacctgttaaagggctgttgaccgcctgcgacaaggcagaaattacatcctccacagggaatggacttttcctggataccaatcatccaagcacataacaagcgtccttggaagctgaagactgatgaagacttcttggaaaggctgtgttccgtttttaacccaatgattt

SEQ ID NO: 5253 - DNA, 434 bp, Bos taurus
  Clone ID: 23-LIB188-025-Q1-E1-F11
gggcccgggctacgtgaaaaaagaaattaaaaatgccctcaaggaggtgaaacagataaagacccaaatagaacaaaccaatgaagagcgcaaattactgctcagctccctagaggaagccaagaagaagaaagaggacgccctgaatgacaccagggattctgaaaacaagctgaaggcgtcccagggggtgtgcaatgagaccatgacagccctttgggaggaatgtaagccctgcctcaagcagacctgcatgaagttctacgcgcgagtgtgcagaagcggatcgggactggttggccaccagcttgaggagttcctaaaccagagctcccccttctacttctggatcaacggtgaccgcatcgattccctgatggagaatgaccgggagcagagccacgtgatggacgtcatggaggacagcttcaccc

SEQ ID NO: 5254 - DNA, 362 bp, Bos taurus
  Clone ID: 23-LIB188-025-Q1-E1-F3
attttggtaaaaattccaataaaggtttaaggtggggttttttttttttttttaagaggagattaccctttaaatcagaagactttgattaaagcagattaccctcaaaattgtgggtgggcctcatcaaataggttgaaggactgaacagaccacgcttgcaaccccatggccctgaattctcaaggcaagaatactggagcctttcaccttggatcatcccaatcaagggatcgaacccagatctcccagatctatattgcaggtagattccttaccagctgagccacaaaggaagtccaagaatactggagtgggtagtctatcgcttctccagcagagcttcccaacccaggaatcga

SEQ ID NO: 5255 - DNA, 423 bp, Bos taurus
  Clone ID: 23-LIB188-026-Q1-E1-F3
tggccgcggcataccgcgaggtcagcgccctgcccatccagcaccaggactggactggaggaaaggagttcaagtgcaaggtcaacaacaaaggcctctcggcccccatcgtgaggatcatctccaggagcaaagggccggcccgggagccgcaggtgtatgtcctggacccacccaaggaagagctcagcaaaagcacgctcagcgtcacctgcatggtcaccggcttctacccagaagatgtaaccgtggagtggcagagaaaccggcagactgagtcggaggacaagtaccccccaggggggtacgtggaagtgagtctacaggccactgaagaataggactgtttggtgaccaaaataaatggggaaatcgtggtgtgaaaagaagcttcagtttggtgaattattttgcaccagtaat

SEQ ID NO: 5256 - DNA, 396 bp, Bos taurus
  Clone ID: 23-LIB188-028-Q1-E1-F11
acttgctattgctctgtttggaggcccgggtggtctccacgttgcgggtgatggtgctgccgtctgccttccagaccacggtcacgctacccgggtagaagtcgctgatgagacacaccagggtggccttgttgccgttgagctcctccgtggagggcgggaacagggtgaccgagggtggggacttgggctgacccaggacggtcagtgtagtcccgcggccgaaaacaccactaacaagagtgaggtcagtagatgcacagtaataatgagcctcgtcctcagcctggagcgaagcgatggtcagggtgcctgtgttgccggacttggtgccagagaatcggtcggggacccccgagggtcgtttggaagtcgcatagatcagggttctggggg

SEQ ID NO: 5257 - DNA, 346 bp, Bos taurus
  unsure (21): unsure at all n locations; Clone ID: 23-LIB188-028-Q1-E1-F3
gccatggtcccgggatgcccnagactactgcataaagtccaagagctgacaactgaagttgaaaaaatcaagacgacagtgaaggaatcagccactgaggagaactgaccccgtggtgctggctaaaaagctggccgccctgaagcagcagctggttgcttcccatctggagaagctgctgggaccagatgcggcaatcaaccttactgaccccgatggagctctgactaagcgcctactgctgcagctggaagcaacaaagaacagcaaagggactggttcaaggggcaagaccaccagtggaacccccccagatagcagcttggtcacttatgaactgcattct

SEQ ID NO: 5258 - DNA, 448 bp, Bos taurus
  Clone ID: 23-LIB2809-001-Q1-E1-F3
tggccgccggatactggagtgggttgccattgccatctccaaagatccttataggagggaatctattacacgcatcaataagaaaattgagaagtttcagagtgaggaacagcagcaaacagaggatgaactccaggataaaatccacccctttgcccagacacagtctctagtctatcccttccctgggcccatccctaacagcctcccacaaaacatccctcctcttactcaaacccctgtggtggtgccgcctttccttcagcctgaagtaatgggagtctccaaagtgaaggaggctatggctcctaagcacaaagaaatgcccttccctaaatatccagttgagccctttactgaaagccagagcctgactctcactgatgttgaaaatctgcaccttcctctgcctctgctccagtcttggatgcaccagcctcaacaacct

SEQ ID NO: 5259 - DNA, 424 bp, Bos taurus
  unsure (378),(391): unsure at all n locations; Clone ID: 23-LIB2809-002-Q1-E1-F11
acagcagaaaggcctgaatgggcatatctctctggggatagggcactgctttctggggaacaggcaggactttggactgagaaagggacagcacggactgaggaggaaacatgacagttggaggaagaggctggtgaggctggtgcatccaagactggagcagaggcagaggaaggtgcagattttcaacatcagtgagagtcaggctctggctttcagtaaagggctcaactggatatttagggaagggcatttctttgtgcttaggagccatagcctccttcactttggagactcccattacttcaggctgaaggaaaggcggcaccaccacaggggtttgagtaagaggagggatgttttgtgggaggctgttanggatgggcccagngaagggatagactagagactgtgtctgggcaaa

SEQ ID NO: 5260 - DNA, 479 bp, Bos taurus
  Clone ID: 23-LIB2809-003-Q1-E1-F11
tgctcgccgcagccatggccacggcatacaactacctttggagttgatattaatagaaattattccaaaattattcttaggtcacaaataactactatcccacataaaaagggaaaaatcccacccaattaaggaaaaggtatcctgtgtatgtttccatggcaatgagtttatgcattctcagattttgtccggctagttatccaccctttatctgatgcatttattccatctctcagagagaaccatatagattcctgacggcatccaggacacgtggctcgtggtggacacacttcatggtggatactgctactataaacatactcagaacttaagagaattccaagatgctttataaaaagcattagtcatgcctcaaaactgccctttgaggtaggtcagtattattaccccattttaacagaaggaaaactgaggcacattatatttaattgacttgcccagggtcacatacc

SEQ ID NO: 5261 - DNA, 422 bp, Bos taurus
  Clone ID: 23-LIB2809-003-Q1-E1-F3
atgcccccggcagccatgaccgcggcatacttgtacttgtataggtgggggttgtctactgagtaaggaatactgtttttaaggttctaaagctaaattcaaatgatgcattaatgacccaaaaactcagatctgatggtgtctgaatttctaacagtccttgctttgtgggtatgctgacaacttatctggatgccttacatcttttctaaacagtgttgcctctgaacgtgctctgcaccctccctgctcactctttggagcccctttgcaccccagagcctgcagaagtggctggtataaaaaggggcctgcctagagaatgatcagtgtagctgtttgcaggattccattctgggcttcattttggaaactttgcttacggctatttttcgtaaatgcccacatttgatggagggtag

SEQ ID NO: 5262 - DNA, 145 bp, Bos taurus
  Clone ID: 23-LIB2809-004-Q1-E1-F3
actgttgcattaaaagcgccatcagggacatcgagcaagggtcaaaagtccagagcgccattcatgcacccctggagattagtccttacatgtccattgtcactacacggcccacggctcagagatgagttagcttcaagggggt

SEQ ID NO: 5263 - DNA, 488 bp, Bos taurus
  Clone ID: 23-LIB2809-005-Q1-E1-F11
ccgacgcctcagctcgcggagccatggctaccggatacagtgccggctgatcctacagaagttatgggaaaggcaaagcgcagagccgggccctggtgtgtgccgccccccttgggatggatgaaacagcaggctcggcgtgggtaggaggaaccagcgacagagacggccttcccggcacggactcccggtaactccgcggaagaccagggtcctgggagtgactatgggcggtgagagcgtgctcctgctgcagttgcggtcatcatgaccacgcccgctcccgcagaccatgttccatgtttcttttaggtatatctttggaattcctcccctgatccttgttctgttgccagtagcatcatctgattgtgatattagcggtaaagacggtggagcatatcagaatgttctaatggtcaacatcgatgacttggacaacatgataaactttgatagcaattgcctgaataacgaacctaactttt

SEQ ID NO: 5264 - DNA, 303 bp, Bos taurus
  Clone ID: 23-LIB2809-005-Q1-E1-F3
acatctgcaaatgccctcttggatacgtgggcatccactgtgagaccgcctgcacctcaccgctgggcatgcagacgggtgccattgccgactcccagatctctgcctcgtccatgcatttgggcttcatgggtttgcagcgctgggccccggagctagcccgcctgcaccagacgggcatcgtcaacgcttggacatccggcaactatgacaaaaacccctggatccaggtgaacctgatgcggaagatgtgggtgacgggtgtggtgacccagggggccagccgcgcagggagtgctgagt

SEQ ID NO: 5265 - DNA, 401 bp, Bos taurus
  Clone ID: 23-LIB2809-006-Q1-E1-F3
gctcggcaccgccatgggtacgggatactgacgaaactgggcaaagactcgaaagataagtgtggtaaactggaccccacctacaccagcgccactttactctttcagaaagaccctccagccaacatccagctcttccaagaggtgcccaatggtcagtccaaggaggacacagtgggccggcccctgccccacctggccgcggccatgcaagcctctggggaggccgtatactgtgacgacatccctcgctacgagaatgagctgttcctccggctggtcaccagcacccgggcccacgccaagatcaagtccattgatgtttcagaagctcagaaagtgccaggatttgtttgctttctctctgctgatgatattcccgggagtaatgaaaccggact

SEQ ID NO: 5266 - DNA, 459 bp, Bos taurus
  Clone ID: 23-LIB2809-007-Q1-E1-F3
ctgaagaatttactatagtcagtaaacttaaaatgaactttaaaaaaatctggttccccactggaactatccttggaaatactgatactttacaaccagaatttgtatagaaaagaattcttgattttatgtcatacaccccatatatatgtgcaatttgtaaaaaaaaatttgagagattatacaaagagcaaaataaacttaacctgtctaaacagatggttatgacacatttaaacaaacacgtggtgttcattttttatatattgtgataaacattttcagaagacttgtatacactttactctcttccaggtgcttgacatatcttttaacttttatcatggtccagaaaaatgtgcaatggaagctatttgcttatctacttcaaaacattgcagtttaactttccatgttaagagataaaatatagtagagcagttcaaggaattaaatgac

SEQ ID NO: 5267 - DNA, 374 bp, Bos taurus
  Clone ID: 23-LIB2809-008-Q1-E1-F11
cgtatgtgtatgatacataaggttatgtattaattgtagccgcgttctaacgacaatatgtacaagcctaattgtgtagcatctggcttactgaagcagaccctatcatctctctcgtaaactgccgtcagaatcggtttggttggacgaaccttctgagtttctggtaacgccgtcccgcacccggaaatggtcagcgaaccaatcagcagggtcatcgctagccagatcctctacgccggacgcatcgtggccggcatcaccggcgccacaggtgcggttgctggcgcctatatcgccgacatcaccgatggggaagatcgggctcgccacttcgggctcatgagcgcttgtttcggcgtgggtatggtggc

SEQ ID NO: 5268 - DNA, 411 bp, Bos taurus
  unsure (358): unsure at all n locations; Clone ID: 23-LIB2809-009-Q1-E1-F3
ctccgtcgaatggcgccgggatacagcagaaaggcctgaatgggcatatctctctggggatagggcactgctttctggggaacaggcaggactttggactgagaaagggacagcacggactgaggaggaaacatgacagttggaggaagaggctggtgaggctggtgcatccaagactggagcagaggcagaggaaggtgcagattttcaacatcagtgagagtcaggctctggctttcagtaaagggctcaactggatatttagggaagggcatttctttgtgcttaggagccatagcctccttcactttggagactcccattacttcaggctgaagggaaggcggcaccaccacanggggttttagtacgaggagggatgttttgtgggaggcggttagggatgggccc

SEQ ID NO: 5269 - DNA, 421 bp, Bos taurus
  Clone ID: 23-LIB2809-010-Q1-E1-F3
acagcagaaaggcctgaatgggcatatctctctggggatagggcactgctttctggggaacaggcaggactttggactgagaaagggacagcacggactgaagaagaaacattacagttggaggaagaggctggtgaggctggtgcatccaagactggagcagatgcagaggaaggtgcagattttcaacatcagtgagagtcaggctctggctttcagtaaagggctcaactggatatttagggaagggcatttctttgtgcttaggagccatagcctccttcactttggagactcccattacttcaggctgaatgaaaggcggcaccaccacaggggtttgagtaagaggagggatgttttgtgggacgctgttacggatgggcccatggaagggatagactagagactgtgtctgggc

SEQ ID NO: 5270 - DNA, 435 bp, Bos taurus
  Clone ID: 23-LIB2809-011-Q1-E1-F11
gggtgacgagctcgaattccgtgtattctatagtgtcacctacatcgtatgtgtatgatacataaggttatgtattaattgtagccgcgttctaacgacaatatgtacaagcctaattgtgtagcatctggcttactgaagcagaccctatcatctctctcgtaaactgccgtcagagtcggtttggttggacgaaccttctgagtttctggtgaacccgtctcgcacccggaaatgggtagccaaccaatcaccagggtcatcgctagccagattctctacgccggacgcatcttggccggcatcatcggcgccacacgtgcggttgctggcgcctatatcgccgacatcatcgatggggaagattgggctcgccacttcgggctcatgagcgcatgtttcggcatgggtatggtggcatgccccgtggccggg

SEQ ID NO: 5271 - DNA, 393 bp, Bos taurus
  unsure (370): unsure at all n locations; Clone ID: 23-LIB2809-013-Q1-E1-F11
tgtaaaattgattgggttacgtcaacctgtacccaagaagtatggagcctgattgttccaaaggcaagaaatcaaatttccttgatcactttgtattattagttactcttttttcagttctaaatcattaggatgcatttactggtaacagtctcctttttatagtcacagcgtttgtcactcagtcgtgtctgctgctttgcgacctcatggacttaagcccaccaggttgctccatccatgggcttttccaggcaagaatactggagtgggttgccattttcttctctactttttagagatgtcctggaatttttcagcctcaagagatatgttctgtggtcagtcgttgaactcagggaaccctcanggtttgcataaaataaaaataat

SEQ ID NO: 5272 - DNA, 432 bp, Bos taurus
  unsure (383),(388): unsure at all n locations; Clone ID: 23-LIB2809-013-Q1-E1-F3
acttgtgtaagtggaggttgtctactgagtaaggaatactgtttttaaggttctaaagctaaattcaaatgatgcattaatgacccaaaaactcagatctgatggtgtctgaatttctaacagtccttgctttgtgggtatgctgacaacttatctggatgccttacatcttttctaaacagtgttgcctctgaacgtgctctgctccctccctgctccctctttggagcccctttgcaccccagagcctgcagaagtggctggtataaaagggggcctggctagagaatgatcagtgtagctgtttgcaggattcctttctgggcttcattttggaaactttgcttagggctatttttcttaattgcccacatttgatgganggtanaaggaattttgaatgtatttgatttaataatatttttttttttt

SEQ ID NO: 5273 - DNA, 420 bp, Bos taurus
  Clone ID: 23-LIB2809-016-Q1-E1-F11
gccatgtacccgggatagccgttagagggcaccactcaatgtagtctgagatactgcacagaccctgccaccgcggagggcaagtgtgacaggacctgccgccccgaggaggagtgtcgcctcgtcagtggcacctggggctgcttctgcagacaggacctcaacgtctccgatgtgcacagtttgcagcctcagctggactgtggggacacagagatcaaagtgtcactggacaagtgtctgctgggaagtctgggtttcggagatgaggtccatgcctacctgcgggacgggaactggaactgcagcagcctcaggcagagtgaagaggagaactggatatctgtgaccaatcccacccaggctggtgcctgcgggaacattctggagagaaaacaagaccatgccatctacataaac

SEQ ID NO: 5274 - DNA, 161 bp, Bos taurus
  Clone ID: 23-LIB2809-017-Q1-E1-F11
gccatggccacgggatactgtcgcattaaaagcgcaatcagggacatcgagcaagggtcaaaagtccagagcgccattcatgcacccctggagattagtccttacatgtccattgtcactacagggcccagggctcagagatgagttagcttcaagggggt

SEQ ID NO: 5275 - DNA, 241 bp, Bos taurus
  Clone ID: 23-LIB2809-017-Q1-E1-F3
gatacagcagaaaggcctgaatgggcatatctctctggggatagggcactgctttctggggaacaagcatgactttggactgagaaagggacagcacggactgatgaggacacatgacagttggacgaagatgctggtgatgctggtgcatccaagactggagcagaggcagaggaaggtgcagattttcaacatcagtgagagtcaggctctggctttcagtaaagggctcaactggata

SEQ ID NO: 5276 - DNA, 129 bp, Bos taurus
  Clone ID: 23-LIB2809-020-Q1-E1-F11
tccttctatgagccctgggccctgtattgacaatggacatgtaacgactaatctccaggggtgcatgaatggcgctctggacttttgacccttgctcgatgtccctgatggcgcttttaatgcaacagt

SEQ ID NO: 5277 - DNA, 397 bp, Bos taurus
  Clone ID: 23-LIB2809-020-Q1-E1-F3
cgctatgggcccgggacacttgtaattgtgaaagtgggggttgtctactgagtaaggaatactgtttttaaggttctaaagctaaattcaaatgatgcattaatgacccaaaaactcagatctgatggtgtctgaatttctaacagtccttgctttgtgggtatgctgacaacttatctggatgccttacatcttttctaaacagtgttgcctctgaacgtgctctgctccctccctgctccctctttggagcccctttgcaccccagagcctgcagaagtggctggtataaaagggggcctggctagagaatgatcagtgtagctgtttgcaggaatcctttctgggcttcattttgggaactttgcttagggctatttttcttaattgcccacat

SEQ ID NO: 5278 - DNA, 440 bp, Bos taurus
  unsure (222): unsure at all n locations; Clone ID: 23-LIB2809-022-Q1-E1-F11
acagacccaatcaggcaaactgacacctccgtagcccttcaagtccttcaactcccggaacaactcacaatttgtacaagcttttttttttttttttttttttttttttaaggttaagcccttaatgccgaaaggagaaccggcccaaacaaggaggcccaagaaggggcttgaaggggcctggttccaagaagggttcaatttggtcccggttcctcctgntcccctgatggggcaagcggggatgacatcgtctgtccccagaggggccaaggctcccgggctcccagaggcgccggcaggggctcacctagatgtggcactgctcctccagctgggttgggttgaaggacagccggatgtgcatgggcacggccttgagggctttgtccaatttctccaaggcctcgtcgtccacctccggggtcctgaccaggcac

SEQ ID NO: 5279 - DNA, 369 bp, Bos taurus
  unsure (321),(326): unsure at all n locations; Clone ID: 23-LIB2809-025-Q1-E1-F11
gggacacagcagaaaggccagaatgggcatatccccctggggatagggcactgctttctggggaacaggcaggactttggactgagaaagggacagcacggactgaggaggaaacatgacagttggaggaagaggctggtgaggctggtgcatccaagactggagcagaggcagaggaaggtgcagattttcaacatcagtgagagtcaggctctggctttcagtaaagggctcaactggatatttagggaagggcatttctttgtgcttaggagccatagcctccttcactttggagactcccattacttcaggctgaangaaangcggcaccaccacaggggtttgagtaagaagaaggatgttttg

SEQ ID NO: 5280 - DNA, 386 bp, Bos taurus
  Clone ID: 23-LIB2809-025-Q1-E1-F3
gggcgcgggatacatgtgtacgtgggggttgtctactgagtaaggaatactgtttttaaggttctaaagctaaattcaaatgatgcattaatgacccaaaaactcagatctgatggtgtctgaatttctaacagtccttgctttgtgggtatgctgacaacttatctggatgccttacatcttttctaaacagtgttgcctctgaacgtgctctgcaccctccctgctccctctttggagcccctttgcaccccagagcctgcagaagtggctggtataaaaaggggcctggctacagaatgatcagtgtagctgtttgcaagattcctttctgggcttcattttggaaactttgcttaaggctatttttcttaatttgccacatt

SEQ ID NO: 5281 - DNA, 143 bp, Bos taurus
  unsure (23): unsure at all n locations; Clone ID: 23-LIB2809-027-Q1-E1-F11
tgttgcattaaaagcgccatcanggacatcgagcaagggtcaaaagtccagagcgccattcatgcacccctggagattagtccttacatgtccattgtcactacagggcccagggctcagagacgagttagcttcaagggggt

SEQ ID NO: 5282 - DNA, 362 bp, Bos taurus
  Clone ID: 23-LIB2809-027-Q1-E1-F3
ttttggctctaaccttgttaatcccgtaccccatttttttgcaacggttctttctgcagctcatgcagagacctttctcaaatgcttctttggaattgcaccggtacgccttacttggattttcctcattcaacagatagtcaatgaagagatgaacggaacgttcatgggagcacttcactagctgatccacatctccaaagcctctctctgcaatcacaccgacagcttccccaatgttacatcctggttggaaagtgcctccgttacggtaaatttccacatgccctactggtttctggattccgatacttccacctggtgaccccccttctgaatgtgtgtaacacgtctacaaaatc

SEQ ID NO: 5283 - DNA, 405 bp, Bos taurus
  Clone ID: 23-LIB2809-030-Q1-E1-F11
acgcgttatctgtcgtctttcccaacctagcccagcttcaccatggtggacgccttcgtgggcacctggaagttagtggacagcaagaatttcgatgactacatgaagtcactcggtgtcggttttgctaccaggcaggtgggcaatatgaccaagcctaccacaatcatcgaagtgaatggggacacagtcatcataaaaacacaaagcaccttcaagaacacagagatcagcttcaagctgggagtcgagttcgatgagaccacagcagatgacaggaaagtcaaggtgagttgaggaaggggctgtgggggatggaaggccctgaaggggaatacggcgtcaccctattgttgcaccttgaggggtgggctgttgtgggggattgaagccggccctgtgggt

SEQ ID NO: 5284 - DNA, 393 bp, Bos taurus
  Clone ID: 23-LIB2809-030-Q1-E1-F3
gccaagggcgcgggatacttcatcatcaggaacagctgcccaaatcaacgtgattccaccatctccgtggaagagaatggggtgtcagcagaaagccggttctcagttcagatgttcaagtttgctggaaattatgacctagttttcctgcattgtgaggtttctctctgtgatttcattaaagaagagtgccaaccgtcttgctcaagaagtcaactccgcagtgaaggggtggctattgatccagcccgagttctagatctgggacccatcactcgcaaaggtgcccagtctcttggtgtcatgagtggaacacccaacactgcagggttcctggtggcctggcccctggttctcctgcctgtcctcctggctgggctgttctgaaagctc

SEQ ID NO: 5285 - DNA, 320 bp, Bos taurus
  Clone ID: 23-LIB3057-002-Q1-K1-F11
ctggtgaagtgtgtttcttgaaatcatcaccaccatggacagcaaaggttcgtcgcgagaaagggtcccgcctgctcctgctgctggtggtgtcaaatctactcttgtgccagggtgtggtctccacccccgtctgtcccaatgggcctggcaactgtcaggtatccgttcgagacctgtttgaccggacactcatggtgtctcactacatccatgacctctcctctgaaactgtcaacgcattctattaacggtgtgcccagggcaaagggttcattaccatggccctcaacagctgccatacctcctcccttactacc

SEQ ID NO: 5286 - DNA, 340 bp, Bos taurus
  Clone ID: 23-LIB3057-004-Q1-K1-F3
acgcgtaccgctcttgctgccgcatcatggcttccgtggggaccctcgccttcgatgaatgtggccgtcctttcctcatcatcaaggatcaggaccgcaagtctcgtcttatgggacttgaggccctcaagtctcatataatggcagcaaaggctgtagcaaatacaatgaaaacatcgcttggaccaaatgggcttgataagatgatggtggataaagatggtgacgtgaccgtgaccaatgacggcgccaccatcttaagcatgatggacgttgaccaccacatcacaagctgatggttgagcttaacattcacaggatgatgagatcgccaatggaa

SEQ ID NO: 5287 - DNA, 433 bp, Bos taurus
  Clone ID: 23-LIB3057-006-Q1-K1-F11
gcccaacagacccaccatgaagtccttatgagcttgattcttgggttgctgcgctcctggaatgaccctctctatcacctagtcaccgaggtgcggggtatgaaaggagccccagatgctatcctatcgagggccatagagattgaggaagaaaacaaacgacttctggaaggcatggagatgatatttggccaggttattcctggagccaaagagactgagccctaccctgtgtggtcaggactcccgtccctgcaaactaaggatgaagatgcacgttattctgctttttataacctgctccactgcctgcgcagggattcaagcaagattgacacttaccttaagctcctgaattgcagaatcatctacaacaacaactgctaagcccacattcatcctatccatttctgagatggttcttaatgatcca

SEQ ID NO: 5288 - DNA, 400 bp, Bos taurus
  Clone ID: 23-LIB3057-006-Q1-K1-F3
gagcttcctggtgaaactttgaccgtgactacagagagaaagtttgctatagagagacgaagcacactgctgcttcttctgctgctgcttcgacagtgagaagagagagagaagcgctcttctccgtaccgtttctagagagagaaactgatggccgaagttaatccgaacggcgtcgccgattttccggcaactccaactcacggcggacagttcattcagtacaacatattcggaaacctcttccaggttacagcgaagtaccgtcctccgatcatgcctgtcggacgctgcgcgtatggaatcatttgctcgctgttgaataccgagaccaatgatctcgttgcggttaagaagatagcgaacgctctccaaaatcacatggactctaaacgtacgc

SEQ ID NO: 5289 - DNA, 376 bp, Bos taurus
  Clone ID: 23-LIB3057-007-Q1-K1-F3
cggtttaaaagaagcctggccttttcctttccccgccatggcgtgtgctcgtccacggggatcagtgtactccgaaaagggggagtcctctggcaaaaatgtcactttgcctgctgcgttcaaggctcccattcgacccgatattgttaactttgttcacaccaacttgcgcaaaaacaacagacagccctatgctgtcagtgaattagcaggtcatcaaaccagtgctgagtcttggggtaccggcagagctgtggctcgaattcccagggttcgaggtggcgggactcaccgttccggtcagggcgcttttggaaacatgtgtcgtgggggccgcatgtttgcgccaactaagaccttgcgacgttggcaccgc

SEQ ID NO: 5290 - DNA, 419 bp, Bos taurus
  Clone ID: 23-LIB3057-009-Q1-K1-F3
ttggttttttttatttttgagttgtgtatccctttattagcaactaaaatagaaggtatctgttgtacaatatgggtagtaattgactataactggagaattttatattctaatacagatcatttataaatgcaacttctttattaaaaagcttccaccctttttgtttgtttgtgtacaatttgcaaaactattctgaaagcagagtatatgtgcacaagtctgcaaagagtgcaaattaggatatggtaaatgctttacaagttactttcaaaaaactgactgccacaactgtgcctttacattgcctgttttttttgatcaaaatattttgatgccagcgttccttccactgctctaaactataaagcattttttttaatgagttgaaattaaggaaggactacacctactagaaa

SEQ ID NO: 5291 - DNA, 424 bp, Bos taurus
  Clone ID: 23-LIB3057-010-Q1-K1-F11
atttaagtagcatcccatcccagcatcctttaattattgcttgtcttaaaataacactagagatagaagatatgatatattgctgttatcaatcatttctagataataaactgactaaacttacatcagggagaaattggtatttatgcaaaaaaacattctgttctagtctttgagagtccatctaacatcattattaatcatgtggctgtgaaattcacagtaatatggttcccaatgaacaagtttacccagcctgctttgctttactgcatgaatgaaaatgatggttcaatttcagaagtaatgattaacagttctgtggtcacatgatgtgcatatagatagctatagtgtaacaacttacactattttgtgcgcaaaacaaaaaaatctgtgtaactgtaaaacattgaatgatact

SEQ ID NO: 5292 - DNA, 301 bp, Bos taurus
  Clone ID: 23-LIB3057-010-Q1-K1-F3
gcgccgatgttcagcggctacaggcccgggtttaggagctggagcgctgtgtgtacggaccgggcgagtctcggggctcgcggaacgtggctttggggaacatcgccagcaagagggagagggtgaaggttctgtacaaaaagattgaagacttgatcaaatacctggatcctgagtacattgaccgcattgccttacctgatgcctgcaagctgcagttcatcttggcagatgagcagttcattctctagcatgttgcacttatcgagcatgtggaggctctggtgcccatgctggacag

SEQ ID NO: 5293 - DNA, 201 bp, Bos taurus
  Clone ID: 23-LIB3057-011-Q1-K1-F3
gggcactggccagacctactgtgacctacgcagtctaaactccaaggctgtggtggctgccctcatgaaggcttaatgtggctcttgcctgataccaaatcaccgcttccccctaagtccctatccctgtatcaagaatgtgctttagagtatgtgagcagcttgtctttagtgtagttcaaaggcagagtgagggggggc

SEQ ID NO: 5294 - DNA, 428 bp, Bos taurus
  Clone ID: 23-LIB3057-012-Q1-K1-F3
gtttgaccgggcagtcatggtgtcccactacatccatgacctctcctcggaaatgttcgacgaatttggtaaaccgtattcccaaggcaaaggggtcattaccatggccctcaacagcttgcataccttcttcctttctacccctgaagattaagaacaaggccaacagaaccaccattgaatccctattaacctgaatcctggggtgcttcgcctccggaatggacctctctatcaaccaatcaaccaagttccgggttttaaaaggagcccaaattccattcctattcagggccataaaaattgaggaagaaaacaaacgacttctggaaggcatggagatgatatttggccatggtattcctggagccaaagagactgagccctaccctgtgtggtcaggactcccgtccctgcaaactaaggat

SEQ ID NO: 5295 - DNA, 410 bp, Bos taurus
  unsure (92),(94),(102),(396): unsure at all n locations; Clone ID: 23-LIB3057-013-Q1-K1-F3
cttgattaacttgcttaaggaatgtcacaaaaattacatggaaaagaagaacaagagcgggggagcttggcaacgcaatgcgaaagagactntntaatcctncagaggaatctgaaaactagatcttattttcactggatgccttgcctgagagaagacccaaagactcttggttggtaactgaaggaatcctgttgcatttggtctctaaaatcttttgcatggaaagtgacccatgagaaatcaagccttggagaagtatggaaaccctggatctggaatgtttgtcgggcagagctgtttgtaccctccctcctctaccaacgcatctgagacttctgtttcttccctttgcctatgacctggtaacatttgagtacctttaaccttcaatanaactattgattctg

SEQ ID NO: 5296 - DNA, 275 bp, Bos taurus
  Clone ID: 23-LIB3057-015-Q1-K1-F3
aatcaccatggcggctgggaccctgtacacatatcctgaaaactggagagccttcaaggcccgcattgccgctcagtacagcggggctcaggtccgcgtgctctccgcaccaccccacttccattttggccaaaccaaccgcacccccgaatttctccgtaaatttcctgctggcaaggttccagcctttgagggtgacgatggattctgtgtgttcgagagcaatgccattgcctactatgtgagcaacgaggagttgcggtgaagtactcccg

SEQ ID NO: 5297 - DNA, 439 bp, Bos taurus
  Clone ID: 23-LIB3057-016-Q1-K1-F3
caaagtgatatgaatgctccagtgttcactgcagcattgttcacaatagccaggatgtggaagcgacctaaatgtccatcaacatgaacagctaaagaaactgtagtcccttcgtacaatgaaacagcactcagtcatgaagacagaggacattcttcaacatgtgacaatacagataagccccgaagacactgtgctacatgaaataagccagacctgggaagccaaatactgcacgattctactcacacagaggtctaatacactaggcaaatttacagaatcaaagggtagaatggtggttgccagaggctggggaagggaggcagggagtcactaaccagtaggcatttcagtcaagcacggtgggtgagctccaggtgtctgttgcacaaccctgcacgcagaatcgagggggacgcatggtacacgccatggt

SEQ ID NO: 5298 - DNA, 427 bp, Bos taurus
  Clone ID: 23-LIB3057-017-Q1-K1-F11
gtttgctgccctcctggattgaccctctgtttaacctaataaccgaggtacggggtatgagagcagccccagatgcctatgctatcgagggccatagagattgaggaagaaaacaaacgacttctggaaggcatggagatgatatttggccaggtaattcctggagccaaagagactgatccctaccctgtgtggtcaggactcccgtccctgcaaactaaggatgaagatgcacgttattccgctttttataacctgctccactgcctgcgcagggattcaagcaagattgacacttaccttaagctcctgaattgcagaatcatctacaacaacaactgctaagcccacattcatcctatccatttctgagatggttcttaatgatccattccctggcaaacttctctgagctttatagctttgt

SEQ ID NO: 5299 - DNA, 284 bp, Bos taurus
  Clone ID: 23-LIB3057-017-Q1-K1-F3
attagtgccacgtgtctgggccactgagaccccgtgatggaactgaggatctgaggaaggaaggctggtggcagctccccagaacagggttgctgggacttagttatcattccagcatgctttccttgttccaggccgtggccttccacttgtggatgatggtggctggaacacagtacccatcagcaagggcagccgccctattgacacttctcgactcactaagatcacaaagcctggctccattgattctaataaccagctgtttgcacctgtaggccgat

SEQ ID NO: 5300 - DNA, 368 bp, Bos taurus
  Clone ID: 23-LIB3057-018-Q1-K1-F11
cggacgcgtgggctgctttggtattttggtaaaaacctgtagcaacttgttacactggggtgagaaagagaaatcaagagaaataaaaaagcagaggaatgggacctactgtagtccccaagtactgttaaatatcttattggacaagggcttgataaaaaaaatccttttaaggatattggatgatcacagctgagcactcaggaacttggatggagaatgctgctaggctcttggttttaattcatgctacctgaaaagtaagacaagcttttgctaactggacacacttttcaagtactgaaggaatgaaatgaatgccaaatgtttcccctggggcttgcctgtcctttcaaaagaacgtggtc

SEQ ID NO: 5301 - DNA, 480 bp, Bos taurus
  Clone ID: 23-LIB3057-018-Q1-K1-F3
ccactcgtcctgttctagatcgcgagcttcctcccttttttttttttttaagtaattgctcttaagagatagagaagcattaaattaaagtaaaaaatttttttgctaggtctaaagctccatctgtttttcataaacatattcaaaagatatttcttgtaacctttcattcaaaggtttttttagttccattttaatagttttaattttttattttataattatttttattattttttactattttttatttattattatttatttttatatttattattcttttttttttttttttattttttatattatttttttatatatttgtatttttatttttattttttattttttttatttattttttatttatttatttattatttatttttattttatttataatattttttttttttttttttttattaaattttttatattttatttcttttttttttaattttttttttttttttt

SEQ ID NO: 5302 - DNA, 331 bp, Bos taurus
  Clone ID: 23-LIB3057-019-Q1-K1-F3
ggcgggtgatggggacgtgaatttaggcaccctggggagtggcagcgagagcagcagcgacggtagtagcgagagcccgggcggcgcgggagcggcagcagaagggggcagctgcttggcaacggcgttggcgcttctgacggggggcggggagatgctgctgaacgtggctctggaggcgctggtgttgctgggggcctaccggctgtgggtgcgctgggggcggcggggtctgggcgccggggccggagcgggcgaagagagccccgctgcctctttgcctcgtatgaagaagcgggacttcagcttggagcagctgcgccagtacgac

SEQ ID NO: 5303 - DNA, 403 bp, Bos taurus
  Clone ID: 23-LIB3057-020-Q1-K1-F3
atcgcgagcgccgcccttttttttttttttttttttttttttttttttttttgtacagggagaacagaccgttttggtcatatattgagataaactgcaaagactgaaagacaaaaattcatcataaatcattcagcagaacattcattaaaaatcaaatgtattttctttaacagagttctcacacagaaaatttcattttatgtaagtctgatacaacattaaatattttacaactcagacatttcatttttaaatctaactgtataattttgaatgcactatagacaaataagatctttaccaatttcacttcatttaacttatacaaggcttccattaaaattccatcacaccttgaaaattacctgcagctctttaaaaaaacacatgatctaagctt

SEQ ID NO: 5304 - DNA, 237 bp, Bos taurus
  Clone ID: 23-LIB3057-021-Q1-K1-F11
caatcttgcttgaatccctgcgcaggcagtggagcaagattgacacttaccttaagctcctgaattgcagaatcatctacaacaacaactgctaagcccacattcatcctatccatttctgagatggttcttaatgatccattccctggcaaacttctctgagctttatagctttgtaatgcatgcttggctctaatgggtttcatcttaaataaaaacagactctgtagcgatgtc

SEQ ID NO: 5305 - DNA, 406 bp, Bos taurus
  Clone ID: 23-LIB3057-021-Q1-K1-F3
agccaggccaagcgcacgattgaagggctccggcggccctgttcctcgggtattgccaccctggtctgtggcattgctggggaagagcaacagcgaggaggtgcccctggacaggctccggcgtctgtgccaggccctggtctggcgaaggactcaccactgctgcttcagcagatctgtgccatgaggctgcacatcttgcagctccagcacgagaacagcaccctgaagggagcccagatgaaggcatccttagcagacctgatctctctgcacgtggccaagctctctctaccgccccacgagggcactggcagcgagcttgctgctggagcgctgtatcgtaagaccaaccagctgctggagacgttgaatcagttgagcgcatgcacgcatgtagtggaca

SEQ ID NO: 5306 - DNA, 346 bp, Bos taurus
  Clone ID: 23-LIB3057-022-Q1-K1-F3
cggacgcgtgggggttttttggttgtggcaaacaatgaaacagaagaaattaaagacgggagcagcccagaatgcctgccgggtgagactagagagcagagggagatgtgaggaggaaggcgaatgtccctaccaggtgaagctgcccccgctgactattcagctccccaagcagttcagcaggatcgaggaggtgttcaaagaagttcagaatctcaaggaaattgtaaatagcctgaagaagacttgccaagactgcaaactgcaggctgatgacagtcgagacccaggaagaaatggattgctgttaccaggcacaggagccccaggagaaactggggacaac

SEQ ID NO: 5307 - DNA, 191 bp, Bos taurus
  Clone ID: 23-LIB3057-023-Q1-K1-F3
tcggcggtctgcatggcccagaggtgggtccttgactttcctctacccatctccccccatgggatgtcggcaccttccgggagtgtgtgggctttggagctgtgcatgatgtgcccgtggtgcttgtacagccggccagtgccattctgttatgactactacaaccctgagcacatgtgttctgtgtttta

SEQ ID NO: 5308 - DNA, 345 bp, Bos taurus
  Clone ID: 23-LIB3057-024-Q1-K1-F11
acgcgctattgaaaaccagttttgccaaggtttaaacctgcattttattccaaccttttgggcaagcacaggaaggaaaagtggaaaaatcaaagtcttcttaacagaaggaattgtataaaccctcggtgggaatgttaccttgaatttgcttggccttgaaatcaatgttcggctggcttcagttatgagggctggcttgctaggtaccagatgacctttgacagtgccaaatcaaagctgacaaggaataaacttgcagtgggctacaggactgtggactttcaactacacactaatgtcaatgatggtacagaatttggaggatcaatttatcagaaagta

SEQ ID NO: 5309 - DNA, 408 bp, Bos taurus
  Clone ID: 23-LIB3057-025-Q1-K1-F3
gaacgaagggaagaaaagtgaccgagaggccgctgaacatcctcgccccggcgcagcgggagccgcccgaggcagcttccccgtgacagagcctcagcctgcctggaagatgccgagactgtgcagcagtcgttcgggcgccctgctgctggccttgctgcttcaggcctccatggaagtgcgtggttggtgcctggagagcagccagtgtcaggacctcaccacggaaagtaacctgctggcgtgcatccgggcctgcaagcccgacctctccgccgagacgccggtgttccccggcaacggcgatgagcagccgctgactgagaacccccggaagtacgtcatgggccatttccgctgggaccgcttcggccgtcggaatggtagcagcagcagcggagttggggc

SEQ ID NO: 5310 - DNA, 367 bp, Bos taurus
  Clone ID: 23-LIB3058-001-Q1-K1-F3
gtgaaatgtgaccctcgccatgggaaatacatggcctgctgcctgttgtaccgtggtgacgtggttcccaaagatgtcaatgctgccattgccaccatcaagaccaagcgcagcatccagtttgtggactggtgccccactggcttcaaggttggcattaactaccagcctcccactgtggtacctggtggcgacctggccaaagtacagcgagctgtgtgcatgctgagcaacaccacagccatcgctgaggcctgggctcgcctggaccacaaatttgacctgatgtatgccaagcgtgcctttgttcactggtacgtgggtgagggcatggaagaaggagagttttctgaggcccgtgaggaca

SEQ ID NO: 5311 - DNA, 447 bp, Bos taurus
  Clone ID: 23-LIB3058-002-Q1-K1-F3
cccacgcgtccgggttggcttctcctccccctccggttcgggttcgggttcgtgaggttctccggggttcggtttcgtgggtgagcggatcgagatggcggcgtcggatgttgagtaccgctgcttcgtcggcggcctcgcctgggccacggacgaccactccctccacaacgccttcagcacctacggcgaggtcctcgagtccaagatcatcctcgatcgggagacgcaaaggtcccgcggcttcggcttcgtcaccttctccacggaggaggcgatgcggaacgccatcgagggcatgaacggcaaggagctggacggccgcaacatcaccgtcaacgaggcccagtcccgcggggcccgtggaggcggcggcggcggcgggtacggtggtggccgtggaggcggcggctacggcggtggcgggcgccgtgatggcggcggcgg

SEQ ID NO: 5312 - DNA, 432 bp, Bos taurus
  unsure (33): unsure at all n locations; Clone ID: 23-LIB3058-003-Q1-K1-F3
gttcgtttcgacgtccgcgaagatgcagctcanaccaatggagattaaccccgagatgctgaacaaagtgctgacccggctgggggtcgccggccagtggcgcttcgaggatgttctgggactggaggaggagtctctgggctcggtgccagcgccggcctgcgcgctgctgctgctctttccgctcacggcgcagcatgagaacttcaggaaaaaacaaattgaagagctgaagggacaagaagtcagtcccaaggtgtacttcatgaagcagaccattggcaactcctgtggaaccatcggactcattcatgcagtggccaataatcaggacaaactggagttcgaggatgggtctgttctgaaacagtttctttctgaaacagagaagttgtcccctgaagacagagcaaagtgctttgaaaagaatga

SEQ ID NO: 5313 - DNA, 316 bp, Bos taurus
  Clone ID: 23-LIB3058-008-Q1-K1-F3
cggacgcgtgggatcgcgagcggccgccctttttttttcttgtatttaactattattttttttgagggggtggatactgtgagtttaattataaagaatgacctggtacaaaagccatttctctctgcaaaatcttggtggggagtcagggggagggtggtgatggatggtacgtacgtatacatacgttataatcctgtcgagcttgtctacccgtagaccctgcaaatggtcacatagctcggattcctgtgatgtacggattcttaggctcggctaaaggaagaatacatggcagtgtatatataacattgct

SEQ ID NO: 5314 - DNA, 157 bp, Bos taurus
  Clone ID: 23-LIB3058-009-Q1-K1-F3
aaacctgccaatattgtccagcgggaccaaccatgacaggctgtcgtatcctgagaggcgggttcagaccacaaactccaagccgacctgctgacctgcctgtacctctactactactacatgttctactagatcttctacccgttcaagcccttac

SEQ ID NO: 5315 - DNA, 395 bp, Bos taurus
  unsure (147): unsure at all n locations; Clone ID: 23-LIB3058-010-Q1-K1-F3
agaataccatctgataaccaggaatggagtttgaaggtcggacggaggagcacacaggagcgctgctgtgacttccgggcgttctcaggaaggaaaggctccgaatgggggacggtggtgtctgtgtcgacagttctggacaccagntctgagctgtagttggagagcttattactgaatgtgctttacttcctgtttcctaccctcaagttcaatagatatgggggaacttttcttattataaaataaatgtatgtaactgctgtacactgctgtaaacttgttagagaaagataaaattaatctgtatgtgggctcctgcgttattgagttattgtaatcctgtctcagaccgtggcggggaaacattcttaaaaggggagctacagaaacac

SEQ ID NO: 5316 - DNA, 330 bp, Bos taurus
  Clone ID: 23-LIB3058-011-Q1-K1-F3
ctgggatcgagaaaagcaacctcccagggtgttgtgagtgttggtccgattctgggaagctggtaaggccaggcatagaagaggcggtcagtaaatgtttttcccaaacaggttggtcgaccacgtccccctcgcccccctcacctgtctcacgcttctcgtttattctcccacagcgctccggacaaccccagtccgcagggctctcggtgtaccagccccgcctcctgtaaagcctatctacattcgctgtcttccttcctcaccttccgttttccctccaacccaccgctttctggtctcctctggtccgttgaacttcaacagctc

SEQ ID NO: 5317 - DNA, 438 bp, Bos taurus
  Clone ID: 23-LIB3058-013-Q1-K1-F3
ctagttctagatcgcgagcggtcgccctttattaatccttgtgtcagtctggctaaaggtcttggtgcgctgatgcatgcctgggctgggtctcctaaaggggccatccattgtggtgacacaaaggatcatccttgaagaactatcagagctgtctgttccatgtcgtcatcatcggcctcctgaaggactcgtcccatcagtcgaatgtgaacctggtgaacgccatgctgctggtgaaagaggccggcctcgatgtgaccacctgccacaacactgccacaccagggaagcaggactttggggaatgcctgctgaccgtggccctggcaggtgccctctaccaggctgtgggcttggtccagggcaccaagcctgtgctgcaggcactcaacggaactgtttttataccagaagtgccttttcatcctggtcagt

SEQ ID NO: 5318 - DNA, 240 bp, Bos taurus
  Clone ID: 23-LIB3058-014-Q1-K1-F3
cggactcgtgggattcgatgtacattacagattaaagaagacaagagcattgtgtatgttacaccaatgcctcggcgactcctcatcaatggctctaaatattgcttcaatttcaaactccagaaagatgtatggctttccagcttttcttaagcgttgctagaagtgcaggttgcactggacggagatgctggaggatggaaaggaattctaatcattatggtacatactcatgtgctt

SEQ ID NO: 5319 - DNA, 312 bp, Bos taurus
  Clone ID: 23-LIB3058-015-Q1-K1-F11
gcggagagagtgaggaggctgcgtctggctcccgctctcacagccattgcagtacattgagctccatagagacagcgccggggcaagtgagagccggacgggcactgggcgactctgtgcctcgcggaggaaaaataattaaacatgggcaaaggagatcctaagaagccgagaggcaaaatgtcatcatatgcattctttgtgcaaacttgccgggaggagcacaagaagaagcacccggatgcttctgtcaacttctcagagttttctaagaagtgctcagagaggtggaagaccatgtctgctaaagag

SEQ ID NO: 5320 - DNA, 426 bp, Bos taurus
  Clone ID: 23-LIB3058-015-Q1-K1-F3
cctcacccaccccagcccagcccccgaaagagcagcccacagagatccctgccagtgggcagggagagaagaggccaaaagagacagctgtcctgacctcacccccagcccctgctcccccggtgacccctagcaaacccatggctggcaccacggaccgagaagaggccactcggctcctggctgagaagcggcgccaggcccgggagcagcgggagcgcgaggaacaggagcggaggctgcaggccgaaagagacaagcgaatgcgagaggagcagctggctcgggaggccgaggcccgggcggagcgggaagccgaggcccggagacgcgaggagcaggaggctcgggagaaagcgcaggccgagcaggaggagcaggagcggctgcagaagcagaaagaggaggccgaagctcggtcccgag

SEQ ID NO: 5321 - DNA, 402 bp, Bos taurus
  Clone ID: 23-LIB3058-017-Q1-K1-F3
accgcccggattcccggtcgacgacgcgtccgcaaataatgagtatccacaattctaaaggacatacatgaacattaatattaatatctctgatcctatttattggatcaacaaacctactaggcctattaccccattcattcacaccaacaacacaactatcaataaacctaggcatagccatccccctgtgagcaggagccgtaattacaggatttcgcgataaaactaaagcatcacttgcccatttcttaccacaaggaacacccactccactaatcccagtactagtaagtattgaaactatcagcctttttattcgagctatagccctcgccgtgcggttaacagctaacatgactgcatgacacctattaattcacctaatcggaggagctacac

SEQ ID NO: 5322 - DNA, 452 bp, Bos taurus
  Clone ID: 23-LIB3058-018-Q1-K1-F3
gtcggggtgatctttaacgtgggcacggacgacattaccatcgacgagcccaacgccatcgtgagcgacggcaaataccacgtggtgcgcttcactcgaagtggcggcaacgccaccttgcaggtggacagctggccggtcaacgagcgatacccggcaggccgccagctgaccatcttcaacagccaggctgccatcaagatcgggggccgggatcagggccgccccttccagggccaggtgtccggcctctactacaatgggctcaaggtgctggcgctggccgccgagagcgaccccaacgtgcggaccgagggccacctgcgcctggtgggggaggggccgtccgtgctgctcagcgcggagaccacggccaccaccctgctggccgacatggccaccaccatcatggagaccaccaccaccatggccaccaccaccacgcgccgggg

SEQ ID NO: 5323 - DNA, 465 bp, Bos taurus
  Clone ID: 23-LIB3058-019-Q1-K1-F3
cttccagtacgagagcaaggtcttctacctgaagatgaagggcgactactacctctacctggccgaggtggcttctggcgagaagaagaacagtgtggtggaggcctcagaggcggcctacaaggaagccttcgagattagcaaggagcacatgcagcccacacaccccatccggctgggcctggccctcaacttctccgtgttctactacgagatccagaatgcgcctgagcaggcctgcctcctagccaaacaagccttcgacgacgccatagccgagctggacacactaaacgaggattcctataaggactccacgctcatcatgcagctgctgcgagacaacctcaccctctggacgagcgaccagcaggacgaggaagccggagaaggcaactgagcgccttggcccgccccgcccccgccccatcaccaccagtcccctctcgccacactcactaagta

SEQ ID NO: 5324 - DNA, 471 bp, Bos taurus
  Clone ID: 23-LIB3058-021-Q1-K1-F3
gccgcctgaaagatgctctgatctttggcccctgtgggtcagacctagtgccctgtatcgaaccgagtccttccggcagccacaccatgaatacgtctccaggcacagtgggcagtgaccccgtcatcttggccactgcaggctatgaccacacggtgcggttctggcaggcccacagcgggatctgtacgcgaactgtgcagcaccaggactcccaggtgaacgcgctggagatcacacccgaccgcaccatgattgcagctgcaggttaccagcacattcgcatgtatgatctcaactccaataaccccaaccccatcatcagctacgacggggtcaacaagaacgtcgcgtcggtgggcttccacgaggacgggcgctggatgtacacgggcggggaggactgcacagcccggatctgggacctcaggtcccggaacctgcagtgtcagcgaatcttccaggtgaatg

SEQ ID NO: 5325 - DNA, 471 bp, Bos taurus
  Clone ID: 23-LIB3058-022-Q1-K1-F3
agaggataaacacaagatcttgtattgtgaagtacccaaggctggctgctccaactggaagagaattctgatggtgctcaacggcttggccccctctgcgtacaacatctcccatgatgctgttcactacgggaagcacttgaaaaagctagacagctttgacttaaaggggatttatagtcgtttaaacacctacaccaaagctgtgtttgttcgtgatcccatggaaagattagtgtcagcatttagggacaaatttgaacaccccaatagttattaccatccagtatttggaaaggcaattataaagaaatatcggccgaatgcctgtgaagaagcattaaataatggatctggagtcaagttcagagagttcatccattatttgctggactcgcatcgtccagtaggaatggacattcactgggaaaaggtcagcaaactctgctatccctgtttgatccactacga

SEQ ID NO: 5326 - DNA, 407 bp, Bos taurus
  Clone ID: 23-LIB3058-023-Q1-K1-F11
ccggaacctaaatacaaccttcttcgacccggcaggaggaggagaccctattctatatcaacacttattctgattctttggacaccccgaagtctatattttaatcttacctgggtttggaataatctctcatatcgtgacctactactcaggaaaaaaagaaccattcggatatatgggaatagtttgggctataatgtcaatcggatttctaggtttcatcgtatgagcccaccatatattcactgtcggaatagacgtcgacacacgagcctacttcacatcagccactataattattgctattccaaccggggtaaaagtcttcagctgattggcaacacttcatggaggtaatatcaaatggtctcctgctataatgtgagccctaggctttattttcttat

SEQ ID NO: 5327 - DNA, 422 bp, Bos taurus
  Clone ID: 23-LIB3058-023-Q1-K1-F3
ctgggatggagcgcgccttggcccgctggcctgggccgcggctcctccggagagcccgggcgcccacgcgagaacctccctacccgggtctgtcttcaaggatgacaccttccgtctgccttcctgccaccaaggaccacctgtggatgacgagctgatgcccagaggacgccaggagcaggggttcctggatcccaccagcaaacaaagcaaccactgggcagtgaccgcccccccaggccgccgaagattgaagaggacccgaactgaccaaccagctgtccctcttggctaagtgttgaaaccagtgccctagtgagggggcactggctaacctcggactttcgatgtgctttttgccttgatgcttttgcttttttttccctttatgtgcgtctgcttctgttaacctttcatcaacc

SEQ ID NO: 5328 - DNA, 389 bp, Bos taurus
  Clone ID: 23-LIB3058-024-Q1-K1-F3
cgacagtgttcctgaggcactagggatgtggaagccatagcattgctgttcacttccgtgtcctgatctgtgctggccagaccttgacctcataagacagaagtgtatctggccctacttctctactggggtcagttggcctcactagacacccagggcttcccaggtggcccatactgtaaagaatctgcctgcaatgcacgagacctgggttcagtccttgggttgggaagatctggaaaagggaatggctacccactccagtattcttgcctggagaatcccatggataaaggaacctaccatgctacagtccatagggttacacagagtcagacatggctgaacgatttaacactgggagagcctctatgcctaattgtgaacac

SEQ ID NO: 5329 - DNA, 415 bp, Bos taurus
  Clone ID: 23-LIB3058-025-Q1-K1-F3
gttctagatcgcgagcggccgccctttttttttttttttaaaaacaagaacgtgtttatgtttcatcattggttatagttcatctgatatttgacacagaacaggccacatttaaataaacacattaaatgttcagaacattttaactgaagttttggaccttagatatgacaaatactcatgtaagatgtttccatgatttcttttgtgatttatttttataaacatgataaaatgtcataaaaatttctcacgtgaaacacttttcttcaacattttacaagttaatcaaatgtaatcaaatgtatatcacaatagattttgctgtggttgctgtttaaagagagagttttcatgcttttataatcaaaaaagatacttgaaataatttctatccaattaaatgctttgaggc

SEQ ID NO: 5330 - DNA, 348 bp, Bos taurus
  Clone ID: 23-LIB3058-027-Q1-K1-F11
caaacttctagttataagataaacaagtattagggatgcagtgtaccagacaataaatgtaatgtaatacttctgtgttatatatgaaagttgttaaagtgaatcctgaattctcatgacaaggaaaaacacacttttctttttctttatttttatctatataaaatgaaggatattcaccaaacttattgtggttatcatttcatgatgtatgtaagtcaagtgattatgttgtacaccttgaacttatatgctgctctgtgtcaattatttgaaaagaccctgatgctgggaaagattgtgggcaggatgataaggggacggcataagatgagatggttggatggc

SEQ ID NO: 5331 - DNA, 426 bp, Bos taurus
  Clone ID: 23-LIB3058-029-Q1-K1-F11
cggacgcgtgggattttaatcttacctgggtttggggtgtccaaagaatcagaataagtgttgatatagacttcggggtgtccaaagaatcagaataagtgttgatatagaatagggtctcctcgaagtctatattttaatcttacctgggtttggaataatctctcatatcgtgacctactactcaggaaaaaaagaaccattcggatatatgggaatagtttgggctataatgtcaatcggatttctaggtttcatcgtatgagcccaccatatattcactgtcggaatagacgtcgacacacgagcctacttcacatcagccactataattattgctattccaaccggggtaaaagtcttcagctgattggcaacacttcatggaggtaatatcaaatggtctcctgctataatgtgagccct

SEQ ID NO: 5332 - DNA, 252 bp, Bos taurus
  Clone ID: 23-LIB3058-030-Q1-K1-F3
cgcgagcggccgccctttatttgtttttttttttttttgcaatccttaaatagatttatggaaatggttttgaattacagcatttagaaaataaaaataatctcagtgcataatataccctccattgtatacttttgttctcccacacgcgctggtgtttaggccggtgtattccactgtcaaacagtagttggagattatgctatagaagaagcagtaggtgagcccgttcggtagaaataaaactgcaat

SEQ ID NO: 5333 - DNA, 437 bp, Bos taurus
  Clone ID: 23-LIB3058-031-Q1-K1-F11
gctggtgtcaggccggggttcggagacccttacataccgtcggcggcagaacaggccggaggcagcccggggtttgctttaggaagagcggctttaaaacctgtgcgcccggctcctctggcagataccattgtgtattttgaatcaggaatgaattttttttaatgctaatagttgatgtctttttcagtatttttgtttttttactttttttctttattctagtatctttattttttttctattttttttcatttctttttttttttcttattttttttatttattttttttgttttttttttttcttgtttatattttattatttttattatttatttttttttgtttattttgtattttttttatttttttttaatttttattcttttatttttgttattttattttttttttttatttatatttgtttattt

SEQ ID NO: 5334 - DNA, 278 bp, Bos taurus
  Clone ID: 23-LIB3058-031-Q1-K1-F3
cccgactcgactcacgcgtccgagatcgcgagcggccgcccgcgatctataacctatacatgaatatttatagagctttagttggcagtgtttaaaaatggaagccactcagatgttcattaatcagcacatggaatactactcatcaatgaaaaggatggatattgattaattttataatttatttttctgtattatatttttttttctatttttatttatattcttattttatgttttcttttatatattttatcttttttttttactcttatttt

SEQ ID NO: 5335 - DNA, 406 bp, Bos taurus
  Clone ID: 23-LIB3058-032-Q1-K1-F3
tctagatcgcgagcggccgcccttttttttttttttttaaattctgtaagtgttttaggtatcattgaagaaaaaacacagcagcaagttctgtgttggcttcaataagaccaaagagttaatctttaacatagctactacactccaaaattgaagtctacagtcattactacaaattacttattgaaagaatttattcttaatagaaaggaaaatttgaataagaatttaaagaatttcttttatctcactcatttataaattttgtcatattttaaatgcttgtaaggcatgaattcttcatattttgataagcatgttgttattttctttattttctttttattctttttttaccattttttattttttatttttgttttttatttttttgtttatttctatt

SEQ ID NO: 5336 - DNA, 423 bp, Bos taurus
  Clone ID: 23-LIB3058-034-Q1-K1-F3
tcgtgggagaagagacaggcattgttttgttttactttcattagcttggcactgaattgtcgaggtgcccacaaggtgggcagaccttatgctttgggggttgagggcaggccttacacaaactaaaagctgcttatgatgtgccttcaacaagctgctcagtcctctccatcagcaaacttaccagtctgtagttgcttttatccttttgtaaaatctatagcaatgaatgtagatttagttcaacttttagttctctcaaactaaatggctcagacggtaaagcgtctgtctgcaatgcaggagacccgggtttgatccctgggttaggaagatcccctggagaaggaaacgtcagcccactccagtactcttgcccggaaaatcccatggccggagaagcctgttcggctactgtccatg

SEQ ID NO: 5337 - DNA, 170 bp, Bos taurus
  Clone ID: 23-LIB3058-035-Q1-K1-F11
tcgtgtatagtccatggaattctccaggccttaattctggagtaggtagcctattgcttctgcaggggattttcctgacccaggaatcaaaccagggtctcctgtactgcaggcagattctttatgagcagagctaccagggaagacccccacaactttagaataacagc

SEQ ID NO: 5338 - DNA, 430 bp, Bos taurus
  Clone ID: 23-LIB3058-038-Q1-K1-F3
aggtgatgctctgtcttgactaatccctgtcatttgacgtggcgtgctgtcctcagttggtctgactgagagcagtactggttggacctaatcgagtggacttccagatggagctcagaggagctcataggacctggcatccccaccggattcatcacctaacatgcgcttgaagacacacctatgctgtggttggtgaaggctcatcagactggccttatgatctcttctggccacacttgtgtacagtacccatttaaccttgcctggtgttttaagattggaacattgctgtgatgtgtagagaatcacacgtggaaatactgctcagaaggtttgcttcacttgacttaagtggaacccaagtatcacagctggtgcaaatgattttcaatgcttgctcggaacattttgagtatgtccactatct

SEQ ID NO: 5339 - DNA, 435 bp, Bos taurus
  Clone ID: 23-LIB3058-039-Q1-K1-F3
agtgaatcgtgtagagtacactgccagtctcttgtcttctcttcaccatggcttcttctgataggcaagtgaaagaactggaaaaacgtgcctcaggccaggcttttgagctgattctcagccctcgatcaaaagaatctgtcccagaatttcccctttcccctcctaagaagaaggatctttccctggaggaaattcagaagaaattagaagctgcagaggaaagacgcaagtcccatgaagctgaggtcttgaagcagcttgctgagaaacgggagcacgagaaagaagtgcttcaaaaggcgatagaagagaacaacaacttcagtaagatggcggaagagaagctgacccacaagatggaggccaacaaagagaaccgagaggcgcatatggccgacaagctggaacgcttgcgggaagaggacaagcaca

SEQ ID NO: 5340 - DNA, 448 bp, Bos taurus
  Clone ID: 23-LIB3058-040-Q1-K1-F11
ttaccggcccgacccactcgttcggggggcgcatagacccggtagaagctgtgcatcctggacaaggtggagccccaagccaccgttgccgagatcaagaaccttttcaccaagacccacccacagtggtaccccgcccgccagtccctccgcctggaccccaagggcaagtccctgaaggatgaggatgtcctgcagaagctgcccgtgggcaccacggccacactctacttccgggacctgggggcccagatcagctgggtgacggtcttcctgacagagtacgccgggcccctctttatctacctgctcttctacttccgggtgcccttcatctacggtcgcaaatacgacttcacgtccagtcggcacacggtggtgcaccttgcctgcatctgccactcattccactacatcaagcgcctgctggagacgctcttcgtgcacc

SEQ ID NO: 5341 - DNA, 437 bp, Bos taurus
  Clone ID: 23-LIB3058-040-Q1-K1-F3
ccactcgttcgcggaccgtgccccagtgagagagcgggttggtgggccaggagcgcagcagcggcggagggcggccggagctcggccccagccaagtcgggcctcccagccagccccgcggcggggcagccgcaggagccctggctgtggccagggggcagtgggccatgccgggggcagtggaacgccccagctggaagcaggcagaggacattagagacatttacgacttccgagatgttctgggaacaggagccttctctgaggtcatcctggcagaagataagaggactcagaagatggtggccatcaaatgtatcgccaagaaggctctggagggcaaggagggcagcatggagaatgagattggctgtctacacaagatcaagcaccccaacatcgtaaccctggatgacatctacgagagtggggggaca

SEQ ID NO: 5342 - DNA, 210 bp, Bos taurus
  Clone ID: 23-LIB3058-043-Q1-K1-F3
tcattgaatgatggtggaggttctggaaatgaagtctgactagaattttactgcagaggccaagtacatttagtatggcattgagttgtgatatagttttactttgatgtgcattttgaatttcagctacatctagatagacgtaaaatgataattaaaatgctgtaaccaacttatctaataaaatcggcacccagccaaaaaaaaata

SEQ ID NO: 5343 - DNA, 385 bp, Bos taurus
  Clone ID: 23-LIB3058-044-Q1-K1-F3
ctgaatgtggttaaagaattaaaggccttgcttactgcttgaaaatgaagccttaagctgcaccaagttgtgacgtgattgatttccctctcagcaaacctccgggacgttccagaatgagtctttcctgacaggttgtcctttccgggaacctggggcacacgccccactggtgtcacccacccttcagctggagttggttttaattcccaaaggtactgagcagctggaacctgggggcctggggcctggggtgacgcctagaggacagtccctgcagaggccactcttgatcacatgggctgtgacctccgtcaggacggatggggtggccctgccccccgacagtggaattgggttgttcttaagcacgcgtaaagggggc

SEQ ID NO: 5344 - DNA, 427 bp, Bos taurus
  Clone ID: 23-LIB3058-045-Q1-K1-F11
ggtccttgctcttcagcattgcttctgttgtcaagcgaatagatttcaaggagcagatcatccatcacgtggccaccatcatcctcatcagtttctcctggtttgccaattacgtccgagcagggactcttatcatggctctgcacgactcttctgactacctgctagagtcagccaagatgtttaactacgcgggatggaaaaacacctgcaacaacatcttcatcgtcttcgccattgtcttcatcatcacccgactggtcatcctgcccttctggatcctgcactgcacgctggtgtacccactggagctctatcccgccttctttggctattacttcttcaatttcatgatgggagtgctacagctgctgcatatcttctgggcctacctcattttgcgcatggcccacaagttcataactgg

SEQ ID NO: 5345 - DNA, 388 bp, Bos taurus
  Clone ID: 23-LIB3058-046-Q1-K1-F3
agagattgtcctctcctgggaagagggctttttttcccggaatggtacatgtctcccacctaattgcatctcaccagtgattgtcctctcctgggaagagggcttttttcccggaatggtccatgtctcccatgtatctttggaactagcagttgtcttcgttttaacttcagcatggtcttacactggcaccttcaaagccacattatttctaggccacagtgcgggtgatgaaaggtctttgggttaggcattaatgtttctctctctgattttgtgcagaagcttcaaattaaaatagcttcagtagaaaaagaggcgctttgcccctccgcctgacacctaaaggtgtaattgaaactatcttgggtgattaacttatttagag

SEQ ID NO: 5346 - DNA, 265 bp, Bos taurus
  Clone ID: 23-LIB3058-047-Q1-K1-F3
atgtaaagtttactgccgatctgtttattgattggtagcgtttctgtacatctgttaaggtagtatttcttagagtgttctgtagactagtgttcttccattcctcaattgatcgcaaagtaggctctgttgtaccattgtgattagaatttaaactaaatcagagaattgtattctttactggacatactggactctttaattcttaaggtcgtcgctacactggtttatcctgatggctttgctcaacaatccgatgcattcc

SEQ ID NO: 5347 - DNA, 433 bp, Bos taurus
  Clone ID: 23-LIB3058-048-Q1-K1-F3
ctctgctttattgactataccaaagtctttgactgtgtggatcacaataaactgtggaaaattctgaaagagatgggaatacctgcccacctgacctgcctcttgagaaacctatatgcaggtcaggaagcaacagttagaactggacatggaacaacagactggttccaaataagaaaaggagtacgtcaaagctgcatattgtcaccctgcttatttaacttatgtacagagtacatcatgagaaatgctggactggatgaagcccaagctggagtcaaaattgccgggagagatatcaataacctcagatatgcagatgacaccacccttatggcagaaaatgaagaggaattaaaaagcctcttgatgaaagtaaaagaagagagtgaaaaaagttgcttaaagcttcacattcagaaaacgaagatca

SEQ ID NO: 5348 - DNA, 446 bp, Bos taurus
  unsure (437): unsure at all n locations; Clone ID: 23-LIB3058-049-Q1-K1-F3
acccacgcgtccgggaaagtgtgtgtcaacgtgcacagctttttcccggaggacttgatggtaaaaaccaaggacggttacttgaaggtgtctggtaaacacgaagaaaagcagcaggaggggggcatcgtctccaagaacttcacaaagaaaatccagctttcctgcagaaggtggatcctgtgacagtgtttgcctccctttccccagaaggcctgctgatcatcgaagctccccaggttcccccttactcaccgtttggagagagcagtttcaacaatgagcttcctcaggacggccaggaagtcacttgtacctgagaccccagtcttggcccttccttgttcccgccccaacccctgggcttctctgattccaggatacattactatagctgaactcatagatttagtgtggctaaaatgttgggggtcggngtggattga

SEQ ID NO: 5349 - DNA, 287 bp, Bos taurus
  Clone ID: 23-LIB3058-052-Q1-K1-F11
cggacgcgtggggtttgaggaacctttattggaataatgacatattacaaggtaaaattaattcctattaagcaacttagttctttataaatctctgccttttttttttttttttaccaaataaatatatagatgcaaagagtgactgctatttgaataaaataagacaatgtgtcagaaaaaaaaaaatatataaaaaaaataatatatatttttaatatattatattataataactttatatatcttattaaatattaatttaaataaaaaaaaaaaaagggggc

SEQ ID NO: 5350 - DNA, 389 bp, Bos taurus
  Clone ID: 23-LIB3058-052-Q1-K1-F3
ggaccactgagctggagggatcaagctagccctgaataggaaacttaaagagggtggatgggagcagggttcaagattcagagccggaatgtccttcctgctctgtccccatagccaaccccagactcctcagaaagaagaaatttctcctcagaaaatagaaataatccaagaagcgaaccacttattgagacttgaggggtctcttagtggaaggggggaggggcgtgacgacaaaatccacttctcttctgtctttaccttgtctgtccctttccccagctccttccctcctctccccctttgtgctgcccacatcattctgctccttggtctgtcttccacctgaagtcctctccggctacagccaggcaggtgttcttctttct

SEQ ID NO: 5351 - DNA, 418 bp, Bos taurus
  unsure (377): unsure at all n locations; Clone ID: 23-LIB3058-053-Q1-K1-F11
gtttgccgccgggacacatgtgtcgtgaaaaccaccgttaaacctaatccaaaatgggaaaggagaagacccacatcaacatcgttgtcattgggcacgtagattcagggaagtctaccacgactggccatctgatctataaatgtggcgggatcgacaagagaacaattgaaaagttcgagaaggaggctgccgagatgggaaagggctccttcaaatatgcctgggtcttggacaaacttaaagctgaacgtgagcgtggtatcaccattgatatctccctgtggaaatttgagaccagcaagtactatgttaccatcattgatgccccaggacacagagacttcatcaaaaacatgattacaggcacatcccangctgactgtgctgtcctgatcgttgctgctggtgttggtga

SEQ ID NO: 5352 - DNA, 348 bp, Bos taurus
  Clone ID: 23-LIB3058-053-Q1-K1-F3
aaaacaagagcgctcttcggagacagtatacctttcagcgcataagaagcactggcccgccttgcaggtcgctgcggagaacgtcttacgtagtgtctatagccatcagattgctgagtctctcgtttgtgcatttgagtgatatttttttcgctctattttatttttactattttaggtttaataccttttacgctggttaaaactttgtccttattaatcttaatttctttttatctctatgttttttagtctgttttcttattatcttttagcctctcatttttttttctttctaattatctttgattttttatattttaatttttatttttgttctttattgtt

SEQ ID NO: 5353 - DNA, 335 bp, Bos taurus
  Clone ID: 23-LIB3058-056-Q1-K1-F3
tgaagataaacctaatggtaaagatgtttaattggcaactgaaactgattaggatacaggaaaaagtgttagtgacagacagtctgcggtaactgaatcctcatggggtacagtatccttattgaggtctcacagaaatctcttcttatctaagttgaaacgtggaaaccaacaacaagattttaataagaaagaggaaagagtggaaactcctcaaagtggaagaaagaattagaacagttagacgagccactgaaagtaagagaacacgtattttaaaaagtgagtctgtaacttctgaaaagcatcggtctaggaaaaaacaggcatggttt

SEQ ID NO: 5354 - DNA, 249 bp, Bos taurus
  Clone ID: 23-LIB3058-057-Q1-K1-F11
gtcaccctgcgatctgttacagtccaagcattgaccagattaaactgcaggttccaggatgggtggacttgatgggaaggtgtttgattctttctttttttttttattgttttttgttatgtttttttattttatttctttttttttatattttatttttgttttttttttattatttgttttttaatttttctttttatttatttgtttttttattttattattatattttttttttttattttttta

SEQ ID NO: 5355 - DNA, 353 bp, Bos taurus
  Clone ID: 23-LIB3058-057-Q1-K1-F3
gcggtttctggaggcgaagaacgcggttggccaatcgcaagccagaagatgaaggttctgtgggttgccgtggtggtcgcgcttctggcaggatgccaggcggatatggagggagagctggggcccgaggagcccctgactacccagcatccccatgggaaggacagccagacttgggagcaggcgctgggccgcttctgggattacctgcgctgggtgcagaccctgtctgaccaggtgcaggaggagctgctcaacacccaggtcattcaggaactgacggcgctgatggaggagaccatgaaggaggtgaaggcctacaaggaggagctggagggacagctaggccccat

SEQ ID NO: 5356 - DNA, 448 bp, Bos taurus
  Clone ID: 23-LIB3058-058-Q1-K1-F3
agcgaggcggccgaatcttccttcaggatattaagtaaccagaccgtgatgactgggagaatgggctgactgcaatggaatgtgcgctgtgcttggagagaagtgtgaatcagtcactactggaactgcacaaactggccactgaaaaaaatgatccccatctgtgtgatttcattgagactcattacctgaatgagcaggtggaagccatcaaagaattgggtgaccacataaccaacctgcgcaagatgggggctcctggatctggcatggcagagtacctctttgacaagcacaccctgggacacagtgagagctaagcctcaggctggtttcccacagccacaggggtgacttccctggtcaccaaggcagtgcatgcatatttgggttaccttcatcttttctataagttgaacaaaacatttacttaagttcttttttttag

SEQ ID NO: 5357 - DNA, 246 bp, Bos taurus
  Clone ID: 23-LIB34-001-Q1-E1-F11
aagcctgctgaggtggtctcagagaacgtcatccccgccctggggctggtggagcccatcaagaaggacccagcccctgcaaaggctgacatttactgcgaggtgtgcgagtttgtggtgaaggaggtggccaagctgattgacaacaacaggacggaggaagaaatacttcacgcgctggacaaagtgtgctcgaagctgcccacatccttagctgagcagtgccaggaggtggtggacacctac

SEQ ID NO: 5358 - DNA, 404 bp, Bos taurus
  unsure (400): unsure at all n locations; Clone ID: 23-LIB34-001-Q1-E1-F3
gttatgtagtagtttgagcattcttttgcattggctttctttgggattggaatgaaaactgactttttccaatcctgtggccactgctgagttttctaaatttgctggcatattgagtgcagcactttcacagcatcatctttcaggatttggaatagctcaactggaattctgtcacctccactagctttgttcatagtgatgctttctaaggcccacttgacttcacattccaggatgtctggctctaggttagtgatcacaccatcttgattatctgggtcgtgaagatctgttttgtacagttcttctgtgtattcttgccatctcttcttaatatcttctgcttctgttaggtccataccatttccgtcctttatcgagcccatctttgcatganatgt

SEQ ID NO: 5359 - DNA, 351 bp, Bos taurus
  Clone ID: 23-LIB34-002-Q1-E1-F11
cggtctaggctatccgggtcggaccacgcgtccaggcaatgtttaccttaaaataaatctgactcaagattttttatgtatgtataaagaagtattttgtgtgctacaaaagccttttcaaattaccaataattttttttggctaaggaatcagacagtatatgcccagtgcactgtaaaggaacatggagatggaagctcagctcgtgatgacagggctcgggagactggtttaattttggcaactgtgaacaggtaactgactgcgtcataatctccgacggacttcttacttcgagtgacaaatttccgtgcgcaactagtacacttggagccatacacacatcttgg

SEQ ID NO: 5360 - DNA, 338 bp, Bos taurus
  unsure (12): unsure at all n locations; Clone ID: 23-LIB34-002-Q1-E1-F3
agcctcgagcanggagctggtggctcttccatccccagaccagccaagcctgtgagtgacaccccagacagaggaaccagagccatgcggagtctcagcggactgctgttgttactgactgcctgcctggcggtaaacgccagctccgtgcccacattgcccgatgacattcaagtgcaggagaacttcgacctgtctaggatctatgggaagtggttcaatgtggccgtgggctccacctgcccatggctgaagaggttcaaggagaagatgaccatgaccacagtggtgttgaaagcggggccgacgaccaaggatatcagcgtcaccaacactca

SEQ ID NO: 5361 - DNA, 399 bp, Bos taurus
  Clone ID: 23-LIB34-003-Q1-E1-F11
ggcatttcgtgtggcaagtccatgatgagctccgtgagcctgatgggcggccgggccggggtgcccctctacgaccggaaccacgtcaccggggcctcgtccagcagctcgtccagcaccaaggctacactgtatccaccgatcttgaacccgccgccgtcccccgccacggacccctccctgtacaacgtggacgtgttctactcttccaacattcccgccgccgccaggccttacaggccctacatcatccgcggcgtggcgcccccgaccacgccctgcagcacggacgtgtgcgacagtgactacagcgccagccgctggaaggccagcaagtactacctggatctgaactcggactcagacccctacccgcctccgcccacaccccacagccag

SEQ ID NO: 5362 - DNA, 390 bp, Bos taurus
  unsure (368): unsure at all n locations; Clone ID: 23-LIB34-003-Q1-E1-F3
gaagacgctgtcacaagagtcagggatccaacaacaggccttgagaaatgtggctcttatacctcctgctgccagtcctgttctacagggtgggaggcgccacacccagccctcagaagctctatggggaggtgatgtccccgctgttccccaagccttaccctaacaattttgagaggaccactgtgatcacagtacccacggggtacaacgtgaagcttgtcttctggcagtttgacctggagccttcgggatgttgtctctatgactatgtcaagatttctgctgataataagaccatggtgaggttctgtgggcagctgggttctcccctgagcaatctcccaggaaggaaggaattcatgtcncaagggaacaagatgctgctga

SEQ ID NO: 5363 - DNA, 353 bp, Bos taurus
  Clone ID: 23-LIB34-004-Q1-E1-F3
ccgcgcccggcgcctcattgagctgtacaaggaggctgggatcagcaaggagcggatcctgataaagctctcgtccacctgggaaggaattcaggccggaaaggagctggaggagcaccacggcatccggtgcaacatgaccctgctcttctccttcgcccaggccgtggcctgcgccgaggccggcgtgacgctcatctcgcccttcgtgggccgcatccttgactggcatgtggccaacacagacaagaagtcctacgaaccccaggaggaccccggattgaagagcgtcaccaagatctacaactattacaagaagttcggctacaagaccatcgtcatgggtgcctcct

SEQ ID NO: 5364 - DNA, 402 bp, Bos taurus
  Clone ID: 23-LIB34-005-Q1-E1-F3
ggctgaacttagttcttggataatctagttcatgtgcattaggctgccacatatactactatgataatgagctgcagtatcaatgtggcataaatactgcagtagtattcttggaaaaccaaatttccaagtctttacctggaatcagtgtgggcctgttataaaactaaatcatgatacaagaagcagtcttgaaaaagttatttccttttgtagtaccataaaaaaacagaatattatgttcatcttactactactgtggaaacaggttctagatttcacacttcatcgaaagtcacttttcagttaaatgtaagtatttttcactgctgttgggatctattccttagatattcaaattcttttttacttactttaaatttaaaatgcataactttaaat

SEQ ID NO: 5365 - DNA, 354 bp, Bos taurus
  unsure (42): unsure at all n locations; Clone ID: 23-LIB34-007-Q1-E1-F3
gcagctggtccccacctgtcagcccctcacggagatgctgcncggagcctggctgtgctgggcctgcctcctgctcctggccaggcccaccctgccctgcccccagggctgtgactgcttcatccgggaagtgttctgctccgatgaagggctccccgccgtcccaatggacatcccgccaaacgccacagacatcatccttgtggagacctccttcactgtggtgggctccaaggccttcaacaacaaccccaacctgaccaaagtggtcttcctcaacacccgggtgtgccacttcaggccggatgccttctggggcctttcggggctccacgatctggagatcaccggggg

SEQ ID NO: 5366 - DNA, 369 bp, Bos taurus
  Clone ID: 23-LIB34-008-Q1-E1-F11
gcacgaggctaaagacatttgcgaggcacaggtcaacagcctgggccgcagcatcgctaaggcaggagacttcctcgaaaaccactacagagagttgcgaagaccatatactgtggccattgctgcctatgccctggctttgttgggcaagctggagggtgaccgcctcaccaaatttctgaacacagccaaagaaaagaaccgctgggaggaacccaaccagaagctctacaatgtggaggccacgtcctacgccctcttggctctgctggcacgcaaagactacgacactacgcctcctgtcgtgcgctggctcaacgagcagagatactatggaggtggttatggctccacgcaggccactttcat

SEQ ID NO: 5367 - DNA, 423 bp, Bos taurus
  unsure (393): unsure at all n locations; Clone ID: 23-LIB34-008-Q1-E1-F3
cggacgcgtgggggcaagatggcggagtacgacttgactactcgcatcgcgcactttttagatcggcatttagtctttccgttgcttgagtttctctccgtaaaagagatatataatgaaaaggagttgttacaagggaaattggatcttcttagtgataccaacatggtagactttgctatggatgtgtacaaaaacctttattctgatgatattcctcatgctttgagagaaaaaagaacaactgttgttgcacagctgaaacagcttcaagcagaaactgaaccaattgtgaagatgtttgaagatccagaaactacaaggcaaatgcagtcaaccagggatggtcggatgctgtttgactacctgtcagacaagcatggtttcaagcangaatatttagatacactgtacaggtatgca

SEQ ID NO: 5368 - DNA, 374 bp, Bos taurus
  Clone ID: 23-LIB34-009-Q1-E1-F11
acagcatatggataagcgctgtagcccacatctagtcttgtctgcattgctttctgacaaccatagtgccacctacgctttcagtgagaaccactactggcgtctggacagcagccgggacgggtggcacagctggcgcattgagcatctgtggccccaaggtccctcaacagtggatgctgcctttctctgggataaaaagctctacctcatccagggtacccaggtatatatcttcctgacaagggcaggctacactctcgtaaaagattatccaaagcagctggagaaggaatttgggagccctgatggggtctgccttcattctgtggatgcagcctttacctgtcctggatcttctcagctctacatca

SEQ ID NO: 5369 - DNA, 333 bp, Bos taurus
  Clone ID: 23-LIB34-009-Q1-E1-F3
gccaagtccggatcccacgccgtgcgcctccgacgcccgcccgctcgacggtcactcccggttcctttagggtctaagtccaagatggcaactctcaaggatcagctgattcagaatcttcttaaggaagaacatgtcccccagaataagattacaattgttggggttggtgctgttggcatggcctgtgccatcagtatcttaatgaaggacttggcagatgaagttgctcttgttgatgtcatggaagataaactgaagggagagatgatggatctccaacatggcagccttttccttagaacaccaaaaattgtctctgggaaagactat

SEQ ID NO: 5370 - DNA, 428 bp, Bos taurus
  Clone ID: 23-LIB34-010-Q1-E2-F11
ccaacatgaagcttggtcatgtcatcctcttacttttgtgcttctacttaagtttttgtgaggataattttagaaaacgaggaaagtcaaaggcagtgaagaaatcagaggctcaccatgcccctgaagcaagtctgagcaaggagacagaagcttcatctgaagtgaagcccacttcaacacaagacacatctcaaaaagatttcgtggataaaaagtgcttaactgaaaaacacacacatctctcctgcaacaaagtcttctgccaaccgtggcagaaatgcatcgatgggacgtgtctttgtaaacttccttatcagtgcccgaagaatggtaccagggtgtgttcaactaatgggaaaagctactcaacttactgtcagcagaagagttttgaatgttatcgtcctgaggcataatttttgaaa

SEQ ID NO: 5371 - DNA, 378 bp, Bos taurus
  unsure (327): unsure at all n locations; Clone ID: 23-LIB34-010-Q1-E2-F3
ctacttgaatgcgcagatgacagggcagatcttgccaagtacatatgtgataatcaagatacaatctccagtaaactgaaggaatgctgtgataagcctttgttggaaaaatcccactgcattgctgaggtagaaaaagatgccatacctgaaaacctgcccccattaactgctgactttgctgaagataaggatgtttgcaaaaactatcaggaagcaaaagatgccttcctgggctcgtttttgtatgaatattcaagaaggcatcctgaatatgctgtctcagtgctattgagacttgccaaggaatatgaagccacactggangaatgctgtgccaaagatgatccacatgcatgctattccacagtgtttgac

SEQ ID NO: 5372 - DNA, 359 bp, Bos taurus
  unsure (352): unsure at all n locations; Clone ID: 23-LIB34-011-Q1-E1-F3
aggacctctgcctggtcctgagtttggtgggtgcaattaagacagaagatggtagtgatcctcccagtggtgactttttaactgaaggaggaggggtgcgtggcccaagacttgtggaaagacagcaatctgcctgcaaagagacaggctggcccttctgctctgatgaagactggaatacaaaatgcccttctggctgcaggatgaaagggttgattgatgaagtcgatcaagattttacaagcagaataaataaactaagagattcactatttaattatcagaagaacagtaaggactctaatacattgaccaagaacatagtggaactaatgagaggggattttgccanagctaac

SEQ ID NO: 5373 - DNA, 375 bp, Bos taurus
  Clone ID: 23-LIB34-012-Q1-E1-F3
aaagagacgtcgctatgaacgcttggccgccacaagccagttatccctgtggtaacttttctgacacctcctgcttaaaaccccaaaggtcagaaggatcgtgaggccccgctttcacggtctgtattcgtactgaaaatcaagatcaagcgagcttttgcccttctgctccacgggaggtttctgtcctccctgagctcgccttaggacacctgcgttaccgtttgacaggtgtaccgccccagtcaaactccccacctggcactgtccccggagcgggtcgcgcccggccggcacgcggccgggcgcttggcgccagaagcgagagcccctcggggctcgccaccccgcctcaccgggtcagtgaaaaaacga

SEQ ID NO: 5374 - DNA, 435 bp, Bos taurus
  Clone ID: 23-LIB34-013-Q1-E1-F11
gtcgacggacgcgtccgatgtgcaaaagatgatccacatgcatgctattccacagtgtttgacaaacttaatcatcttgtggatgagcctcagaatttaatcaaacataactgtgaccaattcgaaaaacttggagagtatggattccaaaatgcgctcatagttcgttacaccaggaaagtaccccaagtgtcaactccaactctcgtggaggtttcaagaagcctaggaaaagtgggtactaggtgttgtacaaagccggaatcagaaagaatgccctgtactgaagactatctgagcttgatcctgaaccggttgtgcgtgctgcatgataagacaccaatgagtgaaaaagtcaccaagtgctgcacagagtcattggtgaacagacggtcatgtttctctgctctgacacctgatgaaacatatgtaccc

SEQ ID NO: 5375 - DNA, 374 bp, Bos taurus
  Clone ID: 23-LIB34-013-Q1-E1-F3
atcaaagaggtggaaggatgcccccagtcccgtggatgctgcattccgctatgatcgtaacagtgtccttctgatcaagggggacaaattctgggtatatcctcctgagaagggggaggaatatccaaagttgctccaagagaagtttcctggaatcccattcccactggatgcagctgtggaatgtcaccgcggagaatgctctcatgaaggtgtcatcttcttccaaggcaaccacacgtggttctgggacttctctacaaaaaccataaagaaacgttcctggccagccgttgggaactgctcctcggccatacgatggctcaaccgctactactgcttccggggtaacaaattcctgcgctttcgacccg

SEQ ID NO: 5376 - DNA, 401 bp, Bos taurus
  unsure (361): unsure at all n locations; Clone ID: 23-LIB34-014-Q1-E1-F3
attacacagattcaaatagtgtcttaaactacagagaagattcaggtatactgtcatttgatgatggtggtaatcagaacatactttcaaatagtttaactagtaagagaagtgaaaccatagagtcgatctttaaggctgaagatttgcttccagagacagcttcactctctgagaatgtggaaatcagtaaagaagaagcacccaccatcagaacacttaaatcacagtcatccttaagcggaaagcctaaggaacgttgcctacccaccttggctccagtctctacttataagaacatgagaagaagcccctcacaaacctcactggataccatttcacttgacagcatgatattggnagaacagttattagaaagtgatggaagtgatagtcatata

SEQ ID NO: 5377 - DNA, 359 bp, Bos taurus
  Clone ID: 23-LIB34-015-Q1-E1-F11
atccgccgggatggtcaccacctcgaccacactggcctgggccctcctcctcatgatcctgcaccctgacgtgcagcgacgggtccagcaggaaatcgatgaggtgatacggcaggtgaggcgaccagagatgggggatcaggccctcatgcccttcaccgtggccgtggtccatgaggtgcaacgctttgcggacatcgtccccctgggattgccccacatgacatcccgtgacatcgaggtgcagggcttccacatccccaaggggacgacactcatcaccaacctgtcgtcagtgctgaaggacgagaccgtctgggagaagcccttccgcttccagccggagcacttcctggatg

SEQ ID NO: 5378 - DNA, 382 bp, Bos taurus
  Clone ID: 23-LIB34-017-Q1-E1-F3
cggacgcgtgggtggcaacttcctgcccaccctcttctcctccccaaccccttagggtagtcagtactggcgctttcaggacggtgtcctggagcctgacttcccccgaaacatctcggacggcttcgggggtattccggatgatgtggatgcagccttggccctccccgctcacaacttcaacggcagggagcgggtctacttcttcaagggtactcagaagtgggcaggagggtgtgcagacagtggagcagttttgggtttcttccacgcttcactggggacgagcctgtgtttatcccccaccttccctccacaccccacctcccctactctcaacccccaccggagctcccaacttccacagccttggggctttcca

SEQ ID NO: 5379 - DNA, 391 bp, Bos taurus
  Clone ID: 23-LIB34-018-Q1-E1-F11
tctagatcgcgagcggccgccctttttttttttttttttatttttatgcagtatacattttattactttgtactaatacattctcatattacaaaggcaacttaatggaagaatgtttcttttgatagttgaataatcagaaagaacacaaacagaactgcacattaaaaaacgtatttcgataacaaaagacaagttcaacaacaacaacaaaaaaatcttcttttcttacaggtagacatcgaagtggatctaattcggttttctttttaacagcctccaaagacaaaagcagcttaaaatctaatttaaatgaataaaaaatttgtttattaaactactggtctccggcaccattttctgttttctgttgttttgatggagggtcttt

SEQ ID NO: 5380 - DNA, 201 bp, Bos taurus
  Clone ID: 23-LIB34-019-Q1-E1-F4
aaactccaataaggaattctttagaggattagatatcaatgcaatgcgtttaacgcgtgaacccagcaatcctgagaggttaaaaagttttggttatgcaaagtttgaggacctgtattccgtgcacaatgccttgagcctcacctaagagtctctatgtaacaagataaatcgagtggacgttactgattaagcacacga

SEQ ID NO: 5381 - DNA, 406 bp, Bos taurus
  unsure (359): unsure at all n locations; Clone ID: 23-LIB34-020-Q1-E1-F11
gtggtatttttgcctttaaggtgaaggatggccctgggggtaaagaagccacctgggtggtggacgtgaagaatggcaaaggatcagtgctccctaactcagataagaaggccgactgcacaattacaatggccgactcggacttattggctttgatgactggtaaaatgaatcctcagacggccttctttcaaggcaaattgaaaatcaatggcaacatgggtctggctatgaagttacaaaatctccagcttcagcctggcaaagctaagctgtgaactccctttgcctcctttgaaaatcaagatgagatatatagatatatatccatatatttcattgtcagaacttagattganactatacattgggaaatagcatgaggtttgtttttaaatgggtgtga

SEQ ID NO: 5382 - DNA, 421 bp, Bos taurus
  Clone ID: 23-LIB34-020-Q1-E2-F11
gtggtatttttgcctttaaggtgaaggatggccctgggggtaaagaagccacctgggtggtggacgtgaagaatggcaaaggatcagtgctccctaactcagataagaaggccgactgcacaattacaatggccgactcggacttattggctttgatgactggtaaaatgaatcctcagacggccttctttcaaggcaaattgaaaatcaatggcaacatgggtctggctatgaagttacaaaatctccagcttcagcctggcaaagctaagctgtgaactccctttgcctcctttgaaaatcaagatgagatatatagatatatatccatatatttcattgtcagaacttagattgaaactatacattgggaaatagcatgaggtttgtttttaaatgggtgtgatcaattccgtttttt

SEQ ID NO: 5383 - DNA, 429 bp, Bos taurus
  Clone ID: 23-LIB34-020-Q1-E2-F3
caggctcggagccccgggcccgccgacaccatgagttggtcctcgcaccctccgagtgtaatcttctacattctttcattgctttcttcagcatgcctggcatatgttgctacccgagacaactgctgcatcttagatgaaagatttggtagttattgcccaactacctgtggaattgcagatttcctgaataattaccaaaccagtgtagacaaagatctacgaactttggaaggcatcttatatcaggttgagaacaaaacatcagaagccagagagctggtcaaagcaatccaaatcagctataaccctgatcaaccatcaaagccaaataacatagagagtgctaccaagaattccaagagtatgatggaagaaattatgaaatatgaaacactgataacaacacatgaatcaacaattcgattt

SEQ ID NO: 5384 - DNA, 428 bp, Bos taurus
  Clone ID: 23-LIB34-021-Q1-E1-F11
ggggcacttggtgtctgggttctgctccagggtccactgcctcccagagaatgtgaccccagaagaacagcacaaagggacgtctgtggatggccactcattagcctccagcaacactgacttcgccttcagcctctacaagcagttggctttgaaggaccccaataagaatgtcatcttctcccctctgagcatctccatagccttggccttcctgtccctgggggctcatgaccacactgtgacagagatcctggaaggtctcaagttcaacctcacagagacccccgagacagaaatccaccagggcttccagcacctcctgcagacgttcaatcagcccagcaaccagctgcagctgagcgtgggcaacgccatgtttgtgtcagaggagctgaagctgctggacaaattcaggaaagatgccg

SEQ ID NO: 5385 - DNA, 373 bp, Bos taurus
  unsure (311): unsure at all n locations; Clone ID: 23-LIB34-021-Q1-E1-F3
caagacgcagatctagtggccgagaggaagaggatgaagagcttctgagacgccggcagcttcaagaggagcaattaatgaagctcaactcgggccttggccagttgatcctgaaagaagagatggagaaggagagggagagccgggagagggcctccctggccgccagtcgctatgattcccccatcaactcagcttcacatgttctatcatccaaaaccgcatctctccctggctatggaagaaatgggcttcaccggcccgtttctacagacttcgctcagtacaacagctacggtgacgtcagcggnggagcgcgagacttacagaccctcccagatggccacatgccctgaatgaggatggacggggg

SEQ ID NO: 5386 - DNA, 359 bp, Bos taurus
  Clone ID: 23-LIB34-022-Q1-E1-F3
atacaatctccagtaaactgaaggaatgctgtgataagcctttgttggaaaaatcccactgcattgctgaggtagaaaaagatgccatacctgaaaacctgcccccattaactgctgactttgctgaagataaggatgtttgcaaaaactatcaggaagcaaaagatgccttcctgggctcgtttttgtatgaatattcaagaaggcatcctgaatatgctgtctcagtgctattgagacttgccaaggaatatgaagccacactggaggaatgctgtgccaaagatgatccacatgcatgctattccacagtgtttgacaaacttaagcatcttgtggatgagcctcagaatttaatc

SEQ ID NO: 5387 - DNA, 245 bp, Bos taurus
  Clone ID: 23-LIB34-025-Q1-E1-F11
aagataatgaaaatgtagtaaacgagtactcctcacatctggaaaagcaccagttatatatagatgagactgtgaagaataatatcccaactaagcttcgtgtgctccgttcaagtctggagaatttgagaagcagaatacaaaaattagaatcggatgtctcaactcagatggaatactgccgcaccccgtgtactgttacttgcaatattcctgtggtgtctggcaaagaatgtgaggaaatc

SEQ ID NO: 5388 - DNA, 423 bp, Bos taurus
  Clone ID: 23-LIB34-025-Q1-E1-F3
cctgcacgtacggtccgagaatcccggggccaaccacgcgttcgaaaacttgggaacattgaattgggtgacttttatttctcttctccttctcttcagctctgcttattccaggggtgtgtttcgtcgagatacacacaagagtgagattgctcatcggtttaaagatttgggagaagaacattttaaaggcctggtactgattgccttttctcagtatctccagcagtgtccatttgatgagcatgtaaaattagtgaacgaactaactgagtttgcaaaaacatgtgttgctgatgagtcccatgccggctgtgaaaagtcacttcacactctctttggagatgaattgtgtaaagttgcatcccttcgtgaaacctatggtgacatggctgactgctgtgagaaacaagagcctgaaag

SEQ ID NO: 5389 - DNA, 398 bp, Bos taurus
  Clone ID: 23-LIB34-026-Q1-E1-F11
gcccgacctggccctggccaaaaggaagacctggcggaacccctggcgacgctcgtaccacaagcgcaagaaggcagagtgggaagtggaccctgactactgcgaggaggtgaggcagacgcccccctacgacagcagccaccgcctcctggacgtcatggacatgaccatcttcgacttcctcatgggaaacatggaccggcaccactatgagaccttcgagaagtttgggaacgagacgtttatcatccacttggacaatgggagagggtttgggaagcactctcacgacgagctgtccatcctggtgcctctacagcagtgctgcaggatccggcggtccacgtacctgcggctgcagctcctggcccaagaggagcaccggctgagcctgctga

SEQ ID NO: 5390 - DNA, 362 bp, Bos taurus
  Clone ID: 23-LIB34-026-Q1-E1-F3
accgcactttttttttttttttttttttttttttttttttttttttttttttttttttttttttttttttttttttttttttttttttttttttttttttttaaactttagaaaattggattaattttgccaaatatcgaaatgaatcccgtgccaaaggtaaacctgtgttccccatccggaactcccttttgcccacctgggaagtccccaaaaggccttcaaatcaccttgcacaaaaccaaattcccccgtcaaaaaaggcgtcttttgaaaaaagctttgtttcaacaaagtttgcatttcaaagaaaagttgtcccaaatgaagaaaaaaaaaagagggggaggcccccaaaggat

SEQ ID NO: 5391 - DNA, 325 bp, Bos taurus
  Clone ID: 23-LIB34-027-Q1-E1-F11
gtgcctctcgccctgccgggctccagctgaccaggggagggctgggctgaaactgaggcgggggccggcggagtagacgacgccgcgcctgaccccgtggcggaccggagccggctctttccggtccgggtggcggcgcgcggccctgagccccgccccgggccggcaggcggaggaggaggggggccggtgcggggttaagggggtgcggtgggggcggggggcggtggggggccctccggcgcatgggggtgccagttccgcaggggctggcctccgggagggctggcggaggagccgcagagatgtccggccagaggctgac

SEQ ID NO: 5392 - DNA, 422 bp, Bos taurus
  unsure (350): unsure at all n locations; Clone ID: 23-LIB34-027-Q1-E1-F3
ggattatgcatgagagcaaacccttctttggtgtacagttccacccagaagttggcccagggccaacagacactgagtatctgtttgattcctttgtctcactgataaagaaggagaaaggaaccaccattacatcggtactaccaaagccaggcctagtagcatctcgagttgaggtttccaaagtccttatcctaggatcaggaggtctgtccattggtcaggcaggtgaatttgattactcgggatcgcaagctgtaaaagccatgaaggaagaaaatgtcaaaactgtcctgatgaacccaaatattgcatcggtgcaaaccaatgaagtgggtagagctttagancataaggtacatctggaggactattaaaatcagcagaagcaacttgaacaggttattgccataaacctactt

SEQ ID NO: 5393 - DNA, 411 bp, Bos taurus
  Clone ID: 23-LIB34-029-Q1-E1-F3
ctgcccgttcgacagatagccgtaacttctgtgctgtgccagccgcatccctgagacaagatggtgaaggtcggagtgaacggattcggccgcatcgggcgcctggtcaccagggctgcttttaattctggcaaagtggacatcgtcgccatcaatgaccccttcattgaccttcactacatggtctacatgttccagtatgattccacccacggcaagttcaacggcacagtcaaggcagagaacgggaagctcgtcatcaatggaaaggccatcagcatcttccaggagccagatcctgccaacatcaagtggggtgatgctggtgctgagtatgtggtggagtccactggggtcttcactaccatggagaaggctggggctcacttgaacggtggcgccaagagggtc

SEQ ID NO: 5394 - DNA, 415 bp, Bos taurus
  Clone ID: 23-LIB34-030-Q1-E1-F3
cagcgacaaggagttgtccttctgagcgagagttgtatttcgaatctgcacgtgttcgccaccgcctccgctgcgaaaatgttccagctgctgcgctgcgtgccccgcgtcctgggtactgccgtcgctggtctccgcgccgccgcgccctccctgccgcggctgcagcccgcgtcccggccatgcgcccggcccttcgggctgctcagcgtgcgtgcgaggtcggtgcagctgcccggcctcctgaagcctcgggggccctgcgcttgcggctgcggctgtagcggactgcacaccgaaggagacaaagctttcgttgacttcctcagcgatgagatcaaggaggaaaagaagatacagaaatataagtctctccccaaaatgtcaggaggttgggaactggaagtgaatggga

SEQ ID NO: 5395 - DNA, 418 bp, Bos taurus
  Clone ID: 23-LIB34-031-Q1-E1-F3
ggagccccgggcccgccgacaccatgagttggtcctcgcaccctccgagtgtaatcttctacattctttcattgctttcttcagcatgcctggcatatgttgctacccgagacaactgctgcatcttagatgaaagatttggtagttattgcccaactacctgtggaattgcagatttcctgaataattaccaaaccagtgtagacaaagatctacgaactttggaaggcatcttatatcaggttgagaacaaaacatcagaagccagagagctggtcaaagcaatccaaatcagctataaccctgatcaaccatcaaagccaaataacatagagagtgctaccaagaattccaagagtatgatggaagaaattatgaaatatgaaacactgataacaacacatgaatcaacaattcg

SEQ ID NO: 5396 - DNA, 395 bp, Bos taurus
  Clone ID: 23-LIB34-032-Q1-E1-F3
ctcaactcagatggaatactgccgcaccccgtgtactgttacttgcaatattcctgtggtgtctggcaaagaatgtgaggaaatcatcaggaatggaggtgaaacatctgaaatgtacctcattcagcctgaggattctagcaaaccatatagagtatactgtgatatgaaaacggaaaaaggaggatggacagtaattcagaaccgtcaagatggtagtgttgactttggcaggaaatgggatccatataaacaaggatttggaaatattgcaaccaatgcagaagggaagaaatactgtggtgtaccaggtgagtattggctcggaaatgacagaattagccagcttaccaatatgggacccacaaagcttttgattgaaatggaggactgga

SEQ ID NO: 5397 - DNA, 409 bp, Bos taurus
  Clone ID: 23-LIB34-033-Q1-E1-F11
cagacgcgtgggcggcgacctttggagagataaacgtgcgaccgtggagtgcgcctgcgcagctttggaagccgcaggtttttgaaatatgaatccttcattcttcctgactgtcctttgcttgggagtagcatcagctgctcccaaacttgatccaaatttagatgcacattggcaccagtggaaggcaactcacaggaggttatatggcatgaatgaagaagaatggaggagagcagtgtgggagaagaataagaaaataattgacctgcataatcaggaatacagcgaagggaaacatggcttccgcatggcaatgaatgcctttggtgacatgaccaatgaagaatttaggcaggtgatgaatggttttcaaaatcagaagcataagaaggggaaactgtttcat

SEQ ID NO: 5398 - DNA, 397 bp, Bos taurus
  Clone ID: 23-LIB34-034-Q1-E1-F3
acaagagtggcaaccagtttgtattgtaccgcataaccgaggttgccagaatggataatcctgacacattttattccttgaagtaccaaatcaaggagggcgactgtccttttcaaagtaacaaaacttggcaggactgtgactacaaggactctgcacaagctgccacaggagagtgcacagcgaccgtggccaagagagggaatatgaagttctccgtggctatccagacctgcctgatcactccagccgagggccccgtggtgacagcccagtatgagtgccttggctgtgtgcatcccatatctaccaagagccccgacttggagcctgttctgagatatgccatccaatattttaacaacaacaccagtcattcccacctctttgatctgaa

SEQ ID NO: 5399 - DNA, 436 bp, Bos taurus
  unsure (262): unsure at all n locations; Clone ID: 23-LIB34-035-Q1-E1-F3
acaaaactttggcacaatgaagtgggtgacttttatttctcttctccttctcttcagctctgcttattccaggggtgtgtttcgtcgagatacacacaagagtgagattgctcatcggtttaaagatttgggagaagaacattttaaaggcctggtactgattgccttttctcagtatctccagcagtgtccatttgatgagcatgtaaaattagtgaacgaactaactgagtttgcaaaaacatgtgttgctgatgagtcncatgccggctgtgaaaagtcacttcacactctctttggagatgaattgtgtaaagttgcatcccttcgtgaaacctatggtgacatggctgactgctgtgagaaacaagagcctgaaagaaatgaatgcttcctgagccacaaagatgatagcccagacctccctaaattgaaa

SEQ ID NO: 5400 - DNA, 419 bp, Bos taurus
  unsure (71),(247),(275),(318): unsure at all n locations; Clone ID: 23-LIB34-036-Q1-E1-F3
gcctcagaccacactatctccactcgctcagacctgtggaagattagcgaccatgatttccaatgggatangaaccgtcaccgctggaaaaaggagtatatgtcttctccctttgctgcttattggcctctggggctgtgtgacctgtcatcggagccctgtggaagacgtctgcacagccaaacctcgggacattcctgtgaatcccatgtgtatttaccgttcctcagagaagaaggcaactganggccaaggctccgagcagaagatcctgnggccaccaaccggcgggtctgggaactgtctaaggccaattcncactttgccactgccttctatcagcatttggcagactccaagaataacaatgacaacattttcctgtcacccctgagtatctccacagctttttgctatga

SEQ ID NO: 5401 - DNA, 433 bp, Bos taurus
  Clone ID: 23-LIB34-037-Q1-E1-F3
aagacgagttcgcagagacgcccgctcttctccgtccagctctcctgctgcctttagggccttaggctcgctgagttaagaaatggccgaggagtccagcaaagccgttaagtactacaccctggaagagatccagaagcacaacaacagcaagagcacctggctgatcctgcactacaaagtgtacgatttgaccaaatttttggaggagcatcctggtggggaggaagtcttaagggaacaagctggaggtgatgccactgaaaactttgaggatgttggacactctacagatgctcgagaattgtccaaaacgttcatcattggggagctgcacccggatgacagatcaaagataaccaagccttcggaaagtattattactaccattgattcaaatcgcagctggtggaccaactggctgatcccagct

SEQ ID NO: 5402 - DNA, 431 bp, Bos taurus
  Clone ID: 23-LIB34-039-Q1-E1-F11
ggtccacgcacgcgtccgcacctttactatgctaataaatataatggagtttttcaagaatgctgccaagctgaagataaaggtgcctgcctgctaccaaagattgaaactatgagagaaaaagtactgacttcagctgccagacagagactcaggtgtgccagtattcaaaaatttggagaaagagctttaaaagcatggtcagtagctcgcctgagccagaaatttcccaaggctgagtttgtagaagttaccaagctagtgacagatctcacaaaagtccacaaggaatgctgccatggtgacctacttgaatgcgcagatgacagggcagatcttgccaagtacatatgtgataatcaagatacaatctccagtaaactgaaggaatgctgtgataagcctttgttggaaaatcccactgcattgct

SEQ ID NO: 5403 - DNA, 432 bp, Bos taurus
  Clone ID: 23-LIB34-039-Q1-E1-F3
aagttaatgacaggaacaacaacaagcctacgtaggtttggcttgtattacagcagagctctggaaaccgattatatcacatatatagatgaacgcctgaccgctagcgacgcatagcgacagctgttctctctgcagctgacagattcacgcctgtctttggacatcttctctggaccatgcataccatatgaatttcgtgagactggtccacagaaatgggatggagcccgacacgctatcacgacccagtgggaccaaacattcaaagttaccacttatctaaatgtacaagaatcccagattcgcgatgcaagcatacttaatgtcatcaactttccagctttacttatggccaaatacccgattttccaatgacaaactcatcacatacatttactatgatatgcacagagtaaatgcgacacagtc

SEQ ID NO: 5404 - DNA, 405 bp, Bos taurus
  Clone ID: 23-LIB34-040-Q1-E1-F11
actagttctagatccgcgagcggccgcccttttttttttttttttttttttcctgctttgaagaaatatattaaagatggtgaaaagttaaaaaaaaaaatcaaaccccaaataacaatagaaatagatgtctcctctgtaaaattctggactaatctactgagtcattcatatctatttagtattcagagcatgaaggcaaaataccagagtataaaaaaattaaaacacaaaactaaccaaaacactttgagatactgcctgtgagcaagcccaccaggctcgcagctggcatgggccccgccagtgaccactggaagcttcgctgggtccggtccctctcgcactcgccctctgcagaccccaagggcttcagagttcttccttggttctggccaattttgt

SEQ ID NO: 5405 - DNA, 287 bp, Bos taurus
  Clone ID: 23-LIB34-040-Q1-E1-F3
accggtgcgtaccttccgggtacacccacgcgtccgggacagcagcaccaactggggggagccaaacaggctggagacgtataaaagaccatttcaaaagtgatttacttttttaaagaactttatctgaaaagaaaaagataatatttttcctatgggacaatggacttgcaaagcctcacttcactttaaaagtaaaaagaacccatgttgagaactccactaacagttttatgccggtgataatttatctacataccatttcaataaatattttgtttcctaag

SEQ ID NO: 5406 - DNA, 388 bp, Bos taurus
  Clone ID: 23-LIB34-041-Q1-E1-F11
tgatatcaaaaaggtctatgcctctcagcgaatgagagctggcaaaggcaagatgagaaaccgtcgccgtatccagcgcaggggaccctgcatcatctataatgaggacaatggtatcatcaaggccttcagaaacatccctggaattactctgcttaatgtaagcaagctgaacattttgaaacttgctcctggtggtcacgtgggacgtttctgcatttggactgaaagtgctttccgaaagttagatgagctatatggcacttggcgtaaagcagcctccctcaagagtaactacaacctccctatgcacaagatgctcaatacagaccttagcagaatcttgaaaagcccagaaatccaaagagcactccgagcaacacgcaag

SEQ ID NO: 5407 - DNA, 404 bp, Bos taurus
  Clone ID: 23-LIB34-041-Q1-E1-F3
attcatctttcttaatattgaaaagccatattatatccaatttttactcatgagcctagtcaaaaaaaaaacaaaaatgttacaggtctcattgtcaccactgcaataaaattacagtgatggaagcaaaacctgtgttctcaatgtagccacattaacagttttatggacaccatgaacaagtgcccattttcagtagaatgaggctttgtaaataagtttcccaagcttaagacaatgtgcaaaaagcttcttctgcacctgtacagctccagtactcttgcctggaaaatcccatggacagagaatgctggcaggctacagtccatggggttgctaagagttggacacaactgagcacacttttcattttcatgcactgaagaaggaaatggcaacccaat

SEQ ID NO: 5408 - DNA, 376 bp, Bos taurus
  Clone ID: 23-LIB34-042-Q1-E1-F3
aagcgaaggacgcggtttctggaggcgaagaacgcggttggccaatcgcaagccagaagatgaaggttctgtgggttgccgtggtggtcgcgcttctggcaggatgccaggcggatatggagggagagctggggcccgaggagcccctgactacccagcagccccgggggaaggacagccagccttgggagcaggcgctgggccgcttctgggattacctgcgctgggtgcagaccctgtctgaccaggtgcaggaggagctgctcaacacccaggtcattcaggaactgacggcgctgatggaggagaccatgaaggacgtgaaggcctacaaggaggagctggagggacacctaggccccatggcccaggagac

SEQ ID NO: 5409 - DNA, 390 bp, Bos taurus
  unsure (370): unsure at all n locations; Clone ID: 23-LIB34-043-Q1-E1-F3
ggaacaaacaaagaaaccaccgttcaagggcttgatggcctttctgaacgctgtgctcagtataagaaagatggtgctgactttgggaagtggcgtgctgtgctgaagattgacaaccagtgtccatcccatcttgctatccaggaaaacgccaacaccctcgcccgctatgccagcatctgtcagcagaatggtctggtacccattgttgagccagaggtaattcctgatggcagccatgacatggaacactgccagtatgttactgagaaggtcctggctgctgtatacaaggccctgaatgaccatcacgtttacttggagggcaccctgttgaagcccaacatggtgactgctggacatgcctgcnacaagaagtatactccagag

SEQ ID NO: 5410 - DNA, 424 bp, Bos taurus
  Clone ID: 23-LIB34-044-Q1-E1-F3
cccgggcccgccgacaccatgagttggtcctcgcaccctccgagtgtaatcttctacattctttcattgctttcttcagcatgcctggcatatgttgctacccgagacaactgctgcatcttagatgaaagatttggtagttattgcccaactacctgtggaattgcagatttcctgaataattaccaaaccagtgtagacaaagatctacgaactttggaaggcatcttatatcaggttgagaacaaaacatcagaagccagagagctggtcaaagcaatccaaatcagctataaccctgatcaaccatcaaagccaaataacatagagagtgctaccaagaattccaagagtatgatggaagaaattatgaaatatgaaacactgatatcaacacatgaatcaacaattcgatttttgcaag

SEQ ID NO: 5411 - DNA, 399 bp, Bos taurus
  Clone ID: 23-LIB34-046-Q1-E1-F3
catgaatcagccctatccacggcagagatgttttccgtgagggacctctgcctggtcctgagtttggtgggtgcaattaagacagaagatggtagtgatcctcccagtggtgactttttaactgaaggaggaggggtgcgtggcccaagacttgtggaaagacagcaatctgcctgcaaagagacaggctggcccttctgctctgatgaagactggaatacaaaatgcccttctggctgcaggatgaaagggttgattgatgaagtcgatcaagattttacaagcagaataaataaactaagagattcactatttaattatcagaagaacagtaaggactctaatacattgaccaagaacatagtggaactaatgagaggcgattttgccaaagctaac

SEQ ID NO: 5412 - DNA, 413 bp, Bos taurus
  Clone ID: 23-LIB34-047-Q1-E1-F3
agaggctgaagctagttaacatcagtgtcttggctcccaactggctcccaattcctggtgaaactcctaaagggagactgttaaatcatgaaattaatcaccatccttttcctttgttccaggctgctaccaagtttaacccaagagtcttctcaagaaatcgactgcaacaaccaggatgtatttaaagctgtggacgctgctctgacaaaatacaacagtgaaaacaagagtggcaaccagtttgtattgtaccgcataaccgaggttgccagaatggataatcctgacacattttattccttgaagtaccaaatcaaggagggcgactgtccttttcaaagtaacagaacttggcaggactgtgactacaaggactctgcacaagctgccacaggagagtgcacagcgac

SEQ ID NO: 5413 - DNA, 371 bp, Bos taurus
  Clone ID: 23-LIB34-048-Q1-E1-F3
agtagaagagcttcttaaatcagagagaaactttgagagaaacttccaaggcaaatttcccaaagaaaatgggcaccaagggaaaaattattaaatgcaaagcagctatcgcctgggaagcaaacaagcccctcagcattgaagaggttgaggtagctccccccaaggatcatgaagttcgaatccagataattgccactgctctgtgccattctgatgcccatattctccatcctcaatttgaggggggggttttcccagtgattcttggccatgaggctgcaggaattgtggaaagtattgggccaggagtgaccaacttcaaaccaggtgacaaagtaaatccactccacgcacctcaatgtggaaaa

SEQ ID NO: 5414 - DNA, 437 bp, Bos taurus
  Clone ID: 23-LIB34-050-Q1-E1-F3
caaaactttggcacaatgaagtgggtgacttttatttctcttctccttctcttcagctctgcttattccaggggtgtgtttcgtcgagatacacacaagagtgagattgctcatcggtttaaagatttgggagaagaacattttaaaggcctggtactgattgccttttctcagtatctccagcagtgtccatttgatgagcatgtaaaattagtgaacgaactaactgagtttgcaaaaacatgtgttgctgatgagtcccatgccggctgtgaaaagtcacttcacactctctttggagatgaattgtgtaaagttgcatcccttcgtgaaacctatggtgacatggctgactgctgtgagaaacaagagcctgaaagaaatgaatgcttcctgagccacaaagatgatagcccagacctccctaaatttgaaac

SEQ ID NO: 5415 - DNA, 246 bp, Bos taurus
  Clone ID: 23-LIB34-051-Q1-E1-F11
cccatctctccgcttcctcctttcctcaggcatcaaagcagagaccacgggaacctagttcaccaggctcgaggctggaggccccgccatgacatccctaaggccccttctgatgctggccctgctggcgtgggttgttgtggctgaccaagagtcctgcaagggccgctgcaccgagggcttcaacgccaccaggaagtgtcagtgtgacgagctctgttcttactaccagagctgctgtgccga

SEQ ID NO: 5416 - DNA, 233 bp, Bos taurus
  Clone ID: 23-LIB34-051-Q1-E1-F3
ggcgtgatgccgcctagatcctgggctctgggagagcgagtgtgacccgggggatgtcggcttcctgggatggccaggttgggacagtgagtgtgctcacctaccccattgcccactggcacttggtcatgtccaatatcatgattttaatatcatatcttggtccagatgacctacagtacctggccagcatcctgctgagaactttaccagtgagcaaagcccgggaaggc

SEQ ID NO: 5417 - DNA, 241 bp, Bos taurus
  Clone ID: 23-LIB34-052-Q1-E1-F3
agacaatccactcaacacaccccctcacatcaaacccgagtgatacttcttatttgcatacgcaatcttacgatcaatccccaacaaactaggaggagtactagccctagccttctctatcctaattcttgctctaatccccctactacacacctccaaacaacgaagcataatattccgaccactcagccaatgcctattctgagccctagtagcagacctactgacactcacatgaatt

SEQ ID NO: 5418 - DNA, 253 bp, Bos taurus
  Clone ID: 23-LIB34-054-Q1-E1-F3
cccacgcgtccgagaggtgaaacaggtaatggatcccaaaggccatagagtgaagcttaatgatggccacttcattcctgtcctgggatttggcactgctgaagctaaagaggttcctaagagtgaagctctggaagtcaccagatttgctatagaggttgggttccgccatattgactgtgctcatgtgtaccaagatgaagagcacgttggccaggccattcgaaccaagattgcagatggcactgtgaag

SEQ ID NO: 5419 - DNA, 349 bp, Bos taurus
  Clone ID: 23-LIB34-055-Q1-E1-F11
gcctccagaaaacgctccggcccctggatcattgctccggttgactgagtcagaggccccttctaggaggaaaggggcagcccgtgctggggcagtcggcggcaggccacccaggtggctgtggcttcctgggggaacatgtagtccgaatgctgctgcagcgggaaccccggctccgtgagctgcgcatctttgacctacacctgggtccttggctggaggagctgaagacagggcccgtgcaggtgacggccatccagggggatgtgacccaggcccacgaggtggcagcggccgtggccggagcccacgtggtcatccacacagctgggctggtggacgtgtttgg

SEQ ID NO: 5420 - DNA, 356 bp, Bos taurus
  Clone ID: 23-LIB34-055-Q1-E1-F3
cggacgcgtgggggcctacaaggaggagctggagggacagctaggccccatggcccaggagacacaggcccgcgtgtccaaggagctgcaggcagcccaggcccggctaggctccgacatggaggacttgcggaaccgcctggcacagtaccgaagcgaggtgcaggccatgctgggccagtccaccgaggagctgcgggcccgcatggcctcccacctgcgcaagctgcgcaagcggctgctccgcgacgctgacgacctgaagaagcgcctggccgtctaccaagctggggccagcgagggtgccgagcgcagcttgagcgccatccgcgagcgcttcgggcccctggtggagc

SEQ ID NO: 5421 - DNA, 296 bp, Bos taurus
  Clone ID: 23-LIB34-056-Q1-E1-F3
actagttctagatcgcgagcggccgcccttttttttttttttttttttttttttttttttttttttgttttttttttttttttttttttttttttttttttttgtttttagccctaggaaacaaaatatttaatgacatgtgaagtttaaaatgtacctccggcaaaaaacggtcaatgggattctcaacacgggttctttttagttttaaagtaacatggggctttggaagtccattggcctaaaggaaaaaaattaccattttctttacggacaaagttctttcatccagtgaa

SEQ ID NO: 5422 - DNA, 227 bp, Bos taurus
  Clone ID: 23-LIB34-057-Q1-E1-F11
ggctcttccatccccagaccagccaagcctgtgagtgacaccccagacagaggaaccagagccatgcggagtctcagcggactgctgttgttactgactgcctgcctggcggtaaacgccagctccgtgcccacattgcccgatgacattcaagtgcaggagaacttcgacctgtctaggatctatgggaagtggttcaatgtggccgtgggctccacctgcccatg

SEQ ID NO: 5423 - DNA, 203 bp, Bos taurus
  Clone ID: 23-LIB34-059-Q1-E1-F3
gcctggaaggcagagcaactggacctcgcctaagctgtgtctctgactcatttctgactttaggcaagttcttccaatgggaaaaatggcgaagatgtttagtttcatccttgtcaccactgctctggtaatgggcaggggaagctcggctctggagaactgcctccaggagcaggcgcggctcagagcccaagttgtacctg

SEQ ID NO: 5424 - DNA, 319 bp, Bos taurus
  Clone ID: 23-LIB34-060-Q1-E1-F11
acgcttttgggggtaaagtttgctctaccagatagtgatcgtaacaaattgatctgttttggatgttgctatagtgacatgcagttatacattttgtttttttgggggggagcaaaagaaacaccagtgttaacttaatcttaatgtctggtgtttgtcatggtgaaattataactattacagtgtaggagaacactgaatatgttctctgaatgagcctttgtgctttttgtcatgttatgcagtgaactatttttaaggtctaatcagtggttctttttttccaactccgtgtttctctaaggaagtctttcacaca

SEQ ID NO: 5425 - DNA, 240 bp, Bos taurus
  Clone ID: 23-LIB34-060-Q1-E1-F3
ggcggttggtgtggcttggcctccattgttcgggatataggacgccatgcggggtgacagaggccgaggtcgtggcgggcgctttggttccagaggaggcccaggaggagggttcaggccctttgtgccacatattccgtttgacttctatttgtgtgaaatggcttttccccgggtcaagccagcacctgatgaaacttccttcagtgaggccttgctgaagaggaatcaggaccttgc

SEQ ID NO: 5426 - DNA, 402 bp, Bos taurus
  Clone ID: 23-LIB34-061-Q1-E1-F11
ggcccggtacaatctcaggggacgctcgcaaattttgattttccactctagaaccggtatctagatcaccatggcaactgcacagaagttgatgagagctattagagtttttgaatttggtggcccagaagtgctgaaactccagtcggatgttgctgtaccaattccgaaagaccatcaggttctcatcaaagtccaggcgtgtggtgtaaacccagtggacacatacattcgctctggtactcacaatatagaaccacttcgaccttatactcctggcttcgatgtggctgggataatagaagctgttggagagagtgtatctgctttcaagagaggtgacagagttttcactaccaggaccatctctgggggctatgctgagtatgctctggcagccga

SEQ ID NO: 5427 - DNA, 353 bp, Bos taurus
  Clone ID: 23-LIB34-061-Q1-E1-F3
atctttgttgctttcctgataccagactgtttccgtggttggttagaatatattttgttttgatgtttatattggcatgtttagatgtcaggtttagtcttctgaagatgaagttcagccattttgtatcaaacagcacaaccagtgtctgtcactttccatgcataaagtttagtgagatgttatatgtaagatctgatttgctagttcttccttgtagagttataaacggaaagattacactatctgattaatagtttcttcatactctgcatataatttgtggctgcagaatattgtaatttgttgcacactatgtaacaaaacaactgaagatatgtttaataaatatt

SEQ ID NO: 5428 - DNA, 191 bp, Bos taurus
  Clone ID: 23-LIB34-062-Q1-E1-F3
ctcgcctgagccagaaatttcccaaggctgagtttgtagaagttaccaagctagtgacagatctcacaaaagtccacaaggaatgctgccatggtgacctacttgaatgcgcagatgacagggcagatcttgccaagtacatatgtgataatcaagatacaatctccagtaaactgaaggaatgctgtgac

SEQ ID NO: 5429 - DNA, 380 bp, Bos taurus
  Clone ID: 23-LIB34-063-Q1-E1-F3
accaaaagatgccttcctgggctcgtttttgtatgaatattcaagaaggcatcctgaatatgctgtctcagtgctattgagacttgccaaggaatatgaagccacactggaggaatgctgtgccaaagatgatccacatgcatgctattccacagtgtttgacaaacttaagcatcttgtggatgagcctcagaatttaatcaaacaaaactgtgaccaattcgaaaaacttggagagtatggattccaaaatgcgctcatagttcgttacaccaggaaagtaccccaagtgtcaactccaactctcgtggaggtttcaagaagcctatgaaaagtgggtactaggtgttgtacaaagcccgaatcagaaagaatgccct

SEQ ID NO: 5430 - DNA, 410 bp, Bos taurus
  unsure (162),(182): unsure at all n locations; Clone ID: 23-LIB34-064-Q1-E1-F3
aaggagattattccaacccattatttaaggacttgaatttaatttaaccttgaaaatgacttggcctaaactttggtaaaggacagctaaaaagtcctgagatggccctgggttggcatgagtggggtctgctgtcacggtgtcactgggtgagcactgtanggaggactagcagccgtgtntgtaatttacctggaagatcttacacaattgatcttttttcagattgttgaaaaatcctgtaaatgcaaatagtcgatactgtattaaatatgtgcacttgggagtgtgtgctttgcttgtacagttgtaaataatcagaacatattaaaaaggtaccctaaagagaaaaatctgataaaaattgatatattataaatgttactattgacctggatgtagataaactc

SEQ ID NO: 5431 - DNA, 226 bp, Bos taurus
  Clone ID: 23-LIB34-065-Q1-E1-F3
agcaaccggctgttgacagtggaattgctctcctcactaatttccaggtgaccaaactttttgctgaagctgtgaagaaagctcgcaatgtggactccaagagtctcttccactacaggcagtacagagctgggaaagaactatagagaaatagagacacgctgtctccattcttaaatcaacctaagccactctttatctaaaggaactgatttgcagctttctt

SEQ ID NO: 5432 - DNA, 202 bp, Bos taurus
  Clone ID: 23-LIB34-066-Q1-E1-F11
gcgtgggcaacgccatgttcgtgcaggaggagctgaagctgctggacaagttcatagaagatgcccaggtgctgtactcctctgaggccttcccgaccaacttcagggattctgaagctgccaggagtctaataaatgactatgtgaagaataaaacccaggggaaaattgaagagctgttcaagtacctttccccgagaac

SEQ ID NO: 5433 - DNA, 260 bp, Bos taurus
  Clone ID: 23-LIB34-066-Q1-E1-F3
gattgtctccaacatgaagcttggtcatgtcatcctcttacttttgtgcttctacttaagtttttgtgaggataattttagaaaacgaggaaagtcaaaggcagtgaagaaatcagaggctcaccatgcccctgaagcaagtctgagcaaggagacagaagcttcatctgaagtgaagcccacttcaacacaagacacatctcaaaaagatttcgtggataaaaagtgcttaactgaaaaacacacacatctctcctgca

SEQ ID NO: 5434 - DNA, 193 bp, Bos taurus
  Clone ID: 23-LIB34-068-Q1-E1-F11
cgcgagcggacgctcgcgatctacaactaggccttggccttcctgtctctgggggcccgtggctccaccctgacagagatcctggaaggtctcaagttcaacctcacagagatccaggagaaagaaatacaccatagctttcagcacctcctgcaggcgctcaatcaacccagcaaccagctgcagctgagcg

SEQ ID NO: 5435 - DNA, 174 bp, Bos taurus
  Clone ID: 23-LIB34-069-Q1-E1-F3
tagaatcgcgagcggccgcccttctttttctccttcaattcccatgatgtttccatttgttattccctaatgaggagagtcagcagtgaggtacgccaggacttctttcccacacagctaatgccaatctctggctagcaaaacaaaattgaattaaaaagagaatgttgattt

SEQ ID NO: 5436 - DNA, 248 bp, Bos taurus
  unsure (211): unsure at all n locations; Clone ID: 23-LIB34-070-Q1-E1-F11
cgacgcccgcgtacggccttaccggccgcgccccgtgtcccgggacgaagggctctccgcaccggaccccggtcccgacgcgcggcgggggcgcgccgcgccgcgccccgggggacgcgggcgacggcccgccggcggggacggcgggggaccggctatccgaggccaaccgaggctcccgcggcgctgccgtatcgttccgcctgggcgnggattctgacttagaggcgttcagtcatacatcccac

SEQ ID NO: 5437 - DNA, 414 bp, Bos taurus
  Clone ID: 23-LIB34-071-Q1-E1-F3
cccacgcgtccaaagaagtgtcccctctagcccgggccataatggaggtgcatgggggttacccacagggaaccatgagctcaggggttcagcaactgctcactcagtccttccttaggctggaagttggcagtggtggtcagaaagcccatgcactttaccatccaggccttcacttggcctgtggactttagactcatgttcttggtttacaggttcattggttcctcagcccatgacagatgagaaggatctctgtcaaagggtgtgagggaactgtgggtgtttgaatgctccggagagcctgggttagtgcttagcattctcttaaacctcagaacaatgagattggtacttttagtccctattttacaggggttggaatatattgttaagcaagaaaagacaagagga

SEQ ID NO: 5438 - DNA, 203 bp, Bos taurus
  Clone ID: 23-LIB34-075-Q1-E1-F11
tattaccgccctttttttttttttttttttttttttttttttttttttttttttttttttttttttttttttttttttttttttttttgtttttgtgtgggttttttttttttttttgtttttggggttttgttttgttttggtttgtttttttgtttttttttttttttttgtttttgtgtgggggggtgtttttgtgttgg

SEQ ID NO: 5439 - DNA, 453 bp, Bos taurus
  Clone ID: 23-LIB34-075-Q1-E1-F3
gtcgacggacgcctctaaaataaatcgcactaagaacggggccacatgctggagaaccacgttgaacgcctgtgggcctacctgaccatccaggagctgctggccaagaggatgaagttggagggccaggagaaggccaacgtgtcagcaaaggccctgcagatgtcattggcctatcagttcgtgaccccactgacctccatgaccgtcaggggcatgacagaccaggacggcctggagcccatcattgataagcccctggacgattatctgcccttggagatggtgggacccagaaagaccttcatgctacaggcctcccagcctgctccaacgcactccagcctcgacatcaagaagttgccagaccaagtgactggcgtggatactgacccgcacttcctcatccacgtgccccagaaagaggacacgcctgtgcttcaacatcaacga

SEQ ID NO: 5440 - DNA, 454 bp, Bos taurus
  Clone ID: 23-LIB34-077-Q1-E1-F11
cctatagtaagtcgtattatctccttcacttttgtcatgcgctttgtagttgtttgggtgttgtaattttcttcatattaataccatcacaaaagtgtcttcagatatgaagctagtggtcagggactgtgccttcttaggactcagctcactgagactagagcccagcaccgctcccatggctgcagcctttaggaggcactttagaaactaacaagccctgactttccttggatggtgttggggtaaagaacccctgtgccaatgcaggagacataagagatgcaggtccaatccctaggttgacaagatccccaggaggggggcatggcaacccattccagtgttcttgcgtggagaatcccatggacagaggctacagcctggcaagctacagtccatggcatcgcacagagttggacacaactgaagtgacttagcacacacacacaac

SEQ ID NO: 5441 - DNA, 415 bp, Bos taurus
  Clone ID: 23-LIB34-077-Q1-E1-F3
agtgctgcttatcagaaggcacctactaaggagttttatgcgtgaaaactcccatttagtgtctctatttatgagatcactgaacttttaaaaataaagcttttgcatagaataatgaagatctttgttttttgttttttgtttttttttcattaaagagccattctggcactttaatgataaaaatcccattgtatttaaatcttttcatgtatttctttagaacaacgtaaaattcaaacttaacatctgcagtgttctgtgaatagcagtggcaaaatattatgttaataaaacgctcaatgtatatggaatcggtttaaatttctatgcgcaaatatgaaaagagtgtttttatccgatggttcgaagatgaaagctatttcaattgtgtcaacaagtcccagagtgacct

SEQ ID NO: 5442 - DNA, 382 bp, Bos taurus
  Clone ID: 23-LIB34-078-Q1-E1-F3
ctactatgtgcgcatcctgagcaccattgaccgggagctgctcaagcccaacgcctcggtggccctccacaagcacagcaatgccctggtggacgtgctgccccccgaggccgacagcagcatcatgatgctcacctcagatcagaagccagacgtgatgtatgcggacattgggggcatggacatccagaagcaggaggtgcgggaggctgtggagctcccactcacacacttcgagctctacaagcagatcggcatcgacccaccccgaggcgtcctcatgtacggcccacctggctgcgggaagaccatgctagcaaaggctgtggctcatcacacgacagctgcattcatccgcgtcgtgggctcagaattcgtacag

SEQ ID NO: 5443 - DNA, 380 bp, Bos taurus
  Clone ID: 23-LIB34-079-Q1-E1-F3
ggacttcgagcaggagatggccaccgcggcctccagctcctccctggagaagagctacgagcttcctgacgggcaggtcatcaccatcggcaatgagcggttccgctgccctgaggctctcttccagccttccttcctgggcatggaatcctgcggcattcacgaaactaccttcaattccatcatgaagtgtgacgtcgacatccgcaaggacctctacgccaacacggtgctgtccggcgggaccaccatgtaccccggcatcgcggacaggatgcagaaagagatcactgccctggcacccagcacaatgaagatcaagatcatcgcgccccctgagcgcaagtactccgtgtggattggcggctccatcctggcct

SEQ ID NO: 5444 - DNA, 398 bp, Bos taurus
  Clone ID: 23-LIB34-080-Q1-E1-F11
acttttattgtgtaatgttctttttttacccctggtaatattcattatcctgaagtcactttatgtgatatataacatagccactcaagctttcttttgcttattgtttgcctggtacatcactttcttttactttaacccatctgtgtctttcagacaggatagtattgggtcttgttttagatatacaatttaataataagtgtgttttagtgatatgtttaaagtttaatatagggcttctgtggtggcttagacggtaaagactccacctgcagtgcgggagacctgggtttgattcctgggtcagggggattccctggaggagggcatggcagcccactccagtattcttgcttggataatcgcatggacggaggagcctggtgggctatagt

SEQ ID NO: 5445 - DNA, 417 bp, Bos taurus
  Clone ID: 23-LIB34-080-Q1-E1-F3
caaatactgctggaatggacatctttgattctgggtgttttggtgaaagctttaagtacttgggggggcataaagatgtccattccagcagtatttgattctgggtgttttggtgaaagctttaagtacttgggggggcataagacttcttcaagaaattcttcaatcttatttacatccgttttgacctcattgttgaaagttataaatggtgggtgggtccccggagccaagttctgcaagtctgcaggcttccttttcaggtcaacagttgtgacactaaacacaactcctttgagccaaagaatcatgaagagcctctgggaaaaggggcagtttcctatgctttcaccatcactgccagccttgacgaagagctcgatgatgggctctttgtcctcctccttcaacccgttc

SEQ ID NO: 5446 - DNA, 417 bp, Bos taurus
  Clone ID: 23-LIB34-082-Q1-E1-F3
attgtgcctgtcctttaaataaatcaaataacatcagtttcttggactgaacaattttcacttgcaggacaggcacaaagttcgcttatggcaaaaacaacctgcagcacacttcacccctctttctcaatggccagtgaggggttcgccgtggcggggcgggggctggctggcaggagacaggagtctggaagctgtgtcctctcaggcccctagtcagctgcaaaggtcttccccaggggtaggaaacatggccaagtcttgttcttgctgggttgacgcctcactctgacccggctggagctgttctagcgccctgtcactccacccaccaccaccattaaataacaccatcctacctccgaaaataaaattatatctatatttatataacaacccatcctccccagccctccc

SEQ ID NO: 5447 - DNA, 431 bp, Bos taurus
  Clone ID: 23-LIB34-083-Q1-E1-F3
gggtccacgcacgcgtccgagccaaaaatgttttgttacaaaattctctttctactgaggtttcactaatacgtaccttctacttttgaaccccaaattaaagcagaagaactgttttctactggatttttcattaatggcaagctttttcttttatgtaaaataaatttattgtgaattgatatcagtgactcatttattaggtataattaatagccaaagaataaagttaaaatttgtttttaacttggtttaaaaagagctctaggatataaacctcttttgtgaaaaatagaatgtttctgaatgttttcataaacaaaaacttagttataccatgtttaccttattttccagcagttattaaatgatgacaatattctgtttcagtgagttattttgagggctttttattaaacactactgaatga

SEQ ID NO: 5448 - DNA, 425 bp, Bos taurus
  Clone ID: 23-LIB34-084-Q1-E1-F11
ggcggctctggatccactgcccacaccccgctctcgcaggcagacatgaggacagagagaacttccttcctcctggctctggggctcctggtgtctgggttctgctccagggtccactgcctcccagagaatgtgaccccagaagaacagcacaaagggacgtctgtggatggccactcattagcctccagcaacactgacttcgccttcagcctctacaagcagttggctttgaaggaccccaataagaatgtcatcttctcccctctgagcatctccatagcccttgacttccctgtccctgggggctcatgaacacactgtgacagaaattctggaaaggcccaagttcaaactcacagagaaccccgagacagaaatccaccaatgcttccagcaactcctgcaaacgttcaatcagccca

SEQ ID NO: 5449 - DNA, 442 bp, Bos taurus
  unsure (398): unsure at all n locations; Clone ID: 23-LIB34-085-Q1-E1-F3
ttccaggccgacccacgcgtccatgcaaatggagaggcagtttattgcaaattccattataagactgatcagggcatcaaaaacctttctgttgaagatgcagcaagacttgcccacgaagatcctgactatggcctccgcgatcttttcaatgccattgccacaggcaactacccctcctggactttatacatccaggtcatgacatttagtgaggcagaaatttttccatttaatccatttgatcttaccaaggtttggcctcacggcgactatccccttattccagttggtaaattggtcttaaaccggaacccagttaattactttgctgaggttgaacagttggcttttgacccaagcaacatgccgcccggcatcgagcccagccctgacanaatgctccagggccgcctttttgcctatcctgacaatcaccgct

SEQ ID NO: 5450 - DNA, 474 bp, Bos taurus
  Clone ID: 23-LIB34-086-Q1-E1-F3
cggtgcgtatccgggtagaccacgcgtccccggaagcgtgggcaacagcagagacccagcttcccttttaagaacggcaaatggtatcctggtctcccttggctgcttggccatactcgtcactgtgatcgcctttttgatgtacaaaaaacacaaggaatacaaaccaatagaaaacagccctgggatcgtgatcagaggcaaaggcctgaatgttttcctcaatcatgcaaagaccctgttcttccccggaaaccaggaaaaagatccactgctcaagaaccaaccaggaattctttgaatcttcagccttacttctaaccaacagctcatcctcggcaccatttatgtcagcttgctagagtggatgatgataactttctaaaaagattaatgtaaaatatagattgtgtgagggacgtccaatttttttttaatttttacaggttaaatgacattttaaggacatggctg

SEQ ID NO: 5451 - DNA, 281 bp, Bos taurus
  unsure (275): unsure at all n locations; Clone ID: 24-BOVMS1-001-Q1-E1-F7
cactaatcccaatactagtaattattgaaactatcagcctttttattcaacctatagccctcgccgtgcggttaacagctaacatcactgcaggacacctattaattcacctaatcggaggagctacacttgcactaataagcattagcactacaacagctctaattacattcaccattctaatcctactaacaattctagagtttgcagtagctataatccaagcctatgtattcactctcctagtcagcctatatctgcatgacaacacatanaatagt

SEQ ID NO: 5452 - DNA, 388 bp, Bos taurus
  unsure (370): unsure at all n locations; Clone ID: 24-BOVMS1-004-Q1-E1-F11
atgcgacgtcatagctcttctatagtgtcacctaaattcaattcactggccgtcgttttacaacgtcgtgactgggaaaaccctggcgttacccaacttaatcgccttgcagcacatccccctttcgccagctggcgtaatagcgaagaggcccgcaccgatcgcccttcccaacagttgcgcagcctgaatggcgaatgggacgcgccctgtagcggcgcattaagcgcggcgggtgtggtggttacgcgcagcgtgaccgctacacttgccagcgccctagcgcccgctcctttcgctttcttcccttcctttctcgccacgttcgccggctttccccgtcaagctctaaatcgggggctccctttanggttccgatttagtgctt

SEQ ID NO: 5453 - DNA, 191 bp, Bos taurus
  Clone ID: 24-BOVMS1-005-Q1-E1-F7
atgcgacgtcataactcttctagagtgtcacctaaattcaattcactggccgtcgttttagaacatcgtgactgggaaaaccctggcgttacccaacttaatcgccttgcagcacatccccctttcgccagcaggcgtaataccgaaaaggcccgcaccgattgcccttcccaacagttgcccagcctgaa

SEQ ID NO: 5454 - DNA, 268 bp, Bos taurus
  Clone ID: 24-BOVMS1-006-Q1-E1-F7
atgcgacgtcatagctcttctatagtgtcacctaaattcaattcactggccgtcgttttacaacgtcgtgactgggaaaagcctggcgttacccaacttaatcgccttgcagcacatccccctttcgccagctggcgtaatagcgaagaggcccgcaccgatcgcccttcccaacagttgcgcagcctgaatggcgaatgggacgcgccctgtagcggtgcattaagcgctgcgggtgtggtggttacgcgcagcgtgaacgctacac

SEQ ID NO: 5455 - DNA, 309 bp, Bos taurus
  Clone ID: 24-BOVMS1-008-Q1-E1-F7
cttacccatttcttaccacaaggaacacccaccccactaatcccaatactagtaattattgaaactatcagcctttttattcaacctatagccctcgccgtgcggttaacagctaacatcactgcaggacacctattaattcacctaatcggaggagctacacttgcactaataagcattagcactacaacagctctaattacattcaccattctaatcctactaacaattctagagtttgcagtagctataatccaagcctatgtattcactctcctagtcagcctatatctgcatgacaacacataa

SEQ ID NO: 5456 - DNA, 365 bp, Bos taurus
  Clone ID: 24-BOVMS1-009-Q1-E1-F7
ggtataaaggttttgctggtaaaaaaaaaaaaaaaaaaaaaaaaaaaaaaaaaaaaaaaaaaaaaaaaaaaaaaaaaaaaaaaaaaaaaaaaaaaaaaaaaaaaaaaaaaaaaaaaaaaaaaaaaaaaaaaaaaaaaaaaaaaaaaaagggggggcccctcaaaaggttcaaactttacttacctttcaatgaaatttcatacctcttcaaaattttccctaaatttcatttcacgggcgtttttttaaaaatttcttaatggtaaaaaccctgtgtttcccaattttaacctccttgaaaaaaatccccttttcccaacgttgtttattttcaacatggcccgaactttttccacttccaaaaa

SEQ ID NO: 5457 - DNA, 432 bp, Bos taurus
  Clone ID: 24-BOVMS1-010-Q1-E1-F11
ggaaaagtgagaaacgttgcatttgaagagatgatagttttgccaatatcattgttttaaagaatatacatttgaaggaatataaattgggagaaggcttttagagtattatcagtatctcatttctaatactcagatgttatgtgatacaaaacacattctcttgtctttcctagatgcactatatatttgttcataggtaaatctacaaaatgtatatactttatttggtggttttgctatttataaattttatgtttcacctgttactcatttatggtttgttttggtagttttgttcatctgtatatcaccacgttaatttgtaataggaaatgcacttcgtagtatatgtggttactgatattaaaataccttttagcataatattgcctctgagcaaaaactagtatttaactgtacaactgaatg

SEQ ID NO: 5458 - DNA, 337 bp, Bos taurus
  unsure (272): unsure at all n locations; Clone ID: 24-BOVMS1-010-Q1-E1-F7
tctatgctggtcagaagctatgttaaaagagtttcatattaaggaggaacacataaatcattttaagttcttaagaattatctgaagcatccaagatacagaaagaattcttcacacctattttgtctcacgtgcttacatactcacttgtgcccaactctttgtgactccatggactgtaacctatcaagttcctttgtccatggaatttttcaggcaagaatactggagtgggttgtgatttcctactccaggggatcttcccagtgcanggatcaaacccgtgtctcctgcttggcagatggattcttaaacactttgtgccacggggaaagcc

SEQ ID NO: 5459 - DNA, 440 bp, Bos taurus
  Clone ID: 24-BOVMS1-016-Q1-E1-F7
taaaaaactgctgagcccttggcgcacacgctcacagtttcgttctccatctgtttggggtacgtgtcgagcaaacgtgtcttgatgtttcagatgggcttctgatgcactgttgccaaggaaggtttttttttcctgattttttgacaaacgagttttttgcacactttagatcggtgactttgggcaactttcaaacacactgaaaactagctgctgtacatacttttataccctcttcataagcgcatgtctgactacttgtgaccatgttgtgacgcggggctgtccaatcggcctgacgcggcttgggccggcggagaagcagtgtgactagcggcccctcagcagtctcgggaacttcctcctgaacattgagtgtgaatttggtcaagtctgctcctgattcattcagccaatttcaacatttgaagtaatta

SEQ ID NO: 5460 - DNA, 355 bp, Bos taurus
  Clone ID: 24-BOVMS1-017-Q1-E1-F11
aaaaaaaaaaaaaaaaaaaaaaaaaaaaaaaaaaaaaaaaaaaaaaaagaaaaaaaaaaaaaaaaaaaaaaaaaaaaaaaaaaaaaaaaaaaaaaaaaaaaaaagggcaaaagcgcgaaaggttaaaaccttcaattgaccatgggggggacgccatagcgcttcaaaatttccgccgaatctcatttcattgccccttctttttacaacgccctcactggaaaaaccctggcgttccctttgtaaatccccttccagaaaaaccccctttttccccctgtttttgcacctagaaagccccccccctttccccttcccaacatttgccaaaccggaatgcccattgggactcccc

SEQ ID NO: 5461 - DNA, 113 bp, Bos taurus
  Clone ID: 24-BOVMS1-017-Q1-E1-F7
caagctggtgccacaccagctggcccactgagccactgcactaatgcactcagaatatgatgtggaatttcttctttccagtaaagactagccattacattggcttctcctcc

SEQ ID NO: 5462 - DNA, 423 bp, Bos taurus
  Clone ID: 24-BOVMS1-018-Q1-E1-F11
tagaagtgttaataacgtgaatgtcactgtgacctcctgtaccaacaggactggtttatgccagatcattttctggcacttagggagtggctttgactggtcagtaactttctgtaagaaaatagaagacctctaaaattttcaggctttcctccataattccatctccaatatttaaaattttctacattgccaataccagtggcctaagaaatgttttcattagacttaaaacaatgcacagagcttgaattttctgtcatttgactttaaaaagaaggttgattgataacatttatcctcttgtgtgaattctggcataaaagtttcatctcttcaaatacattgaatgacaaaattattttacacaatgtttatgcacatcctataatcttaagttcttattttagaatgtgaaaatgc

SEQ ID NO: 5463 - DNA, 415 bp, Bos taurus
  Clone ID: 24-BOVMS1-020-Q1-E1-F11
cttgagttaagggcacacagtgatcatattaggatttagcaaaaagcaagcctgcagcaaagtttatttctccatagctgcaattaggaaacaaatacttaggtagattgattcttctgcatgtttatcatagagcagaaaagcgctgaccacgtagctgcttagtgatgcaagcaaaaagcctaagcgataaagccccactgatacacctcttgtggctcagctgggacccacattgtcatcacacgacacaagagttggagcggctgctccaactcagctgctcaccctgttctgtgagcagaaagaacttactgaaatgcatggtttaaataacttcctcatcaaaaccttccttctgttttttgtgctttcaaataactaatccgaatttccaaaaaattaacatttgaat

SEQ ID NO: 5464 - DNA, 268 bp, Bos taurus
  Clone ID: 24-BOVMS1-022-Q1-E1-F11
aactcatcagtcggcggccgctccacacgattgatgctgacatagacatgcatgcgacgtcatctatcatccaaaatgtcacctaaagtcaattcacgtgggcgtccttgtactacatcgcgatgagggaaaaccctgacgttacccaacttaatcgccttgcagcacatcacgcttgccgcaccagacgatcctagctaacatgcccgcaccgatcaccccatcaaacagttacacagccagaatggttaatgtcactcgccctcta

SEQ ID NO: 5465 - DNA, 404 bp, Bos taurus
  Clone ID: 24-BOVMS1-022-Q1-E1-F7
atgcgacgtcatagctcttctatagtgtcacctaaattcaattcactggccgtcgttttacaacgtcgtgactgggaaaaccctggcgttacccaacttaatcgccttgcagcacatccccctttcgccagctggcgtaatagcgaagaggcccgcaccgatcgcccttcccaacagttgcgcagcctgaatggcgaatgggacgcgccctgtagcggcgcattaagcgcggcgggtgtggtggttacgcgcagcgtgaccgctacacttgccagcgccctagcgcccgctcctttcgctttcttcccttcctttctcgccacgttcgccggctttccccgtcaagctctaaatcgggggctccctttagggttccgatttagtgctttacggcacctcgaccc

SEQ ID NO: 5466 - DNA, 391 bp, Bos taurus
  Clone ID: 24-BOVMS1-023-Q1-E1-F11
atgcgacgtcatagctcttctatagtgtcacctaaattcaattcactggccgtcgttttacaacgtcgtgactgggaaaaccctggcgttacccaacttaatcgccttgcagcacatccccctttcgccagctggcgtaatagcgaagaggcccgcaccgatcgcccttcccaacagttgcgcagcctgaatggcgaatgggacgcgccctgtagcggcgcattaagcgcggcgggtgtggtggttacgcgcagcgtgaccgctacacttgccagcgccctagcgcccgctcctttcgctttcttcccttcctttctcgccacgttcgccggctttccccgtcaagctctaaatcgggggctccctttagggttccgatttagtgctttac

SEQ ID NO: 5467 - DNA, 331 bp, Bos taurus
  Clone ID: 24-LIB188-001-Q1-E1-F11
acttatgatcggccagcccaccgggcactttgacaagcttgttgttgttcaaatgaagttccctcaaatgaggagtgttggccaaagagccattgtcaaccgcagagatgctgttgaaactcagtcccaacttagccaaattattcagtcctttcaggctggctgcatcaactttggtgattttgttgccatcgagatgtaattcagtaagggaaggaggaagaccttgagggatggtagttatatttgtgtcagcaatgcggatgtaggagagcttcttcattccctgaaaggctccattttcaatgcctgagctcttcagcgggttggt

SEQ ID NO: 5468 - DNA, 408 bp, Bos taurus
  Clone ID: 24-LIB188-001-Q1-E1-F7
acaacagtgtcaaggcagctgctggctgatttcttgcctccccatgggggtcagagttatgcccatcagtcctgtgcaaatgtcctggggctggctaggggggcagccggattcttccccaggatagaagcagtcctgctcacccagcagaagtgtgctgagggacaggcatgtacgcgtgtgcccaggtgcccgtgccccctcacgttccgtggcttttgagcctgtttctccgtcctgtctttatgtccgccctttgaaagtgttcatgcaggtgtaggttcctgagaatttgtggatctcctcgagggcagcctgtgggagtatgcttttcaagataatgagggcatgcattgtccacggcaacaggatgatggcctggttaagctgcacagcttccactgttct

SEQ ID NO: 5469 - DNA, 397 bp, Bos taurus
  Clone ID: 24-LIB188-002-Q1-E1-F11
acttggcccgggtcacgcgtgggtcctctccgggctcgggggtcgcatcctcaggagtagtgtagcgagcaaattctggaaagtagtcctcaatcttcgattttccagcaaggactttctcagccagcagatcttgcttgttgaggaacagaatcacagagatggtgcgcagccatctgttattccagatgctcttgaagaggttcagagcctcctgcaggcggttggtctggttgtcctcccgaatgaccatgttgtagctgctgctggcaaccacgaagatgatggcagtcacatcattgaagcattggattcaattgcggcgttcatcgcgctggccgcccacgtcaaacatgtggaagttgactttgtccaactggaacttggtctcaaagat

SEQ ID NO: 5470 - DNA, 315 bp, Bos taurus
  Clone ID: 24-LIB188-002-Q1-E1-F7
cagccacactcaccatcaactcgctccaggctgaggacgaggcagattatgtctgcgcaacggctgactacgatctcacgtctgctgtttttggcagagggaccgcgctgaccgtccagggtcagcccaagtccccaccctcggtcaccctgttcccgccctccacggaggagctcaacggcaacaaggccaccctggtgtgtctcatcagcgacttctacccgggtagcgtgaccgtggtctggaaggcagacggcagcaccatcacccgcaacgtggagaccacccgggcctccaaacagagcaacagcaagt

SEQ ID NO: 5471 - DNA, 408 bp, Bos taurus
  Clone ID: 24-LIB188-003-Q1-E1-F7
acagacacattcagatgcagctgcagaaagaggggtccagtgatctgaagtcacatagcgggatgcagcattactcagtccccacaaggcagctgtctcaaactttaggaaccgtgagagacacatcagagccctggtcactgtcaccacttgcagcctgggtgtaggtctgtcttttttcacctgagcgcttcttcctccagatcacagctccagccaccacagctactacgaggagaaccaggccaacaatgatgcccatggtgaggaaggaggtctgaggaggttcccatctcaaggtgaggggctcctgaagcccttcgtgctgcacatggcacgtgtatctccgctcctctccagaaggcaccaccagggccgcccacttctggaagtttccgtcccctgaag

SEQ ID NO: 5472 - DNA, 403 bp, Bos taurus
  Clone ID: 24-LIB188-006-Q1-E1-F11
actcggtgtggatcggaggctccatcctggcctccctgtccaccttccagcagatgtggatcagcaagcaggagtatgacgagtctggcccctccattgtccaccgcaaatgcttctaaatggactgcgagcagatgcgtagcatttgctgcatgagttaattcagaagtataaatttgccgtggcaaatgtatacacctcatgctagcctcatgaaactggaataagcctttgaaaagaaatttgtccttgaagcttgtatctgatatcagcactggattgtagaacttgttgctgattttgaccttgtattcaagttaactcttaccttggtatatgtttaataccctgtgcatatctttgatttaaacccctagttatatgcggctctcacctcgagctg

SEQ ID NO: 5473 - DNA, 374 bp, Bos taurus
  Clone ID: 24-LIB188-006-Q1-E1-F7
actataatatctgagtatcttcttattggagaggtaaagtgagtatatttatctaatgcaagaccatagtgatggaactcctcctcggcacatgatccggtggaaaaatacagagcgttagacatggcctgtgtagccattgatcgaagtaacttgttgacgatgggatcgttggggtcatttgcattatccagagaatcagccagtgctttattggaccgtgtatctatgaagaagccctttgctttagcacactctcggagttcggagaaaaactcctgatgtggaggagggtgtcggcgcagcaaggcttgatgagggaagctctcccagatcttcttggctacccagtggttggccaggatcatgcattc

SEQ ID NO: 5474 - DNA, 371 bp, Bos taurus
  Clone ID: 24-LIB188-007-Q1-E1-F7
gggatacagcgcaaaatctaccttcgaggggatcctcaaaaacccaagagcagagtctttgaacagcaggtccctctggccgggtggagagccaaaagggctggaagctccgagacttgttttttccaaatttctcctgcgccttgctgagaagcttccagatcaagtcttccttgccatccacacttcgggccacgacagcatgagaagggacctgggccaggtggcactccttgaacgcatccactggcgcccgactgttgttcaggcagagaagctcatactggtccctgtcagccttctctggcaagttctcaaacactgtcgtctctttaacaaaagccacgtctccagccccgtcctgcagacac

SEQ ID NO: 5475 - DNA, 381 bp, Bos taurus
  Clone ID: 24-LIB188-008-Q1-E1-F11
actcttgcctggaaaatctcatggacggaagagcctggtaggctgcagtccatggggtcgctcagagtcgggcacgactgagcgacttcactttcacatttcactttcatgcattggaggaggacatggcaacccactccagtgttcttgcctggagaaccccagggactgcggggcctggtgggctgccgtccatggggtcacacagactcggacacgactgaaacgacttcgcagaagcagcagcagcagcagcagcagcagcagtgcatagatatcaaaagggtttagaacagtcaggtaggatcacacaagtcaccgtgaagcaatacttctccacttagccaaagctaacaaaagatttctgttctaggtcaacct

SEQ ID NO: 5476 - DNA, 404 bp, Bos taurus
  Clone ID: 24-LIB188-008-Q1-E1-F7
actgttttcacatcttgatgataacgagagaagtgacatttttgacgccatgttcccggtttcctttattgctggagagactattattcagcagggtgacgaaggggataacttctacgtgattgaccaaggagagatggacgtctatgtcaacaatgaatgggcaaccagtgttggggaaggagggagcttcggggagcttgctctgatttacgggactcctcgagcggccactgtcaaggccaagacgaacgtgaaactgtggggcattgaccgggacagctacagaaggatcctcatgggaagcacgctgagaaagcggaagatgtatgaggagtttcttagtaaagtgtctattttagaatctctggacaagtgggagcgtctcacggtagctgatgcat

SEQ ID NO: 5477 - DNA, 286 bp, Bos taurus
  Clone ID: 24-LIB188-009-Q1-E1-F7
ggcacgggcgcgggatacatctccatagagttgggcacacacttgtccaggccctggtcatcgccagcacacaaggcacagagtctggatttcgggtcagccccatgggcacagctctgactaaagaattcatcaaatgcgcaggagcctgtctggttgacgatcaggcccatggggatgttccagcctgcagtcctgtccacggcggtgtggcacgacttcttgtctttcagagaattccatgtgagcccctcatttgctttcttgacaactgccacggcaaggt

SEQ ID NO: 5478 - DNA, 277 bp, Bos taurus
  Clone ID: 24-LIB188-010-Q1-E1-F11
acaaagataaggaagttggcaccattgtcttggagctgaatgcttcaaatgaccgaggaatagatatcgttcggggatcaatcctgagctttgctagcacaaggacaatatttaagaaaggctttaaactggtgatcatggatgaggctgatgccatgactcaggatgcccagaacgccctgaggagagtgcttgagaagtttactgaatctaccagattttgcctcatatgtaactatctgtcaaagatcatccctgccatgcagtcccggtgtaa

SEQ ID NO: 5479 - DNA, 399 bp, Bos taurus
  Clone ID: 24-LIB188-010-Q1-E1-F7
acttgtcctccgactcaggctgcccgtttctctgccactccacggcgatgtagtctgggtagaagctggtgaccatgcaggtgaggctgaccgtgcttttgctgagctcttcctggggtggggccaggacatacacctgcggctcccgggccggccctttggtcctggagatggtcctcacgatgggggccgggaggccttcgttgtggaccttgcacttgaactcctttcctccagtccagtcctggtgctggatgcgcagggcgctgaccacgcggtaggtgctgttgaactgctcctctctcggcttcgtcgtggctgtgtttacctccacgtcgtccacgaaccaggagaacttcacctcggggtcatcgtggcccacgtccaccaccacacacg

SEQ ID NO: 5480 - DNA, 282 bp, Bos taurus
  Clone ID: 24-LIB188-011-Q1-E1-F7
actgcatgaacccgcggaggagacgcccgtccggccccacgtagcagccagacatccactggagggtgtgagacccggcctcgctctggttgtattagccgcgcagggtgttcaggcccactcggaaactctgtgcgttgcccttggcgtttcgcgtgttccgatcccaatactccggcccctcctgcttcacccaccgcgtccgcggctccatcctcggattccgggcgtcgctgtcgaaccgcacgaactgcgtgtcgtccacgtagccgacttccaggt

SEQ ID NO: 5481 - DNA, 400 bp, Bos taurus
  Clone ID: 24-LIB188-012-Q1-E1-F11
acggctttttcgagttggcttaggcagaattctcctctgggcgatggagacgacgtgcttcccgctgaacttcttctccagctcgcgcaccaggcgcacctggattttctggaaagacttcagctgcgggacggggacgaacataataatagctttccggccaccgccaacttcgatctccttggcggccgtgatgttcagctcgcgcagctgcgccttgaggtccgagttcatctccagctccagcagggcctgggagatccccgactcgaactcgtccggcttctcgccgttgggcttgacaatcttgggactggacctgaacatggccgggaccttgtacaggcggccaaatagtcttgccgctgctgacccgagacctgcccggggcggcgctcca

SEQ ID NO: 5482 - DNA, 418 bp, Bos taurus
  Clone ID: 24-LIB188-012-Q1-E1-F7
acctggcacctccacgccggaagggcagccagatcacccagcagtctaccaaccagagccggaatcccgccaccaccaaccagacggagtttgagcgcgtcttctgagggccggctgctgttgcttctcgttagggccgtgtttgtttttttttcttctgctctgtgacttgcagcgtggagattatggggcatgtgagtttttcctctagcgcatatcttatttaatccacaccctgggcatcaggcaccaaccgagcagactggagtaaaactttggcggagagtccaggaaggcacctgagctgcctcaccttgttccctggctttggcggtgatgcccagagggtctccctttactttaggacaggactggggttggggaaaggcatgccccactggtgactctgagaatacct

SEQ ID NO: 5483 - DNA, 386 bp, Bos taurus
  Clone ID: 24-LIB188-013-Q1-E1-F7
accaggtttgtttggcggctgtgggcttagtgggagacttatgccgtgccctgcaatccaacatcttacctttctgtgatgaggtgatgcagctcttactggagaacttggggaatgaaaatgtccacaggtctgtgaagccacagattctgtcagtgtttggtgatattgcccttgctattggtggagagtttaaaaaatacctagaggttgttttgaatactcttcagcaggcctcccaggcccaagtggacaagtcagactatgacatggtggattatctgaatgagctactggaaggctgcttggaagcctataccggaattgtccagggattgaagggagaccacgagaacgtactgtgaacactaataacagggttatcc

SEQ ID NO: 5484 - DNA, 421 bp, Bos taurus
  Clone ID: 24-LIB188-014-Q1-E1-F11
acttacgcaaaaaactatagtgtatttatgggccagcatctgcctggggtcggactggaaagaagccgaccttccatgtgtattctaaatatttctcttcattgtctgggtgctagccacagcaaccctggctccaaacccagttacacaaggagttagcacccctgttttcaagcctgaaatccgcatcaccacaagaggagcttggagagcaggtaacactcatggcaaaatttcaggcatcacctagggggttacgtttcagaagcagctgcccatgctgcagctctggtaagacctctgttctcaaactctccactatagacaggagggagtgagggagggagacagagtctgcgggtctgaggagtgtttcattctggagcccctggcccgccaggagcctgcaccatgggccaat

SEQ ID NO: 5485 - DNA, 417 bp, Bos taurus
  Clone ID: 24-LIB188-014-Q1-E1-F7
cgccatgggcgcgggatacaagaatagttaagtattttgcacaaaggaaatttgttgatgatccagtagaactgatgcccatagaacgcagtttcttaaggattttgttttgcttctttgagggaggcggccatcgtcattgtcagttcagctgggggttccttccttcatgctgaggacctgtgtctttgaagttgctgacgtcctcggaatcccaggcaggctggtgaatgctcaggggctcccatggaggcatctggtggcctcgggccccctttgcttgtatgaggcttagcaagttccttgtcgcttcttcccactgggcatactccctcagctgctccttcaggctctcctcctcatgaagttgtggggactctgccacactcttttttcccattaagtgtccgacagccc

SEQ ID NO: 5486 - DNA, 365 bp, Bos taurus
  Clone ID: 24-LIB188-016-Q1-E1-F11
acaggctggggcatggcacgcggctctggattcccacccttctgttcagagatcggggtggtgggcagtatttcatctttgggttccacagtgcacatctgatcatgcagatgcttcttagggccaatcttacaagtcgggtcccaaggcaccatgatcattaccttgatacccagcatacactgtctgatcaacacatggcgcatggcagtgtccacatattagttaccagggtcaccactgtggatcatgaggccatcgatagacttcatggatttacccctctgtcctcgaagtttcccacacaccacgaactctcaacctttggccccactctccataatgaaccgcatctacacatagca

SEQ ID NO: 5487 - DNA, 306 bp, Bos taurus
  Clone ID: 24-LIB188-016-Q1-E1-F7
acaaccagatcctcagaattgaagaggaactgggcagcaaggccaagtttgccggcaggagcttcagaaacccgctcgccaagtaagctgtgggtgggcgagcccctgcagtcactcgttggctccttagacctgcatctgatgtcaccgagcagtgtgaggcccctgctgatgcccacaggggcctctggtagttacctgccctctcctcgtcctgtgacgtccccgctgcttccttagacctgctatagaagccatgcctgaccatctggagccctgctggaaaccctagctctgtaatcacgt

SEQ ID NO: 5488 - DNA, 190 bp, Bos taurus
  Clone ID: 24-LIB188-018-Q1-E1-F11
actcgccatgatattcatcggggtattctgcctgataatcactatcactgatttctgacccattggttcctgttccttggcttccgttgtgaatgataggttctgtgggagcagcacagtatttgggatcatacacttgccgcccaagcccatacacactcattcctttctgggaagcgactttgttggt

SEQ ID NO: 5489 - DNA, 432 bp, Bos taurus
  Clone ID: 24-LIB188-018-Q1-E1-F7
accattctgtttctggaaggcagctttcttgaaaggttgctctgccacctgctgcttaaccttctcagcccctgtggtgtttccaaagggctggtcacggtcctcaggcttgggtgtggcctgggtcttggagagggatggtgctgcgggcaagtctgtgtccatggccttgggaggagcatgctgcttccggaaggcagctttcctggaggactgcagtttgggtgaatgttgctttagcttcccagcctccttcggttccctgaccactgctgctgtttcgggcggctgactactgtcctggagcttggaggacgcctgggcctttgtgacagcagacacagtagacaattctgtgtccgtccctttggagatgccattctgcttctggaaggaagacttcttgggatgctgctgtttctgcagccgttg

SEQ ID NO: 5490 - DNA, 307 bp, Bos taurus
  Clone ID: 24-LIB188-019-Q1-E1-F7
actcagtgtagggctgacggttcacttgctgcaaaccgtgtaccgtgcagttacattcgcccagttgatgacattccagatggccttcacataatctggcctgacatttttagactgaaggtaatacacatgctcccacgcttcaatccccaccagggggataagacctgttgttccttgcaggggatcctggttagaacatcgcatcattctgtaagcatccctgctccttattgaagccgagccgatcccaaccggagccttggacactaacagatacagcagtcaacttttccttaaatttggc

SEQ ID NO: 5491 - DNA, 393 bp, Bos taurus
  Clone ID: 24-LIB188-020-Q1-E1-F7
gccatgggcccgggatacaaatttacactggatgcagttatcaaccccgacgacaggtgtttgaaaagggtggggcaagaatggtggttgactctgataacttaaccttcgtcaaaggggcccatgtggacttcagccaagaactgatccgaagctcatttcaagtgttgaacaatcctcaagcgcagcaaggttgctcctgtggatcatccttctctgtcaaactttgatgtgatgacaagtgacccggagattgctatcatctgactgatttgaggcacctgggattagaacaattctagaagtttccttcccatcatgaccctctctcaattttattttcctttaatccaggatgttgtttcaccactattttcagaatgtgaaactttt

SEQ ID NO: 5492 - DNA, 301 bp, Bos taurus
  Clone ID: 24-LIB188-022-Q1-E1-F11
accttgccgtggcagttgtcaagaaagcaaatgaggggctcacatggaattctctgaaagacaagaagtcgtgccacaccgccgtggacaggactgcaggctggaacatccccatgggcctgatcgtcaaccagacaggctcctgcgcatttgatgaattctttagtcagagctgtgcccctggggctgacccgaaatccaaactctgtgccttgtgtgctggcgaagaacaagggctggacaaatttgtggccaactccaaaggaaagttccaaccggccgcccggcaagttgggttaac

SEQ ID NO: 5493 - DNA, 425 bp, Bos taurus
  Clone ID: 24-LIB188-022-Q1-E1-F7
actcagtgtaaggctgacggtttacttgctgcaagccgtgtatcgtgcagttacattctcccagttgatcacattccaaatggccttcagataatcgggcctgacatttttatactgaaggtaataagcatgctcccacacgtcaatccccagcagggggataagacctgttgttccttgcaggggatcctggttagaacaagcagcaatctgtaagcgtccctgctccttattgaagccgagccaaccccaaccggagccttggacaccaacagatacagcagtcaacttttccttaaatttggcaaagggaaccaaagtcacgtttgatggcttccagcaattccccttggggttctcaaccaccgttagggctcagatttgtccagaagatgctgtgattgatatggcccccaccgttgaac

SEQ ID NO: 5494 - DNA, 422 bp, Bos taurus
  Clone ID: 24-LIB188-023-Q1-E1-F7
catggccgccggataccttcatttaagatctccaaatttaagagaagatcggagagctgtgctatctaacatggcaagtgccggccactctgaaatcaattaaaatgacaggaagttaaagttcattcctcaattatactaatccgcatttcaagtgctcagcggccacgtggggccggtggctggtgtactagacagaccagtagagcccactggcatctgttgcctgcacagcttgagaactaaactggtttaataagtcacaggctcagcctggttaggatgacctttgtccctctagacaaaggggggctgggagggctgatcaggccctggctctggggcttatcctatgcagagaggagaggcctagtggctcaggctggccagaccacatctcctgaccccatgggggtatcact

SEQ ID NO: 5495 - DNA, 364 bp, Bos taurus
  Clone ID: 24-LIB188-024-Q1-E1-F7
actgggggtatcccttgaggtcgtaagtggccccatccagacccatgatcagatattctttcccaggttccaactgaaggcggcaagaggctcggaccaggaagtttctggtctgatcagcggtggccctggcatccttggtgaaatgcaggacttgggtgatacgggtctcaaagaggcggaaagcagccctgctgtcttctcggagaaccttaacctggaagccgtagtccactcggggagagtagcaggcgaatttcatccggtaaccctccaagtcctgctgcccacgctccagggcccggcgctgtcgagggcacttcccctcagcacactggcagacatccgcagagcacaacgtgga

SEQ ID NO: 5496 - DNA, 410 bp, Bos taurus
  Clone ID: 24-LIB188-026-Q1-E1-F11
acctgcaaggaagattgctattgacagaggctatgacatcgcccagatatcccgacacctggacttcatcagccttttgacctatgactttcacggagcctggcgccagacagtcggacaccacagccccctgtttcgaggccaggaagatgcaagttctgacagattcagtaacgctgactacgctgtgagctacatgctgaggctgggggctccagccaataagctggtgatgggtatccccacttttgggaggagctacactctggcctcttccaagacagatgtgggagtccccatctcagggccaggaattccaggccagttcaccaaggagaaagggatccttgcctattatgagatctgtgacttcctccacggagccaccacccacagattccgtgaccagc

SEQ ID NO: 5497 - DNA, 280 bp, Bos taurus
  Clone ID: 24-LIB188-026-Q1-E1-F7
cgccatggcgcgggatacaagatgtccctggagattgaaatccttcagacaaataaactaaagaaagaagcatttctcttaagagagagggagaaaaatgtgacttgtgactttaatccagaatagatcacttcagttaatcacctttaccatctctttatgccatcaactgtggtaatagttatctagaaagaataatttgttaacatttagttatttgagattgtagaattgttgatcattttctgactcattgtttttgcttttctgcctacattgt

SEQ ID NO: 5498 - DNA, 351 bp, Bos taurus
  Clone ID: 24-LIB188-027-Q1-E1-F11
acaaatcaatgttttgaaaataatgatctcaaactttctaagttaaattttaaaaaacctgatcgtttgccatatggggtgggtttgctcttagaaccgcatgctgtagaaatgctcacagtgcatataggactcagtcctttagatgttccttttcttttaagaaataacctctttgaatttgtgacttcgccctctgttcatttcgcttcgcccctctgttcaaacccatccaattggaggccgtccattaagcggctctacacgctcgcctggcgaaatgtcactgttttctttctttaaaaaaacaagtcctgttccaaaatcgttgttgaatgggttggggggttt

SEQ ID NO: 5499 - DNA, 423 bp, Bos taurus
  Clone ID: 24-LIB188-027-Q1-E1-F7
acacacttatatcagttcagttcagtcacttagttgtgtccaactctttgcaaccccatggactgcagtatgctatgcttccctgtccatcaccaactcctggggcttattcaaactcaagttcatagagtaggtgatgctatccaaccatcttatcctctgtcgtccccttctcctcctgccttcaatctttcccagcatcagggtcttttcagatcagtcagtttttcccatcaggtgaccaaagtgttggagtttcagcttcagcatcattccttccaatgaacacccagggctgatctccttcagaatggactggttggatctccttgcagttccagggactctcaagagtcttctccaacaccacagttcagaagcatcaattctttggcgctcagccttcttcacagtccaactctc

SEQ ID NO: 5500 - DNA, 385 bp, Bos taurus
  Clone ID: 24-LIB188-028-Q1-E1-F7
acacttgcgggaacattccaggtggttgtaaccctcctcgtgggtctgagtgagcagctggactggggagtagccagaggggcaggacgcgctgccagtcagaggattcttctgctccaggttctggcagagttggacaacctcattccctgagaactgggtgcattcctggtaaactcccccgaaggagaaattggtcatcttcccttcgcaagagccatcgtcagtgttggcttggaagttgaagttgggggagctgagatctgtgcagccggggtaggtgttgaccgcataatacctgcgcacggcagcttccaccgtcttcgacagctttctcaccaagggtcccggcaggtcaggcagtcgttcggggttgatgaagaaa

SEQ ID NO: 5501 - DNA, 424 bp, Bos taurus
  unsure (389): unsure at all n locations; Clone ID: 24-LIB2809-001-Q1-E1-F11
acatatctacccgctcctcattcttggagctgcactgaactgccatccacttctgctccgaactgaacgggatctctttctttcggatgtatgaatctttaatatcgcctaagtccatcttcattgccagggccaccaaggcgccctctgttggctgccccatcacggtgttttttctgatgatggcgttgttggcaacacagcctgcctccactaacttccccaccgagacgttggaaaactgcttaatgacttccttggagggtaaaaggcagacagtcccattgccgttgtagccaactccgctgacctcggcatggagcccatcagatgttacgatttgggtgacaattcatttcgttggcagtcaaagtccccgtcttatcggnacagatgacgttgcagcaacctaaggtctccacga

SEQ ID NO: 5502 - DNA, 427 bp, Bos taurus
  Clone ID: 24-LIB2809-001-Q1-E1-F7
cggataccatcaaagtaactttgttagtttttaaaatgacaaaaatctgtgtcatatgggaagattcaaagcagcattgtccataaaaactaaagagttgaaacagcccaattgtccatctagtgatgaatgggaaacaaaatatggtcctttcagacaatggaatattcttcatcaataaaaaggaatgaaggaacgatccatgctataacatggacctcctagtcaccccaggatgcaggggcaggtctgacatacactgtgagagaggtctcggctgttcccggcattgctgtagtgatccacctctagagccacaatcgtccctgtcttcatgaagccaaccttgtatctggccaagaaggggtgtctgccgccagttatcagcatatcctcattacgatccagcatgcagcgcaccgggtgt

SEQ ID NO: 5503 - DNA, 388 bp, Bos taurus
  unsure (329): unsure at all n locations; Clone ID: 24-LIB2809-002-Q1-E1-F7
cgtatgtgtatgatacataaggttatgtattaattgtagccgcgttctaacgacaatatgtacaagcctaattgtgtagcatctggcttactgaagcagaccctatcatctctctcgtaaactgccgtcagagtcggtttggttggacgaaccttctgagtttctggtaacgccgtcccgcacccggaaatggtcagcgaaccaatcagcagggtcatcgctagccagatcctctacgccggacgcatcgtggccggcatcaccggcgccacaggtgcggttgctggcgcctatatcgccgacatcaccgatggggaagatcgggctcngcacttcgggctcatgagcgcttgtttcggcgtgggtatggtggcaggccccgtggccg

SEQ ID NO: 5504 - DNA, 381 bp, Bos taurus
  Clone ID: 24-LIB2809-003-Q1-E1-F7
catacagcagaaaggactgaatgggcatatctctctggggatagggcactgctttctggggaacaggcaggactttggactgagaaagggacagcacggactgaggaggaaacatgacagttggaggaagaggctggtgaggctggtgcatccaagactggagcagaggcagaggaaggtgcagattttcaacatcagtgagagtcaggctctggctttcagtaaagggctcaactggatatttagggaagggcatttctttgtgcttaggagccatagcctccttcactttggagactcctaaaggcatccttgtctttagtttagcctaagctctgtagcctccatctatccaattaatacaggaagaaatgttctcct

SEQ ID NO: 5505 - DNA, 474 bp, Bos taurus
  Clone ID: 24-LIB2809-004-Q1-E1-F11
acagctgcttcatgagagagatcacatctcactagagttacttcactgttttattcgaaacactcatgaccttactcaaaaattgggtctgcaacatcagcttcaggtccacttcagtttccagaggatccttgcaatgcaggggcatcacacctaatgctcacatgcacactcacgtacatattttcagcaccaatgaaattcacgctctggctttcaataaatggcccaccttcatatttagcgaaaggcattactttgtgcttatgagccatagcctccttcactttggaaactcccattacatcatgctgaaggaaacgcagcaccaccacaggggtttgagtaagacgagggatgttttgtgggacgctgttatggatgcgcccagggaagggatatactatacactgtatctggccaaccgggtggattttatcctgcagttcatcctctgtttgctgctgttcctca

SEQ ID NO: 5506 - DNA, 341 bp, Bos taurus
  Clone ID: 24-LIB2809-004-Q1-E1-F7
acagcagaaaagcctgaatgggcatatctctctggggatagggcactgctttctggggaacaggcaggactttggactgagaaagggagagcacggactgaggaggaaacatgacagttggaggaagaggctggtgaggctggtgcatccaagactggagcagaggcagaggaaggtgcagattttcaacatcagtgagagtcaggctctggctttcagtaaagggctcaactggatatttagggaagggcatttctttgtgcttaggagccatagcctccttcactttggagactcccattacttcaggctgaaggaaaggcggcaccaccacaggggtt

SEQ ID NO: 5507 - DNA, 449 bp, Bos taurus
  Clone ID: 24-LIB2809-005-Q1-E1-F7
acaacatagccatttgcaatttttaaaggttatactccatttatagttattatagaatattggctacatgccctgtgccatgcaaaatatacttgtagcttgttgattttatacatgattctcaatttcagttcaaatttgtagtgatcatatttgtaagagaatacaactttcagaatcttcaacttgattaaattcaattaaatttacatcacccaattgatatcaaaatccaaagttgttatcatagattaggttacattaattttttttgtatgaaaaaaaattctgtaaaataaaaagcagatccaggagaaaaagactctttactacttgaaatcaaatttgtagctaacatgtctgtgatttccttgttagtaaatatcaaatctgagtagatgatgcagccttccatcatgtagccctgctcggtcagtgcttggaattta

SEQ ID NO: 5508 - DNA, 403 bp, Bos taurus
  Clone ID: 24-LIB2809-006-Q1-E1-F11
cgtatgtgtatgatacataaggttatgtattaattgtagccgcgttctaacgacaatatgtacaagcctaattgtgtagcatctggcttactgaagcagaccctatcatctctctcgtaaactgccgtcagagtcggtttggttggacgaaccttctgagtttctggtaacgccgtcccgcacccggaaatggtcagcgaaccaatcagcagggtcatcgctagccagatcctctacgccggacgcatcgtggccggcatcaccggcgccacaggtgcggttgctggcgcctatatcgccgacatcaccgatggggaagatcgggctcgccacttcgggctcatgagcgcttgtttcggcgtgggtatggtggcaggccccgtggccgggggactgttgggcg

SEQ ID NO: 5509 - DNA, 391 bp, Bos taurus
  Clone ID: 24-LIB2809-006-Q1-E1-F7
actgaacctactgccaagcaagagctgacggtcacaaggaaaggtgcaatgatgaagagttttttcctagttgtgactatcctggcattaaccctgccatttttgggtgcccaggagcaaaaccaagaacaaccaatacgctgtgagaaagatgaaagattcttcagtgacaaaatagccaaatatatcccaattcagtatgtgctgagtaggtatcctagttatggactcaattactaccaacagaaaccagttgcactaattaataatcaatttctgccatacccatattatgcaaagccagctgcagttaggtcacctgcccaaattcttcaatggcaagttttgtcaaatactgtgcctgccaagtcctgccaagcccagccaacta

SEQ ID NO: 5510 - DNA, 151 bp, Bos taurus
  Clone ID: 24-LIB2809-008-Q1-E1-F7
acagcagaaaggcctgaatgggcatatctctctggggatagggcactgctttctggggaacaggcaggactttggactgagaaagggacagcacggactgaggaggaaacatgacagttggaggaagaggctggtgaggctggtgcatcca

SEQ ID NO: 5511 - DNA, 403 bp, Bos taurus
  Clone ID: 24-LIB2809-009-Q1-E1-F11
ggatacagctcagagcccagtctggccagccgtctccggagcctcagcagcccgctgggcctcatggctgtcaaccaagaagcctgggaccacgggctggcctacctgccctttagcaagaataagccgagcccctgtgagttcatcaacaccaccgcccgcgtgccctgtttcctgacgggagattttctagcctcacagcagattctgctggccactgcccacaccctccttctccgggagcacaaccggctggccagataactaaagaaactcaaccctcactggaatggagagaagctctaccatgaagcccggaaaatcctgggagccttcatacagatcatcacctttagggactacctacccattgtgctacgttctgacattccagaatggatcc

SEQ ID NO: 5512 - DNA, 294 bp, Bos taurus
  Clone ID: 24-LIB2809-009-Q1-E1-F7
acccacgcatttttcaaagctatactattcatatgctccggttccattattcacagcctaaacgacgaacaagatattcgaaaaataggaggcctatttaaagccatgccattcaccacaacagccctcattgttggcagtctcgcactaacaggaatacccttcctcacaggattctactccaaagacctaatcatcgaagccgccaacacgtcttataccaacgcctgagcccttctaataacattaattgccacctctttcacaggtatttacagcacccgtattattttt

SEQ ID NO: 5513 - DNA, 377 bp, Bos taurus
  Clone ID: 24-LIB2809-010-Q1-E1-F11
acgagtcacactatgcactgcccctgggccgcaagaagggggccaagctgactcctgaggaggaagagattttaaaaaaaaaaaaaaaaaaaaaaaaaagcacttacaggagaagtgattcaaaggcttttaaaacattttccatacagaaatttaatgaagactttaattccctttgactcagtggcctttataccagcatgatactactggaatttaggtaacaagctgttaggacaatttcacttaaggatgttacactatctaaaatacagtagagaactcaagaagaaagagtgccttcaatttgagattgccctattctaaaacagcagttgaagccgttggatagaatggtttgacatgatagatgaaaa

SEQ ID NO: 5514 - DNA, 414 bp, Bos taurus
  Clone ID: 24-LIB2809-011-Q1-E1-F7
accccaaggcctcctgagcaggcccgtggaacatgagtcttcccgaggccaacaaggtgaggctatcaaacaacttgaagatgggataacgaggctgatgaatggagaagatgattgtccgtccttgtttagacatcctcttcaggagcaaaaggacagcatttgctgtgcttgagtctaagccagttgtgggctcatccatgaagaagatggatggattagtagtaagctccattgcaatacgagtcctttttctttctcctccagacacaccacggacaaactgagttccaaccttggaatctgccactttatcgagacctaactcttgaataagcttgtgaatccgtgcatttttttcgtaacttgtcatagttgttggaagcccaagggctgcttagaactgtaagtttt

SEQ ID NO: 5515 - DNA, 406 bp, Bos taurus
  Clone ID: 24-LIB2809-012-Q1-E1-F11
accccagctggaaattgttcccaatagtgctgaggaacgacttcacagtatgaaagagggaatccatgcccaacagaaagaacctatgataggagtgaatcaggaactggcctacttctaccctgagcttttcagacaattctaccagctggatgcctatccatctggtgcctggtattacgttccactaggcacacaatacactgatgccccatcattctctgacatccctaatcccattggctctgagaacagtgaaaagactactatgccactgtggtgaagagtcaagttaattccgagggactccacagttatagtctttgatggttctgaaaattccatgctctacatgtcttttcatctatcatgtcaaaccattctatccaaaggcttcaactgctgt

SEQ ID NO: 5516 - DNA, 287 bp, Bos taurus
  unsure (149): unsure at all n locations; Clone ID: 24-LIB2809-012-Q1-E1-F7
actgtcaggtagaacttgaagaagaagctgacggtgaaggtgcgtcggaattcaatcatgcctccaggggcgtctggggataaggacagttcttccgccaggcctgcacacacgtcctgtagcagcttcgcattcgagaactttgacanctgcttctgcgtggtcggtagggctgagatggttctgtccgccattccgccatagcacgagactagctcctttacctgcatgcgtcctggctggaacaggactctcatgccgcaggtcaccttggctatgtcatcttc

SEQ ID NO: 5517 - DNA, 394 bp, Bos taurus
  Clone ID: 24-LIB2809-013-Q1-E1-F7
acttccaaagaccaaattttcaatggtattaccagaagtggaagcagcattagcagagattcctggagtcaggagtgttgtgttgtttggagtagaaactcatgtgtgcatccagcagacagctctggagctcgttggccgaggtatcgaggttcatattgtcgcggatgccacatcatcgagaagcatgatggacaggatgtttgcccttgagcgtcttgctcgaaccgggatcattgtgactacaagtgaagctgttctgctacagctggtggctgataaagaccatccaaaattcaaggaaattcagaatctaattaaggcgagtgccccagagtcgggtctgctttccaaagtataagacatgtgaaagactggtatgctactcactgtc

SEQ ID NO: 5518 - DNA, 421 bp, Bos taurus
  Clone ID: 24-LIB2809-014-Q1-E1-F11
acagcagaaaggcctgaatgggcatatctctctggggatagggcactgctttctggggaacaggcaggactttggactgagaaagggacagcacggactgaggaggaaacatgacagttggaggaagaggctggtgaggctggtgcatccaagactggagcagaggcagaggaaggtgcagattttcaacatcagtgagagtcaggctctggctttcagtaaagggctcaactggatatttagggaagggcatttctttgtgcttaggagccatagcctccttcactttggagactcccattacttcaggctgaaggaaaggcggcaccaccacaggggtttgagtaagaggagggatgttttgtgggaggctgttagggatgggcccagggaagggatagactagagactgtgtctgggc

SEQ ID NO: 5519 - DNA, 417 bp, Bos taurus
  unsure (351),(378): unsure at all n locations; Clone ID: 24-LIB2809-014-Q1-E1-F7
acagcagaaaggcctgaatgggcatatctctctggggatagggcactgctttctggggaacaggcaggactttggactgagaaagggacagcacggactgaggaggaaacatgacagttggaggaagaggctggtgaggctggtgcatccaagactggagcagaggcagaggaaggtgcagattttcaacatcagtgagagtcaggctctggctttcagtaaagggctcaactggatatttagggaagggcatttctttgtgcctaggagccatagcctccttcactttggagactcccattacttcaggctgaaggaaaggcggcaccaccacaggggtttgagtaagangagggatgttttggtggaagctgttanggatgggcccagggaagggatagactagagactgtgtct

SEQ ID NO: 5520 - DNA, 411 bp, Bos taurus
  Clone ID: 24-LIB2809-015-Q1-E1-F11
gccatgggtccgggatacagcagaaaggcctgaatgggcatatctctctggggatagggcactgctttctggggaacaggcaggactttggactgagaaagggacagcacggactgaggaggaaacatgacagttggaggaagaggctggtgaggctggtgcatccaagactggagcagaggcagaggaaggtgcagattttcaacatcagtgagagtcaggctctggctttcagtaaagggctcaactggatatttagggaagggcatttctttgtgcttaggagccatatcctccttcactttggagactcccattacttcaggctgaaggaaaggcggcaccaccacaggggtttgagtaagaggagggatgttttgtgggacgctgttagggattggcccacggaag

SEQ ID NO: 5521 - DNA, 149 bp, Bos taurus
  Clone ID: 24-LIB2809-015-Q1-E1-F7
gggatacaccttaaagctaactcgtctctgagccctgggccctgtagtgacaatggacatgtaaggactaatctccaggggtgcatgaatggcgctctggacttttgacccttgctcgatgtccctgatggcgcttttaatgcaacagt

SEQ ID NO: 5522 - DNA, 395 bp, Bos taurus
  Clone ID: 24-LIB2809-019-Q1-E1-F11
ccatgtggcgcgggatacagataagacggttgggtaaccaatctgcaggcacacgctggcagcattgcggacgccctccaggaagcgggaatgcagagtttcctctgtgatgtcaagcacttcagggttgtggatgctgccattgtcaaacacctgctggatgaccagcccgaaggagaagggggagatgttcagcatgttcagcagcgtggcttcgctggcgcccactttgtctcctgtcttaatcagctgcacatcactcaggatttcaattgtgcccctggagatcttcgtggtgatgcctaaagcctggaagaaggaggtcttctcgggccccagaccagtgttctgtgctggcacagtgacttcacacggcgctatggcaccaacacggg

SEQ ID NO: 5523 - DNA, 462 bp, Bos taurus
  Clone ID: 24-LIB2809-023-Q1-E1-F11
gcatgctacctaccgccatgcggcgcgggatacagctcaactgaaaccacattatctgcttctgaaaaccccttcttgaggtctcctttctcaatcttcagctcagatccataaaaggaattattttttatagcatcctcaattgtgataatggcaggaagatcctcataggtgactttcactacatgggcagctctctctgcatgttctggggtgtcagcgaccacagcaccaatgatgtgaccaacacaagtcaccgtatccttcgcaaagactgtctcatcattaaagagtccggtttcattactcccgggaatatcatcagcagagagaaagcaaacaaatcctggcactttctgagcttctgaaacatcaatggacttgatcttggcgtgggcccgggtgctggtgaccagccggaggaacagctcattctcgtagcgagggatgtcgtcacagtat

SEQ ID NO: 5524 - DNA, 349 bp, Bos taurus
  Clone ID: 24-LIB2809-024-Q1-E1-F7
acagcaaaaaggcctgaatgggcatatctctctggggatagggcactgctttctggggaacaggcaggactttggactgagaaagggacagcacggactgaggaggaaacatgacagttggaggaagaggctggtgaggctggtgcatccaagactggagcagaggcagaggaaggtgcagattttcaacatcagtgagagtcaggctctggctttcagtaaagggctcaactggatatttagggaagggcatttctttgtgcttaggagccatagcctccttcactttggagactcccattacttcaggctgaaggaaaggcggcaccaccacaggggtttgagtaag

SEQ ID NO: 5525 - DNA, 215 bp, Bos taurus
  Clone ID: 24-LIB2809-025-Q1-E1-F7
agcagaaaggccagaatgggcatatctctctggggatagggcactgctttctggggaacaggcatgactttggactgagaaagggacagcacggactgatgaggaaacatgacagttggaggaagatgctggtgaggctggtgcatccaagactggagcacaagcatatgaacgtgcagattttcaacatcagtgagagtcaagctctggctttc

SEQ ID NO: 5526 - DNA, 263 bp, Bos taurus
  Clone ID: 24-LIB2809-026-Q1-E1-F11
cgccatgggcccgggatactttttatagtcggtgtccagcacaaggactttgttctcgttcaaggcatcgatcttgaacaccgcagggatcttgggtttttctgcaatgatcttcttctgagcacactcatcattctcccatttctgcagcaggatctccaggtcgccctcaggggtgggcttcagctcctccacatacactctcaagggggcactctgggcgtccaacaaggagatgtctctgggcgccatgggcaaggagt

SEQ ID NO: 5527 - DNA, 363 bp, Bos taurus
  Clone ID: 24-LIB2809-027-Q1-E1-F7
ggataaccagatggaaattgttcccaatagtgctgaggaacgacttcacagtatgaaagagggaatccatgcccaacagaaagaacctatgataggagtgaatcaggaactggcctacttctaccctgagcttttcagacaattctaccagctggatgcctatccatctggtgcctggtattacgttccactaggcacacaatacactgatgccccatcattctctgacatccctaatcccattggctctgagaacagtgaaaagactactatgccactgtggtgaagagtcaagtgaattctgacggactccacagttatggtctttgatggttctgaaaattccacgctctacatgtcttt

SEQ ID NO: 5528 - DNA, 441 bp, Bos taurus
  Clone ID: 24-LIB2809-028-Q1-E1-F11
gccctgggcccgggatacagcagaaaggcctgaatgggcatatctctctggggatagggcactgctttctggggaacaggcaggactttggactgagaaagggacagcacggactgaggaggaaacatgacagttggaggaagaggctggtgaggctggtgcatccaagactggagcagaggcagaggaaggtgcagattttcaacatcagtgagagtcaggctctggctttcagtaaagggctcaactggatatttagggaagggcatttctttgtgcttaggagccatagcctccttcactttggagactcccattacttcaggctgaaggaaaggcggcaccaccacaggggtttgagtaagaggagggatgttttgtgggacgctgttaaggatgggcccacggaagggatagactagagactgtgtctgggcaaag

SEQ ID NO: 5529 - DNA, 395 bp, Bos taurus
  Clone ID: 24-LIB2809-028-Q1-E1-F7
gggatacctgaaaaacacggtcaacacgatgcgcctctggtccgctcgggcgcccaatgacttcaacctcagagactttaacgttggagactacattcaggccgtgctggaccggaatctggccgagaacatctcccgggtcctctatcccaatgataatttttttgcagggagcgagctaagattgaagcaggagtattttgtggtagctgctaccttgcaagatgtcatccgacgtttcaaagcctccaagtttgactccagcaatagcaccaaaactgcgttcgatgccttcccagatcaggttgccatccagctgaatgacacccacccttcacttgccatccctgagctgatgaggatttttgtggatattgaaaaactgccctggtcca

SEQ ID NO: 5530 - DNA, 391 bp, Bos taurus
  Clone ID: 24-LIB2809-029-Q1-E1-F11
accaataacaccaattttatagacatcctggagaggcaaacgcaagggtttgtcagttgggcgagttggtggcagaatgcaatccagagcttcaagcagggtggttccactggcattgccgtccttacgggtgactttccatcccttgaaccatggcatattagcacttggttctagcatgttgtcaccattccagccagaaattggcacaaatgctactgtgtcggggttgtagccaattttcttaatataggtgctgacttccttaacaatttcttcgtatctcttctggctatagggtggctcagtggaatccattttgttaacgccaacaattagttgtttcacacccagggtgtaagccaaaagggcatgctcacgggtctgcccg

SEQ ID NO: 5531 - DNA, 444 bp, Bos taurus
  Clone ID: 24-LIB2809-029-Q1-E1-F7
actttgacagttcatcttatctaaattacccaggaatttgtggctaaaatcagtttaccacagataagctatgatgtgtctggttaattagcatttttatcttgaatgtaaattaatgtcataaaactaacaatacatgttttttattttttaaggaaattgttcccaatagtgttgaggtgagatatatctactaaatttaaaatatattaacatcatccaggatatcttaaaatttaattaaactttttagtttttgaattttttagcataagcacattcaaaaggaagatgtgccctctgagcgttacctgggttatctggtaaaattttattaaaagttaatcagagaccaatgtatcatggaatgagcaagatgttgtattgataaattatctctccttttcaatatctgctaaacttaaagtaagcagtctaacagat

SEQ ID NO: 5532 - DNA, 436 bp, Bos taurus
  Clone ID: 24-LIB2809-030-Q1-E1-F7
acaatgaagaaagctgtctgggaaagggagaaccatagccttggctcagagccttgaggcacagcctgaagacttcctacttaacatctaggaaggctgctttagtgtttttctaggccacgggtctgtctggaatggagagccaatggcctcctatagataccaatgtgtcatctagaaaggatatgctggattcagtttgccacatctcactaggccgactttgtaaccttgtttgtcacctgtctacactgcttaagcatttgatattgaatgaataatgtagagttgatgaaaactttaaaattaaacatgttttcagtcacatgttatttctttgaaactgaggactctgaattttcaacttattgaatctctaataaacactgtaactccaataatttgggcaacctcatgcgaagacttgactcattgg

SEQ ID NO: 5533 - DNA, 374 bp, Bos taurus
  unsure (351),(354): unsure at all n locations; Clone ID: 24-LIB2809-031-Q1-E1-F11
acagcaaaaaggcctgaatgggcatatctctctggggatagggcactgccttctggggaacaggcaggactttggactgagaaagggacagcacggactgaggaggaaacatgacagttggaggaagaggctggtgaggctggtgcatccaagactggagcagaggcagaggaaggtgcagattttcaacatcagtgagagtcaggctctggctttcagtaaagggctcaactggatatttagggaagggcatttctttgtgcttaggagccatagcctccttcactttggagactcccattacttcaggctgaaggaaaggcggcaccaccacaggggtttgagtaaganganggatgttttgtgggaagctg

SEQ ID NO: 5534 - DNA, 374 bp, Bos taurus
  Clone ID: 24-LIB2809-031-Q1-E1-F7
acagcagaaaggcctgaatgggcatatctctctggggatagggcactgctttctggggaacaggcaggactttggactgagaaagggacagcacggactgaggaggaaacatgacagttggaggaagaggctggtgaggctggtgcatccaagactggagcagaggcagaggaaggtgcagattttcaacatcagtgagagtcaggctctggctttcagtaaagggctcaactggatatttagggaagggcatttctttgtgcttaggagccatagcctccttcactttggagactcccattacttcaggctgaaggaaaggcggcaccaccacaggggtttgagtaagaggacggatgttttgtgggacgctg

SEQ ID NO: 5535 - DNA, 452 bp, Bos taurus
  unsure (394): unsure at all n locations; Clone ID: 24-LIB2809-032-Q1-E1-F7
gccatgggcgcgggatacagcagaaaggcctgaatgggcatatctctctggggatagggcactgctttctggggaacaggcaggactttggactgagaaagggacagcacggactgaggaggaaacatgacagttggaggaagaggctggtgaggctggtgcatccaagactggagcagaggcagaggaaggtgcagattttcaacatcagtgagagtcaggctctggctttcagtaaagggctcaactggatatttagggaagggcatttctttgtgcttaggagccatagcctccttcactttggagactcccattacttcaggctgaaggaaaggcggcaccaccacaggggtttgagtaagaggagggatgttttgtgggacgctgttanggatgggcccagggaagggatagactagagactgtgccctggcaaaggggtggatttt

SEQ ID NO: 5536 - DNA, 365 bp, Bos taurus
  Clone ID: 24-LIB3057-003-Q1-K1-F11
ctccgcgctgccacattccattcagacggccacagagggacccggccccagggaaggagccgcgtgctgttccctgaggagctgcccagacctagggctggactctgaggagctgggggggggtctcaccccgtcccctgaggccacagcctaacccggagggaggctcacaggggaccaggaaactggactgggctgggcaggcctggtggtgggggcatggcactgggggggcccactgctatgggggccgtggagttcaagggccgcagccaggagggcagagggccttgaggaagcccccaggaagaggcttcgtaagcctcccagccctttgggactgtcactctgaggctcctgggggc

SEQ ID NO: 5537 - DNA, 254 bp, Bos taurus
  Clone ID: 24-LIB3057-003-Q1-K1-F7
gcatcgcattctctcgtgaggcaatgcagcttcctgagatcaagttcgttgacccgaggtggaacgagctaggctaagtcgcattaccagaaaacttgagtgactagctgcacgagcttgacttgactggaatccccggcatcggcattgaccgacgacccgtggagctattcaagtgtctgagaccgtggacgatagatcaagcttggtgctgacatgcttctagagctccaggcatgtccagccattgctac

SEQ ID NO: 5538 - DNA, 388 bp, Bos taurus
  Clone ID: 24-LIB3057-004-Q1-K1-F7
actcttgctgccgcatcatggcttccgtggggaccctcgccttcgatgaatgtggccgtcctttcctcatcatcaaggatcaggaccgcaagtctcgtcttatgggacttgaggccctcaagtctcatataatggcagcaaagactgctccatagtcatagcctacatcgcttggaccaaatgggcttgataagatgatggtggataaagatggtgacgtgaccgtgaccaatgacggcgccaccatcttaagcatgatggacgttgaccaccagatcgccaagctgatggttgaactgtccaaatcacaggatgatgagatcggagatggaaccaccagagtggatgcgctggctggcgccctgttggaagaggctgaacaactgct

SEQ ID NO: 5539 - DNA, 378 bp, Bos taurus
  Clone ID: 24-LIB3057-005-Q1-K1-F11
gcttcctggtgaagtgtgtttcttgaaatcatcaccaccatggacagcaaaggttcgtcgcagaaagggtcccgcctgctcctgctgctggtggtgtcaaatctactcttgtgccagggtgtggtctccacccccgtctgtcccaatgggcctggcaactgccaggtatcccttcgagacctgtttgaccgggcagtcatggtgtcccactacatccatgacctctcctcggaaatgttcaacgaatttgataaacggtatgcccagggcaaagggttcattaccatggccctcaacagctgccatacctcctcccttcctacccctgaagataaagaacaagcccaacagacccaccatgaagtccttatgagcttg

SEQ ID NO: 5540 - DNA, 415 bp, Bos taurus
  unsure (371): unsure at all n locations; Clone ID: 24-LIB3057-007-Q1-K1-F11
ggaaaacaccaattggctcttcgattacggcttgatcgacgatattcccgttccggacgccaccttcggcgtcaattcctccgccttcacatggccccctaacgccttgaacgcttcctccaatgtcggcgttgaaattgatggctcgttgggggattctgacagtctcaaagagtctggctcaaagaaaagggttaggtctgagtcatgtgctgcttctggctccaaggcatgtcgggagaagttgagaagggataggcttaatgacaagtttgttgaattgggcgccattttggagcctggaaggcctgccaaaacagacaaggctgctatcctgattgatgctgtccgaatggtgacccagttaccgngtgaagcccagaagttgaaagacactaatcagggtcttcaagaa

SEQ ID NO: 5541 - DNA, 375 bp, Bos taurus
  Clone ID: 24-LIB3057-007-Q1-K1-F7
aagccacccctctgatctccgtccccattcctagtccccccgtcctctgccaaatgatccctgtgactggatccagtggcctgttaccagctgttctgaagccgcctccccaggtgtctgcagggcttgtcaagcccgtcttgccccacgcagctcctgcactcccgcctgtgttcgtgggaacgtctgtgcctcagggaaccgtgatgctgcttctgccccagggggccctcccccagcccaccacatgctcagccggcaacatgcctgtcgggaacaccagattcctgcctcttgcccctgctccagtgttcattgcatccagtcagagctgtgcccctcaggtagacttttcccgaaggagaaactatgttt

SEQ ID NO: 5542 - DNA, 284 bp, Bos taurus
  Clone ID: 24-LIB3057-008-Q1-K1-F11
cttcaaccgagaagttattcagagtgacagtttgtggcttgtagaattctatgctccatggtgtggccactgccagaggttaacaccagaatggaagaaagcagcaactgccttgaaagatgttgtcaaagttggtgcagttgacgcagacaaacatcagtccctagggggtcagtatggtgttcagggatttcctaccattaagatttttggatccaacaaaaacaaaccagaagattatcagggtggcagaactggtgaagccatcgtggacccttgcctta

SEQ ID NO: 5543 - DNA, 405 bp, Bos taurus
  Clone ID: 24-LIB3057-008-Q1-K1-F7
attgatgtgagcactgctaaagagttgttcagacgctggtatccctaagaatacgggtgggcacctaagaaggctgcttgtcacagggcacttgatgacattagcgaaagcatcaaagaacttcagttataccgaaataacatcttcaagaaaaaaacagatgagaagaagaggaaaattatagaaaatggggaaaatgagaagactgagagttgatgccggttctcgtgccgtcaccatgcggctctatggaagcagcttctggtggctttttcttttcccatgggatcacgctgtatgcttggccgatcaccttccttcagataacttgcatctacagatttctcaagcagacagtacctgaaaattatttgtctgctaacatgctgttttcatttatgacac

SEQ ID NO: 5544 - DNA, 419 bp, Bos taurus
  Clone ID: 24-LIB3057-009-Q1-K1-F7
cgggctccgccatgttgggacttgtgtgttcgtgtggttgctgcctgggcctccgggggcttgcggggactcagcccttcagcgccgctaccgcaagcccagcttttactgcgggccgctcctgcagcgctccagcctgccagagactatgccgctcaagcatctccatcgccaaaggccggcgccaccactgggcgcatcgtggcggtcattggtgcagtggtggacgtccagtttgatgagggactgcctcccatcctaaatgccctggaggtgcaaggcagggagaccaggctggttttggaggtggcccagcatttgggtgagagcacagtaaggaccattgctatggatggtacagaaggcttggttagaggtcagaaagtcctggattctggtgcaccaatcagaattcctgt

SEQ ID NO: 5545 - DNA, 258 bp, Bos taurus
  Clone ID: 24-LIB3057-010-Q1-K1-F7
acgcttctagatcgcgagagccactacaggctcgcgtttaagaactggagcgctttgtgtgcgtaccgggcaagtctcggggctctcagaaagtagctttttggaacatttccagcaagatggagagggtgaaagttctgtacaaaaagattgaagacttgatcaaatacccggatcctgattacactgaccgtattgccttacctgattccttctaactgcagtttatcctttcagaagagcaagtcattctttttc

SEQ ID NO: 5546 - DNA, 415 bp, Bos taurus
  Clone ID: 24-LIB3057-011-Q1-K1-F11
ctcctgttgggtggagtcatgggcccatctctgttcctgtttgtttttaaatattgttgtgtgttttgtatctgtggcgctgtcttacagcgtgctctgtacatattgtgaagaaaccgtttggagtaattttcttttccgttgggcaggcatagcccgggattcctgccctttccactttgttctgtaacagagaagaggaacttctgtattagcagggcagccttgggttctgcagaagggaacagctttttttctctttttctcccccttaaaaaaatttggctttttgatccttacatcctgaaaagcaggagctgaactgcccagaagagcaggtgagagcatcagtggcagaacagcactgcccatttcctgatcctcctggtccctgacccttgccaggcccgtcgtc

SEQ ID NO: 5547 - DNA, 447 bp, Bos taurus
  Clone ID: 24-LIB3057-011-Q1-K1-F7
gaatatccctgtgagatgacagccaatagtgagtgtttgtttcttttatagtcttcactccagtatccaaagcttaaaagaatgtctcttttgtagtgtccacatagaccgtggccagacagacagtggggactgtgcatctttgatgatgtcatataacactgtagtccagcctcatttaaatatgcagaatatttcttaaggccaatgctccaatacgtatgtgacagcagcccggaagtcaggcaagcagctgcatatggcctgggagtcatggcacagtatggtggcgataactaccgtcctttctgcacaggtacttctgtttgtctggttacgcgcatttcgccccagacatccctggtagccctaccttgctttctgccccgaccctgaaaacagtatacacttgctttctgcagtatttcttttgcacacaccttatta

SEQ ID NO: 5548 - DNA, 340 bp, Bos taurus
  unsure (271): unsure at all n locations; Clone ID: 24-LIB3057-012-Q1-K1-F7
aagggaagaaaagtgaccgagaggccgctgaacatcctcgccccggcgcagcgggagccgcccgaggcagcttccccgtgacagagcctcagcctgcctggaagatgccgagactgtgcagcagtcgttcgggcgccctgctgctggccttgctgcttcaggcctccatggaagtgcgtggttggtgcctggagagcagccagtgtcaggacctcaccacggaaagtaacctgctggcgtgcatccgggcctgcaagcccgacctctccgncgagacgccggtgttccccggcaacggcgatgagcagccgctgactgagaaccccccgaagtacgtcat

SEQ ID NO: 5549 - DNA, 432 bp, Bos taurus
  Clone ID: 24-LIB3057-013-Q1-K1-F11
agtccgtgcatcctagagtccctgcgtctcgcccttacccacgcagggaagtacgtggtcctctttttctacccgctggactttacctttgtgtgccccacggagatcgtagctttcagcgaccgtgctgcggagttccacaagctgaactgcgaggtgctgggcgtctcggtcgactctcagttcacccacctggcttggatcaacactcccaggaaagagggaggcttgggcccgctgaacattcccctgctggctgatgtaaccagaaagttgtccagtgattatggcgtgctgaaagaagatgaggggatcgcctacaggggcctctttgtcatcgacggcaagggtgtccttcgccaggtcaccatcaatgccttgcctgtgggacgctctgtggatgaggctctgaggctggtccaggctttccag

SEQ ID NO: 5550 - DNA, 431 bp, Bos taurus
  Clone ID: 24-LIB3057-013-Q1-K1-F7
ggcaaacagccatggccaaggacatcctggctgaagcagggctgcactttgatgagctgaacaagctgcgggtgttggacccagaggtttcccagcagaccatagagctcaaggaggagtgcaaggactttgtggacaaaattggccaatttcagaaaatagttggtggcttaattgagcttgttgaccagcttgcaaaggaagcagaaaatgagaagatgaaggccattggtgctcggaacttgctcaaatctatagcaaaacagagagaagcccaacagcagcaacttcaggcactaatagcagaaaagaaaatgcagcttgaaaggtatcgggttgaatatgaagctttgtgtaaagtagaagcagaacaaaatgagtttattgaccaatttatttttcagaaatgaaatgaaattttcattttctag

SEQ ID NO: 5551 - DNA, 335 bp, Bos taurus
  unsure (108): unsure at all n locations; Clone ID: 24-LIB3057-014-Q1-K1-F7
gaccagtcaactgatcaaccatctaatgggaaagaatgatggcatgcccaaggatgccgaggacctgttccgcttgtacatggccctgaagcagtaccgagaagccgnccggaccgtcatcatcatcgccagggaagagcagtctgcaggaaactatcggaatgcacatgacgttctcttcagcatgtatgcagaacttaaatctcagaagatcaagattccctctgagatggccaccaacctcatgattctgcacagttacatactagtgaggattcacgtgaaaaaatggagatcacatgaaaggggcacgtatgctcatccgggtggccaac

SEQ ID NO: 5552 - DNA, 368 bp, Bos taurus
  Clone ID: 24-LIB3057-015-Q1-K1-F7
gttctagatcgcgagcggccgccctttttttttttttttttttttttttttttggtttgttcatctacacagtgttttaattttaattcaactataaccaaacagcaaaattaacacaatattcaccaactccaaaacagttttcttttttaaaccaaagtgtgattaatttaacaagcacagactttcaaattctgataaccttttacccaacccagccctgctgctcatctaaatggccaggctttaacagcaaagcaatttcttctatggagctttttccagtattgctctttaaaggagccacaatgggacactgacacccattaaccaacctgaaactttgggggtcccctggttgtcttggt

SEQ ID NO: 5553 - DNA, 455 bp, Bos taurus
  Clone ID: 24-LIB3057-019-Q1-K1-F11
cccacgcgtccgctgagctgtgcgcgtgaggcgggcccttagaagcaccggggaggaggccctggtcacctgcgcctttttctttcgcagtggctccccgttaccaagctgggccgcctggtcaaggacatgaagatcaagtctcttgaggagatctaccttttctctctgcctatcaaggtaaacacgggtcatcctggatggggccgtggccagcagtcgagggaactcttgttggccaaacgttgagaggttctagactccacttgccctggacttatctggtagcccagacggtaaagaaaatgtcttcagtacaggagacccgggttcgatccctttgttgggaagatcccctggagaaggaaatggctacccgttatttcttggaaaactccatgagcaggggagccgggtggtttacagtccatgaggtcctaaaaactccaacacaa

SEQ ID NO: 5554 - DNA, 361 bp, Bos taurus
  Clone ID: 24-LIB3057-019-Q1-K1-F7
cggtacgcgtgggtgcgagtcaggattcccgatctagagacaatggccccgatgggatggaacccgaaggcgtcatcgagagtaactggaatgagattgtcgacagctttgatgacatgaacctctcagagtcactcctccgtggcatatatgcctatggttttgagaagccctctgccattcagcagcgagccattcttccttgtatcaagggttatgatgtgattgctcaagcccaatctgggactgggaaaacggccacttttgccatatcaattctgcaacagattgaattagatctaaaggccacccaggccttggtcctggcacccacttagagagtttggcccaagcaggatac

SEQ ID NO: 5555 - DNA, 413 bp, Bos taurus
  Clone ID: 24-LIB3057-020-Q1-K1-F7
ctagttctagatcgcgagcggccgccctgatcaatttgcttgctgaaaatggtcgcttgactaatacccctgcggtgatttccgcattttctaccatgatgagtgtccaccgtggagaagtaccatgcacagttaccactgcatctgctttagatgaagccactctgactgaattgaaaacggtcctgaagagcttcctaagtaaaggccaggttttgaagttagaagttaagattgatccgtcgatcatgggtggaatgattgtccgtattggagagaaatacgttgatatgtctgcaaaaaccaagattcagaagctgagcagagcaatgcgggagattctgtaaaagtgttgattttctaaaagtgagaattcttaaacttggagcaacaataaacactttctgaacagg

SEQ ID NO: 5556 - DNA, 425 bp, Bos taurus
  Clone ID: 24-LIB3057-022-Q1-K1-F7
ctttttcactgtattgatccaaatgattccaagcataaaagaacagacagatcgatttgatgttgtttacgaaaaggagaatctggccagtcatggccaaggttaacaaaagaaagggcaaagcttaattggcttagtgtggactttaataattggaaagactgggaagatgattccgatgaagacatgtctaattttgatcgtttctctgagatgatgaacaacatgggtggtgatgaggatgtagatttaccagaagtagatggagcagatgatgattcacaagacagtgatgatgaaaaaatgccagatctggagtaaggaatgttgtcatcgctggattttgagaaagaaaaataacttctctgcaagatttcgtaattgagagaattcctgagttgatagctctaaaggcagatgctgga

SEQ ID NO: 5557 - DNA, 236 bp, Bos taurus
  Clone ID: 24-LIB3057-023-Q1-K1-F7
gcgaacaccaccctctggagaagccaaggctccgttgccaacccgtccctggggcccgggcccatgcgccacgcccgcccacaccgctaccatggctgaggacgcggacatgcgcaatgagctggaggagatgcagcggtaagctgaccagctggccgatgagtctctggaaagcacccgtcgtatgcttcaactggttgaagagagttaagatgctggtatcaggactttggtta

SEQ ID NO: 5558 - DNA, 431 bp, Bos taurus
  Clone ID: 24-LIB3057-024-Q1-K1-F7
ggaaatcaactgttgggagcttcggtttctgtcgacttgagctgagcgtgttggtttatttataatttggttatctataaattttatttattttatttttttttttttatttttttatttttattttttatattattttttttttttttttattttttttttttatttttttttttttattttattttttttttattattttttatttttttttttttttttttttttttttttttatttttaattttttttttatttttttttatttatttttttttattttttttttattgttttttattttttattatttatattttatttttttttattttttttttttttatattttttattatttatttttattaattttttatttatttatttttttttattttattttttttttatttttttttatttttttt

SEQ ID NO: 5559 - DNA, 358 bp, Bos taurus
  Clone ID: 24-LIB3057-025-Q1-K1-F11
ctagttctagatcgcgagcggccgcacttttttttttttattttatttttttttgtttggttttttaaatttattttatatttttttttttataatttttttttttaatataatttttttttattatatctatagagaaaatatttttattataaaaatttgacattaaaacgctctttatcattgataactgcatttcttatcttttcttgacttctaaaaatatagacaacacatgtcctgattcaattgcattaacaatatgaaaataattacaataattagctgttttcatttcaccggtatgaaaatactttaaaagctatttggaatgcatccaatttgagtcattaaatat

SEQ ID NO: 5560 - DNA, 162 bp, Bos taurus
  Clone ID: 24-LIB3058-001-Q1-K1-F11
ggagtcttaagacaccgggtatctccacttgctgtcaaacagcactctggggactggcccacgccgcggcatctgggggttggggagggtctgggagctggacggagataaaggaagtgcgcacagcctgtctgctgagttacaataaaagcgaggtcttgg

SEQ ID NO: 5561 - DNA, 377 bp, Bos taurus
  Clone ID: 24-LIB3058-001-Q1-K1-F7
ctggggtccaaattcatgaccacccttcacctgcagggaggtgatctgttggagaggagaggaaaactggcgccttctcttttaaaggcaataatggaattgactttcaataactgaatttgtgcacaaaacattctaaacactagtgaagcctgttttgttgaactaattctggctctggaaatgttttatagttatttacagttttgttttgttcggggagtttttggtttggattcaagcttagtttggtaatatgtataatttaacatatattgcactcatgtaaatatggagtaagtattgtaaactatttcattgctggggattgtgggtgttatacatacatttaggactgcaattttttggggtttttt

SEQ ID NO: 5562 - DNA, 410 bp, Bos taurus
  Clone ID: 24-LIB3058-007-Q1-K1-F7
gtccgcctcgctccgcggcggccatcagacccttgggctcaggctcgaggggctgggagctgcgcgctccgctcaggcagagcgacaccgccctccccgcgcgctcctccccgaggagccgagtccgcgcccggcccgcccgccgccatgggctgtctcggaaacagcaagaccgaggaccagcgcaacgaggagaaggcgcagcgcgaggccaacaagaagatcgagaagcagctgcagaaggacaagcaggtctaccgggccacgcaccgtctgctgctgctgggtgctggagaatctggtaaaagcaccattgtgaagcaaatgaggatcctgcatgttaatgggtttaatggagagggcggcgaagaggacccgcaggctgcaaggagcaacagcgatggtagtga

SEQ ID NO: 5563 - DNA, 387 bp, Bos taurus
  Clone ID: 24-LIB3058-008-Q1-K1-F11
gctgcttctctcgtgaccacgattatcttgccttatccaggaataattgcccctttgcagagaaaaaaacacttgatgaaagcacatgcctactgctgcctgtcccgctttgctgccgacacgcccgccccaagaaaacgctggaggattcatcacgcagacgtggaaagagtggcccgaccatccttccgatgggctctgggcaggattctctgtctttggttcgttttaaagtcgtctttacttggcccacgtgcgttcagtttatgatttggtggctattacttgggaccatatcctgtccacctgattttttttaagtttatttattacatcttttacatttgattttcaatattagtggttttgtttgaggagatgatttgg

SEQ ID NO: 5564 - DNA, 401 bp, Bos taurus
  Clone ID: 24-LIB3058-008-Q1-K1-F7
gtccggtcggccgtggtcccgcagagagcgcgcggccctgaggtgggagcgccgcgagcagcagcgcccataggatgcccaggggtgaactgtcctgagctgccgtggtctagacgcctgcctgcccccgcgtgccccacacagcccgcccgcacacccagcatggagtccagagggaagtcgactaacagccccaaggccgacgctaaggccacggccgagacccgagcccctgccgccgtggacgggaaggccccgtcctctaagccagggaagaaggaggtccaggcagagaagcaggagccgccggcagcccccacgccgccacctgccaagaagaccccagccaaggcagacccggcccttctcaacaatcacagcaacctgaagccggcccccgc

SEQ ID NO: 5565 - DNA, 432 bp, Bos taurus
  unsure (353),(377),(412): unsure at all n locations; Clone ID: 24-LIB3058-009-Q1-K1-F7
tgctgctgcagggctggcaggaccagggcttcatcacgccggccaacgtggtcttcctctacatgctctgccgggatgtcatctcctccgaggtgggttccgaccacgagctccaggcggtcctgctgacctgcctgtacctctcctactcctacatgggcaacgagatctcctacccgctcaagcccttcctggtggagagctgcaaggaggccttttgggaccgctgtctctccgtcatcaacctcatgagctccaagatgctgcagatcaacgccgacccccactacttcacgcaggtgttctccgacctgaagaacgagagcggccaggaggacaagaagcggctcctnctcgggctggaccggtgagcccgncagcctgcatcatggctcaaggattcaattcattnttaaaaatttattcttaaat

SEQ ID NO: 5566 - DNA, 383 bp, Bos taurus
  Clone ID: 24-LIB3058-010-Q1-K1-F7
tgaaaattcaagatagttaatcataattgttaacagtgcatttactgatctgccgtcccatcaaatatcataacgaaatccttttgtttgctttgtatttgtttactttttcaaataaaatcacaacagatgtaaaaaaaaaaaaaaaaaaaaaaaaaaaaaaaaaaaaaaaaaaaaaaaaaaaaaaaaaaaaaaaaaaaaaaaaaaaaaaaaaaaaaaaaaaaaaaaaaaaaaaaaaaaaaaaaaaaaaaaaaggggcggccgttttaaaggtcccaagtttacttccccgtaattgcaacgtaatagtttttttatagggccccctaaatcaaattcagtggccgccgttttaaaacgtttaaattggaaaaaccttgggg

SEQ ID NO: 5567 - DNA, 364 bp, Bos taurus
  Clone ID: 24-LIB3058-014-Q1-K1-F11
cacagacccaccgatcgcgtgtcgtctttacgcattggctgcccatatcagtgggtccgagatatccaagtacctggacttagcgagcaccatggaccaaaccaggcacggcttccatggcagacacagatacacagtcatatcatactcccttttctgcttcttcatgcctagtcaattatacacccaatcgactctcactcattgataggctcctctcgaccagaaccacctactatttctactttatcagatggctcatatcatgactgactcatacgaaaacttttttatgaactaatgatagaacatatacacacagtgtacacgttctacatatatggaaaggtgctaggactgtcca

SEQ ID NO: 5568 - DNA, 352 bp, Bos taurus
  Clone ID: 24-LIB3058-016-Q1-K1-F7
caagagggaagtagcccctccccaagactggtgagggagccctgcgtagaccctggtgagaatgctcagtgcaggcccaggggcacccaccatggccttcaccctcaccacgacctctgcccccagcaaagctgacaggcatgaacgagatcacagagaagctcacgctggcagacacctgtcggagtgaccacgttgtggtgcagaaagtgacggccacagccaacctgggtcgtggcccttgtgggacatctgacgagtacaggtttgcaaggaggacgctgaccagtgggagcctggtcctgctgactctggacgccccgcctactggagctgccaactgacggtcaac

SEQ ID NO: 5569 - DNA, 400 bp, Bos taurus
  Clone ID: 24-LIB3058-017-Q1-K1-F11
acgggaagactcaagtgccccttccctgaaacgcttctgtatggaccagcctgcagtgccgcagacagcgtcagaaagctagcaccaccctggcgcccttcacctccaagccccatgcctgtatttattgcattctggttctggctgagctgtgttgctggggtaagggcgagcaccagggtccagagcctgcacctcagagccttctgggctggaaggcggacgcgggacctggggtcgtagcatcatcttcctgtccctggcacctgtgtctgcctggtcctgagaagaggagcactcctgtcctctttgcaccccaaggaggctggcgcctcagccgcttcaggatcatctgtcacctccagtagcagtctctactccacagcctctggactgagct

SEQ ID NO: 5570 - DNA, 479 bp, Bos taurus
  Clone ID: 24-LIB3058-017-Q1-K1-F7
tttatatctgggttaagtgtttatcatatatatgggtactttgtaatatcagaaacggaaatggaatcctgctcacaaaatcactttaaaatcttttttaagctgtttgatcttctttttcctgatgttgctgacactgcagaattgtacagaactcccacgggcctgtactaaccttgctcaaggtctctcgctgttggctttttgctttcgggatatgccataggcgtgacaaataatccagaaagtggaatcattaagtgggagcattgcgagctgtcttctccttgtgttctatatgtattttgtatgtatgtatgtatgtattattattactgccaagagggtctgatggcacgtcaagggtcggggtgggacgatctaagggaggggaagtgctttaactctttgtaagattttggtggcagccccttcaagtgcactgagctatgtgactctaatggctttcatgtggcaca

SEQ ID NO: 5571 - DNA, 439 bp, Bos taurus
  Clone ID: 24-LIB3058-018-Q1-K1-F7
cggacgcgtgggcacaatgatacattaaatgctatttttatttaaatactggatcaaaatggctggcttcaaattgtagacattaataaactaactttatgtgaacctgtgtaggagaatcaaagttctgtatagtttctttgccttgttccccttctcacggtgacaactgtcacgtggttaccaggagatgcaattgtagctcttaaagttgtattagcccacatttctgagaggtggtatctgaaagagagattatgccttctctcacttaaatcataaccatctatgaataccagctaagatgaaatcgctgcactgtaagtagtcaataaatgaagacttatttcaggctgaagattacctaagagtatttatttgggagggtgtgaatcaacctaatatatttttgttacgtcaagttctggtctattaatat

SEQ ID NO: 5572 - DNA, 465 bp, Bos taurus
  Clone ID: 24-LIB3058-019-Q1-K1-F7
aaaagatgcttgacgttgttcgtcatcagggaagtgcaaatcaaaaatcaaacccattaggatgtctggaatcaaaaagttattaaacattggtaaagatgggaaaaaactggaacctttatacattgctggtgtgaaagtaaaatggtacaacagcttcaaaaagcactctgtcagttcctcaaatgattaaacatagagttaaccatatgacccagcaatttaattcctaagtatatgctccaaagaaatgaaacatatgtccaaacaaaaacttgtatatacatttttatagcagcattttttgcaatagctgacaggtagaaacaacactaacatccatcaacagatgaatggttgaacgtatacaatggaatatttgttttaaaagaagtactgttaccttctatcagtcagttcagttcagttcagtcgctcagtcgtgtccgactctgcgaccccatg

SEQ ID NO: 5573 - DNA, 424 bp, Bos taurus
  Clone ID: 24-LIB3058-020-Q1-K1-F11
tccggttatttaagcgtcctcccgaggctgcgctttctgttgcaggtgtccgcgtgtgcccctccagcgcagcgcccgtgccggcagctggtgaactacatgtcgccccctcaggacccggaagacgaacagggcggcggcgatccacccggggacctgcgcagcgtcctggtcaccagcgtgctcaacctcgagccgctggacgaggatctcttcagaggaacgcattactgggtaccctcaactgagcggctgtttgggggtcagatcgtgggccaggccctggtggctgcagctaagtctgtgagtgaagatgtccatgtgcattctctgcactgctacttcgtacggacaggggacccgaaggtgccggtgctgtaccaggtggagcggacgctgacaggggcatgcttctctgtgcgct

SEQ ID NO: 5574 - DNA, 328 bp, Bos taurus
  Clone ID: 24-LIB3058-020-Q1-K1-F7
cttccagctgacccactcgctggggggcggcacggggtctgggatggggacccttctcattagtaagatccgcgaggagtaccccgaccgcatcatgaacaccttcagcgtcatgccctcgcccaaggtgtccgacacggtggtggagccctacaacgccaccctgtccgtgcaccagctggtggagaacacggatgagacctactcgattgacaacgaggcgctgtatgacatctgcttccgcaccctgaaactgaccacccccacctacggggacctcaaccacctggtgtcggccaccatgagcggggtcaccacctgcctgcgg

SEQ ID NO: 5575 - DNA, 470 bp, Bos taurus
  unsure (451): unsure at all n locations; Clone ID: 24-LIB3058-021-Q1-K1-F7
gaaagtatttgtttactttcaaaagaaagtttttttttttttttaacaatcctcatatcaagacagaatagaccttaaactaaagaacaatataagagataaggaaggacactacatattgaccaagggatcaatccaagaggaagacataacaattgtaaatatctatgcacccaacataggagcatctcaatacgtaagacaaacactaacaaacataaaaggaaaaattgacaataacacaataatagtagactttgacaccccactcacaccaatggacagatcatcaaaacaaaattaataaggaaacacaagtcttaaatgatacattagatgaaatggatttcattgatatcttcaggacattcgatccaaatgcaaaagaataccccttcttctgatgtgcacatggaacattctccagaatcaaccacatcttgggtcacanatcataccttagtaaaatt

SEQ ID NO: 5576 - DNA, 449 bp, Bos taurus
  Clone ID: 24-LIB3058-022-Q1-K1-F11
agagggcatccccccagaccagcagaggctgatctttgccgggaaacagctggaagatggccgcaccctgtctgactacaacatccagaaagagtccactctgcacctggtcctccgcctcagaggtgggatgcagatcttcgtgaagaccttgaccggctagaccatcaccctggaggtggagcccagtgacaccatcgagaacgtctaggccaagatccaagacatagagggcatccccccataccagcagaggctgatctttgccgggatacagctggaagatggacgcaccctgtctgactacaacatccagaacgagtccactctgcacctggtcctccgcctaagaggtggtatgcatatcttcgtgaagacctcgaccgtcaagaccatcaccctggaagtggagcccagtgacaccatccagaacgtcaaggcctagatcc

SEQ ID NO: 5577 - DNA, 422 bp, Bos taurus
  unsure (402): unsure at all n locations; Clone ID: 24-LIB3058-022-Q1-K1-F7
ggatgctccacacttttttcagaaagtagacagtagaaaatgcacaagtcctgatgtgagattaaacatctgctttaaaaaaaagattcaaatgaaactccttccgatttaaaagataagcccctactaaagcgagggagttgacttttttaagttccttgaatatcagaaattgacatttgagttcactgtattcagctttaagttgttcgcaccgaaacacacattttgaaacaagcaggttcgagttgccaagtacacatcatttcttgcattaaagcacgactaatgcgttctcttgcaacactgccagacatgggacactgtcaccgtagaatcagctggtactacatctgtcacaagtcagtaaccgaacctgctgcaagactgagattcatcctncagtaagccacatgcaccct

SEQ ID NO: 5578 - DNA, 412 bp, Bos taurus
  Clone ID: 24-LIB3058-024-Q1-K1-F11
ccggtccccagcccccctccccgccctcccctgccgagctgccagccaacgtgaagcaggcctataggacgttcgcggctgtgcctggcctgcacccgcccctggacacccctgcccagcaccccatgctcgggcccacggcctcgccggagcagctgtccttccgcgagcggcagaagtacttcgagctggaggttcgggtgccccaggccgagggcccccctaagcgcgtgtcgctggtgggcgctgacgacctgcggaagatgcaggaggaggaggcccgcaagctgcagcagaagagggcgcagatgctgcgcgaggcggcggccaacacggtgctcccggaagccgatgctcccgaggacgaggagcccgaggaggaaccaccctgggccggccagggccccatggc

SEQ ID NO: 5579 - DNA, 406 bp, Bos taurus
  Clone ID: 24-LIB3058-024-Q1-K1-F7
cggacgcgtggggtggagggcgactacaccttcatttatgcttgtggttcacacattgacgtttacataagagattacttactccgctcagtagaattagatttagattttcaaccattacttcacatacaatcctaagagctaatgtggacttttgcagttccatgaaatgtctttaaaggatgaattagcatggtctcaaaatacatgaccgtggctactaatctgtattttgaatcatgggcaaaatgctgcgaaacccaattggcatttaaattaaatgctgaccttaagtctatagttgttaaatgtggctaattctgtaatataatcttggttgaattcaattatgaatgcataatctgattctaggcagactctcatacttgaatacttttccaaaatc

SEQ ID NO: 5580 - DNA, 427 bp, Bos taurus
  Clone ID: 24-LIB3058-025-Q1-K1-F7
agaagatcgtcattggcatggatgttgccgcctcggagttttaccgcgatggcaaatatgacttggatttcaagtctcctgctgatccttcccgatacatcaccggggaccagctgggggccctctaccaggactttgtcagggactatcctgtggtctccattgaggacccctttgaccaggacgattgggcggcctggtccaagttcacagccaatgtggggatccagattgtgggtgatgacctgacagtgaccaaccccaagcgaattgagcgggcggtggaggagaaggcctgcaactgtctgctgctgaaggtcaaccagatcggttcagtcaccgaagccatccaagcgtgcaggctggcccaggagaacggctggggggtcatggtgagtcaccgctccggagagactgaggacacgtt

SEQ ID NO: 5581 - DNA, 413 bp, Bos taurus
  Clone ID: 24-LIB3058-027-Q1-K1-F7
cgcacctagaaaattggtctctctctctttttttaaaaaatagctatttgctaaatggtgtttcttacatagaatgtcttaattttcaccgagcagaggtggaaaagtacttttgctttcagggaaaaatgatatgacattaatttattaatgaattggtaatatacaaaacaatcgttttttgtgttttttttttggtaatttaagtggcatttctatgcaggcagcacaccagactagttaatctcttgcttgaacttaactagttaccagatcctctgaaaagagaaatatttacaaaatgtgactaatttgggggaagtgaagttttggtttatttgtatttcagctctgctgtcagatgattggtctttaaccacctaactgcccgtatgaaagagcccattgatgag

SEQ ID NO: 5582 - DNA, 274 bp, Bos taurus
  Clone ID: 24-LIB3058-028-Q1-K1-F7
cgcgagcggccgccctttttttttttttttttttttttttttttttttttttgttttgtttttttttttgggactgaggggctccatgcccgtgagaattgccatttattcccgaagttgccaaaatcattaccgaggattcaccgaggggtgcctgaggggaggcggcggctcaaacactgattgagggccaaaggctgggggaggggaactggcgggagccccccgttgccccttccccttttaatgccctgggaagggtcctccttcggcc

SEQ ID NO: 5583 - DNA, 377 bp, Bos taurus
  Clone ID: 24-LIB3058-032-Q1-K1-F11
tgggtattagtgatggtaaactttgtgttgttctttatgaaatgatacatataactggtgggtgcatcagtgcttttaaagggggctgcataatataatagggttaactatgtatattcatgttaagaattaacttgtggtttgtctgtttcctggattttatacatatttacttgcataattgtgtttttttgtatggttagttatcttatattattttctatttttaaatttttttcttgttttttattttatattttttattttttttatatttttttttatatttttttattatttttttttatttatatttttattatattttttatatttttttttttatttttttatttttttattatttatttttatat

SEQ ID NO: 5584 - DNA, 169 bp, Bos taurus
  Clone ID: 24-LIB3058-032-Q1-K1-F7
gggcattctaggctacactgaggaccatgttgtctcctgcgacttcaacagcgacactgactcttctaccttcgatgctggggctggcattgccctcaacgaccactttgtcaagctcatttcctggtacgacaatgaatttggctacagcaacagggtggtggacctt

SEQ ID NO: 5585 - DNA, 428 bp, Bos taurus
  Clone ID: 24-LIB3058-034-Q1-K1-F7
ctgagaagcatttgcatctaacgtagattcttgactgtagacttaaccacgacacatgtagaatgattaaacggatgccctccaccatatcacacatttgaagaacccacctatgttaacctaaaataagaaaggaaggaatcgaaccccctactattggtttcaagccaacatcataacctatatgtctctctcaatatacaaaaacaaaaaaaaaaagaaaaaaaacataaaaaaacaaaaaaaaaagggcggccgttcgcgatctagaaggcccccactgattgtggggcaaaaactcagaatggtgtttacagtgctgcaaattacaccaatgggagctttggaagtaattttgtgtctgctggtatacagaccagttttaagactggtaatccaacagggacttaccagaacgggtatgatag

SEQ ID NO: 5586 - DNA, 439 bp, Bos taurus
  Clone ID: 24-LIB3058-036-Q1-K1-F7
ggggaacccagaaaaagaaattttagatggcctctaagactgcagagaatgctaccagtggggaaactttagaagagaatgaagctggggactgaggtgggtcccatccccccagcttgtcactcctgcctcatccccttcccaccacaccccaggctctgtgaagtgcagttcgacttctcaacccaggaccgcgagcagagcggggtctccctgtcctcctcccagtcccccatcccagcccccttccaacaacaaccagctccaactgactctggtcttgggaggccaggcttcccagccaccgaagactactttaaataggaaagagaaattgaataataaaatcaggagtcaaaatccatcgttttcaagcccctctttctagcctttttctactaatctgcttggtcaaggtttatggccctacaacagaacg

SEQ ID NO: 5587 - DNA, 422 bp, Bos taurus
  Clone ID: 24-LIB3058-038-Q1-K1-F7
ggctgctgcaatatgtggacgatctgcttctggccgctgagaacaaggatgattgctgggaaggaaccaaggcctcgctgagactgctgatggaggctggttaccgggtctcgaaaaagaaggctcggatctgcaaggaggaggttggccaatcgcaagccagaagatgaaggttctgtgggttgccgtggtggtcgcgcttctggcaggatgccaggcggatatggagggagagctggggcccgaggagcccctgactacgcagcagccccgggggaaggacagccagccttgggagcaggcgctgggccgcttctgggattacctgcgctgggtgcagaccctgtctgaccaggtgcaggaggagctgctcaacacccaggtcattcaggaactgacggcgctgatggaggagaccatga

SEQ ID NO: 5588 - DNA, 442 bp, Bos taurus
  unsure (393): unsure at all n locations; Clone ID: 24-LIB3058-040-Q1-K1-F7
aacgattttgtagaaaggtgattgtttttcactttaatccacattaaaaagtggtagggggagcaggaatctgacaagatattttaaaatgaagttgcatttctcttttcaaaatgcagacataattcgaacatcatgtaatttacccctgtaaagtgtacaattcaatgttttttggtgttttcacaaagttgtgcaaccatcaccattctttgactccagaacattttcattatctcccaaagaaattctgtacccattagcaatcactcttcctgattcccatcaacctctcacaaccactgatctattttgttgctacagatttgcctatcctgggcattccatataaatagaatcatacaatatgtgctcttttgtgtctggcttctntaacttagcataatgtttttaagtttcatgttgtaccaaatgtcatgtt

SEQ ID NO: 5589 - DNA, 426 bp, Bos taurus
  Clone ID: 24-LIB3058-042-Q1-K1-F7
gtttcgagtcgctgaagaacactcactttccattgtctttattgatgaaattgatgctattgggacgaaaaggtacgactccaactcaggcggggagagggagattcagcgaacgatgctggagctgctgaaccagctggacggctttgactcaaggggagacgtgaaagtcatcatggccacaaaccggatagagacgctggacccggccctcatcagaccaggccgcatcgacaggaagatcgagttccccctgcccgacgaaaagaccaagaagcgcatcttccagatccacacgagcaggatgacgctggccgacgacgtgaccctggacgacttgatcatggctaaagatgacctctctggtgccgacatcaaggcaatctgtacagaagctggtctgatggccttgagagagcgcagaat

SEQ ID NO: 5590 - DNA, 413 bp, Bos taurus
  unsure (385),(390): unsure at all n locations; Clone ID: 24-LIB3058-043-Q1-K1-F7
gccatatcaagcctagccgtatactccattctctgatcaggctgagcttccaactcaaaatacgcactaatcggagccctacgagcagtagcacaaacaatctcatacgaagtaacgctagcaattatcctgttatcagtactcctaataagtgggtcctttaccctctccacattaattactacacaagaacaaatatggttaatcctcccagcatggcctctagcaataatatgatttatctcaacactagcagaaacaaaccgagctccatttgatttaactgaaggagaatcagagctagtctcgggcttcaacgtagaatatgcagcaggaccatttgccctcttcttcatagcagagtacgcaaatattatcataatanatatncttacagcaatttaattctagga

SEQ ID NO: 5591 - DNA, 430 bp, Bos taurus
  Clone ID: 24-LIB3058-044-Q1-K1-F11
ggctgagcaagttggctgctgacccagattccaatgtgaaaagcggatctgagctcctagaccgcctcttaaaggacatcgtgacagagagcaacaagtttgacctggtgggcttcatccccttgttgcgggagaggatttactccaacaaccagtacgcccggcagttcatcatctcctggatcctggtgctggagtccgtgcccgacattaaccttctggactacctggcagagatcctggacgggcttttccaaattctaagcgacaatggcaaagagatcccgaaaatgtgtgaagtggtccttggggagttcctgaaggaaaccaagaagagcccctcgagtggtaagtttgctggaaatggccaccatcctgtggatccattgccggaccacggacgacctgttccagttgacagccatgtgct

SEQ ID NO: 5592 - DNA, 397 bp, Bos taurus
  Clone ID: 24-LIB3058-044-Q1-K1-F7
ctgttccgcaagggcaaggttctggcttagcaaggcgagtatagtgaggccatccccggcttgagagcagccctgaagctggaaccttccaacaagacgatccacgcagagctctcgaagctggcgaagaagcatgcggcccagaggagcacggagaccgccctgtaccggaagatgctgggcaaccccagccggctgcctgccaagtgtcctggcaagggtgcctggtccatcccatggaagtggctgtttggggcaactgctgtcgccttgtagggcgtggctctctatgtggtcattgctgccgggaactgaccgtccgagtggccaccattccctccactcaccgtggacccccaccctgtgctccctaacacccccaggctccctgtccact

SEQ ID NO: 5593 - DNA, 409 bp, Bos taurus
  Clone ID: 24-LIB3058-046-Q1-K1-F11
ggacttgtgggtcgtttggttgctgctttggcctccggggccttgcggggactcagcccttcagcgccgctaccgcaagcccagcttttactgcgggccgctcctgcagcgctccagcctgccagagactatgccgctcaagcatctccatcgccaaaggccggcgccaccactgggcgcatcgtggcggtcattggtgcagtggtggacgtccagtttgatgagggactgcctcccatcctaaatgccctggaggtgcaaggcagggagaccaggctggttttggaggtggcccagcatttgggtgagagcacagtaaggaccattgctatggatggtacagaaggcttggttagaggtcagaatgtcctggattctggtgcaccaatcagaattcctgttggccctg

SEQ ID NO: 5594 - DNA, 337 bp, Bos taurus
  Clone ID: 24-LIB3058-047-Q1-K1-F7
atcgcgagcggccgccctttttttttttgttttcttttttctttaaacctaaggaagcgggatctgagaagacagcacagcggtatcggcctccccgggcctgagggccacgtgtgcgtcccctcggagggcatggcaggagggatggggcaggggggaaggcctgttggcggcagcaggaccaccgtcacacggcggtgcgtgtgggcgtgctgggctggtttacccgcagggttttacacaaccagccagcaaaatccactttttccacctcgaaccgttggatgaaggtggggtcaatgaccttcttaaggtctgctcgctcagctgggttcta

SEQ ID NO: 5595 - DNA, 412 bp, Bos taurus
  unsure (357): unsure at all n locations; Clone ID: 24-LIB3058-048-Q1-K1-F7
caaatggcccagggtctcactatctgtttatatattatcaaattaaaatgtgtttcttgttctgtttcccctctaagcttgagggtgttgaaagaagagcagtctgtgaacacatctgtgaggaatcaggtcagacaaccatcttccctgggtctggttgcgatgtgagaactgaaattgctgcttgtcccctctggtgctgccctctggtggccgcagctaacagagcaggatttcagggtctgaaacaggagtgtgggccgcgcagaggggactgtaaaaggatacgcggtgtgataagataacgataattctgtatctagcagggacactgaaaaatgggtatgtctacattgntaaatgagcaaaacaaatgctaaatggatagcgttaattttgagctttatgtttt

SEQ ID NO: 5596 - DNA, 230 bp, Bos taurus
  Clone ID: 24-LIB3058-049-Q1-K1-F11
cggctcgacccactcgtccggcgagacgtatacgcttgtaacgacatagccggaccaccggcctcgtactagggggagccaagccagggctgtggcaacaaacgagaacgggaggccgcttcagaaagatgaagcggtcggaggcatagacagggaagcaaagtaggatgtcatgagccgactgactcatgtgccggacgagcagcatgcactgcatgatcagcaagtga

SEQ ID NO: 5597 - DNA, 436 bp, Bos taurus
  Clone ID: 24-LIB3058-050-Q1-K1-F11
aaaggaaataaatgttttccatttttcgtcttgatttattttctgtatgagagcagctgtgtttttgataggtttatggtttgcatgaattaatatttaaagtggtctaggccaacgcatggctattgctgtaaatcttgatgtttatttctgccttataaaattctctcatggcctacctgagacttaatattcaatggacaaattaactggtcctccacacaactttttttttaataagtaaattattttacaaacaaatttgaactaatttaattgaaacttttgtttagcttgcctctaagaactttgcttaataaagctcacaaaatttctcagcaaataaatctcccttaagtaggggggaaaaaagctagatttcatacttgcttactttgaattaacagcaactttctacaggtaaatctgctcttgc

SEQ ID NO: 5598 - DNA, 417 bp, Bos taurus
  Clone ID: 24-LIB3058-053-Q1-K1-F7
gtgaccggcgcgagatctgagttagagttcaagtcggggtctgatcgcaccggcgagggagccatggcgtcgtccgggccgctggtgcctccgctgctgctgctgctcgtgctgctggcgggcgcggcgcgggccggcctccacttccgcccgggccgcggctgctaccggcctcttcggggagaccggctcacccaactggggcgcaggacgtacccccggcctcatgagtacctgtccccgtcggatctccccaagagctgggactggcgcaatgtgaatggggtcaactacgccagtgtcaccagataccagcacattccccagtactgtggctcctgctgggcacatggcagcaccagtgccatggcggaccggatcaacatcaagaggaagggggcgtggtcggccacactg

SEQ ID NO: 5599 - DNA, 411 bp, Bos taurus
  Clone ID: 24-LIB3058-054-Q1-K1-F7
aaggaattcagagcccttatttttagttctaagacgagctactttggacctagtttgaagacagaaagaagaagaacaacattaagatagtatgctcgcagagtattcatcatggataactgcgaggagctaatccctagaatacctgaatttcattagaggtgtggtggattctgaggatcttcctgggaacattttctcgtgagatgttgcatcaaagcaaaattttgaaagttatcaggaagaatttggtcaaaaagtgcttggaactcttgactgaactgtcagaagataaggagatctacaagaagttttatgagcagttctctaaaattattaagcttggaatacatgaagattctcaaaatcggaagaagccttcagagctgttgaggtactaatactttgctt

SEQ ID NO: 5600 - DNA, 441 bp, Bos taurus
  unsure (427): unsure at all n locations; Clone ID: 24-LIB3058-057-Q1-K1-F7
gccgcaccacatctggcccactctgaccgacgaggagtggatcaaggtggaggtgcagctcaaggaccttatcttggctgactacggcaagaaaaacaatgtgaatgtggcatcgctgacacagtcagaaattcgggacatcatcctggggatggagatctcagcaccatcacagcagcggcagcagattgctgagattgagaagcagaccaaggaacagtcgcagctgactgcaacccagactcgcactgtcaataagcatggtgacgaaataatcacctctaccaccagcaactacgagacccagactttctcctctaagactgaatggagggtcagggccatctctgccgccaacctgcacctaaggaccaatcacatctatgtttcatctgatgacatcaaggagactgggtacacctatatncttcccagaacgtg

SEQ ID NO: 5601 - DNA, 406 bp, Bos taurus
  unsure (293): unsure at all n locations; Clone ID: 24-LIB3058-058-Q1-K1-F11
ggaaaactaatagagctacagttcacaaatcaaaacaagagggccgtcaacaagatttattgatagcagccttgggaatgaaactgggttctcaaaagtcgtctgtgacaatctggcaacctctgaaactctttgcttattcgcagttgacatcacttgttagaagagcaactctgaaagaaaacgaacaaattccaaaatatgaaaaggtccacaatttcaaggtccacacattcagagggccacactggtgtgaatactgtgccaacttcatgtgggggctcattgctcanggagtgaaatgtgcagattgtggtttgaatgttcataagcagtgttccaagatggtcccaaatgactgtaagccagacttgaaacatgtcaagaaggtgtccagctgtgacct

SEQ ID NO: 5602 - DNA, 425 bp, Bos taurus
  unsure (374): unsure at all n locations; Clone ID: 24-LIB34-001-Q1-E1-F7
cggacgcgtgggcatcgcaagcctccgcttagcaatttctgcagaaagcatccctaaaggcactcagcaagacaccaccaaactgaccgcatcaaagagaaatttcatcatctacagagggctcctcttcaggtgttcctgcaaagcttggtgtgaagacagctttccaggcttacgtgtcttgcatgatgttcctgctgcaaggtgcccagatgctgcagatgctggagaaatccttgaggaagagccttcctatgtccttaaaggtttatgggaccgtcatgcacatgaaccatggaaacccattcaatctaaaggccctggtggacaagtggcctgattttcagaccgtggttatccgccctcaagagcangacatgaaagatgaccttgatcactacactaatacttaccatgtctactct

SEQ ID NO: 5603 - DNA, 388 bp, Bos taurus
  Clone ID: 24-LIB34-004-Q1-E1-F11
ggaggccttggccatctatggtggaaattctccttttgccttgagaggccggtatgcagatgccaactttggtttggggtacttttccacgcccctgagccgtggggtggactgtccctatctggctacctacgtggactggcacttccttctggagtcccaagcccccaagacactacaagacgccttttgtgtgtttgaggagaacaatggcctgcccctaaggcgacaccactcagattttcattcccactattttgggggtgttgtggagacagtgctggtcttcaggtctgtgtccacgatgcttaattatgactatgtgtgggatatggtcttccaacccactggggccatagaagtcacattccatgccacaggctacatc

SEQ ID NO: 5604 - DNA, 389 bp, Bos taurus
  Clone ID: 24-LIB34-004-Q1-E1-F7
cagttgctcatgttgaccagttcactgctgacatgctgggatctgctgagttagctgaggaggtcagcttaaatggttctggcaaactgatcaagattacaggctgtgcaagccctggaaaaacagttacaattgttgttcgtggttctaacaaattggtgattgaagaagctgagcgctctatccatgatgctctctgtgttattcgctgtttagtgaagaagagagctcttattgcaggaggtggtgctccagaaatagagttggccctacggttaactgaatactcacgaacattgagtggtatggaatcctactgcattcgtgcttttgcagatgctatggaagtcattccatctacactagctgaaaacgctggcctgaatccc

SEQ ID NO: 5605 - DNA, 384 bp, Bos taurus
  unsure (366): unsure at all n locations; Clone ID: 24-LIB34-005-Q1-E1-F11
ggcaaagctgaggggcacggagaccagctcaagggcttctgggggggacgggctgcgggagaggtggacgaggtgacggtccgacgccgcccggaccaggacaaaagcttgagcagaggagaccagaggcaggggactggacctagaggggtggggagcatgcgcattccgtttggacaggaaggtgggttcacgggagcagctggacctgcaggaaaaaccagatgagagatagcgaaaagccactgttactgccgtttattgagcacctactgggtgcccacaatcgtcctaagatcggttggtcaatcgcaagccagaagatgaaggttctggtggttgccgtggtggtcgcgcttctggcangatgccaggcggatatgg

SEQ ID NO: 5606 - DNA, 333 bp, Bos taurus
  Clone ID: 24-LIB34-005-Q1-E1-F7
gcggcctgctcccgggacagtgcgccggctgagctggtgctgagcgacgggacgctccccgcgccggagctgtcggccgaacccgcgatcctgagctccacgccgggcgcgctggtgcagctgctgtgccgggcaccgcgcgccggcgtgcgcttcgccctggtgcgcaaggacgccggcgggcgccatgtgcagcgcgtcctgagcctcgcaggctccgaggcccaattcgagctgcgctgcgtctcgcacgtggactcgggcaactacatctgcgtctacgtggacacgtggcctcacgtcgcgggctccatgcctatcgcgaccctgcag

SEQ ID NO: 5607 - DNA, 375 bp, Bos taurus
  Clone ID: 24-LIB34-006-Q1-E1-F7
aacatcttaatacgaaatagacccatcctattggccgtagcattccttacgttagtggtacgaaaagttctaggctatactcatctcacgattggtcaatgtgtcaaatgtccatatggcctacttcaacccatcgccgatgctatcatacttttcattatttaaccactagcatccgctacatcttcagcctcaatatttatcctagcatctaacataactttaggcctagccataaccatgtgaattcccctaacaataccctatcctcttaacatcactatcctatgagtcctatttatactaaccatatcaagccaaagccgtgtactccattcactgatcaggctgaacttccatctcaaactaggcact

SEQ ID NO: 5608 - DNA, 375 bp, Bos taurus
  Clone ID: 24-LIB34-007-Q1-E1-F11
atgggaacttcttaatcacgcccaggaacattttggcacccgataaaccagacaatatccagcttttccaatcccctcatgggaaggacctgctgtttaaggactctgctgatgggtttttaaagattccttctaagatggattttgagctgtacttgggatatgaatatgtcactgctcttcagaatctaagagaaagtaaacccccggactcctcaaaggatgagtgcatggtgaagtggtgtgcaattggtcaccaggagaggacaaagtgtgatcggtggagtgggttcagcggcggggcaatagagtgtgaaacagcagagaacactgaagagtgcatcgccaagatcatgaaaggagaagctgatgcca

SEQ ID NO: 5609 - DNA, 397 bp, Bos taurus
  Clone ID: 24-LIB34-007-Q1-E1-F7
ggctcttgagtttttcaggacagattttttttcttagctgaggtataattatagggaggagaattaattaagccacagttttatgtgtgaaaagactgtttcctctccaggtctttttctgttgtcagaggtgggggtacggtccaaaccccattaggtcactccggcagcatgtgcttttagcttctctcttgactaggagtcacatatccctttgtcagctggccttcagctcctttgcttctgtgtataaaccttggatattactgcattttatatttaccagagctattcgagcaatagtatttgaaccactagcctttgaaataaaagtcagccccgttattaacagtgcagatactgagtccacttggatttcttgcagctttctttgcac

SEQ ID NO: 5610 - DNA, 424 bp, Bos taurus
  Clone ID: 24-LIB34-009-Q1-E1-F7
gagcttgtggagggagctgaggctgggagctggggcccgggactgaaacagcccctgtgagcagcgcagacacctgtgtacaggagcagttctctttccaggatgtggctcttagctctggtcctgacctcccttggttccttcacagcttgggggctggcaccctcaccgcctattgtggacaccgctcagggcagagtcctggggaaacatgtcagcttaaaaggatttgctcagcctgtggccgtcttcctgggagtcccttttgccaagcctcctcttggatccttgaggtttgctccgccgcagcctgcagaaccatggacctttgtgaagaatgacatctcttaccctcgcatgtgctcccaagacccagtgggggcacagttgctctcagatccctttacaacagaaaggagaacat

SEQ ID NO: 5611 - DNA, 399 bp, Bos taurus
  Clone ID: 24-LIB34-010-Q1-E1-F11
ccaacatgaagcttggtcatgtcatcctcttacttttgtgcttctacttaagtttttgtgaggataattttagaaaacgaggaaagtcaaaggcagtgaagaaatcagaggctcaccatgcccctgaagcaagtctgagcaaggagacagaagcttcatctgaagtgaagcccacttcaacacaagacacatctcaaaaagatttcgtggataaaaagtgcttaactgaaaaacacacacatctctcctgcaacaaagtcttctgccaaccgtggcagaaatgcatcgatgggacgtgtctttgtaaacttccttatcagtgcccgaagaatggtaccagggtgtgttcaactaatgggaaaagctactcaacttactgtcaacagaagagttttgaat

SEQ ID NO: 5612 - DNA, 434 bp, Bos taurus
  Clone ID: 24-LIB34-010-Q1-E2-F7
ccaaagcattcattctttttcctcttttccctacagtgaaatctcagcatttcatttctattgacttacttcccttactcttatgactcattactttttccttccagtaattcctggaccatgagcttagatactcttttagtcatctttgtttctccttagcagaattcctggcatgtggcaggtgcttaataaatgtgtgccgtcatttatcaaatattatggtggggaacataagccaatatctacataagaaatgggtgactccatgtaactgtgcttctgacagtattttctactagaagctgaatcttttgttgtttttaatatataactaaatgtatttttcctgagagataagagataaaggttgtcttataactgttgtacacacctaagataggatatatagatacttagacattttggttcac

SEQ ID NO: 5613 - DNA, 348 bp, Bos taurus
  unsure (323),(332): unsure at all n locations; Clone ID: 24-LIB34-011-Q1-E1-F7
aggacgcgtgggcaaggctgagtttgtagaagttaccaagctagtgacagatctcacaaaagtccacaaggaatgctgccatggtgacctacttgaatgcgcagatgacagggcagatcttgccaagtacatatgtgataatcaagatacaatctccagtaaactgaaggaatgctgtgataagcctttgttggaaaaatcccactgcattgctgaggtagaaaaagatgccatacctgaaaacctgcccccattaactgctgactttgctgaagataaggatgtttgcaaaaactatcaggaagcaaaagatgccttcctgngctcgtttntgtatgaatattcaag

SEQ ID NO: 5614 - DNA, 408 bp, Bos taurus
  unsure (390): unsure at all n locations; Clone ID: 24-LIB34-012-Q1-E1-F11
actcatcgtcatgacaggaaagtttctgtggtttgaagggatacccttcccaagtgtggattactcacctgaactcctgagagaggtacaggagagttttcttattaaagatgaagatgtcttactgctgactttccccaaatcaggaacgaactggttgattgaaactgtctgcctgatttactccaagggggatcccaagtgggtccaatctgagcccatttgggaccgctccccctgggtagagactaagcatgggtatgaattactaaaggagaaggaaggcccacgtctcatcagttctcacctccccatccaactcttccccaagtctttcttcaaatccaaggccaaggtgatctaccttgtccgaaatcccagagatgtgtntgtgtctggttatttttt

SEQ ID NO: 5615 - DNA, 381 bp, Bos taurus
  Clone ID: 24-LIB34-012-Q1-E1-F7
aactcgcctgagccagaaatttcccaaggctgagtttgtagaagttaccaagctagtgacagatctcacaaaagtccacaaggaatgctgccatggtgacctacttgaatgcgcagatgacagggcagatcttgccaagtacatatgtgataatcaagatacaatctccagtaaactgaaggaatgctgtgataagcctttgttggaaaaatcccactgcattgctgaggtagaaaaagatgccatacctgaaaacctgcccccattaactgctgactttgctgaagataaggatgtttgcaaaaactatcaggaagcaaaagatgccttcctgggctcgtttttgtatgaatattcaagaaggcatcctgaatatgctgt

SEQ ID NO: 5616 - DNA, 400 bp, Bos taurus
  Clone ID: 24-LIB34-014-Q1-E1-F11
acggcagcgacgactgcggctctggaggccgcactcccggtcctggcttcggccgcatcctcaacatggtgactcttgctgagctgctggtgctcctgaccgtgctcatgggcatagactcttgctacatcatcatcattgacgcgcatgcataagagtgcttcctcaatcgggtcacctctggcaacatgatgggcctcatctttgaggtggccgacggcggcttcctgcacatcgatgtggagattacaagacctgatcctgatggtatttagtcatgagaacgcgagtctagtgagaaatagtgatttgctgctcacattgatggaacatataggttatgtgttaacagcaggatgtctaacatgactccaagaattgtgagcttcatgattgacat

SEQ ID NO: 5617 - DNA, 401 bp, Bos taurus
  Clone ID: 24-LIB34-014-Q1-E1-F7
aacccactaataaaaattgtaaacaatgcattcatcgaccttccagccccatcaaacatttcatcatgatgaaatttcggttccctcctgggaatctgcctaatcctacaaatcctcacaggcctattcctaacaatacactacacatccgacacaacaacatcattctcctctgttacccatatctgccgacacgtgaactacagctgaatcatccgatacatacacgcaaacggcgcttcaatgttttttatctgcatatatctgcacgtacgacgaggcttatattacgggtcttacacttttctagaaacatgaaatattggagtaatccttctgctcacagtaatagccacagcatttagaagatacctcctaccatgatgacaaatatcattctg

SEQ ID NO: 5618 - DNA, 383 bp, Bos taurus
  Clone ID: 24-LIB34-016-Q1-E1-F11
atccgatttaagcgcaagtactccaacgaggatacgctctccgtggcgctgccgtacttttgggatcactttgataaggatggctggtccctgtggtactctgagtatcgcttccctgaagagctcacccagaccttcatgagttgcaacctcatcactggaatgttccagcgattggacaaactgaggaagaatgcctttgccagtgtcattctctttggaaccaacaatagcagctccatttctggggtctgggtctttcgaggccaggagcttgcttttccgctgagtccagattggcaggtggactacgagtcatacacatggcggaaactggatcccggcagcgaggagacccagacgttggttcgagaatacttctg

SEQ ID NO: 5619 - DNA, 411 bp, Bos taurus
  Clone ID: 24-LIB34-017-Q1-E1-F11
cggacgcgtgggtggggcctctccagctcaccatggctcgggcattgagagtgccagttgcactgtggctgttgggcttgtgctggtctttggctaaagcccaccctctggctagagctcctgagcttgggcacggagttgaaggtgggaatgtggccaagccggatccagaagtgacggaacgctgctcggatggctggggctttgatgctaccaccctggatgagcatgggaacatgctgtttttaaaaggggagtttgtgtggaagggtcatgcctgggcccggcagttgatctcagagaggtggaaggatgcccccagtcccgtggatgctgcattccgctatgatcgtaacagtgtccttctgatcaagggggacaaattctgggtatatcctcctgagaaggggg

SEQ ID NO: 5620 - DNA, 404 bp, Bos taurus
  Clone ID: 24-LIB34-017-Q1-E1-F7
tgaatacttcaacttgtatcaaaacaaataatgagtatccacaattctaaaggacaaacatgaacattaatattaatatctctgatccaataaataggatcagagatattaatattaatgttcatgtttattggatcaacaaacctactaggcctattaccccattcattcacaccaacaacacaactatcaataaacctaggcatagccatccccctgtgagcaggagccgtaattacaggattccgcaataaaactaaagcatcacttgcccatttcttaccacaaggaacacccactccactaatcgcaatactagtaattattgaaactatcagcctttttattcaacctatagccctcgccgtgcggttaacagctaacatcactgcaggacacctatt

SEQ ID NO: 5621 - DNA, 410 bp, Bos taurus
  Clone ID: 24-LIB34-018-Q1-E1-F7
agggaagctctcattgctgcgggaaaagagattatatggcatgggcgaacaaaagaagaaccagcacattactgtagcatttgtgaggtggaggtttttaatctgctttttgtcactaatgagagcaattctcgaaagacctacatagtacattgccaagattgtgcaagaaaaacaagtggaaacctggaaaattttgtggtgctagaacagtacaaaatggaggacctgatgcaagtctatgaccaatttacattagctcctccattaccatcctcctcatcttgatattgttccacggacattaaacgagaccttttctgctattcaggaagtaacccagttctgcaccactggtttttgtagctatctcgtaaggctgctggctgaaaactgtgtctatgcaacct

SEQ ID NO: 5622 - DNA, 376 bp, Bos taurus
  Clone ID: 24-LIB34-019-Q1-E1-F11
agcagagaagaagtaaaattccaaaggaagtcctctcaccatgtggctgtacctggcagtcctcttgggcctgtactacctcctgcgctggtaccgagagaggcaagtggtgagccacctccaggacaagtttgtcttcatcacgggctgtgactcgggctttgggaaccagctggccaggcagctggacctgcgaggcttgagggtcctggctgggtgtctgacggagcagggggccgagcagctgaggaaccagacatcagacaggctgcagacagtgattctggacgtcaccaagacagagagcatcgctgcgggcactgagtgggtgaaagagtgtgtttgggacaaaagggtctggggtctggtccacaat

SEQ ID NO: 5623 - DNA, 322 bp, Bos taurus
  Clone ID: 24-LIB34-019-Q1-E1-F7
tccgcttcctcctttcctcaggcatcaaagtagagaccacgggaacctagttcaccaggctcgaagctggaggccccgccatgacatccctaaggccccttctgatgctggccctgctggcgtgggttgttgtggctgaccaagagtcctgcatgggccgctgcaccgacggcttcaacgccaccaggaagtgtcagtgtgacgagctctgttcttactaccagagctgctgtgccgacttcatggctgagtgcaagccccaagtgactcgtggggatgtgttccatctgccagaagatgagtacgggttccatgactacag

SEQ ID NO: 5624 - DNA, 410 bp, Bos taurus
  Clone ID: 24-LIB34-020-Q1-E2-F7
tgaagatgcagcaagacttgcccacgaagatcctgactatggcctccgcgatcatttcaatgccattgccacaggcaactactcctcctggactttatacatctaggtcatgacatttagtgaggcagaaatttttccatttaatccatttgatcctaccaaggtttggcctcacggcgactaacctcctaatccagttggtaaattggtcttaaaccggaacccagttaagatactttgctgaggttgaacagttggcttttgacccccacaacatgccgcccggcatcgagcccagccctgacaacatgctccagggccgcctttatgcctatcctgacactcatcgccaccgcctgagacccaactatctccacattactgtgaactgtcactaccgtgctcgagtg

SEQ ID NO: 5625 - DNA, 403 bp, Bos taurus
  Clone ID: 24-LIB34-022-Q1-E1-F11
gataaagtggtccagcttgaagcaaactgtcaagagccttgtcaagatacagtgaaaatacatgatgtaactgggagagattgccaagatgttgccaataagggggccaaagagagtggactttactttatcagacctctgaaagctaagcagcagttcttagtctactgtgaaattgatgggtctggaaatggatggactgtgtttcagaagaggcttgatggcagtctggatttcaagaaaaactggattcagtataaagaagggtttggacatctgtctcctactggagacacagaattttggctgggaaatgacaagattcatttgataagcacacagtctaacaccccttatgtattaagaatacagttggacgactggaatggcagaacaagcactg

SEQ ID NO: 5626 - DNA, 433 bp, Bos taurus
  Clone ID: 24-LIB34-022-Q1-E1-F7
gacagtcattgtgctgagatccaaaaatgggatctacttgcagctcaggaagctctctgatccagggacttagaacaacacaaagttatcctctgatggctctggagtgagaagtctgaaaagggtttccctggacacaaccaagatgttgactcggccctcatccagggacctggtacaggatcctgctttttgccatttttgtatctagagctgcaatccttgcattccttggctcctgggccctcctccacattcaaatccagcagcatcttcaaatgtccctctgcttctgtcttcatataaccttctctttcatcaagactttgtgcttacctgggcaactcagatcagacaggcttattctgggtttctgggaactaggagaagaacacctggggagccatcactggacctgttaaaacccggtgtg

SEQ ID NO: 5627 - DNA, 336 bp, Bos taurus
  Clone ID: 24-LIB34-023-Q1-E1-F7
tcacagactcagcggatcttcgcgcttgggcgtctgctggctgatttcttctttctccagcaagaaagatggcatctgttgcagttgaaccacaactgagtgtggtgaccagggtggccaacctccccttggtgagctccacgtatgatctggtctcctcggcttacatcagtagaaaggatcagtatccttacttgaagtctctgtgtgagatggcagagaagggcatgaagaccatcacttctgtggctgtgaccagcgcgctgccaatcatccaaaagttagaaccacaaattgctgttgccaatacctatgcgtgtaaggggctacacagga

SEQ ID NO: 5628 - DNA, 296 bp, Bos taurus
  Clone ID: 24-LIB34-024-Q1-E1-F7
aacaaatatcaactgtcagtgagcaaatacaaaggaacagctggcaatgccctcatagaaggggcttctcaactggtgggagaaaaccggaccatgaccatccacaacagcatgttcttcagcacatacgacagagacaacgacggctggaaaactacagatcccagaaagcagtgttctaaagaagatggtggtggatggtggtataaccgatgccatgccaccaatcccaatggcaaatactacgggggtggaccgtacacctgggacatggcaaagcagggcacatacgatgg

SEQ ID NO: 5629 - DNA, 419 bp, Bos taurus
  Clone ID: 24-LIB34-025-Q1-E1-F7
ctcagacctgaaagttttacgtccgctgcgcccgcctgtgcccacagtggttcgaacaatgtctttggtcgcttcacagtctccgctccggaatcgggtgtttgtggtgggggttgggatgaccaagttcacaaagcctggagtcgagaacagagactaccctgacttggcaaaggaagcaggccagaaggctttagcggatgcacagatcccttattctgcagtggagcaggcatgtattggctatgtgtatggtgactctaccagtgggcagagggctatctatcacagtttgggactgactggaattcctataatcaacgtcaacaataactgttctactggctcaactgctttgtttatggcccggcaactgattcagggtggtctggcagattgtgtcttggctcttgggtttg

SEQ ID NO: 5630 - DNA, 409 bp, Bos taurus
  Clone ID: 24-LIB34-026-Q1-E1-F7
ggcacgccggagcaaccactggctccgggcacacggggcctgggcagtggtgacaggagccaccagcggcattggcaaggcttacgcacatgagctcgcccggagaggtctgaacgtcgtcctcatcagtcgagacctgagcaagttgaagcacgaggcaaaggagatagaggggctttacggcaaaagaacacgagtgattcaggtggatttcaccgggggcttggaaatctacgagaccattgaggcaggactgaagggcctggaggtcggagtactggtaaacaacgtgggccaaaaatatacaccccgcttgagtaaactgctcgactgtgaggacacggccaaaaaactccaggatattataaactgcaacatggtgtctgtggcccagatgactagaatcctc

SEQ ID NO: 5631 - DNA, 402 bp, Bos taurus
  Clone ID: 24-LIB34-027-Q1-E1-F7
gacagatctcacaaaagtccacaatgaatgctgccatggtgacctacttgaatgcgcagatgacagggcagatcttgccaagtacatatgtgataatcaagatacaatctccagtaaactgaaggaatgctgtgataagcctttgttggaaaaatcccactgcattgctgaggtagaaaaagatgccatacctgaaaacctgcccccattaactgctgactttgctgaagataaggatgtttgcaaaaactatcacgaagcaaaagatgccttcctgggctcgtatttgtaagaatattcaagaacgcatcctgaatatgctgtctcagtgctattgagacttgccacagaatatgaaaccaaactgggggaatgctgtgccaaagatgatccacatgcatg

SEQ ID NO: 5632 - DNA, 381 bp, Bos taurus
  Clone ID: 24-LIB34-028-Q1-E1-F11
cacagatacccttgccccagaggtggagtctgtggcacctgagtgtccttctctgaaaaccaagctcctggtgtctgaccacagccgtgaagggtggctggacttccgatgactggctaaatcagcctccccagatcacatctgtattaagtcaaagaccctgaacccaatggccatcttcttcaccagtgggatcacgggcttccccaagatgggaaagcacatccacggattcgctttacgatcctatttcccagcaatgcaggaaattgtttgcagctggaagatgtctgatgtcttcctggtgcctgtcagacacaggctgggattctggctgccttggggtccctgccttgaacatggacagcggtgtctacagtc

SEQ ID NO: 5633 - DNA, 422 bp, Bos taurus
  Clone ID: 24-LIB34-028-Q1-E1-F7
catgaggtagaaaaagatgccatacctgaaaacctgcccccattaactgctgactttgctgaagataaggatgtttgcaaaaactatcaggaagcaaaagatgccttcctgggctcgtttttgtatgaatattcaagaaggcatcctgaatatgctgtctcagtgctattgagacttgccaaggaatatgaagccacactggaggaatgctgtgccaaagatgatccacatgcatgctattccacagtgtttgacaaacttaagcatcttgtggatgagcctcagaatttaatcaaacagaactgtgaccagttcgaaaaacttggagagtatggattcgaaaatgcgctcataattcgttacacaggaaagtaccccaagtgtcaaatccaactctcgtggaggtttcaagaagcctagga

SEQ ID NO: 5634 - DNA, 301 bp, Bos taurus
  Clone ID: 24-LIB34-029-Q1-E1-F7
ggcggcggctctggatccactgcccacatcccgctctcgcaggcagacatgagggcagagagaacttccttcctcctggccctggggctcctggtggctgggatccgcagtgtccactgcctcccagaaaatgtggtggtgaaggaccagcacagaagggtggatggccacacgttagcctccagcaacaccgacttcgccttcagcctctacaagcagttggctttggagaaccccaaataagaatgtcatcttatccccgctgagtgtccccaataccttggccttcctgtctccgggg

SEQ ID NO: 5635 - DNA, 408 bp, Bos taurus
  Clone ID: 24-LIB34-032-Q1-E1-F11
tcttacttttgtgcttctacgtaagtttttgtgaggataattttacaaaacgaagaaagtcaaaggcagtgaagaaatcataggctcaccatgcccctgaagcaagtctgagcaaggagacagaagcttcatctgaagtgaagcccacttcaacacaagacacatctcaaaaagatttcgtggataaaaagtgcttaactgagaaacacacacatctctcctgcaacaaagtcttctgccaaccgtggcataaatgcatcgatgggacgtgtctttgtaaacttccttatcagtgcccgaagaatggtagcagcgtgtgttcaactaatgggaaaatctactcaacttactgtcaccatcagagttttggatgttatcgtcccgaggcaaagtttttgaaaagtggag

SEQ ID NO: 5636 - DNA, 407 bp, Bos taurus
  Clone ID: 24-LIB34-032-Q1-E1-F7
ctcctcttgagtcagccctatccacggcagagatgttttccgtgagggacctctgcctggtcctgagtttggtgggtgcaattaagacagaagatggtagtgatcctcccagtggtgactttttaactgaaggaggaggggtgcgtggcccaagacttgtggaaagacagcaatctgcctgcaaagagacaggctggcccttctgctctgatgaagactggaatacaaaatgcccttctggctgcaggatgaaagggttgattgatgaagtcgatcaagattttacaagcagaatagataaactaagagattcactatttaattatcacaagaacagtaaggactctaatacattgaccaagaacatagtggaactaatgacaagggaatttgccaaagctaacaac

SEQ ID NO: 5637 - DNA, 422 bp, Bos taurus
  Clone ID: 24-LIB34-034-Q1-E1-F11
catctcctcactcgacatcggcgttacaggtaagaagaagcgggtgagaaaaacgtctgtatccaccgttttgcccatttctgcagatttgttccgaggccgaggcatctccaaggcagtgatggctctccagaggacccaggcctttcttctgctcttgctgctgaccctgctggggctaaggctggtacagccctcctatggccacgatcgcatgtaccaacgattcctgaggcaacatgtggaccctgatgagacaggacgcaatgacagctactgcaatttgatgatgcaaagacggaagatgacttcacatcagtgcaagcgcttcaacactttcattcatgaagatctttggaacatccgtagtatctgcagcaccacgaacattcagtgcaacaatggccagatgaactgccatg

SEQ ID NO: 5638 - DNA, 389 bp, Bos taurus
  Clone ID: 24-LIB34-034-Q1-E1-F7
gtgagccctaggcttgattttcttatttacagtagggggtttaactggaattgtcttagccaactcttccctcgatattgttcttcacgacacatactacgttgtcgcacatttccactatgttttatcaataggagctgtatttgctattacagggggatttgttcattgattcccactattctcaggttatactctcaacgatacatgagccaaaatccacttcgcaattagatttgtaagcgtcaatattcacttcttcccacaacactttctatgactatctggcatgcctcgacgatactccgactagccatatgcatacacaatatgagatacgatctcatcaatatgctcattcatttccctaacagcagttagactaatag

SEQ ID NO: 5639 - DNA, 430 bp, Bos taurus
  Clone ID: 24-LIB34-035-Q1-E1-F7
aatccaggctcggagccccgggcccgccgacaccatgagttggtcctcgcaccctccgagtgtaatcttctacattctttcattgctttcttcagcatgcctggcatatgttgctacccgagacaactgctgcatcttagatgaaagatttggtagttattgcccaactacctgtggaattgcagatttcctgaataattaccaaaccagtgtagacaaagatctacgaactttggaaggcatcttatatcaggttgagaacaaaacatcagaagccagagagctggtcaaagcaatccaaatcagctataaccctgatcaaccatcaaagccaaataacatagagagtgctaccaagaattccaagagtatgatggaagaaattatgaaatatgaaacactgatatcaacacatgaatcaacaattcga

SEQ ID NO: 5640 - DNA, 341 bp, Bos taurus
  Clone ID: 24-LIB34-036-Q1-E1-F7
actttaactcaatgaccctgctaataattggcctaacaacatatatactaacaatataccaatgatgacgatatgttatccgataaagcaccttccaagggcaccataccccaactgtccaaaaaggcctccgttatggaataattctttttattatctccgaagtactattctttaccggatttttctgagctttctaccactcaagcctcgcccccacccctgaactacgcggctgctgacccccaacaggcattcacccactaaaccccctagaagtcccactgctcaacacctcagtcctaatgtgttccggagtttctattacctgagcacatcat

SEQ ID NO: 5641 - DNA, 407 bp, Bos taurus
  Clone ID: 24-LIB34-037-Q1-E1-F11
gtactgacttcatctgccagacagagactcaggtgtgccagtattcaaaaatttggagaaagagctttaaaagcatggtcagtagctcgcctgagccagaaatttcccaaggctgagtttgtagaagttaccaagctagtgacagatctcacaaaagtccacaaggaatgctgccatggtgacctacttgaatgcgcagatgacagggcagatcttgccaagtacatatgtgataatcaagatacaatctccagtaaactgagaatgctgtgataagcctttgttggaaaaatcccactgcattgctgaggtagaaaaagatgccatacctgaaaacctgcccccattaactgctgactttgctgaagataaggatgtttgcaaaaactatcaggaagcaaaagatg

SEQ ID NO: 5642 - DNA, 421 bp, Bos taurus
  Clone ID: 24-LIB34-037-Q1-E1-F7
gaaccatggagggtgcagaagagaagaaaaagaaggttcctgctgtgccagaaacccttaagaaaaagcggaagaatttcgcagagcttaagatcaagcgactgagaaagaagtttgcccaaaagatgcttcgaaaggcaaggaggaagcttatctatgaaaaagctaagcattaccacaaggaatacaggcagatgtacagaactgaaattcgaatggctaggatggcacgaaaagccggtaacttctatgtacccgcggaacccaaattggcgtttgtcatcaggatcagaggtatcaatggtgtgagcccaaaggttcgaaaggtgctgcagctccttcgcctccggcagatcttcaacggcacctttgtgaagctcaacaaggcgtcaattaacatgctgagaattgtggagccata

SEQ ID NO: 5643 - DNA, 423 bp, Bos taurus
  Clone ID: 24-LIB34-038-Q1-E1-F7
cgccgccgcagttcgcagcatcagcaccagcgccagcgccgccgagtccagcatcagcgccacagccatgcgggagattgtgcacctgcaggccggccagtgcggcaaccagatcggagccaagttttgggaggtaatcagtgatgagcatggcattgatcccacgggcacataccacggggacagtgacctccagctggagagaatcaacgtatactacaatgaggccactggaggaaattacgtgcccagagctgtcctggtggaccttgagccaggcaccatggactctgtccgctctggccccttcggccagatctttcgtcctgacaattttgtgtgtggccagtctggagccggcaacaactgggccaaaggccactacacaagaggcgctgaactggtggacgccgtcctggatgt

SEQ ID NO: 5644 - DNA, 412 bp, Bos taurus
  Clone ID: 24-LIB34-039-Q1-E1-F7
ggcaaaggtggccaaggacctcaacccgagagttcagaagatgtcgctgggccagcagcagtcagcaagaggtgtgccttgtctgagatgcaaggggacgtgttcgggcttcgagccacattcatggaggaaaatatgcaagtcatgcaaatgcagccaagaggaccactgcttgagctctgacctggaagacgatcggaaaattggccgcttgctgatggactccaagtattccacactcacagcccgggtgaaaggcggggacggcatccggatttacaagaggaaccggatgatcatgaccaaccccattgccacagggaaagatcccacctttgacaccatcacctacgagtgggctccccctggagtcacccataaactgggcctgcagtacatggagctcatcccc

SEQ ID NO: 5645 - DNA, 417 bp, Bos taurus
  Clone ID: 24-LIB34-040-Q1-E1-F7
cagccaagggccaagtccgtctcttaaataactgggacgtgtgtgcagacatggtgggcaccttcacagacactgaggaccctgccaagttcaagatgaagtactggggcgtaacgtcctttctccagaaaggaaacgatgaccactggatcattgacacggactacgagacctttgccgtgcagtactcctgccgcctcctgaacctcgatggcacctgcgctgacagctactctttcgtgtttgcccgagaccccagcggcttttccccggaagtgcagaaaatcgtgcggcagaggcaggaggagctgtgcctggccaggcagtaccggctgatccctcagaacggttactgtgatggcaagtcagaaagaaacattttgtagcaacatggaacgtgtcctttcattaggaaac

SEQ ID NO: 5646 - DNA, 411 bp, Bos taurus
  unsure (372): unsure at all n locations; Clone ID: 24-LIB34-041-Q1-E1-F7
aggaggagcgcgcccctcgccatggctgcgcggtcgctcctcctgatccgcggggggtgcgtcgtcaacgacgactcctcgcaggaggccgacgtgctggtggaggacggcgtggtgcaggcagtggggcgccacgtgctgccgcccggggacgcgccagccgggctgcgggtcctcgacgccgccggcaagctggtcctgcccggcggcatcgacacgcacacacacatgcagttccccttcatgggctcgcgctccgtggacgacttccatctgggcaccaaggctgccctggcaggaggcaccaccatgatcatggattttgctattccacacaaaggccactccctcattgaggcctttgacacctgncgaagctgggctgactcccaagtctgctgcgattacagc

SEQ ID NO: 5647 - DNA, 194 bp, Bos taurus
  Clone ID: 24-LIB34-042-Q1-E1-F7
gttgcatgcgcttttctgcctctgcacctgccttgcactggtttatccttttgactggcaagacctgaagccagttgcctatagtgagtcaccagcatgggtcagtaggatacaagctctgatcgctgccgcacgcactggtcaatccaaaatccccacatgaaatggctgtgagtccgtcggttggacagacg

SEQ ID NO: 5648 - DNA, 355 bp, Bos taurus
  Clone ID: 24-LIB34-044-Q1-E1-F11
accatggggtgtgaaatgagaccatgacagccctttgggacgaatgtaaaccctgactcaatcagagctgcatcaaattctaagcgcgggtgtgcagaaccggatcgggacgggttggccaccacgcttgatgagttcctaaagcacagctcccccttctacatctggatcaacggtgaccgcatcgagtccctgatggagaaagaccgggagcaaagccacgtcgatggacgtcatggaggacagcttcacccgggcgtccagcatcattgacgagctcttccaagaaaggttcatcctccggacgcgccaggacactcaatgcgactcccccttcagctcgtacccgaggggg

SEQ ID NO: 5649 - DNA, 362 bp, Bos taurus
  Clone ID: 24-LIB34-044-Q1-E1-F7
cactcgccggccgacgcacgccaccaggccaaccgctctgactcactcttcgccagtccctggacatcacccacttggctcaagactaatggggctgtgaatgggaaggggacactcaagggtcacgcaagggatctctaccacaagacctgggccagatactttgtcaagttcctggatgcctacgcggagcataagttacagttctgggcagtgacagccgagaacgatcctactgcatggctccttaccgggtaccccttccaatgcctgggtttcactcctgaacatcagctagacttcatcgcccgtgacctggggtctcaaccgtcgccaagagcacacgaccgctacgtccgact

SEQ ID NO: 5650 - DNA, 380 bp, Bos taurus
  Clone ID: 24-LIB34-046-Q1-E1-F11
gtttgggagcgcaacgtccacggtgcccgggcgttcaccatgagtgtcccggcgttcatcgacatcagcgaggaagatcaggctgctgaacttcgcgcttatttgaagtcgaaaggagctgaaatttcagaagagaattcagaaggtggacttcatgtagatttagctcagattattgaagcctgcgatgtatgtctgaaggaagatgataaagatgttaaaagtgtgatgaacagcgtggtatccctcctgttgatcctggaaccagataagcaagaagctctgattgaaagcctatgtgagaaactggtcaaatttcgggaaggtgaaagtccgtctctgagactgcagttgctaagcaaccttttccatgggatgga

SEQ ID NO: 5651 - DNA, 371 bp, Bos taurus
  Clone ID: 24-LIB34-046-Q1-E1-F7
aaattcctgtggtgtctggcaaagaatgtgaggaaatcatcaggaatggaggtgaaacatctgaaatgtacctcattcagcctgaggattctagcaaaccatatagagtatagtgtgatatgaaaacggaaaaaggaggatggacagtaattcagaaccgtcaacatggtagtgttgactttggcaggaaatgggatccatataaacaaggatttggaaatattgcaaccaatgcagaagggaagaaatactgtggtgtaccaggtgagtattggctcggaaatgacagaattagccagcttaccaatatgggacccacaaagcttttgattgaaatggacgactggaaaggcgataaggtgacggcactc

SEQ ID NO: 5652 - DNA, 399 bp, Bos taurus
  Clone ID: 24-LIB34-047-Q1-E1-F7
cggacgcgtgggtttttttttttttttttttttttttcatctacacagtgtttttatttttattcaactataagcaaacagcaaaattaacacaatattcaccaactccagaacagttttcttttttaaaccaaagtgtgattaatttaacaagcacagactttcagattctgataacctcttacccaacccagccctgctgctcatctagatggccaggctttaacagcaaagcaatttcttctatggagctttttccagtattgctctttaaaggagccacagtgggacactgacacgcagtaaccagcctgagacgttggggggtccctggttgtcttggtgagacagagccgtgaaaacacatgccagtaggtaccttcacacacaattcggtgc

SEQ ID NO: 5653 - DNA, 327 bp, Bos taurus
  unsure (241): unsure at all n locations; Clone ID: 24-LIB34-048-Q1-E1-F7
gaaggatgatttcttgcaacttcgaaaaatttaaaaccatgaaacatctattactgctacttttctgtgcttttatagttcaggcccaatttcctactgactatgacgagggacaagatgacagacctaaggtaggtttgggtgcccgcggtcatcggccctatgacaagaagaaggaagaggcccccagcctgagacctgtgccccctcccatcagcggaggtggctatcgggctcgtcncgccacagcaactgtgggccagaagaaagtggagagaaagccccctgacgctgatggctgcctgcacgcggacccggatctgggtg

SEQ ID NO: 5654 - DNA, 419 bp, Bos taurus
  Clone ID: 24-LIB34-049-Q1-E1-F11
gaaaagcaggagtaacatttgttcctatgtagatttgatgttggtacatagtagaaaacctcaagagatgattgatatttggtctcggttgcagagtgctcatttaaaatgctgaattatgtgcaaactatattttacatagaaatgtatctcaaatagttcccatttgtgttttcttccattagaggtcatttctatgtaaaaccatcaaaattgcctttatagatcatgtccatttgacggcctctaaacccttcagttcagacgtaaagcgtctgcctgcaatgcgggagacctgggttcaatccctgggttgggaagatcccctggagaaggaaatgacaacccactccagtattcttgcctggagaatcccatggatggaggagcctgaggggctacagtccacggggttccaa

SEQ ID NO: 5655 - DNA, 403 bp, Bos taurus
  Clone ID: 24-LIB34-049-Q1-E1-F7
ttagtcgtatcaggaagaaaggtgtgaggtagcacctaatttttcggaattcatgtctgtccctactttggatcagacgtcctgatagataaaatttttcgtcagcgcagtagcttcttcagtttttgaaatatgaatccttcagtctgcctgactgtcctttgcatgggagtagcatcaactgctcccagacttgatccaaatttagatgcacattggtaccagtggaacgtagctcacaggacgttatatcgcatgaatgaagactactggatgagagcagtgtgggagaagaataagaatagaaatgacctgcataatcatgaatacacctaagggaaatatggcttccgcatggcaatgaatgcctttggtgacatgaccaattaaggaattacgcagg

SEQ ID NO: 5656 - DNA, 419 bp, Bos taurus
  Clone ID: 24-LIB34-050-Q1-E1-F7
aaagattgaaactatgagagaaaaagtactgacttcatctgccagacagagactcaggtgtgccagtattcaaaaatttggagaaagagctttaaaagcatggtcagtagctcgcctgagccagaaatttcccaaggctgagtttgtagaagttaccaagctagtgacagatctcacaaaagtccacaaggaatgctgccatggtgacctacttgaatgcgcagatgacagggcagatcttgccaagtacatatgtgataatcaagatacaatctccagtaaactgaaggaatgctgtgataagcctttgttggaaaaatcccactgcattgctgaggtagaaaaagatgccatacctgaaaacctgcccccattaactgctgactttgctgaagataaggatgtttgcaaaaactatc

SEQ ID NO: 5657 - DNA, 234 bp, Bos taurus
  Clone ID: 24-LIB34-052-Q1-E1-F7
ccacctgccacgtactggaccccacgccccttgcgaactgcagcgtgaggcagcagacgcagcacgcggtggaaggagactgcgatatccacgtgctgaaacaagatggccagttttccgtgctgtttacaaaatgtgattccagtccagattccgccgaggacgtgcgcaagttgtgcccagactgccccctgctggcgccactcaacgacagccgggtggtgcacgcagtgg

SEQ ID NO: 5658 - DNA, 350 bp, Bos taurus
  unsure (261): unsure at all n locations; Clone ID: 24-LIB34-055-Q1-E1-F7
caaaactttggcacaatgaagtgggtgacttttatttctcttctccttctcttcagctctgcttattccaggggtgtgtttcgtcgagatacacacaagagtgagattgctcatcggtttaaagatttgggagaagaacattttaaaggcctggtactgattgccttttctcagtatctccagcagtgtccatttgatgagcatgtaaaattagtgaacgaactaactgagtttgcaaaaacatgtgttgctgatgagtcncatgccggctgtgaaaagtcacttcacactctctttggagatgaattgtgtaaagttgcatcccttcgtgaaacctatggtgacatggc

SEQ ID NO: 5659 - DNA, 344 bp, Bos taurus
  Clone ID: 24-LIB34-056-Q1-E1-F11
agaaaatttacaaagtcatttttgcctaaactatcctgtggagttaaaaacaacatgcacattcgaaggaaacgagtcgtaggaggcaagccagcaaaaatgggagaattcccgtggcagatggcaatcaaggaaggagacaaaatccactgtgggggaatttacatcggtggctgttggattctgactgctgcccattgtgtcagaatcagcagaatgcatcgttaccaaatatggacatcatttacagactggttaagacctggctttcagacggttgttcactcggtgaatcgaattattatccatgaaaactacaatggaactacctaccaaaacgacat

SEQ ID NO: 5660 - DNA, 371 bp, Bos taurus
  Clone ID: 24-LIB34-056-Q1-E1-F7
ccaggctcggagccccgggcccgccgacaccatgagttggtcctcgcaccctccgagtgtaatcttctacattctttcattgctttcttcagcatgcctggcatatgttgctacccgagacaactgctgcatcttagatgaaagatttggtagttattgcccaactacctgtggaattgcagatttcctgaataattaccaaaccagtgtagacaaagatctacgaactttggaaggcatcttatatcaggttgagaacaaaacatcagaagccagagagctggtcaaagcaatccaaatcagctataaccctgatcaaccatcaaagccaaataacatagagagtgctaccaagaattccaagagtatga

SEQ ID NO: 5661 - DNA, 218 bp, Bos taurus
  Clone ID: 24-LIB34-057-Q1-E1-F7
cggaagcatggtttccactccgattatcagcatcaatcctaattacaaccatcctcgatccggcatgaagaagacaacctattccaaatcaacacctagtctgattcattaggcacccctagctcgatatattgcaccaacctccatttggaataaactcccatagcttcacctactagtcacgaaaataggcatgactccgtcagatggaaggcatt

SEQ ID NO: 5662 - DNA, 223 bp, Bos taurus
  Clone ID: 24-LIB34-058-Q1-E1-F11
cggacgcgtgggttgtcatcctcttctgctgttctggaaagaaacaggccagccctgtggaatacaaaaagactgatgctcctcagccagatgtgaaggaagatgaagaagaaaaggaagaggagaaggaaaagggagatgaagaggaggacggtgaagagaaacttgaagagaagcagaaaagtgatgttgaagaagatggtgacactgtcagtcaagagga

SEQ ID NO: 5663 - DNA, 221 bp, Bos taurus
  Clone ID: 24-LIB34-058-Q1-E1-F7
ggcagatcaggtagtctggtattcccatctcttgaagaattttccacagtttattgtgatccacacagtcaaaggctttggcatagtcaataaagcaaaaatagatgttttactggacctctcttgctttttccatgatccatcagatgttggcaatttgatctctggttcctctgccttttctaaaaccagcttgaacatcaggaagttcacggttcaca

SEQ ID NO: 5664 - DNA, 208 bp, Bos taurus
  Clone ID: 24-LIB34-059-Q1-E1-F11
atttcttgcaacttcgaaaaatttaaaaccatgaaacatctattactgctacttttctgtgcttttatagttcaggcccaatttcctactgactatgacgagggacaagatgacagacctaaggtaggtttgggtgcccgcggtcatcggccctatgacaagaagaaggaagaggcccccagcctgagacctgtgccccctcccatca

SEQ ID NO: 5665 - DNA, 219 bp, Bos taurus
  Clone ID: 24-LIB34-060-Q1-E1-F7
cggacgcgtgggggtcaccaaggcagtgcatgcatatttgggttaccagggaagtcacccctgtggctgtgggaaaccagcctgaggcttagctctcactgtgtcccagggtgtgcttgcatatttgggttaccttcatcttttctataagttgtaacaaaacatctacttaagttctttctttagtaccattccttcaaataaagtaatttggtaccc

SEQ ID NO: 5666 - DNA, 271 bp, Bos taurus
  Clone ID: 24-LIB34-061-Q1-E1-F7
actgtgggtgtcatcaaagcagtggacaacaaggcagctggagctggcaaggtcaccaagtctgcccataaagctcagaacgctaaatgtatatgacccccaatacttgccatcccagtcttaatcactggtggtacaacggtcgcataactgtttgtctcaattggtctgattgttatcattaatcagtgctgagtttaacaactactgccttgtactgtcacacaccggacgaatggtccatactgacattcaccttcatctcacctcg

SEQ ID NO: 5667 - DNA, 175 bp, Bos taurus
  Clone ID: 24-LIB34-062-Q1-E1-F7
aaacaaaatgtgactacttcgaaacacttggagagtatggattccaaaatgcgctcatagttcgttacaccaggaaagtaccccaagtgtcaactccaactctcgtggaggtttcaagaagcctaggaaaagtgggtactaggtgttgtacaaagccggaatcagaaagaatgcc

SEQ ID NO: 5668 - DNA, 381 bp, Bos taurus
  Clone ID: 24-LIB34-063-Q1-E1-F7
ccacgcgtccgcatttatttctcttctccttctcttcagctctgcttattccaggggtgtgtttcgtcgagatacacacaagagtgagattgctcatcggtttaaagatttgggagaagaacattttaaaggcctggtactgattgccttttctcagtatctccagcagtgtccatttgatgagcatgtaaaattagtgaacgaactaactgagtttgcaaaaacatgtgttgctgatgagtcccatgccggctgtgaaaagtcacttcacactctctttggagatgaattgtgtaaagttgcatcacttcgtgaaacctatggtgacatggctgactgctgtgagaaacaagagcctgaaagaaatgaatgcttcctgag

SEQ ID NO: 5669 - DNA, 214 bp, Bos taurus
  Clone ID: 24-LIB34-065-Q1-E1-F7
aggaatatcatttttgctggctgaaatggcaatgaaagttgaactagctagattgagttaccagagagcagcttgggaagttgattctggtcgccgaaatacctattatgcctctattgcaaaggcatatgctggagatatcgcaaatcagttagcttctgatgctgttcagatttttggaggcaatggatttaatactgaatatcctgtagaa

SEQ ID NO: 5670 - DNA, 250 bp, Bos taurus
  Clone ID: 24-LIB34-066-Q1-E1-F7
gcggcatgcggcattgaggttcagtatctggacacaatggaaaccaatggatggtagatcatgcttgagtcccagtccctgactgccctctaacagatcggtcaaatcctataatgctacatctgtattaaccaatttaactgcacttcaatcgtcaattgttcacattctcaatatgcttgtctcttcgttaaggctgtgtcgctaacattttagcagcagtgttggtagtagtacaaatggatttttt

SEQ ID NO: 5671 - DNA, 202 bp, Bos taurus
  Clone ID: 24-LIB34-067-Q1-E1-F11
atttgatcaccaagctgtatatgaatgtgataaagggtacatcctggttggagcaaaagaactctcctgcacatcttcaggctggtcacctgcggtccctcagtgtaaagcattgtgtctgagaccagagatagaatatggaaggttatctgtggagaaggttagatatgttgaacctgaaataattactatccagtgtgag

SEQ ID NO: 5672 - DNA, 235 bp, Bos taurus
  Clone ID: 24-LIB34-067-Q1-E1-F7
caagaacttccagatgtacaagctggatttagaaaaggcagaggaaccggagatcaagttgtcaacatttgttggatcacagagaaagcaagagaattccagaaaaacatctgcttcattgactatgctaaagcctttgactatgtggatcacaacaaactgtggaaaattcttaaatagatgggaatactggaccacctgacctgcctcctaagaaatctgtatgcaggtcaac

SEQ ID NO: 5673 - DNA, 240 bp, Bos taurus
  unsure (182): unsure at all n locations; Clone ID: 24-LIB34-069-Q1-E1-F11
acggcctgagccagaaatttcccaaggctgagtttgtagaagttaccaagctagtgacagatctcacaaaagtccacaaggaatgctgccatggtgacctacttgaatgcgcagatgacagggcagatcttgccaagtacatatgtgataatcaagatacaatctccagtaaactgaagganatgctgtgataagcctttgttggaaaaatcccactgggcattgctgaggggtagaaaa

SEQ ID NO: 5674 - DNA, 211 bp, Bos taurus
  Clone ID: 24-LIB34-069-Q1-E1-F7
cataaattgtataatttttgcctgacaatgctggccacgttctgatctgtttcattaaatttgtggtgatgttactctaaacattttgactatttgaatgtactgagatgtcagaaaacaaaacaaggaagaaaaatattgttaattaaaatatgctgctgccaaggagactgcaacttgaagctaggattttgtaacaagcagaatccaa

SEQ ID NO: 5675 - DNA, 227 bp, Bos taurus
  Clone ID: 24-LIB34-070-Q1-E1-F7
gttcagcggcggggcaatagagtgtgaaacagcagagaacactgaagagtgcatcgccaagatcatgaaaggagaagctgatgccatgagcttggacggaggctacctctacatagcaggcaaatgtggcctggtgcctgtcctggcagagaactacaaaactgagggtgaaagttgcaagaacacaccagaaaaagggtatcttgctgtagctgtggttaaaacat

SEQ ID NO: 5676 - DNA, 351 bp, Bos taurus
  unsure (283): unsure at all n locations; Clone ID: 24-LIB34-071-Q1-E1-F11
agccttccactatttcacctacggggtggcttgctcagaagtagaaattgactgtttgacaggggatcataagaacctccgtacagacattgtcatggatgttggctccagtctgaaccctgccatcgatattggacaggtggaaggggcgtttgtccagggcctgggcctcttcaccctggaggagctacactattcccctgaggggagcctgcacacccgcggccccagcacctacaagatccccgcgtttggcagcatccccacagagttcaaggtgtcnctgcttcgcgactgccccaacaagaaggccatctatgcctccaaggcggtcggggagcccgccctctt

SEQ ID NO: 5677 - DNA, 410 bp, Bos taurus
  Clone ID: 24-LIB34-072-Q1-E1-F7
acggacgcgtgggtgctgctgctaggtcacttcagtcgtgtccggctctgtgtgaccccgtggacggcagccaccaggctcccccatccctgggattctccaggcaggaacgctggagtgggttgccatttccttctccagtgcatgaaagtgaaaagtgaaagtaaagtcactcagtcgtgtccaactcttaggctcctccatccatgggaatttccaggcagagtactggagtggggtgccattgccttctccgattattcccctacgtggtgcctaaacttaaaaaatttttttctgaattaggatgcattgtagacacaatgtctgtgcatggcatttaattactttatctctaagtctctctctccatattgaagtgaaatttatataacaaaattagccacttt

SEQ ID NO: 5678 - DNA, 432 bp, Bos taurus
  Clone ID: 24-LIB34-074-Q1-E1-F7
aaaaatggttggttttgatatgagtaaagaagctgccagaaggtgctatgagaaatctggcctgagaccaagtgatattgacgtaatagaacttcacgattgcttttctgccaatgaacttattacttacgaagcactgggactgtgtccagaaggtcaaggtggaaaactggttgaaagaggagataatacttatggaggaaagtgggtcataaatcctagtggcggattaatttcaaaggggcacccacttggagctacaggtctggctcagtgcgttgaactctgctggcatctgagaggggaagccggaaaaaggcaagttcctggtgcaaaggttgctctgcagcataatataggcatcggaggagctgtcgttgttacgctgtacaagatgggctttcctgaagctgccagaactcatcaaattga

SEQ ID NO: 5679 - DNA, 392 bp, Bos taurus
  Clone ID: 24-LIB34-076-Q1-E1-F11
cgacccacaagtcaagatggtgttgttcaacttggcacgaaatgggatacagataaacagtgatttgggaagaatgcaagcattgcccaagggatgaaatactgtggtgtaccaggtgagtattggctcggtcatgatagtattatccagcttagcaagatgggacccacatagcttttgactgatatggaggactggtacggctataaggtgacaggactctatgactgatttactgtacacagtgatgccaacagatatcacctgtcaatgatcaaatagaatggatcatctggtcaatccctcatataaggggcttctcaactggtgggagaaaaccggtccatgatcatccacaacaacatgtgcttcagcacaattgacagagacaa

SEQ ID NO: 5680 - DNA, 459 bp, Bos taurus
  Clone ID: 24-LIB34-077-Q1-E1-F7
accctatagagagtcgtattaatagagacacgctgtctccattcttaaatcaacctaagccactctttatctaaaggaactgatttgcagctttcttttctagagacaaatattgataccaaactttatttcagtatacttaggtgtgccttaatattctttctttcacaattaaattgttgtcagtcaccttttaaaaattttacttagagaggcctccctaagtaactgttcttcatgagagccttcacttattaatgccttatttttggtgggccaaggttatctacgtgcttctttgcagctaacattgtatagtgctgattaatgatgatcaaggtagaaaaaattgctgctctgtcttctgaactctttctatatatcctttacagacactattgtcgtttttaagcagcatctgccatactcaggacactttcacataacaaggcagaatac

SEQ ID NO: 5681 - DNA, 438 bp, Bos taurus
  Clone ID: 24-LIB34-078-Q1-E1-F11
cggccggtaactgtagagaaggccagtatgtcagctctggtcctggagagccgagccttgggcaggaaactcagcgactttggacaggaaacgagctatattgaaggcaactctgatcaaaatgctgtatcgctgatcttctcactcaaagaagaagttggtgcactggccagagtattacgtttatttgaggagaatgatataaacctgacccacattgaatcaagaccttcacgtttaaggaaagacgagtatgaatttttcaccaatctggatcaacgcagcgtgcctgccctggcaaacatcatcaagatcttgagacatgacattggtgccactgtgcacgagctttcccgggataagaagaaagacacagtgccctggtttccaagaaccattcaagaactcgacaactttgccaaccaagttctcagctat

SEQ ID NO: 5682 - DNA, 463 bp, Bos taurus
  Clone ID: 24-LIB34-078-Q1-E1-F7
gccccacgcgtatgggtagaatggcagcagcacagctagcagagccgcggtccggacggcagcgcgtgccccaagctctccgtcttcccccgcccgccagcccgagcccagcccgcggccccagcagcagccccgagagcagccccaaaagcagcgccatggccgggtggaacgcctacatcgacaacctcatggcggacgggacctgtcaggacgcagccatcgtgggctataaggactcgccctccgtctgggccgccgtccccggcaagaccttcgtcaacatcacgcctgctgaggtcggtatcctggttggcaaagaccggtcaagttttttcgtgaacgggctaacacttgggggccagaaatgttctgtgatccgggactcactgctgcaggatggagaatttaccatggattctcgtgacaagagcaacggtggaagcccaaccttcagtatcac

SEQ ID NO: 5683 - DNA, 408 bp, Bos taurus
  unsure (371): unsure at all n locations; Clone ID: 24-LIB34-079-Q1-E1-F11
aggcgagcttggcgcgtcccgcttcggagcgtggtgcacggcggcaccatggggtccagcaacttggagctgatttttgacagcgtggggcacttcggcagataccaaatattcctctattttatatgtgccttccagaatatctcttgtggtatccactacttggcttctgtgttcttgtcagtgtccccccagcatacctgtaggcccccaggcaatgtgagtcaggttcttttccaagacctctctacttggcagttggaggacatctggacccagttctccgtaggccgtgaggatcgcattctcgtgcagctgcaggatggggagatctgggagcttaccagctgtcagaggttccggagggatgnacagtcgagcctggactatgagtacagcggccagaag

SEQ ID NO: 5684 - DNA, 435 bp, Bos taurus
  unsure (367): unsure at all n locations; Clone ID: 24-LIB34-079-Q1-E1-F7
acattctttggcattgcctttctttggaattggaagctgagaagtcccataatctgtccttcaagcaggagaaccaggacatctagtgatataacttattccaaatctaaacttctgaaaattaggggtggggagggcaatacatcctaatttgagtccaaaaacctgagagccaggagtcagatatctaatagaaggaaaaaaatgggtgtctcagttcaagagaagagagtaaaatgtgccctgactctgcttttttgttctattgggtggattggataatgctcacctgcactggttgggatcatgggttggatgatgctcgcttgcgttggtgagggaggtcttcttcactctacggattcanattttaatcacttccagagataccctcacagatatgtatgggaattaataatttaacaaccaaccggg

SEQ ID NO: 5685 - DNA, 420 bp, Bos taurus
  Clone ID: 24-LIB34-080-Q1-E1-F7
caatatcaattattactcccctgctgctgctgctgggtcacttcagtcgtgtccgactctgtgtgaccccatggacggcagccaccaggctcccccatccctgggattctccaggcaggaacgctggagtgggttgccatttccttctccagtgcatgaaagtgaaaagtgaaagtaaagtcactcagtcgtgtccaactcttaggctcctccgtccatgggaatttccaggcaaagtactggagtggggtgccattgccttctccgattattcccctacgtggtgcctaaacttaaaaaatttttttctgaattaggatgcattgtagacacaatgtctgtgcatggcatttaattactttatctctaagtctctctctccatattgaagtgaaatttatataacaaaattagccactt

SEQ ID NO: 5686 - DNA, 137 bp, Bos taurus
  Clone ID: 24-LIB34-082-Q1-E1-F7
aggacgcgtgggaaaaaaaataaaaaaaaaaaaaaaaaaaaaaaaaaaaaaaaaaaaaaaaaaaaaaaaaaaaaaaaaaaaaaggaggacgcacaaaaggataaaaaacttaagtaaacatgggggggccgtccaaa

SEQ ID NO: 5687 - DNA, 328 bp, Bos taurus
  Clone ID: 24-LIB34-083-Q1-E1-F11
aggaaaaagaaggggatttctgacctcgtgctgaaggagtacttagataatgtccagttgagtcatatccttgaacgtgaaggtggctgggacagtgttcaagactggatggatgtgctaagtggtggagagaagcaaagaatggcgatggcaagactattttatcacaagccccagtttgctattttggatgaatgtacaagtgcagttagtgtggatgtggaagactacatttacagtcattgtcgagaggttggcattaccctcttcactgtgtcacatagaaagtctctttggaaacaccatgagtactacctgcatatggatg

SEQ ID NO: 5688 - DNA, 406 bp, Bos taurus
  Clone ID: 24-LIB34-083-Q1-E1-F7
aatttttgtggaaaactcaagcattttaaaaatcctatgggtgatcaaaaattaatggaagatggaaccagcaggtttacctgcaaaggaaaaccaatttaccatttcatggggaccagtaccttcagtcagtacactgtggtctcagacgtcaaccttgccaaactagaggacgatgccaatttagagagagtttgtctgcttggatgtgcattttcaactggctatggagctgtcatcaacaatgccaaggtcacacctggttctacctgtgccatctttggcctaggaggtgtcggtctctctgctgtaatgggttgtaaagcatcaggagcttcccgaatcatagttgttgacatcaatagtgagaagtttacaaaggccaaagcccttggagccactgact

SEQ ID NO: 5689 - DNA, 420 bp, Bos taurus
  Clone ID: 24-LIB34-084-Q1-E1-F7
aacgatcgcgagcggccgcccttttttttttttttttttttttttttttttttttttctggacagtcaataggttttatttacattgctttgggaaaaggagacaaaagacatccctttaaaattgtcgtccagcaatctcagtttggaagggaatatatagcataaatttatatatataaggaaagaaatatctctatacacaaaaacgtataaataagcagacaaataaagtggctaggaagtatcttgaagttcaaatttataaaatgaccatcaaacccagaacttaaatcggaaaacctgtgtcttgtaaagatttctttccatcagaagatgcagaaacattttcccccctggagtaaacgcaaacgtttctgaggcacccccagtttcttccccgctttctcccccaggcgcc

SEQ ID NO: 5690 - DNA, 394 bp, Bos taurus
  unsure (372): unsure at all n locations; Clone ID: 24-LIB34-085-Q1-E1-F7
agaactaattgaaaaactggacatcaagttggacagtgaagataaggacaaggagggcaaaccgcttctgaaggctgtgatgcgccgctggctgcctgctggggatgccctgctgcagatgatcaccatccacctgccttcccctgtgacggcccacaagtaccgctgtgagctcctgtacgaggggcccccagacgatgaggcagccatgggcattaaaagctgtgatcccaaaggccctctcatgatgtacatttccaaaatggtgccgacctctgacaaaggtcggttctatgctttcggccgggtcttctcacggctggtgtctactggcctgaaggtccgcatcatgggacccaactatactcctgngaagaacgatgacctgttcctg

SEQ ID NO: 5691 - DNA, 318 bp, Bos taurus
  Clone ID: 24-LIB34-086-Q1-E1-F7
cccagctctggttgtccttcgttaccagatacaacgtggggttgttgttctggccaagagttacaacaagaagcggatcaaagagaacatacaggtgtttgactttgaactgactccagaagacatgaaagcaatcgatggcctcaacaaaaataaaagatattatgaatttcttgttggtgtcggtcaccctgagtatccattctctgaagaatattgatcaactcactgtggttcttcgataactctttacttctgtggggtggtgaatatttttatgcttgatgaagaaatttaaataaagtgtctgaacttctg

SEQ ID NO: 5692 - DNA, 344 bp, Bos taurus
  unsure (49): unsure at all n locations; Clone ID: 25-BOVMS1-002-Q1-E1-G1
atagcagcatggctgaccaactgactgaagagcagattgcagaattcanagaagctttttcactatttgacaaggatggtgatggaactataacaacaaaggaattgggaactgtaatgagatctcttgggcagaatcccacagaagcagagttacaggacatgattaatgaagtggatgctgatggtaatggcacaattgacttcccggaatttctgacaatgatggcaagaaaaatgaaagatacagacagtgaagaagaaattatagaagcattccgtgtgtttgataaagatggtaatggctatattagtgcagcagagcttcgccatgtgattacaaac

SEQ ID NO: 5693 - DNA, 444 bp, Bos taurus
  unsure (292): unsure at all n locations; Clone ID: 25-BOVMS1-003-Q1-E1-G1
gtccgctccaaagtcctctccaagtttggttaaacccaaatccaagagttcaaaggaggcctcaaaattaattgccaaaaaccggaatggaataattgccaaggaaaacctgcggaaaacttttgcagccatggggcgtcccaatgtaaagaatgaggagctagacgccatgatgaaggaagccagtgggcccatcaacttcactgtcttcctgaacatgtttggggagaagctcaaaggtgccgaccctgaggatgtgatcactggagccttcaaggtcttagaccctganggaaaaggcaccatcaagaaaaaattcctggaggagctgctgaccactcagtgtgaccgcttctcccaggaagagatcaagaacatgtgggctgccttcccccccgacgtgggcggcaacgtagactacaagaacatctgctacgtcatcac

SEQ ID NO: 5694 - DNA, 438 bp, Bos taurus
  unsure (73)...(74),(127),(136),(159): unsure at all n locations; Clone ID: 25-BOVMS1-003-Q1-E1-G9
ggtcgaccgaccgtccgctttagaacaacattaattattatttaactcttaactgaagaagtcacacacacannaaggaagacgggagcaatgtttaattctagtgggaagagactgtgcagcacangaacagcanacagccagggtaatttgcagcanaaagacctttcagacgggaacactaaccagactccagactggattccagcgagtgtgggatcagacttggtgacggagaaagtgctgtttccttgcctgccttatccgacatttccctgccctaaagcacccttctaatagtgtttgaaatgacatttcctgttcatagatgttggaaaagagaattttttttcctgttgtctagagttcatcagtaaacagtattcagctagcagacaagtgtagtatgcggtatgaatattttatattaaaataatg

SEQ ID NO: 5695 - DNA, 435 bp, Bos taurus
  Clone ID: 25-BOVMS1-004-Q1-E1-G1
gaaaaaacatactgaaatgcatggtttaaataacttcctcatcaaaaccttccttctgttttttgtgctttcaaataactaatccgaatttccaaaaaattaacatttgaatttagctgtaattctcaactgacctttttccctgtactaacgtttggtttccctgtgtggcgtgttttctgagcgttcctactttcaagcatggaacgtgcaggtgatttggaaagtgtaggcagatctgagaaaacgagcctgttacagaagaacgtcatcacagcgaatacttttggaagcttaacaaaactaacccagctgtccttttatctttttttttaattaataattcctttgttttaattaatagcagcatagtttatgggtttggagacttgcatgagaagtatttagcccccttatacgttcccacagttttga

SEQ ID NO: 5696 - DNA, 352 bp, Bos taurus
  Clone ID: 25-BOVMS1-005-Q1-E1-G9
gtcggcagcagggtcggtcaggcgtccgtctagatcgagagcggccgcccttttttttttttttttatgtgttgtcatgcagatataggctgactaggagagtgaatacatatgcttggattatagctactgcaaactctagaattgttagtatgattagaatggtgaatgtgattagagctgttgtagtgctaatgcttattaatgtaagtgtagctcctccgattaggtgaattaatacgtgtcctgcagtgacgttatctgttaaccgcactgctatggctataagttgcataataaggctgtaaatttcaataattactcatattgggatgattcacgtgggtgttcc

SEQ ID NO: 5697 - DNA, 363 bp, Bos taurus
  Clone ID: 25-BOVMS1-006-Q1-E1-G1
gtccacccactaataaaaattgtaaacaatgcattcatcgaccttccagccccatcaaacatttcatcatgatgaaatttcggttccctcctgggaatctgcctaatcctacaaatcctcacaggcctattcctagcaatacactacacatccgacacaacaacagcattctcctctgttacccatatctgccgagacgtgaactacggctgaatcatccgatacatacacgcaaacggagcttcaatgttttttatctgcttatatatgcacgtaggacgaggcttatattacgggtcttacacttttctagaaacatgaaatattggagtaatccttctgctcacagtaataaccacagca

SEQ ID NO: 5698 - DNA, 294 bp, Bos taurus
  Clone ID: 25-BOVMS1-007-Q1-E1-G9
cttcaaagatcgtgcatcacgaatacatggacgccttgatcaccatcatgacaatgagatctcacatgacgtcttagatattgcacgcctgcattacgatattgcacggcatctgcacgtcgatcactgacactataacagcactgaggatgacaaacaagtgcacaagttcccgacagaatgggtacgtaataacgctcacttcaatggcgccacaattctggctaaatcaatatcaacctgtgtgcatccatcacattacactaacttgtcattagagaagacatcagtgat

SEQ ID NO: 5699 - DNA, 215 bp, Bos taurus
  Clone ID: 25-BOVMS1-009-Q1-E1-G1
aaaaaaaaaaaaaaaaaaaaaaaaaagggggggccccccaaaggattcaagcttaattaaccctgcaagcgaattcaaaacccctccaaaagggcacctaaattcaattcaagggccgtcgttttaaaaagtcctgactgggaaaaccctggggttacccaatttaaaccccttgcaaaaaatccccctttcccaaactggggtaaaaaccaaaa

SEQ ID NO: 5700 - DNA, 459 bp, Bos taurus
  Clone ID: 25-BOVMS1-009-Q1-E1-G9
cgggtcgtaccacgcgtccgaccgaatgcttactatcaaccctgctaatcgcatcacggtctcagaggcactgaaacacccgtggatctgtcaacgttctactgttgcttccatgatgcacagacaggagactgtagactgcttgaagaaattcaatgcgagaagaaaactaaagggtgccatcttgaccactatgctggctacgaggaatttttcagcagccaagagtttgttgaagaaaccggatggagtaaagataaacaacacagccaacgtggtaaccatccccaaagaaaatattcctacaccggcgctggagccccagactactgtaatccacaaccctgatggaaacaaggagtcaactgagagctcaaatacaacaattgacgatgaagacgtgatagcacgaaagcaagagattatcatagtcactgaacaactgatcgaagctatcaa

SEQ ID NO: 5701 - DNA, 372 bp, Bos taurus
  Clone ID: 25-BOVMS1-013-Q1-E1-G1
ctaaatcgcgagcggacgccctttttttttttttttttagtataataggtcctaaaataatttttgggtttacggttaggaatagtaagggtaggatgtgtaatgatatgaatgcattttcccgtgtaaaggaaggcgagatattattaatgtggtaggtatattttcctcgttgggttataattagcatgtatagagaatatatggccgtgattactatatttactcctattagaataattgtaatgttagatcatgaaaaggttgacattactacaaatagttctccaattaagttgattgttgggggtagatctaagttgggtacacttgctattagtcatcaagtggctattactggcacgagcgttt

SEQ ID NO: 5702 - DNA, 463 bp, Bos taurus
  Clone ID: 25-BOVMS1-013-Q1-E1-G9
ctaatagccacctgatgactactagcaagtctaaccaacttagctctacccccaacaatcaacttaattggagaactatttgtagtaatgtcaaccttttcatgatctaacattacaattattctaataggagtaaatatagtaatcaccgccctatattctctatacatgctaattataacccaacgaggaaaatatacctaccacattaataatatctcgccttcctttacacgggaaaatgcactcatatcattacacatcctacccctactactcctaaccctaaacccaaaaattattctaggacctctatactaaaacaaaaaaaaaaaaagggcgggcgctcgcgacacagctgagctgtccaaggaagtccacttcaagtgactgacaaccaatgtcctgggagggagctggtgcaagaagaacgaaatcaaacctgtccttgttttttgatccc

SEQ ID NO: 5703 - DNA, 303 bp, Bos taurus
  Clone ID: 25-BOVMS1-014-Q1-E1-G1
atgcgacgtcatagctcttctatagcgtcacctatattcaattcactggccgtcgttttacaacgtcgtgactgtgataaccctggcgtcacacaacttaatcgccttgcatcacatcaccctttcgccagctggcgtcataacgaacaggcccgcaccgatagcccttcccaacaattgcgcaccctggtatggtgaatgggacgcgctctgtagcagcgcattaagcgctgctggtgtggtggttatgcgcagcgtgaccgcgaaacgtgccatggccctaacgcccgctcctttcgcatt

SEQ ID NO: 5704 - DNA, 107 bp, Bos taurus
  Clone ID: 25-BOVMS1-015-Q1-E1-G9
aaaaaaaaaaaaaaaaaaaaaaaaaaaaaaaaaaaaaaaaaaaaaaaaaaaaaaaaaaaaaaaaaaaaaaaaaaaaaaaaaaaaaaaaaaaaaaaaaaaaaaaaaaa

SEQ ID NO: 5705 - DNA, 406 bp, Bos taurus
  Clone ID: 25-BOVMS1-016-Q1-E1-G1
taaggattcaagatgcaacatcaccaatcatagaagaactacttcactttcatgaccacacgctaataattgtcttcttaattagctcattagtactttacattatttcactaatactaacgacagagctgacccatacaagcacgatagatgcacaagaagtagagacaatctgaaccattctgcccgccatcatcttaattctaagtgctcttccttctttacgaattctatacataatagatgaaatcaataacccatctcttacagtaaaaaccataggacatcagtgatactgaagctatgagtatacagattatgaggacttaagcttcgactcctacataattccaacatcagaattaaagccagtgggagctacgactattagaagtcgataatcgag

SEQ ID NO: 5706 - DNA, 194 bp, Bos taurus
  Clone ID: 25-BOVMS1-016-Q1-E1-G9
gaacatgtgggctgccttcccccccgacgtgggcggcaacgtagactacaagaacatctgctacgtcatcacgcatggtgacgccaaggaccaggagtagagcgggcccttttcggtctctgctaatcaacaccttcctgccagtccgacctccccacccagactcctaataaattgaaagggtctcatttctt

SEQ ID NO: 5707 - DNA, 443 bp, Bos taurus
  Clone ID: 25-BOVMS1-017-Q1-E1-G1
gcgttcgggctccacctcaaaaaccaatttggggaacacaagccttaatttttcactactatttttctccgactccctatccactccactactaattttaaccatatggctcctccctctaatactaatagctagccaacatcatctatcaaaagaaaacctaacccgaaaaaaactatttattactatgctgatctcactacaactattcctaattataacctttaccgccatggaactaatcttattttatattctatttgaagcaacactagtcccaacactcattattattacccgatgaggaaaccaaacagaacgcctaaacgccggactctatttcctattctatacactagctggctccctaaccctattagtcccactaatttatatccaaaacacagtaggattcctaaatttcccaatattacagtactgag

SEQ ID NO: 5708 - DNA, 399 bp, Bos taurus
  Clone ID: 25-BOVMS1-019-Q1-E1-G1
tgacaaacccgatatggctgagattgagaagttcgataagtcgaaattgaagaaaacggaaacgcaagagaaaaatccactgccttcgaaagaaacgattgaacaggagaagcaagcaggcgagtcgtaatgaagcgtgcgccgccagtatgcactgtacattccacaagcattgccttcttattttacttcttttagctgtttaactttgtaagatgcaaagaggttggatcgagtttaaatgactgtgctaccccttttcacatcaaagaatggagaactactgacaacgtaggccgcgcctgcctctcccatctgcttgtgtggctggcacggaaagaaaagaacttgcatgttggtgaaagacgaagctgggtgggacgacagtgaaatctagag

SEQ ID NO: 5709 - DNA, 365 bp, Bos taurus
  Clone ID: 25-BOVMS1-020-Q1-E1-G1
atgcgacgtcatagctcttctatagtgtcacctaaattcaattcactggccgtcgttttacaacgtcgtgactgggaaaaccctggcgttacccaacttaatcgccttgcagcacatccccctttcgccagctggcgtaatagcgaagaggcccgcaccgatcgcccttcccaacagttgcgcagcctgaatggcgaatgggacgcgccctgtagcggcgcattaagcgcggcgggtgtggtggttacgcgcagcgtgaccgctacacttgccagcgccctagcgcccgctcctttcgctttcttcccttcctttccccccacgttcgccggcttttcccgtcaagctctaaatcgggggctccc

SEQ ID NO: 5710 - DNA, 381 bp, Bos taurus
  Clone ID: 25-BOVMS1-021-Q1-E1-G1
gaatatatgaaattggatatattcgccatgtcactctacacaattgcatttccagcatttgtagaaggtaccgacataacagtgatccagtcagatgaagtggatctgtgcatacatggtgaaattgacttccacagcatttaagtcagagaaattttgacacagaccatatttttaatcagtctgaaacgtggttgcagcgtatggttaacatgtcattcttgttcctattgcagtagactacttgcgttaatgagaacacgtcacgtaaagtataacctacgggattctgttggatggttggtaactaacaatggacgatgatcaagacatacatgttctccacattcttatttctcaaaacactgttatcatcgtctt

SEQ ID NO: 5711 - DNA, 432 bp, Bos taurus
  Clone ID: 25-BOVMS1-021-Q1-E1-G9
cttgactgtgctgtgcaaatctgcaaagctgtacccgtttcccagaaccttattaataccttgagcacaaacatgactttttttatgaagacatggagtctttaactcagatgcttaggactttggctacagatggaaataagcaccgggccaaggtagacaagagaaagcagcggtcagtgttcagagacatcctgagggcggtggagaaactgttaaatttggtcctgaaaggatgtatattgattgctgggtcaaaaaacatacatatgacacctttaaggagattcttggatcaggaatgcagtaccacttacagtcaaatgaattccttcgcaatgtatttgaacttggacccccagtgatgcttgatgctgctgcattgaagacaatgaagatttctcgatttgaaaggcatttatataattctgc

SEQ ID NO: 5712 - DNA, 365 bp, Bos taurus
  Clone ID: 25-BOVMS1-022-Q1-E1-G1
acgcagcaaaacaaaacggctgagtttaatgcttcaagttttccatttccttccacagggcttcgttttaaaaataacaaaatgaggtaaacaatgtatgtacacattaaaaacagtgtgtcaatttgcggcaacggcaacgctgatggttggaaaacaactgctgcccggtggctcaaggtcaaccgcctgcgccgcgagcaaattcgtcgcgaatccacagccgaaccataattctagctcgaggcctacaaacgctccttccactaatagccacctgatgactactagcaagtctaaccaacttatctctacccccaacaatcaacttaattggagaactatttgtagtaatgtcaaccttt

SEQ ID NO: 5713 - DNA, 452 bp, Bos taurus
  Clone ID: 25-BOVMS1-023-Q1-E1-G1
gtccgctaattttacatgtattttgttattaaaaatattattttattgagaaaaaatgagtttatcactttaagggccaacaatgacactctaaatgctgtatatctgaaaactgctttgcatattcttgatggagacaaatgtcatttaaccagatattaaataggaaatgatcagttggtaaactgtcacaatagtagtacctttctttaaaaaacagagaaagagataatgtatgcagtatttaaaaagcgtttactgctgtagtatggaatattgtctggaattggatggtttaagtattaccattgtgtagttcaaaacaaaacaggacttggaacctttattgtgatacatttttatatataatatataaggttactctgccctgcccccagctgttaagaactgttttaaaacatgttgggaaaatatttttttggtatgaaagg

SEQ ID NO: 5714 - DNA, 411 bp, Bos taurus
  Clone ID: 25-LIB188-001-Q1-E1-G1
actgccggctgcagaagtgcttcgaagtgggcatgtccaaggagtctgtgagaaatgaccggaacaggaaaaagaaggaggtgcccaagcccgagtgctccgagagctacacgttgacgccggaggtgggagagctcatcgagaaggtgcgcaaagcgcatcaggagaccttccctgctctctgccaactgggcaaatacactacgaacaacagctcagaacagcgtgtctctctggacattgacctctgggacaagttcagtgaactctccaccaagtgcatcattaagactgtggagttcgccaagcaactgcccggcttcaccaccctcaccattgcggaccagatcaccctcctcaaggctgcctgcctggatatcctgatcctgcggatctgcacgcggtatcact

SEQ ID NO: 5715 - DNA, 404 bp, Bos taurus
  Clone ID: 25-LIB188-002-Q1-E1-G1
gggactctggcggcttctcaaacccgaacttctcccacgggtcggtgctgtccaggtattgcacggcgatgaccgtgggcgtcataccaatcatgttctgctccccacagccggagggggtttggataatgtgcttcagccgctctccgtcgatggcgtcctccgtcatttgggccaccggagtcccctgcaagaggatcttggtctctgactcggtgtctgggacttgatcactaagatctgcagctgggacttcctctcgctgcactcccccttgacccagatgttctggattcagtgtacgaacagccacagttttgttgactcttacgccttctggcacgaccttcagggtcttcttgacaccatcactggataagtggttgtacacggcagccttgacc

SEQ ID NO: 5716 - DNA, 425 bp, Bos taurus
  Clone ID: 25-LIB188-003-Q1-E1-G1
ccatggcggccggatacacgcgcggcaaccactgggctgtcggacacttaatgggaaaaaagagtgtggcagagtccccacaacttcatgaggaggagagcctgaaggagcagctgagggagtatgcccagtgggaagaagcgacaaggaacttgctaagcctcctacaagcaaagggggcccgaggccaccagatgcctccatgggagcccctgagcattcaccagcctgcctgggattccgaggacgtcagcaacttcaaagacacaggtcctcagcatgaaggaaggaacccccagctgaactgacaatgacgatggccgcctccctcaaagaagcaaaacaaaatccttaagaaactgcgttctatgggcatcagttctactggatcatcaacaaatttcctttgtgcaaaatacttaact

SEQ ID NO: 5717 - DNA, 426 bp, Bos taurus
  unsure (157),(216),(393): unsure at all n locations; Clone ID: 25-LIB188-003-Q1-E1-G9
ccaaggccgcgggatactttttatattgaaagatttgtcaaactcttcacaccgtggcaagagtttgcatgattaataagaagcagctttttcatgaaatgcttggaggtgaacgagttctcagcctgtgagattcggacatcccattgaatttganatttcttttgattaatagaaagaaaaagtggggaggggagaagaggaggaacatgctancgactgaaagatctctggtgacagccatccagatgtgataaaggaaaacagaaaacccagaagaaaaccaatttgccacctgcccctttttctgttttaccacggttctgctcctcgctcttgattttggtctttctggttgaaacagcctccctgtcctgcatctcctaaaggtantttggaggggagcagccctgcaggacatggtga

SEQ ID NO: 5718 - DNA, 217 bp, Bos taurus
  Clone ID: 25-LIB188-004-Q1-E1-G1
tggcggccggatacttgacctgagcaaatccatccaacccctccaaggaactgttgctaaattcctccccggcaactgtgttccctgcaattataaaccagcattccccaacctgttttcactgttccaaggggaaggggaaaaacaattttcctggtcctccccggaaaccaaactccggtaatcctggtgctttcaagtgtctgcaagacggggc

SEQ ID NO: 5719 - DNA, 396 bp, Bos taurus
  Clone ID: 25-LIB188-005-Q1-E1-G1
tggccgcgggatacaagctttatttttttttttttttttttttttgccacgaggtgtgttttattttcattaatcatacaaataattttctataatattccagggcaaaccggagaaatttggcagtccgattggaaggtccccttcagagacccgcgggccggtggcgacggcacggagtgcccgggttcacagtgcagcttgtcgctcgtgtactcccccttgtccttgagcaggtaggacacactgtagagcctgctgcccacgtgtttcaccaggatctcttcacagggcgtccggggcccatgcacgcccaccagcagcatgttgttgcctgctttgctgcagtccaccgtgaagctgctcttctggcccatgtaggccttgctcagcccc

SEQ ID NO: 5720 - DNA, 386 bp, Bos taurus
  Clone ID: 25-LIB188-006-Q1-E1-G1
ctcccgaccgtattgggcgcgggctaccggctgatgaagatgaatgctcaccacagccaaatcctacaccgggagatttcttccccttgcttagtctggggccagatgcctatggacaccatgttggtaggctctgcttccagacagtcttagaatatgcagcacccacactacttagactgtctgcaatgcctggattgataccttttcctgggaacatcactggtgctccatcgcacttccacttgctggttctggatctgcacaataaagcaccacagttcacccgttcagaactacgactagtactttctagacctggggattcaaggggagactcatggcgctattgagtatacccgcacagcccttcagctttactgaac

SEQ ID NO: 5721 - DNA, 384 bp, Bos taurus
  Clone ID: 25-LIB188-008-Q1-E1-G1
actgctgcaatgagcagaagctgctctgtgcctgcttgggcttcccttacaaactcagccttcatttccttgaccagagtggtgagatgccgcttgtctctccacccggggtagagccatgctaggtccagtccatcaaagccatgggtccgcagaaatggtggcaccgacttgatgaaagtcctgcgactccgggtcttggaagctatcttggaaaatctttgagaaccgaagttccatcctccaacagataggagggtcttcaggttggggttcctgttcttgagtgtgttcaatgtgtcatagagcgtcacgtcattccactcccaggtgtcgatctcattgttgcttatgttggcaaagctgtagatgacatgggtgcac

SEQ ID NO: 5722 - DNA, 405 bp, Bos taurus
  Clone ID: 25-LIB188-009-Q1-E1-G1
actgtccctgtgggtcgtgtggagactggtgttctcaaacctggcatggtggtcacctttgctccagtcaatgtaacaactgaagtgaagtctgtagaaatgcaccatgaaacattgagtgaagcccttcctggggacaatgtgggctttaatgtcaaaaacgtgtctgtcaaagatgtccgtcgtggcaatgtggctggtgacagcaaaaatgatccacccatggaggctgctggcttcacagctcaggtgattattttgaaccatccaggccaaatcagtgctggatatgcacctgtgctggattgtcacacagctcacattgcttgcaagtttgctgagctgaaggagaagattgatcgtcgttctgggaaaaagctggaagatggccctaaattcttgaaa

SEQ ID NO: 5723 - DNA, 285 bp, Bos taurus
  Clone ID: 25-LIB188-009-Q1-E1-G9
tggccgcgggatacccttccgttggactcagcacacaatctaggctactgtgtttggaggatttccggctctctgccaggacaggcaccaggccacacttgcccgcagtgtagatatatcctccatccaagttcagggcatctgcttcccctttcagcaccaggacgatgcagtcgtcagtggtggacgccgtggcacaggtcacgttctggccgctctgctggctccactgctggcacttcttctgctcctcaggtcccacggcacaccacacgaccctggtgt

SEQ ID NO: 5724 - DNA, 413 bp, Bos taurus
  unsure (404): unsure at all n locations; Clone ID: 25-LIB188-011-Q1-E1-G1
gccatgggcgcgggatactcagtgtaaggctgacggtttacttgctgcaagccgtgtatcgtgcagttacattctcccagttgatcacattccaaatggccttcagataatcgggcctgacatttttatactgaaggtaataagcatgctcccacacgtcaatccccagcagggggataagacctgttgttccttgcaggggatcctggttagaacaagcagcaatctgtaagcgtccctgctccttattgaagccgagccaaccccaaccggagccttggacaccaacagatacagcagtcaacttttccttaaatttggcaaaggaaccaaagtcacgtttgatggcttccagcaattccccttggggttctccaccaccgttagggctcagatttgtccanaaaatgctg

SEQ ID NO: 5725 - DNA, 434 bp, Bos taurus
  Clone ID: 25-LIB188-011-Q1-E1-G9
catgcgcccgtgcgccatggaggcgggatacatcaagctgccaacagcgatcaagcggaacgagaacatggctaaagggctgcagaaggccctgctgcagcagcagccggaagatgacagcaagcgcgcccctcggccccaggacctgatccggctctatgacatcattctgcagaatttggtggaattgctccagcttcctggcttagaggaggatagagccttccagaaagagataggccttaaaactctggtctacaaggcttacaggtgtttcttcatcgctcagtcctacgtgctggtgaagaagtggaatgaagcccttgtcctgtatgacagggtcctgaaatacgcagacgaagtgaattccgacgctggagccttcaagaacagcctcaaggacctgccggacgtgcaggagctcatcacacaag

SEQ ID NO: 5726 - DNA, 275 bp, Bos taurus
  Clone ID: 25-LIB188-012-Q1-E1-G1
acatggtcaagcgctcaggtcggaagagggcacaagtcttgatctgccccgtgcacagccccaacacgatgtcagcagtgaaagtgtcctcagtctccccggaacgatgagacaccatgaagcgccaccagttggactgggacagcttgcacgcctgcagggactcggtcacaggggtacactgggtcactttcagcaggaggcagttgcaccatttctcgctcaagggcttggatatacgcttggggttggtcaccatgaggtcatcacccaac

SEQ ID NO: 5727 - DNA, 255 bp, Bos taurus
  Clone ID: 25-LIB188-013-Q1-E1-G1
acaagctttatttttttttttttttttttttttttcttttttttatttttttttttttttttttttttttatttctttatatggaatgataatcaacatcatttccaatttatttcttgccaaattgtcatcatggaattgttaatactgatattcttccattaaatccgcgtcaagaaaggacaggaatgtccctcacgcctggaaattggggctcaaagcagggatgacctgacgcccacggaggcaggcaaa

SEQ ID NO: 5728 - DNA, 398 bp, Bos taurus
  Clone ID: 25-LIB188-013-Q1-E1-G9
atggccggcggatacaaaatggaaacaaaacggagaatcccttaagaacctgaagaggtgcaacattaaaagctacgattatccagtagcaagtgttccagccttcagttgccagccgcttcctcttcctgttcccaagagttagcgggatgaaaacgtcttccccgtgattgttttcatttcctttttctcggtatctgggcgtgcacggttcagcaccttgaggaagtcggatgtttttgcccgcatacgtgtgtgactataagcgttcgagcacttgatgtggtagtgcaagtagtcacggaacgtgtggatcaggttgatggtgttgtctcgagcactggcgttagtgtggcaagggaacagcatcagggttatgtagccaattttgtcaccca

SEQ ID NO: 5729 - DNA, 279 bp, Bos taurus
  Clone ID: 25-LIB188-015-Q1-E1-G9
accgcgtggtcagcgccctgcccatccagcaccaggactggactggaggaaaggagttcaagtgcaaggtcaacatcaaaggcctctcggcctccatcgtgaggatcatctccaggagcaaagggccggcccgggagccgcaggtgtatgtcctggacccacccaaggaagagctcagcaaaagcacggtcagcgtcacctgcatggtcatcggcttctacccagaagatgtagacgtggagtggcagagagaccggcagactgagtcggaggacaagt

SEQ ID NO: 5730 - DNA, 449 bp, Bos taurus
  Clone ID: 25-LIB188-016-Q1-E1-G1
acttgtatgattcaagatcgctgctactgctgctaagtcacttcagtcgtgtccgactctgtgcgaccccatagacggcagcccaccaggctcccccatccctggggttctccaggcaagaacactggagtgggttgccatttccttctccaatgcaggaaagtgaaaagtgaaagtgaagtcgctcagtcgtgtccgactcttcaggaccccatggattgcagcccaccaggctcctccatccatggaattttccaggcaagagtacttgtaagggcctcgcccctgtcagaatcaagccagtcctgctccctgtgtcactgaacgtggctccacctccccacgcccctctgcgttctggagttctgttcactcagaattgtaaatgtttagttgtgaccatgacatattgttttggtcagtgttccttctcaatgcatactaatata

SEQ ID NO: 5731 - DNA, 397 bp, Bos taurus
  unsure (66): unsure at all n locations; Clone ID: 25-LIB188-017-Q1-E1-G1
gccaaggccgcgggataccttgaccattgtcctcagtctagacagaaggtctagtccctaccatanggaagctgaggggtagcaggagacccactgagacccaatcccaacactgaaacctgccaggctcccctttactcctccccaggtccttccagcgggaggacctgcaagggcaagcccaccttggcttgattgcctggcaactgagaccctgctctggggaagggaagaggtcagaggaagccctgcagagggctggggaggtggggcccatctctgagcaatcagagtaggaggaaagaatgtatgtgcctgatggagaaagggatcggcatgctgggaagtgagggacttatctggggtgctccttcctcctccgtttgtggtcacagac

SEQ ID NO: 5732 - DNA, 419 bp, Bos taurus
  unsure (352),(402): unsure at all n locations; Clone ID: 25-LIB188-017-Q1-E1-G9
ccatggacgcgggatacctgcaggaaaaatggcaatggacaaaggcaaggacatcgccaaaaaacccggaaaccggaccttaaccaccctttgaaccaagaacttcaacggacccggcccccaaacattcggaaacaaaagcccccggttccaaggcaagaaaaaggcaattccgaacagattcattaacgctgactaccctgtgagctacatgctgatgctgggggctcaagccaataagctggtgatgggtatccccacttttgggaggagctacactctggcctcttccaagacagatgtgggagcccccatctcaaggccaggaattccaggccagttcaccaagganaaacggatccttgcctattatgagatctgtgacttcctccaggagccgcnacccacagattccgtga

SEQ ID NO: 5733 - DNA, 397 bp, Bos taurus
  Clone ID: 25-LIB188-019-Q1-E1-G9
cggatactcttgccaggaaaatctcatggacggaagagcctggtaggctgcagtccatggggtcgctcagagtcgggcacgactgagcgacttcactttcacatttcactttcatgcattggaggaggacatggcaacccactccagtgttcttgcctggagaaccccagggactgcggggcctggtgggctgccgtccatggggtcacacagactcggacacgactgaaacgacttcgcagaagcagcagcagcagcagcagcagcagcagcagtgcatagatatcaaaagggtttagaacagtcaggtaggatcacacaagtcaccgtgaagcaatacttctccacttagccaaagctaacaaaagatttctgttctaggtcaacctagaagaga

SEQ ID NO: 5734 - DNA, 412 bp, Bos taurus
  unsure (336): unsure at all n locations; Clone ID: 25-LIB188-021-Q1-E1-G9
tggccgcgggatactgggggtctcccttgaggtcgtaagtggccccatccagacccatgatcagatattctttcccaggttccaactgaaggcggcaagaggctcggaccaggaagtttctggtctgatcagcggtggccctggcatccttggtgaaatgcaggacttgggtgatacgggtctcaaagaggcggaaagcagccctgctgtcttctcggagaaccttaacctggaagccgtagtccactcggggagagtagcaggcgaatttcatccggtaaccctccaagtcctgctgcccacgctccagggcccggcgctgtcgagggcacttcncctcagcacactggcagacatccgcagagcacaacgtggacaagagtttgctcttacgtggtgccccataaaacac

SEQ ID NO: 5735 - DNA, 451 bp, Bos taurus
  unsure (227),(318): unsure at all n locations; Clone ID: 25-LIB188-022-Q1-E1-G1
catgcgcccggacgccatgtacgccggatactgcatcccgggagcaattaaaatgtgaaaatggcaaactgccaccaaagggaaggacaatgtcacaacttgacccgtgacctctcatcttccttccagatgaacacctgtgtgcaggccctattcccaggaaggaaagccatctgctggcactgctctgcctggctggggccaggctgactcacctgtttgtgtangagatggagcaaagcaccccaggcatccgcctcatgctgctgctggggtgggagatcgccacagcggcgcatcaaacaacagcttcacgcncacccgcctcccatggcacctggccctgaagatcccatgggctaaattcttctgtggatgggttattgccattggaaaacgattaatctctagtagtgtaaacagtgccctttggtctctctgactgtcactg

SEQ ID NO: 5736 - DNA, 410 bp, Bos taurus
  Clone ID: 25-LIB188-023-Q1-E1-G1
cctataatgagtcgtattataaagtgtcacctaaatcgtatgtgtatgatacataaggttatgtattaattgtagccgcgttctaacgacaatatgtacaagcctaattgtgtagcatctggcttactgaagcagaccctatcatctctctcgtaaactgccgtcagagtcggtttggttggacgaaccttctgagtttctggtagcgccgtcgcgcacccggaaatggtcagcgaaccaatcagcagggtcatcgctagccagatactctacgccggacgcatcgtggccggcatcaacggcgccacacgtgcagttgctggcgcctatatcgccgacatcatcgatggggaagatcgggctcgccacttcgggctcatgagcgcttgtttcggcgtgggtatggtggc

SEQ ID NO: 5737 - DNA, 288 bp, Bos taurus
  Clone ID: 25-LIB188-024-Q1-E1-G1
gccggatacttccctacagtgactcctatcatcagctcggcgccgggctgggcttacgggtctctgttcaggaaccaagagaagacgttcttgtcgactaacttcagctgcttcaggttgtcgacaacaagcagcacgttgttgacggatattcaggggtaggccatgcccacaatgccgtcgaacttagccacgatcaataccacaccgggctgcttgaagggctccccgaaggtctgcatctgcaccgtgacgccactcgggctggatcaggataggttacacggt

SEQ ID NO: 5738 - DNA, 440 bp, Bos taurus
  unsure (395): unsure at all n locations; Clone ID: 25-LIB188-025-Q1-E1-G9
cgcaatgggcccgggataccaaaagaccttcctcctgatactgcgctgctggacctgcaaaacaacaaaataactgagatcaaagatggagactttaagaacctgaagaaccttcatacactgattctcatcaacaacaaaattagcaaaatcagccctggggcatttgctcctttggtgaaattggaacgactttatctttccaagaatcaactgaaggaattgccagagaaaatgcccaaaactcttcaggagctgcgtgtccatgagaacgagatcaccaaagtgcgaaagtctgtgttcaatggattgaaccagatgatcgtcgtagaacttggcaccaacccgctgaaaaactcaggcattgaaaatggagcctttcaaggaaatgaagngctctcctacatccgcattgctgacacaaatataactaccatccc

SEQ ID NO: 5739 - DNA, 398 bp, Bos taurus
  Clone ID: 25-LIB188-026-Q1-E1-G1
atggccgcggcatacatcgagttaataataaaaagccaagtaagagggctgaacttcaacctagcattttaatatcctctggacaaggcaagctagaaaatcaatcactttgcacacatgtaagagtagtgttccaaaataagtaggaagctgctatacttctaggcaggggaggaaaaaacttccattttggtcttttttcttccagtaaattatactttcaattaacagcaataatggtatcataaaaaaatgctctgctttttaaattcctgaacttcaatacaaattaaaatagtagtattggagtcttttgggaggcaaacagctagcagctacattcatcagtgtaactgagcctctttatcgataacctggtccaggttgggtatagccct

SEQ ID NO: 5740 - DNA, 311 bp, Bos taurus
  Clone ID: 25-LIB188-028-Q1-E1-G1
tcatgcgccaagccgccatgagcgcgggatagctggaatcggtcccgcgcagcatcagctcgcccccgggctgggctttcgggtccctgttcaagaagaacgacaagacgttcttgtccaccaacttcggctgcatcaggttgtcaaatacacgcagcacgttgttgaccgagatgcgggggtaggccatgcccaaaatgccgtcgaacttggacgcgatgaacaccacagcgggctgcttgatggcctcccccaaggtctgccactgcaccgtgacgccacccgggctggatgaagatgggttacaaggt

SEQ ID NO: 5741 - DNA, 413 bp, Bos taurus
  Clone ID: 25-LIB188-028-Q1-E1-G9
gccataggcccgggatactggggatctcccttgaggtcgtaagtggccccatccagacccatgatcagatattctttcccaggttccaactgaaggcggcaagaggctcggaccaggaagtttctggtctgatcagcggtggccctggcatccttggtgaaatgcaggacttgggtgatacgggtctcaaagaggcggaaagcagccctgctgtcttctcggagaaccttaacctggaagccgtagtccactcggggagagtagcaggcgaatttcatccggtaaccctccaagtcctgctgcccacactccagggcccggcgctgtcgagggcacttcccctcagcacactggcagacatccgcagagcacaacgtggacaagagtttgctcttacgtggtgccccataaaa

SEQ ID NO: 5742 - DNA, 408 bp, Bos taurus
  Clone ID: 25-LIB2809-002-Q1-E1-G1
actttgtattttttcagtctgagaagctgttccagataacccaggtaacgctcagagggcacatcttccttttgaatgtgcttctgctcaacactattgggaacaatttcctcacttgacgaaatgctttcagcttccatttgcttaatatcttccatggcttgatcctcagttgattcactcccaatatccttgctcagttcattgaccttctcctttccaaacacttctggaaaaggtgccacaaaaaacctgagtaaattttcattgaggacttcttgagggagtccttggtgcttgataggatgtttaggcctggcaagagcaacagccacaagacaggtaaggatgagaagtttcatggttgtcaagatcttgaacccaagactgggaagaagcagcaagcgc

SEQ ID NO: 5743 - DNA, 502 bp, Bos taurus
  Clone ID: 25-LIB2809-003-Q1-E1-G9
cgacgtctatgctcgacgcagccatggccaggggataccagattgtatttcgttgttctgtctccttattctcctctggtctgtaatgttttctcagaatttccttattgctcatgattttgacagctttgaggagtcctgatcaaggtattttctatttagatttgcttgatgttttattgcataataagactggggttgcaaagagcaccacagaagtgatatctcttctaattatatcatatacggtgatatgtgaatccatatggctcattgctgagtcagtaatgatgtggaattttgatcacttagttaagatgttatttgccagatttctccactgttcataccttccgctttggaagcgagtcccaaagttcagcacagactcaataacgggtggacaaagttcctactcctgaaaggagaaggttaatccaaataagttaatttgaatttttttttaagggaaaattgtttaaaagaagagagactttaaaag

SEQ ID NO: 5744 - DNA, 144 bp, Bos taurus
  Clone ID: 25-LIB2809-004-Q1-E1-G1
agcccttcaagctaactcatctctgagccctgggccctgtagtgacaatggacatgtaaggacgaatctccaggggtgcatgaagggcgcgctggacttttgacccttgctcgatgtccctgagggcgcttttaatgcaacagt

SEQ ID NO: 5745 - DNA, 455 bp, Bos taurus
  Clone ID: 25-LIB2809-005-Q1-E1-G9
agccgatacagcacaaaagcctgaatgggcatatctctctggggatagggcactgctttctggggaacaggcaggactttggactgagaaagggacagcacggactgaggaggaaacatgacagttggaggaagaggctggtgaggctggtgcatccaagactggagcagaggcagaggaaggtgcagattttcaacatcagtgagagtcaggctctggctttcagtaaagggctcaactggatatttagggaagggcatttctttgtgcttaggagccatagcctccttcactttggagactcccattacttcaggctgaaggaaaggcggcaccaccacaggggtttgagtaagaggagggatgttttgtgggaggctgttatggatgggcccacggaagggatagactagagactgtgtctgggcaaaggggtggattttatcctggagttc

SEQ ID NO: 5746 - DNA, 379 bp, Bos taurus
  Clone ID: 25-LIB2809-007-Q1-E1-G9
cccgggatcggccgcacgggcaggtaccttcaaattgcaagaaattagcaaatacagtggccaaaggaatctgcagcaacttctcaaaatactgttagcatctttgggtttgctgaggcttgtcaaaaactcacatcaaatcctctcaaaagaagatctgaatggatagacatgactaaacagttttgtggtgataatccaattttacacattaatttgctgttgcaaatctgcctgaagctacaggtaatgaaaaataaagcaagtgtaaaatggatagtctgacacttaaaaatttatacaaagtgaaggttatagtttacatatttgaaaatcacatatacactaaattaccattatctgaattacccaaagacaa

SEQ ID NO: 5747 - DNA, 130 bp, Bos taurus
  unsure (11),(18),(20),(32)...(34),(44): unsure at all n locations; Clone ID: 25-LIB2809-008-Q1-E1-G1
atatctctctnttgatangncactgctttctnnnaaacatgcangactttggactgagaaagggacagcacggactgatgaggaaacatgacagttggaggaagaggctggttaggctggtgcatccaag

SEQ ID NO: 5748 - DNA, 435 bp, Bos taurus
  Clone ID: 25-LIB2809-008-Q1-E1-G9
tgggcccgggatacttatgatcggccagcccaccgggcactttgacaagcttgttgttgttcaaatgaagctccctcaaatgaggagtgttggccaaagagccattgtcaaccgcagagatgctgttgaaactcagtcccaacttagccaaattattcagtcctttcaggctagctgcatcaactttggtgattttgttgccatcgagatgtaattcagtaagggaaggaggaagaccttgagggatggtagttatatttgtgtcagcaatgcggatgtaggagagcttcttcattccctgaaaggctccattttcaatgcctgagctcttcagcgggttggtgccaagttctacgacgatcatctggttcaatccattgaacacagactttcgcactttggtgatctcgttctcatggacacgcagctcctgaa

SEQ ID NO: 5749 - DNA, 341 bp, Bos taurus
  Clone ID: 25-LIB2809-011-Q1-E1-G1
acagcagaaaggcctgaatgggcatatctctctggggatagggcactgctttctggggaacaggcaggactttggactgagaaagggacagcacggactgaggaggaaacatgacagttggaggaagaggctggtgaggctggtgcatccaagactggagcagaggcagaggaaggtgcagattttcaacatcagtgagagtcaggctctggctttcagtaaagggctcaactggatatttagggaagggcatttctttgtgcttaggagccatagcctccttcactttggagactcccattacttcaggctgaaggaaaggcggcaccaccacaggggtt

SEQ ID NO: 5750 - DNA, 279 bp, Bos taurus
  unsure (247),(250): unsure at all n locations; Clone ID: 25-LIB2809-012-Q1-E1-G1
gccatagcggcgggatacttgtaggatcaccactagcagtggtattgatggtagggatttctgttttatcctgatttttctttggtggaatggccataaatgataaatgtgagtgtgggtgacgtgccagggtagttggctgggcttggcaggacttggcatgcacagtagttgacaaaacgtgccattgaagaatttgggcaggtgaccgaactgcagctggctttgcagaatatgggtgtggcanaanttgatgattaattagtgcaactggtttct

SEQ ID NO: 5751 - DNA, 374 bp, Bos taurus
  Clone ID: 25-LIB2809-013-Q1-E1-G1
acagcagaaaggcctgaatgggcatatctctctggggatagggcactgctttctggggaacaggcaggactttggactgagaaagggacagcacggactgaggaggaaacatgacagttggaggaagaggctggtgaggctggtgcatccaagactggagcagaggcagaggaaggtgcagattttcaacatcagtgagagtcaggctctggctttcagtaaagggctcaactggatatttagggaagggcatttctttgtgcttaggagccatagcctccttcactttggagactcccattacttcaggctgaaggaaaggcggcaccaccacaggggtttgagtaagaggagggatgttttgtgggaagctg

SEQ ID NO: 5752 - DNA, 426 bp, Bos taurus
  unsure (385): unsure at all n locations; Clone ID: 25-LIB2809-013-Q1-E1-G9
cgcgggatacatattccacttttgacgcgaataaaaagcctgattttgaaaaaaaaaaattcaaaaaaaaaaaaaaaagcttgtacttgtgtaggtgggggttgtctactgagtaaggaatactgtttttaaggttctaaagctaaattcaaatgatgcattaatgacccaaaaactcagatctgatggtgtctgaatttctaacagtccttgctttgtgggtatgctgacaacttatctggatgccttacatcttttctaaacagtgttgcctctgaacgtgctctgctccctccctgctccctctttggagcccctttgcaccccagagcctgcagaaatggctggtataaaagggggcctggctacagaatgatcagtgtanctgtttgcaggattcctttctgggcttcattttggaaactt

SEQ ID NO: 5753 - DNA, 436 bp, Bos taurus
  Clone ID: 25-LIB2809-014-Q1-E1-G1
tcccgagcgccaaggcggcgggatacagcagaaaggcctgaatgggcatatctctctggggatagggcactgctttctggggaacaggcaggactttggactgagaaagggacagcacggactgaggaggaaacatgacagttggaggaagaggctggtgaggctggtgcatccaagactggagcagaggcagaggaaggtgcagattttcaacatcagtgagagtcaggctctggctttcagtaaagggctcaactggatatttagggaagggcatttctttgtgcttaggagccatagcctccttcactttggagactcccattacttcaggctgaaggaaaggcggcaccaccacaggggtttgagtaagaggagggatgttttgtgggaagctgttagggatgggcccagggaagggatagactagagactg

SEQ ID NO: 5754 - DNA, 308 bp, Bos taurus
  Clone ID: 25-LIB2809-015-Q1-E1-G1
gctggaacataaactttaccacgttcttcattgattgcatggctgccatcggtctggcttatgaccggaagaaagtatccaaggctgccatcttggccaggataaaccgaactggagaggaaagctacaagagtggctgaatttgtggtcccttgggttccttttccaaaagccatctgggcagacgtttaatgttctgtttattaactactgaataatgctaccatgactgctaagatgactttaacccattacagtacagtcttcttcaaaattttctttttaaattcacagccaacaactctgcc

SEQ ID NO: 5755 - DNA, 234 bp, Bos taurus
  Clone ID: 25-LIB2809-016-Q1-E1-G9
ttgtgaaaagcctttcaagcagtgaggaatctattacacgcatcaatacgaaaattgagaagtttcagagtgaggaacagcagcaaacagaggatgaactccaggagaaaatccacccctttgcccagacacagtctccaatccaacccttccctggggccaaccataaaaacctcccacaaaacattcccccccttactcaaaaccctgtggtggtgccgcctttccttcaac

SEQ ID NO: 5756 - DNA, 404 bp, Bos taurus
  Clone ID: 25-LIB2809-017-Q1-E1-G1
gccaagggcgcgggatactaaacaagattcagttttagaatcaactacatttgtgtgtccatcacagtaataagtccctaactgttatatttagaatgtaaatctttaataaactccaaaatctcattttgcaatctattgatcgtgaactgcaaacggaggctggggcccccgtggtgtgatctgcaggctgcgtgtcacctcagtgcccagcgatcacagatcacagaggggagaaggcacttgtcttccaggaggtcgcgtcaggacaggtcaggcccgaccacacggtgacgccgtccactctcgtgccacaagcggggcctacgaagaaccggtcccgctcccttcaattgccagagggtgccgaaggttacctacagcaccacaaaactcagaatata

SEQ ID NO: 5757 - DNA, 433 bp, Bos taurus
  Clone ID: 25-LIB2809-019-Q1-E1-G1
gggcccgggcataaaaacaatgaaagcacagaatatggactcttccagataaataataaaatttggtgcaaagacgaccagaaccctcactcaagcaacatctgtaacatctcctgtgacaagttcctggatgatgatcttactgatgacattatgtgtgtcaagaagattctggataaagtaggaattaactactggttggcccataaagcactctgttctgagaagctggatcagtggctctgtgagaagttgtgaacacctgctgtctttgctgcttctgtcctctttctgttcctggaactcctctgccccgtggctacctcgttttgcttctttgttcgagcggccgcccgggcaggtacctggtgagattgtggaaagcctttcaagcaattaaggattcaattacaggcatcaataagaaaattga

SEQ ID NO: 5758 - DNA, 387 bp, Bos taurus
  Clone ID: 25-LIB2809-020-Q1-E1-G1
cgccatggccccgggacacacctaacaccgaagcagtagagagcactgtagctactctagaagattctccagaagttattgagagcccacctgagatcaacacagtccaagttacttcaactgcagtctaaaaactctaaggagacatcaaagaagacaacgcaggtctagctgaaaccaaatgactacttcaaactttcctttggccaattgtctgccttcggtgaacagagaatatgattttcacagatctggctccttcctcgtctcctcttacattttacttttatgccagatttttctttggtggaatggccataaatgataaatgtgggtgtgggtgacgtgccagggtagttggctggacttggcaggacttggcaggca

SEQ ID NO: 5759 - DNA, 441 bp, Bos taurus
  Clone ID: 25-LIB2809-021-Q1-E1-G1
atgcgccgagccgccatgtacgcgggatacgagacatagtcttgggctctggtgatgaccgagagcttcttctagcagttctggatttgggagggtgttctggagaggactcggaactgctgcttccttcaggagaagggcctctgcctttgcttgatgaacctgatctgcttcgtcttggaaggactcgaggggcaggagccttgggttcaggagaggaatcagaaccactctgtgccctgggtgctgctcttggcttctctttaacctcaggggatgagccagacctgctacgccgaggagaaggccgggatttgctgtccacctccggagaggatccagagtgactcctctgcctgagtggcattcgtatcttagctttagaatctggagaagagtctgactcacttctctcctgaagggatgcactgggtttcccat

SEQ ID NO: 5760 - DNA, 432 bp, Bos taurus
  unsure (412): unsure at all n locations; Clone ID: 25-LIB2809-022-Q1-E1-G9
tggggcgggctactgctacaattaaatggttccttattaagtttgaaaagtgcctgaaagtttgggcaccagaaagacaccccaacaacatgtgtctaaactgcaacttcaggttaatatgactaaagcagttacattgtgagaagtgctgaaggtatgtgatgtctttcccggcatagagatggccttggttcttcaccagatggtgtagccaccatctgaaccacccatgaagaagtttcccttccgctgagttacgaggacactggctccctgcatgactgccagctgagcagcattgggagggcatcccgggggaagaggaggaatgtttccagcagtagcgccagctccaaatctggcccctgcatcataccctcctttcaccagcactgttgaaccaggtggatanatgggagcaactggataata

SEQ ID NO: 5761 - DNA, 373 bp, Bos taurus
  unsure (366): unsure at all n locations; Clone ID: 25-LIB2809-023-Q1-E1-G1
tgggcccgggatacagtatactttaaaattttctttttaaattgaaagccaacaactctgcctttatgatgctaagctcatgttcttatttcttctcctatcttctttctcttctgttcccattatccttccctttgttttgtccctgtcaccttcctttctccttctcctcattgccccccaggcaagcaggtggtcagtcattggtgggtttccagcttccaaagcctagacaaccctgctgtagtctcaaactagtggtctttgccccggctgaccctttccttgagctgtctgagctttaaggtggatggctcaagctagagatatgacagaatcttctgggaagggccttgatgatcttcnagcccag

SEQ ID NO: 5762 - DNA, 363 bp, Bos taurus
  unsure (98): unsure at all n locations; Clone ID: 25-LIB2809-024-Q1-E1-G1
atacctggtaagattgtggaaagcctttcaagcagtgaggaatctattacacgcatcaataagaaaattgagaagtttcagaggaggaacagcagcanacagaggatgaactccaggataaaatcggcccctttgcccagacacagtctctagtctatcccttccctgggcccatccctaacagcctcccacaaaacatccctcctcttactcaaacccctgtggtggtgccgcctttccttcagcctgaagtaatgggagtctccaaagtgaaggaggctatggctcctaagcacaaagaaatgcccttccctaaatatccagttgagccctttactgaaagccagagcctgactctcactg

SEQ ID NO: 5763 - DNA, 310 bp, Bos taurus
  unsure (67),(130): unsure at all n locations; Clone ID: 25-LIB2809-025-Q1-E1-G9
cgccatgggccgggatacaaaaaaacctaaaaattgtttcaggaatgtagagaaatatccaacttanataaccaaaaagtgcaacataatttactgctgcactgcagtcattttctgcatttcccatgtntcttaaataactatcttgtctgataacacacaatataaagagcaattatgaaaaacagacatttacatatacttctaaagtcttattgagaatatcctgttggcatcggataaccaatcataggcgcagctgcagtagcaggatatgcatatgcctgttggttcataccattgtgcaaat

SEQ ID NO: 5764 - DNA, 356 bp, Bos taurus
  Clone ID: 25-LIB2809-027-Q1-E1-G9
ccatcggaaaacgccttcctgccgacattcgttccacaaaagtcaactacctcctggtggaacaatccaattttcccggaaaaaccgaacccacccattagacagttaccccactgacaggcgagggtgacctcacgaccctgagcaacatcgtcttcctggggaccctgttgcaatgccggaatggcacaagcgtcatgatcggaacatgacacaactccaggttggagacgtgttcaagatgatgcccgctgactagacccctactactcctctacagaaaaacatggattagcctggggaagcaactgacactcttctcactcggcataattggcctgatcatgttcactggc

SEQ ID NO: 5765 - DNA, 395 bp, Bos taurus
  Clone ID: 25-LIB2809-028-Q1-E1-G1
cgtgttagtttatgttctaagtcattgtgttttacagaaagcacttgtgttgaataccagtgacatacacatttcgtttttaccgcttgcacacatgtatgagcagctcatgctgtgtgtgatgctctgtcatggagctaaaataggatttttccaaggagatatcaggctggttatggatgatctcaaggcccttcaacccaccatcttccccgtggtccccagactgctgaaccggatgtttgaccgaattttcggacaagcaaacactacgctgaaagcgatggctgttggactttgcctccaagaggaaagaggctgaacttcgcagtggcatcattagaaacaacagcctctgggataaactgatcttccacaaaatacagtcgagcctg

SEQ ID NO: 5766 - DNA, 404 bp, Bos taurus
  unsure (316): unsure at all n locations; Clone ID: 25-LIB2809-030-Q1-E1-G9
acagcagaaaggcctgaatgggcatatctctctggggatagggcactgctttctggggaacaggcaggactttggactgagaaagggacagcacggactgaggaggaaacatgacagttggaggaagaggctggtgaggctggtgcatccaagactggagcagaggcagaggaaggtgcagattttcaacatcagtgagagtcaggctctggctttcagtaaagggctcaactggatatttagggaagggcatttctttgtgcttaggagccatagcctccttcactttggagactcccattacttcaggctgaangaaaggcggcaccaccacaggggtttgagtaagaggagggatgttttgtgggaggctgttatggatgggcccacggaagggatagact

SEQ ID NO: 5767 - DNA, 423 bp, Bos taurus
  unsure (391): unsure at all n locations; Clone ID: 25-LIB2809-032-Q1-E1-G1
acaaagaaacaaaacgaggtagccacggggcagaggagttccaggaacagaaagaggacagaagcagcaaagacagcaggtgttcacaacttctcacagagccactgatccagcttctcagaacagagtgctttatgggccaaccagtagttaattcctactttatccagaatcttcttgacacacataatgtcatcagtaagatcatcatccaggaacttgtcacaggagatgttacagatgttgcttgagtgagggttctggtcgtctttgcaccaaattttattatttatctggaagagtccatattctgtgctgtcattgttttgtacaagctttttttttttttttttttttttttttttttaaaatgtaatttattgaaaagaanaaagacaaaatctcagttaatgcacacaatta

SEQ ID NO: 5768 - DNA, 352 bp, Bos taurus
  unsure (262): unsure at all n locations; Clone ID: 25-LIB3057-001-Q1-K1-G1
tcggagcgctgtcttacttccctacttgtgtccactgctcgctcctcgtgctgcgtaggcccctaccccggccatggccacgctcatggtcctgccctaagcccaagccaaggtggatgtgttccgtgaagacctatgtactaagacagagaacctgctcgggagctattttcccaagaagatttctgagttggatgcatttttaaaggagccagatctcaatgaagccaacctgagcaatctgaaggccccattggacatnccagtgcctgatccagtcaaggaggaaagagaatgagggagcggatgaaacagcatgagaaggaagacaaggatgaaaaagaagaaaagg

SEQ ID NO: 5769 - DNA, 366 bp, Bos taurus
  Clone ID: 25-LIB3057-002-Q1-K1-G9
cagcaaaggttcgtcgcagaaagggtcccgcctgctcctgctgctggtggtgtcaagtctactcttgtgccagggtgtggtctccacccccgtctgtcccaatgggcctggcaactgccaggtatcccttcgagacctgtttgaccggtcagtcatggtgtcccactacatccatgacctctcctcggaaatgttcaacgaatttgataaacggtatgcccagtgcaaagggttcattaccatggccctcaacagctgccatacctcctttcttgctacccctgaagataaagtacaagcccaacagacccaccatgaagtccttatgagcttgattcttgtgttgctgcgctcctggaatgaccc

SEQ ID NO: 5770 - DNA, 343 bp, Bos taurus
  Clone ID: 25-LIB3057-003-Q1-K1-G1
tcggtccttctccacctcctcggcgtcgctcccggctcccgcggcgtccggccagcccgcgctggcgggccgatgcccagcgccgtgtgagtgctccgaagcggcgcgcacggtcaagtgcgtgaaccgcaacttgaccgaggtgccggccgacctgcccccctacgtgcgcaacctcttcctcacgggcaaccagctggccgtgctgcccgccggtgccttcgcccgccggccgccgctggccgacctggccgggctcaacctcagcggcaaccgcctgaaggaggtggacgccggcgccttcgagcacctgcccggcctgcgccagctcgaccttagccac

SEQ ID NO: 5771 - DNA, 412 bp, Bos taurus
  Clone ID: 25-LIB3057-004-Q1-K1-G1
ggagtagacccctactcacaaaaccagattcctcaagctgttcctggactccattcagagtggtggagaaccttactcccgaatggaaatttcctgtgtgaacccctcccgttcgataggcaaaaccaaatccacgcaggcatcttaaagcgctcttttgtcttaacctgaacacccggagcgtcttcatggtgacgtgtgttatctccagtgcacgtaagttgtggtacttttcctgtaaaactactgcatggcccaccttcagcagtgaagtgtgcctcatggagaccccctcgctctcttaaggtgaccttttctttagccatgtactgttcacatggtgcaatctttagccccagggaggtcagtaatgtcttttaaagccagaagtcccattttactgatatgcatt

SEQ ID NO: 5772 - DNA, 187 bp, Bos taurus
  Clone ID: 25-LIB3057-004-Q1-K1-G9
ccggttctagatcgcgagcggccgccctttttttttttttttttttattttttttttttgtgtttgtttttttttttttatttttttttttttttatttttttattttttttttttttttaattttttttttattttttttattagtcaatataaaaaaggttttttattataaattccgaagactt

SEQ ID NO: 5773 - DNA, 453 bp, Bos taurus
  unsure (423),(425)...(426): unsure at all n locations; Clone ID: 25-LIB3057-005-Q1-K1-G1
cgtgatggtttttgttccaaaacagtggaatatcatcgtcttgaccagaatgttaatgaagcaatgccttctctgaagattaccaatgattatatattttaaagcactgtgatttgcatttgcttattatgtaattttatttgcttgactttttatatgatattgtgcagatgtttgccattggcaattcatacttaaatgagaggtgggcctctctttattttgctttggtgctttggaaattaagtatcacaaacaaggagtatataattttttatctacatttttagaagtaaattcaatcaggttgtccaaaatgtggagctaagcattaccttgttagtttttaatggtttagatttctttattgtacttcttcctgaagtgttagtaatgctactttaaaaaaaatccagacttatnanntaatctaacacatctggtattgctgac

SEQ ID NO: 5774 - DNA, 374 bp, Bos taurus
  Clone ID: 25-LIB3057-006-Q1-K1-G1
cgcgagcggccgccctttttttttttttttatattgatgatttaaaagactctagttcgagctgaatcacctttttatggtcatcctaaatgccatatttcattccaaatgaaaagatcaagactactgattatattgtaggataaggagaaaagcaataaaactccaatatattctcaaagcagattaaaaatggtatgccacggaaaatgagggttttatatcacaaaaccatagacactgtacaaattaattttcctttcgagcaagtcatccatgatcaacacggcccactgtaaactattaggatttttgatatttacaagtacagcattagcatactttgtcaattttatattttattccttaattta

SEQ ID NO: 5775 - DNA, 278 bp, Bos taurus
  Clone ID: 25-LIB3057-007-Q1-K1-G1
cagcaggtaacactgacaatttattttttcaagattatcatttttacaaaacagaacaaaaagcaggtatcaaaaacagcaaagagtttacagaatttctacaccagttttcacacaagtcaatgattacaaaactggtgtcggatgtaaatactagatacgttgatttcccgcttggtcataagcattcaagtgattcgttttagagctaatgaataataataattccatataaccacctgtcattacttcagaacacattattttagtcaaacaaa

SEQ ID NO: 5776 - DNA, 403 bp, Bos taurus
  Clone ID: 25-LIB3057-008-Q1-K1-G1
ccgagcgacacggatatatcaagggcatcgtgaaggacatcatccacgacccgggccgcggagcgccccttgccaaagtggttttccgggatccgtaccgttttaagaagcggacagagctgttcatcgctgctgagggcatccacaccggccagtttgtgtactgcggcaagaaggcccagctcaacatcggcaacgtgctcccggtgggcaccatgcctgagggcaccatcgtgtgttgtctggaggagaagcctggtgaccgaggcaagctggcaagagcctctggaaactatgccacagtcatctcccacaaccctgagacaaagaagacgcgagtgaagctgccttcgggctccaaaaaggtcatctcctctgccaacagaactgtggtcggtgtggt

SEQ ID NO: 5777 - DNA, 241 bp, Bos taurus
  Clone ID: 25-LIB3057-009-Q1-K1-G1
tctagatcgcgagcggccgcccttttttttttttttttttttttttttttttttttttgtttttttttttgtttttttttttttttttttttttttttttttttttttttttttttttttttttttttttttttttttttttttttttttttttttttaatttaattttataatatatttattttttataaaaatattttttaaaaattttaattttatttaatattttttatatattata

SEQ ID NO: 5778 - DNA, 282 bp, Bos taurus
  Clone ID: 25-LIB3057-011-Q1-K1-G1
ccaggcgaagctggccgagcaggctgagcgatacgacgaaatggtggagtcaatgaagaaagtagcagggatggatgtggagttgacagttgaagaaagaaacctcctatctgttgcatataaaaatgtgattggagctagaagagcttcctggagaataatcagcagcattgaacagaaagaagaaaacaagggaggagaagacaaactaaaaatgattcgggaatatcggcaaatggttgagactgagctaaagttaaatctgtgtgacattcttgatgt

SEQ ID NO: 5779 - DNA, 461 bp, Bos taurus
  unsure (52),(65),(109),(406),(446): unsure at all n locations; Clone ID: 25-LIB3057-013-Q1-K1-G1
gaaaaatgaaatttcagttagagattagtgaaaataaagattaatatttttntttcattggcggntggtcaagaattattcctagaatttcttgcccaatcaacctctntaagggattttcaccatttatattaaaaagcctctgaaattgagccaactcaatgaagactctatttcaagaggaaggaaagtctttagtttattcttcatcagtttatcatattgcatatatttatgatttttcatatgactataacattaaaagtattattttaaatattttaggtatgctcaattgcttagcaaatgcagtcaagaatattaattaataatatgtatacattataatcatattaattcttctacatatgataagaagaaatattatgatagggaaaatgatagngaaatgacaaatgacatatgatagggaaaaactttacatntatggtataattcta

SEQ ID NO: 5780 - DNA, 356 bp, Bos taurus
  unsure (139),(316): unsure at all n locations; Clone ID: 25-LIB3057-014-Q1-K1-G9
cgctttcttgggaaatggggttcttggaattcataaccaccatggccagcaaaggttcggggcaaaaagcagggtccggcctgctcctgctgctggtggtgtcaaatctactcttgtgccagggtgtggtctccacccncgtctgtcccaatgggcctggcaactgccaggtatcccttcgagacctgtttgaccgggcagtcatggtgtcccactacatccatgacctctcctcggaaatgttcaacgaatttgataaacggtatgcccagggcaaagggttcattaccatggccctcaacagctgccatacctnctcccttcctacccctgaagattaagaacaagcccaacag

SEQ ID NO: 5781 - DNA, 272 bp, Bos taurus
  unsure (50),(65): unsure at all n locations; Clone ID: 25-LIB3057-015-Q1-K1-G1
ctcccatattcctaatttatccctttcctttcaagtaaccgtaagttaanaaactgaaaggttcnaatatatcttttgcttaacaatcattattatcattttttcatattacacttttaattttatatcacattatatttcactttctctttctcactctaatatttttatttattattcatctatatttttttctattttattcatccctttttacatatacttctttattctttttttattttcaaattcttatataccttatttttatt

SEQ ID NO: 5782 - DNA, 376 bp, Bos taurus
  Clone ID: 25-LIB3057-016-Q1-K1-G1
gaggaggggtcaggatggggaacacatgtatacctgtggtggattcattttgatattgggcaagactaatacaattatgtaaagtttaaaaataaaataaaattaaaaaaaaaaaaaaaaaaaaaaaaaaaaaaaaaaaaaataaaacgtgttactgacatgaaaaatattttaaaaaggactcaaattaaacttttagggatgaaaactacaattttaaattaaggcccaaatagattttgcctaaaatgcaaaatttagggatggggggacggtgccaaaaaactctatatcaatataaacaatattttaaagcaatattctaagtcataattaatccaaaattttacatgtgaaataaactcagtattttaat

SEQ ID NO: 5783 - DNA, 430 bp, Bos taurus
  Clone ID: 25-LIB3057-017-Q1-K1-G1
ggcggagtacgacttgactactcgcatcgcgcactttttagatcggcatttagtctttgcgttgcttgagtttctctccgtaaaagagatatataatgaaaaggagttgttacaagggaaattggatcttcttagtgataccaacatggtagactttgctatggatgtgtacaaaaacctttattctgatgatattcctcatgctttgagagaaaaaagaacaactgttgttgcacagctgaaacagcttcaagcagaaactgaaccaattgtgaagatgtttgaagattcagatactacaaggcaaatgcagtcaaccagggttgggtcggatgctgtttgactacctggcagacaagcatggtttcaggcaggaatatttagatacactgtacaggtttgccaaattccagtatgaatggggaaaatt

SEQ ID NO: 5784 - DNA, 290 bp, Bos taurus
  unsure (32): unsure at all n locations; Clone ID: 25-LIB3057-017-Q1-K1-G9
actcacacatcataacaaaagaagctttccanccatctaccacataaaacactacaacaaacatatttccactcaaaaacctaatatacttaccactgcaattgataattcattataatacaaactcaataatccaacaataataccccttaatccccttctcttacaaatttacttttcacttattaaatttctcaattttacccttataaaattccttatacaaaccttacactctcaaaactaacaaattactttttactacctttaaattcacacattacattacc

SEQ ID NO: 5785 - DNA, 516 bp, Bos taurus
  unsure (76),(90): unsure at all n locations; Clone ID: 25-LIB3057-018-Q1-K1-G1
tattcccggtctcccacctcctatttagattacaatttgtttatagagtttaaattcttaatggcaataaggtatngagggttagttttnatattttgttttgtattaattttattttttttttttttatttttttattttttttatttttttttttttatatttttttttttttttttttttttttattttttttattttttttttttttaatttttttttatttttttttttttattttttattatttttttttatttttttttttttatttttatatttttattttttttttttttttattttattttttttttttattttttttttttttttataatttttgtttttatttattttttttttttttattattttttatattttttttttttttttttttattttttattttttttttttttattttttattttttatttattattatttttttttattatttatttatttttttttttatatttaatatttttttttatttttttattattt

SEQ ID NO: 5786 - DNA, 305 bp, Bos taurus
  Clone ID: 25-LIB3057-018-Q1-K1-G9
ggtgaagtgtgtttcttgaaatcatcaccaccatggacagcaaaggttcgtcgcagaaagggtcccgcctgctcctgctgctggtggtgtcaaatctactcttgtgccagggtgtggtctccacccccgtctgtcccaatgggcctggcaactgccaggtatcccttcgagacctgtttgaccgggcagtcatggtgtcccactacatccatgacctctcctcggaaatgttcaacgaatttgataaacggtatgcccagggcaaagggttcattaccatggccctcaacagctgccataccttc

SEQ ID NO: 5787 - DNA, 426 bp, Bos taurus
  unsure (310): unsure at all n locations; Clone ID: 25-LIB3057-020-Q1-K1-G1
cggacgcgtgggcttcgccccattggctcctcagccaagcacatacaccaagggtctgggcctgcggttcctctcgtactgagcaggattaccatggcaacaacacatcatcagtagggtaaaactaacctgtctcacgacggtctaacccagctcacgttccctattagtgggtgaacaatccaacgcttggtgaattctgcttcacaatgataggaagagccgacatcgaaggatcaaaaagcgacgtcgctatgaacgcttggccgccacaagccagttatccctgtggtaacttttctgacacctnctgcttaaaaccccaaaggtcagaaagatcgtgaggccccgctttcacggtctgtattcgtactgaaaatcaagatcaagcgagcttttgcccttctgctccacgggaggtttctg

SEQ ID NO: 5788 - DNA, 368 bp, Bos taurus
  Clone ID: 25-LIB3057-021-Q1-K1-G1
gagaaataatgactatctggaaaacctgtgtgctactgctaactaggtgtatcataagctctatgatcaagattttgtagagtgaacagtcagtacatatgttatatccttactaatttcctgggattgaacttagaggagtctattattcggggcatctatgcttatggttttgagaagccatcagctattcagcagagagctattattccatgtattaaagggtatgatgtgattgctcaagctcagtcaggtactggcaagacagccacatttgctatttccatcctgcaacagttggagattgagttcaaggagacccaagcactagtattggcccacaccagagaactggctcaacagatcca

SEQ ID NO: 5789 - DNA, 407 bp, Bos taurus
  Clone ID: 25-LIB3057-022-Q1-K1-G1
gccgaacagacccaccatgaagtccttatgagcttgattcttgggttgctgcgctccgggaatgggcctctctatcacctagtcaccgaggtgcggggtatgaaaggagccccagatgctatcctatcgagggctcctctctatcacctagtcaccgaggtgcggggtatgaaaggagccccagatgctatcctatcgagggccatagagattgaggaagaaaacaaacgacttctggaaagcatggagatgatatttggccaggttattcctggagccaaagagactgagccctaccctgtgtggtcaggacttccgtccctgcaaactaatgatgaagatgcacgttattccgctttttataacctgctccaatggctgcgcaaggattcaagcaagattgacac

SEQ ID NO: 5790 - DNA, 190 bp, Bos taurus
  Clone ID: 25-LIB3057-022-Q1-K1-G9
ttccatacctcctccctttttaccctttaatataaataacaatcccaacggtacctttataaatttcttatgaacttgattctttatttgcttcactccttaaatcaccctctctatcacctaatcacctaatttccttatattaaatgatccccatattctatactatctaataccatatatatttatt

SEQ ID NO: 5791 - DNA, 395 bp, Bos taurus
  Clone ID: 25-LIB3057-023-Q1-K1-G1
cgagagcttcctggtgaagtgtgtttcttgaaatcatcaccaccatggacagcaaaggtgcgtcgcagaaagggtcccgcctgctcctgctgctggtggtgtcaaatctactcttgtgccagggtgtggtctccacccccgtctgtcccaatgggcctggcaactgccaggtatcccttcgagacctgtttgaccgggcagtcatggtgtcccactacatccatgacctctcctcggaaatgttcaacgaatttgataaacggtatgcccagggcaaaggtgtcattaccatggccctcaacagctgccatacctgcttccttcctacccctgaagataaagaacaagcccaacagacccaccatgaagtccttatgaacttgatcttgggttgc

SEQ ID NO: 5792 - DNA, 415 bp, Bos taurus
  Clone ID: 25-LIB3057-024-Q1-K1-G9
gagcatcaaccctgatgaggctgatgcatatggtgcagctgtccaggcagccattttgtgtggagacaaatctgaaaatgttcaagacttgctgctgttggatgtcactcctctttcccttggaattgaaactgctggtggagtcatgactgtcctcatcaagcgcaatactaccattcctaccaagcagacgcagactttcaccacctactctgacaaccagcctggtgtgctcattcaggtttatgaaggtgagcgtgccatgaccaaggataacaacctgcttggcaagtttgaactcacgggcatacctcctgccccccgtggtgttcctcagattgaagtcacttttgatattgatgccaatggcatcctcaatgtttctgctgtggataagagcacaggaaaagagaac

SEQ ID NO: 5793 - DNA, 429 bp, Bos taurus
  Clone ID: 25-LIB3057-025-Q1-K1-G1
gaaacaacttgtgtcctttgatagataaatagataaagatatggtgtttatatacaatgcaagtctacccagctataaaagaattatgacatcttgccatttgcagcaaatggatggaccttgatagtattatgctaaggaaataagtcacacagagaaagacaaataccatatgatttcacttatgtgaggaatcaaaataaaacaaatgaacaaagcaaagctcataaacacagagaacatattcgtgattgccagaggggaggagcattagcagtgggtaaaatgcataaaggagatcaagaagtaacaaatttccagatataaaataaattatgccacaggaataaaatgtgtggcatatggactataatcaataacattgcatggagaaactggaagttgctaagtgagtaaaacctaaaagct

SEQ ID NO: 5794 - DNA, 351 bp, Bos taurus
  Clone ID: 25-LIB3058-001-Q1-K1-G1
gtcgtccttcaccgtggcgacgtgctattgagatgtactcgaacgttgctgcgaatcgtgtgaaatgaactggctggagattaaccaccatgtctgatgggggaccaactctatggacattgataatgcgctatatcatatctacactactcactgtactcaatatacatgaactaattctggcatttgtaaagaaatatagttatatacagaattgatttgttcggtgagtaggtgggtcggattcaaggcttacttcgttaatacgcatgattgagcatatatagctctcatgtaaagatgcgattaagtattgtcaactatgtcattgctcaggattgtggctggtaa

SEQ ID NO: 5795 - DNA, 447 bp, Bos taurus
  Clone ID: 25-LIB3058-002-Q1-K1-G1
cccacgcgtccgggctgagccaatggcacgggcccttggggcgcgaacgccctaacgtgggtcggggcgggcggcgagcagaggcgccggttgctagcttggattctgacttagaggcgttcagtcataatccggcacacggtagcttcgcgccactggcttttcaaccaagcgcgatgaccaattgtgtgaatcaacggttcctctcgtactaggttgaattactatcgcggcgcggtcatcagtagggtaaaactaacctgtctcacgacggtctaaacccagctcacgttccctattggtgggtgaacaatccaacacttggtgaattctgcttcacaatgataggaagagccgacatcgaaggatcaaaaagcaacgtcgctatgaacgcttggctgccacaagccagttatccctgtggtaacttttctgacacctctagct

SEQ ID NO: 5796 - DNA, 307 bp, Bos taurus
  Clone ID: 25-LIB3058-003-Q1-K1-G1
aagggactcaaggggcacgacgcccagggcacgctttccaaaatcttcaagctgggaggacgagacagccgttccgggtccccgatggcaagacgctgaagcccagctcccctcccagaaccccgtccccagcttcttaatacaactacctcggacaagtgagagagggtggtggaggagaggtccacctctgtccgataggccagagaatgaggaaccgcaggacacggcgcccggcctcctctcacctcttaaagcacttcctttcctaaccgatcacagtggagcggcttcgcggcgggagctt

SEQ ID NO: 5797 - DNA, 431 bp, Bos taurus
  Clone ID: 25-LIB3058-004-Q1-K1-G1
cttggaagggatggagacacaaggccgcccttgggcgatggtgctgcccactgagtacccaccatcgcctcctgcacccgatgtgatggagcccaaggaggagcagccccccatgccctcaccgcccacagaggaggaggacgaagacgaggaggacgaggagacagaggaggatgaggatgaggaggacgaggattcccagggggagcagcccaaggacgccccacccccagccccagccccccagacggccagccccaccgaggaggataggatgccgccgtatgatgagcagacgcaagccttcatcaatgctgcccaggaggcccgcaacaagttcgaagaggctgagcggtccctgaaagacatggaagaatccatcaggaacctggaacaggagatttcaattgattttggcccccaacggcgag

SEQ ID NO: 5798 - DNA, 398 bp, Bos taurus
  Clone ID: 25-LIB3058-004-Q1-K1-G9
gcccaccctgctgtggggagcacaggtgggaggtgggcgagggtaggtggcacctgtaggcactcacaggcctgggaggccttactacctgaagtctcgcgtgttctccaagtcgagacacagatgctgtgggctctgtccgcctcagtctgtggtctcttgacaggtcctgtgtcccctccctgggtgccaggctgccttccacagaggcacagcatcagctgttctgtgtacatctttgctgagagctccctgcttctgctgccctgtcctgggccctgctgcctcttgtcttcctgtcctcttctcggaccaaattcctccagctggagcagcttttgtccattcaaagactgcagcccatgtggataaaggcactttgcaggagagaagagcca

SEQ ID NO: 5799 - DNA, 335 bp, Bos taurus
  Clone ID: 25-LIB3058-006-Q1-K1-G1
tctagatcgcgagcggccgccctgttttttatcttggaatctcatacccttcatgatcgaggggtcttcacggagaaaactaaagaatgactattacccagaataatcggtcggtacggttccaaagccatggtcattgtagcaacttcaggggacactggggtgtattgctacatattgacatttgttctgctcagatatgtcgtaacgctcctgtcatgtagatctgcactattggaccgtggacaaggattgccaatggcagcatgggctcaaagtgtgcactcacaggcatggtctaacaactggtcctgtgagaccacttgcgctcatgg

SEQ ID NO: 5800 - DNA, 351 bp, Bos taurus
  Clone ID: 25-LIB3058-006-Q1-K1-G9
tctctatgttattttctcctgtttgctcactgtgtttagtcaggggacccttggtagcagaatggtgcttagtatatggtaggtgttcagtaattgtttgttgactgactgacaactgaatgaatgagcgatttggttatatacttcctagaataattctctgggatgtattattgttatatttattctttatgatgcgttttattagttcttttttttttattgtgttgtatatgtttaatctttttgcttattatttattatttatttatttatatttaaatattgttttatttttatatttttatattatttttttatttttattattttttttattttcttattttt

SEQ ID NO: 5801 - DNA, 360 bp, Bos taurus
  Clone ID: 25-LIB3058-007-Q1-K1-G1
cggacgcgtgggcttcagagataccaacgggcattgctgtgttcagtaaaaagaagtgtatacgcatcttaggtcggtatttctccaggtaaagcagctgtttggaattgaatgctcccctaagatgcgattacgcttcagagataccaacgggcattgctgtgttcagtaaaaagaagtgtatacgaaggctgacttgattgtagcatttagagggaactcttggtacctggaaatgtgaatctggaatcttaactgtgtcatcaaagtagtgatggattcagtactcctcaaccactctcctaatgattggaaaaaagcaaacacaaatccctctataacgtgaataaaatgtttaag

SEQ ID NO: 5802 - DNA, 168 bp, Bos taurus
  unsure (79): unsure at all n locations; Clone ID: 25-LIB3058-007-Q1-K1-G9
gaggcattgacataggtcataaagcattggagtttcaaatcccgcagtcccgcgggtgccacattcctgacggcgcctntttggcctgtgatgttttatccttataatgtgaataatgggcactgagcggtgcttgtattgtagagtcctgtagtcgtgtgtggtttt

SEQ ID NO: 5803 - DNA, 389 bp, Bos taurus
  unsure (347): unsure at all n locations; Clone ID: 25-LIB3058-008-Q1-K1-G1
gaagaaaggaaaactccgttatgttgcaaatctgttcccgtataaaggatacatctggaactacggtgccatccctcagacttgggaagacccaggacacaatgacaaacacactggctgttgtggtgacaatgacccaattgatgtgtgtgaaattggaagcaaggtgtgtgcacgaggggagattatcagagtgaaagttctgggcattctggccatgattgatgaaggggagaccgactggaaagtcattgccattaatgtggaagatcctgatgcagccaattacaatgatattaatgatgtcaagcggctgaaacctggctacctggaagctactgtggatnggtttaagaggtacaaggttccagatggaaaaacctgaaatg

SEQ ID NO: 5804 - DNA, 397 bp, Bos taurus
  unsure (295),(304),(307),(344): unsure at all n locations; Clone ID: 25-LIB3058-009-Q1-K1-G9
ggcggcgcaggaggaggaccgcaggaaggagctggaggcgcatgagaagcacaagaagctcttcgagggcctgaggttcttcctgaaccgcgaggtgccccgcgaggccctggccttcgtcatcaggagttttggggggatcgtgtcctgggacaaatctctgtgcatcggggccacctatgacgtcacagaccccagcatcacccaccagattgtcgaccggcctgggcagcagaccccggtcattggcaggtactatgtgcagccccagtgggtgtttgactcagtgaatgcncagctcctnctncccgtggcagactacttccctggggtgcagctgcccncacacctctcacccttcgtgacagagaaggaaggagattatgtgcccccggag

SEQ ID NO: 5805 - DNA, 138 bp, Bos taurus
  Clone ID: 25-LIB3058-011-Q1-K1-G1
cggacgcgtgggttattttgtatgttaatttattgtccttaaggtgaccagcagcttggtcccagtgtctgttgttccctggaattcatcctcccatgtgtcctccactaataccccaataaagtcctcttccccacc

SEQ ID NO: 5806 - DNA, 401 bp, Bos taurus
  Clone ID: 25-LIB3058-014-Q1-K1-G1
gctgcccgagaaacggcgtgatgaccgccgaggagacgaaggcggccgagagcggagcgcagtcggcgccgctgcgcctcgaaggggtggacatcagccccaagcaggatgaaggggtgcttaaggtcatcaagcgagagggcaccggcacagagacacccatgattggggaccgagtctttgtccactacacaggctggctgctcgatggcaccaagttcgactccagcctggaccgcatggacaggttctccttcgacctagggaaaggggaggtcatcaaggcttgggatattgctgtagcgaccatgaaagtgggtgaagtgtgccatatcacctgcaagccagagtacgcctatggcttagcgggcagtcccccgaagatccctaccaacgccacg

SEQ ID NO: 5807 - DNA, 401 bp, Bos taurus
  Clone ID: 25-LIB3058-015-Q1-K1-G9
cggactcgtgtgcgctggacttacctgtgcatcaccaactcccggagtttacttaaacgggtggacatcttgttggggatgccatccaaccatttcatcctctggtgggccgttctactgccggcttcaatattttccagcatagcggtctactgcaatgagttgattcttcacatccaaggccagaataatggagcttcagccttaacagcaggccttccaatgaatatttgggactgagctactttaagaatgactgggtggatctccttgcagtactagggaccctagcagatcataagcatcgagtctttggtccgctatctgtataggccaactctgacatccatacttgactactggaaaaactgtagctttgactagatggacctttgttgata

SEQ ID NO: 5808 - DNA, 328 bp, Bos taurus
  Clone ID: 25-LIB3058-016-Q1-K1-G1
atcgaccgcctaagagtcgcgctgtaagaagtaacaacctcttctctccgccatctgctcggcagccgcgaaacagcaactatgcgtgagtgcatctccatccacgttggccaggctggtgtccagatcggcaatgcctgctgggagctctactgcctggaacacggcattcagcccgatggccagatgccaagtgacaagactattgggggaggagacgactccttcaacaccttcttcagtgagacaggggctggcaagcatgtgcccagggcagtgtttgtagacctggaacccacagtcattgatgaagttcgcactggcacct

SEQ ID NO: 5809 - DNA, 358 bp, Bos taurus
  Clone ID: 25-LIB3058-017-Q1-K1-G1
cgtccgtttatatctgggttaagtgtttatcatatatatgggtactttgtaatatcagaaacggaaatggaatcctgctcacaaaatcactttaaaatcttttttaagctgtttgatcttctttttcctgatgttgctgacactgcagaattgtacagaactcccacgggcctgtactaacctggctcaaggtctctcgctgttggactattgctttcgggatatgccataagcgtgacaaataatccagaaaggggaaatcattaagtggggagcgttgcgagctgtcttcttcttgggttctatatgtattttaggatggatgtatgtatgtattattattactggccagaaggtc

SEQ ID NO: 5810 - DNA, 469 bp, Bos taurus
  unsure (79): unsure at all n locations; Clone ID: 25-LIB3058-018-Q1-K1-G1
agccttcggttttactttatcccaatcttcctaacctggtagtcattccttttgaaaaccaaacagaaaaagacctcangcggacaggccattcatttcccttctaagaccttcattgcctttgctttctttcttctgcgtgccttttcctctcccttcctcccctttcctgagggtctggatccaggagaaagatccatttccttccctgccacagcagaggcattgggaaagaagccaagccactgacccaggatggcccagcacttgtggggactgcccaggaatagccccttgcttctgtagcccccccagtgacccaaaaggtcctctttctccccaaagcagacgtcgcatatagggcaacagtagaccctctgcttccagtgagtctgctggtgccggatcagcccggagaataaagtgaaggacttgccacagtggaagcagcggttggactgctctgtga

SEQ ID NO: 5811 - DNA, 454 bp, Bos taurus
  unsure (409): unsure at all n locations; Clone ID: 25-LIB3058-019-Q1-K1-G1
ggaggcagagcgtctgactacaaatcggctcacaagggactcaaggggcacgacgcccagggcacgctttccaaaatcttcaagctgggaggacgagacagccgttccgggtccccgatggcaagacgctgaagcccagctcccctcccagaaccccgtccccagcttcttaatacaactgcctcgacgctaaccattgtctaaattcccaagtgcagcaggcatccccccaccctgcccacatgcgcgtcctgcaggctcctggccagcggctcaatggagaagacggtgcagctgtcagctcacccttgaagatcagcgaggtccctgagggtccagggtgggcgacccttcacgcccaccttctgccctgggacggccttggacgcggccctggggaccctgccgncgggcccccatgcagagtgtggagaccggcctgtggctctgagct

SEQ ID NO: 5812 - DNA, 433 bp, Bos taurus
  Clone ID: 25-LIB3058-019-Q1-K1-G9
cggacgcgtgggcggacgcgtgggcatcgctggactgacggttgctttgagcccacaggagctccctttttggatcgtgcagacaggtgcgttctgaaggaggcattgtcgtttgcttgcctgtctaggtgaattgcaggcgaaagcctcagaaagttagagaggagaattagccacacaggctacagttggtatttaaatggtccacttcaaaccagctgctagtgttttgttaaagcagtacatctgtgcatgcaaaagtgaattcacccctccctcttctttcttagctaatggaaaaccattaagggaagctgggacgagagaccacttgctcctttccatcagcttaataattaactttaacgtgaggtttcagtagcaccttgttcgcctctttaaattatgacgtgcacaaaccttcttttcaatg

SEQ ID NO: 5813 - DNA, 324 bp, Bos taurus
  Clone ID: 25-LIB3058-020-Q1-K1-G1
gctaccccatagacaccagcccaccaggctcccccatccctgggattctccaggcaagaacactggagtgggttgccatttccttctccaatgcatgaaagtgaaaagtgaaagtgaagtcgctcagtcgtgtccgactcctagcgaccccatggactgcagcctaccaggctcctctgtccatgggattttccaggcaagagtactggagtggagtgccgttgccttctccaggctgactctctagtaaggtactaatgcagctgatggtttgatgatgaagtcagtggctcatctacaaatctgaaaatcccagtggccctt

SEQ ID NO: 5814 - DNA, 471 bp, Bos taurus
  unsure (428): unsure at all n locations; Clone ID: 25-LIB3058-021-Q1-K1-G1
cggacgcgtgggtggagcttggagtccacattgcagatgtgacgcactttgtagcaccacactcctatattgacattgaagctaggacaagggccaccacttactacttagcggaccgtcgctatgacatgctgcccgccatcctcagcgctgacgtgtgctccctcctgggaggtgttgataggtatgctgtaagcgtgatgtgggaattagataagacctcctatgaaattaagaaagtatggtatggcagaaccattattcgatcggcatacaaactgttttatgaagcagcccaagacttgctggacggaaacttcagtgttgtgaaggatattccggaattcaaggacctggatgagaagagccgacaagccaagctggaggagttagtgtgggcgatcagaaagctaactgacatagcccgncacatccgagccaagcgagacagctgcggtgccctggaacctg

SEQ ID NO: 5815 - DNA, 383 bp, Bos taurus
  Clone ID: 25-LIB3058-023-Q1-K1-G9
cggacgcgtgggcccacgcgtccgatttaaaagcagaagctcgtcagctaggatttccttctgcataaggtttttttgtagtgtaatgtcttaatcatagtctaccatcaaatattttaggagtatctttaatgtttagatagtatattagcagcatgcaataattacatcataagttctcaagcagaggcagtctattgcaaggaccttctttgctgccagttatcataggctgttttaagttagaaaactgaatagcaacactgaatactgtagaaatgcactttgctcagtaatacttgagttgttgcaatatttgattatccatttggttgttacagaaaaattcttaactgtaattgatggttgttgccgtaatagta

SEQ ID NO: 5816 - DNA, 400 bp, Bos taurus
  Clone ID: 25-LIB3058-027-Q1-K1-G1
gtgcgttggcccgtcaactaccgcctcatcaacgccaagaagcaggcactgcacgctggcgtgggcatatggatggtcggctgcatcctgtccaccctgccctccatcggctggcacaacaatggctagcgctactacgcccgtggctgccagttcattgactacaagatcggactatgctttcgcgtctgctatagcctaccgctgattcttggcatcgtactggtacctgtctgacacggccattacctgactacacaccaaacttgcggcccagaccacgagagattggcatgccctgatagctgtatttatgtatgtctctttagatgggttttcctttttggcacttgactcatgatttaaaaactggaacagttatagtgacagcatttaatta

SEQ ID NO: 5817 - DNA, 395 bp, Bos taurus
  Clone ID: 25-LIB3058-031-Q1-K1-G1
ctgctgtgagtccacaagccgctttctctgctgtctgacccgctcggctccgcgatgccggtggaccttagcaagtggtccgggcctctgagcctgcaggaagtggatgagcggccgcagcacccgctgcaggtcaaatacggcggggcggaggtcgacgaactgggcaaagtgctgacacccacccaggttaaaaaccggcccaccagcattacatgggatggccttgatccaggtaaattgtacaccttggtcttgacaggaaattccggatgctcccagcaggaaggaccccaaatacagggaatggcaccatttcctggtggtcaacatgaagggcaacatcatcagcagttgtcacggttctcttcgattatgtgggctctgggtctttc

SEQ ID NO: 5818 - DNA, 430 bp, Bos taurus
  Clone ID: 25-LIB3058-031-Q1-K1-G9
ggcaagtgatcatgaccattgagctcctgtacaccgaggaagcccagacggaggaccctgtggaggtccagcacctggctcggtacgtggagcagtacgtgggagcggagggcgcctccagctcgcccaccgagggctttcttttgaatcccgtgtttctgcataggtaccttatgaagtttcgtctgtgtttttttttagtctttatttgctcatttttgtttgttctatttctcttttttttttttttttttttatattatttttattttttattcttcatttttttttttctttttattattttttttttattttgtttgtttcttttattttttctatttattttttttttatttttgtttattttttttttttttttttcttttttttttatattttttatttttttattttttttttttttttt

SEQ ID NO: 5819 - DNA, 431 bp, Bos taurus
  Clone ID: 25-LIB3058-034-Q1-K1-G9
gccgtaaatagttacccttgactcgatattttatctgttcagtactgtagctaaaataggaaaagcaaatacaaagttcaaaaacaaagatatagtattgctattctgactaatgtcaagccttttttgagagcataaacttgaaaactaaagctcaaaagagatttacattttcctcctctttttacctttgagacaatagacttgtttagaagtcgcatcttcagtggactactgaatttggaaaagatatcaagttatgtctatttggtgaactttatttttatcttctgttctagattatcatggattagtctgaaatttaaaattctgaccagtctattttcatcttttttttttccagttttcaaaatatttacactgtgcatatacaaaattccagttacatgataattgtatcatattggtgt

SEQ ID NO: 5820 - DNA, 406 bp, Bos taurus
  Clone ID: 25-LIB3058-035-Q1-K1-G1
ctagttctagatcgcgagcggccgccctttttttttttttttttttttttttttttttgtttttttacaagacagataaatctactttaatattcacatgtaaaagttacacatcacaagagattggacagtagtttagcagttaactaacatagctatagggaaaatcatttttataaaaaaataatctagatgcggtcatcaaaatttttggtctacttaagttaatgtttgaagatcgacttttatccctgcttgaaggatttgccattatgccttaaaattttttttttctcccactgttgcctattaatattctttggaggaaggaaagcagaaagtgttcattgccaagagtttgtcctttggtagcaagcagagaacatttttcatttctatgatttaa

SEQ ID NO: 5821 - DNA, 453 bp, Bos taurus
  unsure (27)...(28),(60),(71),(73),(77),(82)...(83),(130),(133),(143),(151),(391): unsure at all n locations; Clone ID: 25-LIB3058-036-Q1-K1-G1
ccggcccgacccattcgtccgccgganntttgctttttgaaaccatgcttccaattttcncaccaaaccgngncaanacgannggaagcaaacgccaactggaagaccaggcccagaaaggcataacaancanccaaaggaangccaaggngcgcttccactccagctgcaccattagtggccatgatggtgccagtcagacaatgttaaccagattaccgagtgtttaccacatcatcaatcttcagaatgctccggacagtttcagttgctagagtcagtgcactgactgaaaccaacagaggctggacaaccagttcctccagtatgttggaaataccaccctttcggacattaatgcctgtagttatttctccctgagcatgccggnttcttagttctgttacagtagaaatgggattcaggccaagcgtttcagctagtgtagatgga

SEQ ID NO: 5822 - DNA, 426 bp, Bos taurus
  Clone ID: 25-LIB3058-040-Q1-K1-G9
ccacgcgttcgtggggacctggagggacggaagggcagggtgagagcaaaggggcgggaccctggctgcgggggcctcccctgaccccctgtccccgctgctggggtcctcgggcaagcccccttctcactggactgagagatgaggctgagctgggtcttgacagtactgtccatctgcctgagcgccctggtcacggccacagggaccgagggcaaacggaagctgcagatcggagtcaagaaacgggtagaccactgtcccatcaaatcgaggaaaggggacgtcctgcacatgcactatacggggaagctagaagatggaacagagtttgacagcagcctgccccagaaccagccctttgtcttctccttgggcacaggccaggtcatcaaggggctgggaccaaggggctgctagggatgt

SEQ ID NO: 5823 - DNA, 299 bp, Bos taurus
  Clone ID: 25-LIB3058-042-Q1-K1-G1
gacccactcgttcggtgagaggtcatgattcgagagcaggatctcttctcacctctctgctctccacgactacgaccggagtggacagctggatggcctgcagctgctgtccatgttgacagacgctctggcccctggagcttctgactctcccaccaccaacccggtgatcctggtagtggacaaggtgctggagactcaggacctgaatggggatgggcttatgacccctgcacagcttgacaatttccctggagaggctccgaggcacacagagcccatagagcctacggagccac

SEQ ID NO: 5824 - DNA, 200 bp, Bos taurus
  Clone ID: 25-LIB3058-044-Q1-K1-G1
aggacgcgtgggaaaaaaaaaaaaaagttaaaaatttaaaaaaaaaaaaaaaaaaaagacaaaaaaggaaaaaaagcaaaaaaagaacaaaaaaaaaaacaacaagacgatacacacaaaaaaaaaagaaaaaggagaaaaagcatgcagaccaaaagagcacggagaccgtcctgtaccggaagatgctgggcaaccgc

SEQ ID NO: 5825 - DNA, 438 bp, Bos taurus
  Clone ID: 25-LIB3058-045-Q1-K1-G1
ctgacgtcgcagcgcgtggtggacgtcttcctgggggccttcggggcctgcgccgcttcccagggctgcatgaacaacgtgaccttgggcaacgcccacatgggctactacgagacggtggcgggcggtgcgggcgcgggaccgggttggcacgggcgcagcggcgtgcacagccacatgaccaacacgcgcatcaccgaccccgagatcttggagagcaggtacccggttatcctgcgccgcttcgagctaaggctggggtccgggggtcgcggccgcttccggggcggcgatggcattatccgtgagctgcttttccgcgaggaggcgctgctgtccgtgctgactgagcgccgcgccttccagccgtatggcctgatggggggtgagcctggtgcccggtgcctaaacctactcatccggaaggactgccggaca

SEQ ID NO: 5826 - DNA, 412 bp, Bos taurus
  Clone ID: 25-LIB3058-051-Q1-K1-G9
attggccgtagcatttcttacgttagtttaacgaaaagttctaggctatatacaactgcgaaaaggtccaaatgtcgtaggtccatatggcctacttcaacccatcgccgatgcaatcaaacttttcattaaagaaccactacgacccgctacatcttcagcctcaatatttatcctagcacctatcatagctttaggcctagccttaaccatgtgaaatcccctaccaataccctatccatttatcaacataaacctgagagtcctatttatactagccatatcaggcctagactgatactccattctctgatcaggctgaacttacagcttaaaatacgcacttaacctagccctactagcatgttgtcagacaatcttataccaagtatcgcttgcaattattctgtta

SEQ ID NO: 5827 - DNA, 394 bp, Bos taurus
  unsure (369): unsure at all n locations; Clone ID: 25-LIB3058-052-Q1-K1-G1
aggcattaaaaaaaaaaaaaagaaagtataagatttggaaaaaaaaaaaaaagcctcaaaactttatatccttatcatgcaacttccgtatgaatggctttaatgtcatctgctagtagaccataggagaaggcaatgaaagcccactccagtgttctcgcctggagaatcccagggacagaggagcctggtgggctgccgtctatggggtcgcacagagtcggacacgactgaagcgacttagcagcagcagcagcagaccataaaaaaacagtgttgtcattaatgttgaaaatttacattagtcatccgtgcactctgagtaactgacaaggtactttggaattttgtctgtcaacagctacactngttttaagttggaaaggtagttttt

SEQ ID NO: 5828 - DNA, 439 bp, Bos taurus
  unsure (413): unsure at all n locations; Clone ID: 25-LIB3058-052-Q1-K1-G9
ggcatttggtacatccacagtgttgtgagactatcatctctatcattttcatcaccccaaagaaaatcccatgccctttaagcaatctctccatttctccttgccccctctccctgctctgacaactgttaatctgcttcccatctctatggatctgcctattcttgatattttatataagtggaatcctacagcatgtgttcctttcgtgtctggctcctttccgtatgatatttatggttgaatattcatatatatacatatcacactttgtttattcttttattggttaatggacatttgggtattttccatctctattgtggataacactgctacgaacatttgtgtgccatacatacttttaaagtaactctattttttacttaataatatatttggggactggcttncttcagcttgtaaaaaaaatcacacc

SEQ ID NO: 5829 - DNA, 329 bp, Bos taurus
  Clone ID: 25-LIB3058-056-Q1-K1-G1
ggacgccgggtgtgcgagagcatccggttacgccgggcgggaggtggaccgggaagacctaacctaggttctgtggatttgaacctccgcatttctaacccaagatctcgaaatgcatcgtgattcctgtccattggactgtaaagtttatgtaggtaatcttggaaacaatggtaacaagactgaattggaacgagcttttggctattatggaccactccgaagtgtgtgggttgctagaaaccctgccggctttgcttttggtgaatttgaagatccccgttacgcatctgatgctgtccgagagctagatgggagaacactctgtg

SEQ ID NO: 5830 - DNA, 454 bp, Bos taurus
  unsure (181),(244),(385): unsure at all n locations; Clone ID: 25-LIB3058-057-Q1-K1-G1
gcggctgcggcctctgccgaccgtgatcgtcatccgcacctgcctgccccagagaaggagcagagatttccgcgtggtggtgctcggctcggccggcgtgggcaagagcgctctggtgcaaaggtgggtgcgcggcaacttccgtgaggcgtacctgccgaccatcgaagatacctaccgncaggcgctaggctgcagccacaaagcgggtgcgctgcacatcaccgacaccaccggtggccgncgctaccggggcctgcagcgccttgccatttgccagggtcacgccttcatcctggtttattctatcaccaggaagcaaaccctggaggagctgaagccgctctttgagctgatccgtcaactcaaaggtaacaacccgcanaagtgccccgtcatcctggtgggcaacaagtgcgatgagagccgtcgggaggtgagtgagaaggaaggt

SEQ ID NO: 5831 - DNA, 402 bp, Bos taurus
  Clone ID: 25-LIB34-001-Q1-E1-G9
aaaacctggaaggaactttctgggccaacccaagtttttctactctttgtttaacttttatgaacttgccgttttctataacacaatttggttttattaagagttatgctgttttcgctttagttccagtgtacctgaattacattaacctagaaaaatacgtttggtttgttgttttaacctctgaaaattagagaaacagaaatttcttggaatttcagtgtttttccaaagacagaaaagaaggtttataaagtattcagaatgttccaaaatttacattgagaaaatattctaggatttaaataacctgtcagtgactttgtagacttaatggtcttatattagaagaattaattttactgcaatttggaaagcatttggtttctcttttgtacagta

SEQ ID NO: 5832 - DNA, 232 bp, Bos taurus
  Clone ID: 25-LIB34-002-Q1-E1-G1
aggctgctgcctcatccacagcttctgatagatccaagaggactctcctctctcagactacctgtcaccatggcccaccagtttccagccctcacttcagaacagaagaaggcactctcagaaactgcccgacgcattgttgccaatgggaaggggatcctggctgcagatgattccgtaggcacgatggggaaccgcctgcaaaggatcaaggtggagaacacggaagaga

SEQ ID NO: 5833 - DNA, 416 bp, Bos taurus
  Clone ID: 25-LIB34-002-Q1-E1-G9
atattttcatagagtctttatggaaaaatcaaatttattttccactcttgtagctgtggctgctgcatgttttctccttgactcatttacccatgagttgttatggaattggatttgaggtttcaaaccaaggattttgattttagcttagaatttagaggcattaaggctatgtcttctgatcaaaacattttagtgacaaacctgctgtgaggacacattgttaggcaatttggatcttaaatttatgcgactagttttagacaaaatgataaagaaaaatcgagtaatttcaaaatgtttttcttgagtccttgattcttttagtatctcaaatgttaattagaataattggaatcactttttagatttttcaaattaccttccttgggaagtttgtgcagtgttatagttta

SEQ ID NO: 5834 - DNA, 267 bp, Bos taurus
  Clone ID: 25-LIB34-003-Q1-E1-G1
tcggttggccactcgcaggccatcagatgactgttctgtggggtgccctggtggtcgcgcttctggcaggatgccatgcggctatggggggagagctggggcccgatgagcacctgactactcatgagcatcggcggaacgacagccagccttgagagcaggcgctgggccgcgtctgggattacctgcactgggtgcagaccctgtctgaccacgtgcatgaggagctgctcatcacgcaggtcaatcacgaactgacggttctga

SEQ ID NO: 5835 - DNA, 278 bp, Bos taurus
  Clone ID: 25-LIB34-003-Q1-E1-G9
acgacatcgcgagcggacgcccatgtatgcatatttcatcatacacagctgaaaggaaactcacatgagggaatctccaataagagtggttatgcaataaacccaaacttttcggtggaaacctgagttcgccgggatatcaagctggcgcccctcaacctaggtggaaattattcacatagccagttaaacacgctgggggttccaggcccaacacctcaacgtccttttggaacggtacgatcatatgcaaacggagtatgtcccttgggtcacca

SEQ ID NO: 5836 - DNA, 363 bp, Bos taurus
  Clone ID: 25-LIB34-004-Q1-E1-G1
aagaaactgtattgatgttaccacaaacatcttcttttgattctctttgtgcctggtttctctgtagtgtggtctgtgttggcagtaagccacagtggaggtgctatgctggcatcttagaggtgtggagggaagaactctgacgtccaacatcaacatcttggtcaagtaaagtcttcagggtgttttgcgcacaaattatagtcagatagctatgcatgtttagagtaaatctccaatttgtaattttccttaaaattttgcaaaatgtggtaacagatatttgccaaaattattggaaaaatgttatggtggatggcattttttcatataaaattatatttagttcggttgaaacatggc

SEQ ID NO: 5837 - DNA, 387 bp, Bos taurus
  unsure (77): unsure at all n locations; Clone ID: 25-LIB34-005-Q1-E1-G1
ctaaaccagaactgtgtgattttgttgttttataattggaaagactgaactatggatttgggagaccactgacttanggaagttgatgtggaatacagatagttgctggaaataacactgacaacttcaatgcaaaatgaagttctttctgttgctttcagtcattgtgttctgctgggctcagtatgccccacacaccaaaactggacggacatctattgtccatctgtttgagtggcgctgggtcgatattgctcttgaatgtgagcgatacttagcccccaaaggatttggaggggttcagatctccccacccagtgaaaatgctgtgattactgacccttcaagaccttggtgggaaagatacaaccagttagctacaagtta

SEQ ID NO: 5838 - DNA, 203 bp, Bos taurus
  Clone ID: 25-LIB34-006-Q1-E1-G1
gtttcaactcaaacagccttagcctaaacacgacacaaccacaggcatctcagcctaccctgagagtaagaggaaaaaagagaaatgaaaactcagagcttattcatctgttttccttttctgttggtgttaaaccaacactctcactaaagaacgtaaatttctttaaatattttgcttcttttgtttgtgctacaattaat

SEQ ID NO: 5839 - DNA, 329 bp, Bos taurus
  Clone ID: 25-LIB34-006-Q1-E1-G9
agaagctgctgcatgaatttcctaaaagtactagaagccttaaaaaagcgtggacagaacatcaggaatacggattaatcattgatggctccactctgtctcttatattaaactctagtcaagactctggttctaacaattacaaaagcattttcctacagatctgcatgaagtgcacagcagtgctctgctgtcggatggccccgttacagaaagctcagattgtaagaatggtgaagaatttaaaaggcagcccaatcacactgtcgataggtgatggtgccaatgatgttagcatgatcttggtatcccatgtgggcataggtatt

SEQ ID NO: 5840 - DNA, 333 bp, Bos taurus
  Clone ID: 25-LIB34-007-Q1-E1-G1
gggtcgaggcacgcgtccaatcttatttttttaatggttcattcctttgtacagagcctctctctttgggcaagagtacacacacactaacgctttctctgccctcctgcacctttccacagtacctgctaagtttgtattcaatggtgtttttgttttgttactccaacatgacaccagacttggagatataatttttattacttttttttactactatttaaagcttcacagagggccctttattccctcatttgcctttcttcagtttttttttccccccagtgccttgtttttttcattcatccaagtttcccgctcaagaccttgggg

SEQ ID NO: 5841 - DNA, 425 bp, Bos taurus
  unsure (387): unsure at all n locations; Clone ID: 25-LIB34-008-Q1-E1-G1
tgaaagtggactaaatgtgactctcaccattcggctgcttatgcacggaaaggaagtatgaagcatcattgggaagaaaggggagtcggttaagaggatccgcgaggagagtggcgcgcggatcaacatctcggaggggaattgcccggagagaatcatcactctgaccggccccaccaatgccatctttaaggccttcgctatgattatcgacaagctggaagaagatatcaacagctccatgaccaacagcacggcggccagcaggcccccggtcaccctgaggctggtggtgccggccacccagtgcggctccctgattgggaaaggcgggtgtaagatcaaagagatccgcgagagtaccggggcccaggtccaggtggcggnggatatgctgcccaactccaccgagcgggccatcacca

SEQ ID NO: 5842 - DNA, 358 bp, Bos taurus
  Clone ID: 25-LIB34-009-Q1-E1-G1
agagcgccatggccgccttacgtgccctgctgccccgcgtccgcgccccgctgcggccctggctcttctgcccggtgcagcgctccttcgcctcgagcgcagcctttgagtacatcatcacagcaaagaagggaaggaacagcaacgtggggttgatccagctgaaccgccccaaggccctcaatgcgctctgcaacggcctgatcgtggagctcaaccaggcactgcaggccttcgaggaagacccagccgtgggggccattgtcctcacaggcggggagaaggtatttgcagctggagccgacattcaagaaatgcagagcctcaggttcacaaactgttactctggcgggttttt

SEQ ID NO: 5843 - DNA, 395 bp, Bos taurus
  Clone ID: 25-LIB34-009-Q1-E1-G9
atggaggcggcggtggctgtagcggcgtgacaggagccccatggcacctacccagccccaccttagcccatcttgacaaagtcctaggctccatggagccaccacggggcccccctgctaacggggccgagccctcccggtcagtgggcaccgtcaaagtgtacctgcccaacaagcagcgcacggtggtgactgtccgggatggcatgagtgtctatgactctctagacaaggcactcaaggtgcggggtctcaatcaagattgctgtgtggtttaccggctcatcaaggggcgaaagacagtcaccgcctgggacacagccattgctcccctggatggcgaggagctcattgtggaggtcctcgaagacgtcccctgaccatgcacaattttg

SEQ ID NO: 5844 - DNA, 324 bp, Bos taurus
  Clone ID: 25-LIB34-010-Q1-E2-G1
gaccttcaagatgtcgaagcgaggacgtggtgggtcctctggtgcgaaattccggatttccttgggtcttccggttggagccgtgattaactgtgctgacaacacatgagccaaaaatctatatatcatctctgtgaaggggatcaagggacgattgaatagacttcctgctgctggtgtgggtgacatggtgatggccacagtcaacaaaggcaaaccagagctcataaagaaggtacatccagcggtggtaattcgacaacgaaagtcataccggagaaaagatggtgtgtttctttactttgaagataatgcacgggtcat

SEQ ID NO: 5845 - DNA, 426 bp, Bos taurus
  Clone ID: 25-LIB34-010-Q1-E2-G9
ccatcgtccacagtgtctttgagttcctggccttcaagaatgatatccagttctggaacagccggcagtccctggagggcctgtccgtgcgctccgtcttcttcggcgtcttccagtccttcgtggtcctgctctacatcctggacaacgagactaacttcgtggtccaggtcagcgtcttcattggggtcctcatcgacctctggaagatcaccaaggtcatggatgtccggctggaccgggagcacaaggtggcagggctcttgccccgcccgaccttccaggacaagtccacatacgttgagtcctcgaccaaagtgtatgacgacatggcgttccggtacctgtcctggatcctctttccgctgctgggctgctatgccgtctacagcctcctgtacctggagcacaaaggcttgtactcct

SEQ ID NO: 5846 - DNA, 357 bp, Bos taurus
  unsure (283): unsure at all n locations; Clone ID: 25-LIB34-011-Q1-E1-G1
agacaacactctcttccctagcccagccaggtgtagccattacctttcctgactttcaggactcagatctcattgcaactgtgatgcctaatacactaccacctcacacagagagtgatgatgactggatccctgacatccagacagagccaaatagccttgcatttaaattgatttcagattttccagaaacaacctcccccaaatgtcctagtcgcccctggaagccagttaatggagtgaatccaactgtggaaatgaaagagtctcatgattttgatcntgttgatgctcctctttaatttaggcagccaggggtatttctttaacatctcatcaacccctgtccccattgtc

SEQ ID NO: 5847 - DNA, 418 bp, Bos taurus
  Clone ID: 25-LIB34-011-Q1-E1-G9
gaaccatacttcggctactcaggggcctttaaatgtctgatggagggcgctggggatgtggcctttgtcaagcactcaacggtattcgacaacctgcctaacccagaagacaggaaaaactatgagctgctctgcggggacaacacccggaagtctgtagataattaccaagaatgctacttggcaatggttccttcccatgcggttgtggctcgaactgtgggcggcaaggaggatgtgatctgggaacttctcaatcacgcccaggaacattttggcaaagataaaccagacaatttccagcttttccaatcccctcatgggaaggacctgctgtttaaggactctgctgatgggtttttaaagattccttctaagatggattttgagctgtacttgggatatgaatatgtcactg

SEQ ID NO: 5848 - DNA, 217 bp, Bos taurus
  Clone ID: 25-LIB34-012-Q1-E1-G1
cacgcgtccgatgaacattcattgacgatactttaaaatgtcatctttgcttgtaccagatttcttactttgaatttttaaaaatcactttcccatttaaagttttataatgactacatttattttaaaatagctaactctgtgattttacattctattgtaattcacaagcatttagatctttagtataattaataaacatttagatcttcatttt

SEQ ID NO: 5849 - DNA, 248 bp, Bos taurus
  Clone ID: 25-LIB34-013-Q1-E1-G1
acgcgtccgactgacaacccactccagtattcttgcctggagaattccatggatagaggagcctggcaggccacagtccttggggtcacaaagagttggagatgactgagtgacattcagttcactatggttagaataatacagcatctcagtgtgtgagagataagatattaatggcattgtaagttaagacacaacgttagttgaatgtgcactactatttcgaattaatagatagacgtgagttc

SEQ ID NO: 5850 - DNA, 419 bp, Bos taurus
  Clone ID: 25-LIB34-013-Q1-E1-G9
acgcgtccgaaaaactattggcacaatgaagtgggtgacttttatttctcttctccttctcttcagctctgcttattccaggggtgtgtttcgtcgagatacacacaagagtgagattgctcatcggtttaaagatttgggagaagaacattttaaaggcctggtactgattgccttttctcagtatctccagcagtgtccatttgatgagcatgtaaaattagtgaacgaactaactgagtttgcaaaaacatgtgttgctgatgagtcccatgccggctgtgaaaagtcacttcacactctctttggagatgaattgtgtaaagttgcatcccttcgtgaaacctatggtgacatggctgactgctgtgagaaacaagagcctgaaagaaatgaatgcttcctgagccacaaagatg

SEQ ID NO: 5851 - DNA, 109 bp, Bos taurus
  Clone ID: 25-LIB34-015-Q1-E1-G1
taggcaaaccaggtcctataaaccatcattgactatggaaatactttctaagcaatcaagagttagacaacattcttttatcttttcccatctatctttcaagattggc

SEQ ID NO: 5852 - DNA, 315 bp, Bos taurus
  Clone ID: 25-LIB34-016-Q1-E1-G1
tgctcggtcacccaatgactcggggctttatcacacattccggctcccatggcatttatgaaggaatatgcaatggcgttcccatggtgatgatgcccttgtttggtgatcagatggacaatgcaaagcgcatggagatccggggagctggagtgactttgaatgtcctggaaatgagttcataagatttagagaaagccttgagagctgtcatcactgagaatacctataacgaaaacatcatgcgcctctccagacttcacaaggaccgccccatagaagctctggacctgactgtgttctgggtggagtttg

SEQ ID NO: 5853 - DNA, 385 bp, Bos taurus
  Clone ID: 25-LIB34-017-Q1-E1-G1
ggacaaagcaagagttccacacaggtaaacttgtcactactaaaggagataaagagcttctgattgataatgagaaggtcacctctggtcacacaactaccactcgtcgttcatgctctaaagtcattacaaagacagttacaaatgccgacggtcgcacagaaacgaccaaagaagtggtaaagtctgaagatggttctgactgcggtgacgcggacttcgactggcaccatacttttccttcgaggggtaacctagatgatttctttcatagagacaaggatgatttcttcacccgtagttcacacgagtttgatggtaggacaggcttagcacccgaatttgcagccttaggggaatcgggctcttccagtagtaaaacttc

SEQ ID NO: 5854 - DNA, 399 bp, Bos taurus
  Clone ID: 25-LIB34-019-Q1-E1-G1
cacatcctgttattttaactctaagaatttttaaaaatacttaaaatggcatatcacacttaaaataaacataattctttaatattatccaatatcaattattactcccctgctactgctgctgctgggtcgcttcagtcgtgtccgactctgtgtgaccccgtggacggcgggcaccaggctcccccatccctgggattctccgggcaagaacgctggggggggttgccatttccttctccagtgcatgaaaattaaaagtggaagtaaagtcactcaatcgtgttcaactcttagggtcctccatccaagggaaattccaagcaaagttctggaatggggtgccaatgccttctccgaatattcccctacgttgtgcctaaacttaaaaaatttttt

SEQ ID NO: 5855 - DNA, 420 bp, Bos taurus
  Clone ID: 25-LIB34-020-Q1-E1-G9
gtcgacgacgcgtccggcctgggtcttggacaaacttaaagctgaacgtgagcgtggtatcaccattgatatctccctgtggaaatttgagaccagcaagtactatgttaccatcattgatgccccaggacacagagacttcatcaaaaacatgattacaggcacatcccaggctgactgtgctgtcctgatcgttgctgctggtgttggtgaatttgaagccggtatctccaagaacgggcagacccgtgagcatgcccttttggcttacaccctgcgtgtgaaacaactaattgttggcgttaacaaaatggattccactgagccaccctatagccagaagagatacgaagaaattgttaaggaagtcagcacctatattaagaaaattggctacaaccccgacacagtagcatttgt

SEQ ID NO: 5856 - DNA, 415 bp, Bos taurus
  Clone ID: 25-LIB34-020-Q1-E2-G1
actagttctagatcgcgagcggccgcccttttttttttttttttcattttaaagaatagtgctttattggataagtttttattcacagaaaaataagctttaatctatgataactgccagattatacagtagaaagcaattttcttagttttccatactgatggaaaagtttctactaaatgaaaacagccataaaattatatttacaaatatagtactctatctcacacatttcacgtgattatttacaacactattacaatgacataagaatcagtcattctgtcaggttagatataaagtacaaaggtaatgcaaaatcttctaacaaaaattacattaaagcaattgttacatcaaataaaaatgcaaatttgttgctaagtatagacagaatgacaaaatatacttacat

SEQ ID NO: 5857 - DNA, 356 bp, Bos taurus
  Clone ID: 25-LIB34-020-Q1-E2-G9
gcatgggtcatggtatcattgagttcttaaccttcgcgtggtatcaccagttctggcacactgtggaatctctagacggccaggtagtacgttccgtccactgctgcgtcatgaaatcgatactggacctgctccatgactagaggcacatcacaagcttagtgtgctatctcgatcgttgcagcgggggctggagaaattgcagcgggtatctccaagacatggcatgacccgttagcatgcgcatatggcgtagaaccgtctctttgaaagcacgaccttttagcgtaaatccacaggattcgactcatccaccctagtgtctgacgagatacgattacagtgtcagtgatgtc

SEQ ID NO: 5858 - DNA, 417 bp, Bos taurus
  Clone ID: 25-LIB34-021-Q1-E1-G9
gtgacatgtctgatggaggaggatggactgtaattcagagacgatctgatggcagtgaaaactttaacagagactggagtgactatgaaaatggctttggaaattttgtccaaaaaaatggtgaatattggttgggtaatagaaatcttcacttattgaccacacaaggagattacacattaaaaatcgaccttgcagattttgagaaaaatagccgttatgctcaatataaaaatttcaaagttggagatgaaaagaattcctatgatttacatattggggaatattctggaaccgctggagactcccttactggaaattttcatcctgaagtgcaatggtgggccagtcaccaaagaatgaaattcagcacgtgggacagagacaacgacaactacgaaaggaactgtgcgaaag

SEQ ID NO: 5859 - DNA, 347 bp, Bos taurus
  Clone ID: 25-LIB34-022-Q1-E1-G1
caggctcagatcctcgggcccgccgacaccatgagttggtcctcgcaccctccgagtgtaatcttctacattctttcattgctttcttcatcatgcgtggcatatgttgctagccgagacaactgctgcatcttatatgataagatttggtagttattgcccaactacgtgtgaaattgtagatttctcgaagatttaccagacctgtgtagacgaagatgtacgatctttgtgatgcagcttatatcaggttgagaacagtacatcatgagccacataggtggtcaaagcagtccaaatcagctaggaaatctgatgaaccatcaaagccaggtagcatagagagt

SEQ ID NO: 5860 - DNA, 379 bp, Bos taurus
  Clone ID: 25-LIB34-023-Q1-E1-G9
catcaagatggtagtgttgactttggcaggaaatgggatccatataaacaaggatttggaaatattgcaaccaatgcagaatggaagaaatactgtggtgtaccacgtgagtattggctcggaaatgacagaattagccagcttaccaatatgggacccacaaagcttttgattgaaatggaggactggaaaggcgataaggtgacggcactctatgaaggatttactgtacagaatgaggccaacaaatatcaactgtcagtgagcaaatacaaaggaacatctggcaatgcgctcatagaaagggcttctcaactggtgggagaaaaacgggacatgaacatccacaacagcatgttcttcaacacatacgacagag

SEQ ID NO: 5861 - DNA, 400 bp, Bos taurus
  Clone ID: 25-LIB34-025-Q1-E1-G1
acggtcgaaaatccggccaccaccgtcgagaccctggcggaatcttcgcaaaaaagagatgcccgcgtgccccacaactggaggagagatgccagatataagccagagtcaaatgagctgacggcagagaagatcaccgagttctgccaccgcttcctggaaggcaagattaagccccacctgatgagccaggagctgcctgacgactgggacaagcagcctgtcaaagtgctggttgggaagaactttgaagaggttgcttttgatgagaaaaagaacgtctttgtagagttctatgccccgtggtgcggtcactgcaagcagctggcccccatctgggataagctgggagagacgtacaaggaccacgagaacatagtcatcgccaagattgactcca

SEQ ID NO: 5862 - DNA, 382 bp, Bos taurus
  Clone ID: 25-LIB34-025-Q1-E1-G9
ctgactgctgtgagaaacaagagcctgaaagaaatgaatgcttcctgagccacaaagatgatagcccagacctccctaaattgaaaccagaccccaatactttgtgtgatgagtttaaggcagatgaaaagaagttttggggaaaatacctatacgaaattgctagaagacatccctacttttatgcaccagaactcctttactatgctaataaatataatggagtttttcaagaatgctgccaagctgaagataaaggtgcctgcctgctaccaaagattgaaactatgagagaaaaagtactgacttcatctgccagacagagactcaggtgtgccagtattcaaaaatttggagaaagagctttaaaagcatggtcagt

SEQ ID NO: 5863 - DNA, 424 bp, Bos taurus
  Clone ID: 25-LIB34-026-Q1-E1-G1
gcgagttctccacgcgtgagatctgcagcctggacaatgggggctgcgaccagttctgcagggaggagcgcagcgaggtgcggtgctcctgcgcgcacggctacgtgctgggcgacgacagcaagtcctgcgtgtccacagagcgcttcccctgtgggaagttcacgcagggacgcagccggcggtgggccatccacaccagcgaggacgcgcttgacgccagcgagctggagcactacgaccctgcagacctgagccccacagagagctccttggacctgctgggcctcaacaggaccgagcccagcgccggggaggacggcagccaggtggtccggatagtgggcggcagggactgcgcggagggcgagtgcccatggcaggctctgctggtcaacgaagagaacgacggattctgcggggg

SEQ ID NO: 5864 - DNA, 424 bp, Bos taurus
  Clone ID: 25-LIB34-027-Q1-E1-G1
gaaacaactaattgttggcgttaacaaaatggattccactgagccaccctatagccagaagagatacgaagaaattgttaaggaagtcagcacctatattaagaaaattggctacaaccccgacacagtagcatttgtgccaatttctggctggaatggtgacaacatgctagaaccaagtgctaatatgccatggttcaagggatggaaagtcacccgtaaggacggcaatgccagtggaaccaccctgcttgaagctctggattgcattctgccaccaactcgcccaactgacaaacccttgcgtttgcctctccaggatgtctataaaattggtggtattggtactgtccctgtgggtcgtgtggagactggtgttctcaaaccctggcatggtggtcacctttgctccagtcaatgtaac

SEQ ID NO: 5865 - DNA, 236 bp, Bos taurus
  Clone ID: 25-LIB34-028-Q1-E1-G1
tatcaagttgcccatgaacacatatgtgtgtgatgaatgaaacaccaaggtcctggatcagtatatatttgaactaagcaggaaaactcggattcgagaagtattcctcactaaaatagttgagtcaaccctggaaagccttgatgaatgctgccactctgaatcttctagtgcctgtttaaatgcacagggccctcaattgacaatggaattatcatctttcagtcagaaaggac

SEQ ID NO: 5866 - DNA, 163 bp, Bos taurus
  Clone ID: 25-LIB34-029-Q1-E1-G1
ctgttaacttcagactatgtatgttctgttcttcatagtggttcagtccttgaaatttgttgaaatgtttcctaaaatgtcatgtctgcttgtcaagtgaagtaatgcctgaaatacttagatgtaacctaaacatacagcttaataaaaacaaccttgcatg

SEQ ID NO: 5867 - DNA, 383 bp, Bos taurus
  Clone ID: 25-LIB34-029-Q1-E1-G9
ctttgctgagactagacaggagctgaggcagaggagaaaagtgcagagcagagccatgaagattatcttggatctccttctgcttctgctcatcatcatttattcctacttggaatctctggtgaaggtcttcattcccaggaggagaaaatctgtggctggagagattgttctcattacaggagccgggcatggaataggcaggcagaccgcctatgaatttgcaaaacggaagagcagactggttctgtgggatattaataagcatggtgttgaggaaactgcagcagaatgcagaaaactaggggccactacacacgtgtttgtggtagactgcagtaacagagaagagatttatagctccgtaaaccaggtaaagaaag

SEQ ID NO: 5868 - DNA, 345 bp, Bos taurus
  Clone ID: 25-LIB34-030-Q1-E1-G1
aacaccaacaaaagttaccaatgtcgaggaaaatcagaacacaagcactcaatctgtataatggagaatgggatcctaaagtagactgcaatgaagaagcaaaaatacaactatgcccacctccacctcaggttcccaatgctcgtgatatgacaactacagtgaattatcaggatggagaaaaaatatcaattctatgtaaagaaaactatttaattcaagatgcagaagaaattgtgtgcaaggatgggagatggcagtcaatcgcacgatgtattgaaaaaattggatgttctcaaccacctcaaatagaccatggcaccattagctcatctagctctgcag

SEQ ID NO: 5869 - DNA, 424 bp, Bos taurus
  Clone ID: 25-LIB34-031-Q1-E1-G9
gtcgtgttccggtgagcgtagtctcggctcccgctcagcccaaccgacggacgatggggactctgggcgcccggcgcggcctggagtggtttctgggcttctacttcctctcccacatccctatcactctgctcatggacctgcagggggtgctgccacgcgatctctaccccgtcgagctgagaaacctgcagcagtggtatatcgaggagttcaaagaccctctgctccagacccccccagcgtggttcaagtccttcctgttctgcgagcttgtgtttcagctgcctttctttcccatcgcagcatatgccttcttcaaaggaggctgcaagtggatccgcacccctgccatcatctactcggttcacaccatgacaactctgaatcccatcctctccacgttgctacgcgacgatttctc

SEQ ID NO: 5870 - DNA, 353 bp, Bos taurus
  Clone ID: 25-LIB34-033-Q1-E1-G1
gagttacttatggaagctgaacaaggatatgattacataaacaagagtcgtaggagatatccacgccaaatcaaagtgcagcaacaacgtttgaaacttgattaaagactcatgaaaagaaacggtaagctctgggccactgtcaaaagtatcatttggtcgcctagaattgagtttgcttgactgacggatacgggcttcgcaagtgactcaatggtaaagaatccccctgccagttcaagagccacaggagatgcgcacgttcgatctcggtgtcgagatgatcccctgaaggacggcatggtaacccattccagtagtcttacctagataagtccatggacaggggatca

SEQ ID NO: 5871 - DNA, 408 bp, Bos taurus
  Clone ID: 25-LIB34-035-Q1-E1-G9
aaagataccctctcgactaaacaaccatgatagaataaaacaaaacatttaatcccaatttaaagtataggagatagaaatctaagtacggcgctatagagaaagtaccgcaagggaacgatgaaagaaaaaactaaaagtataaaaaagcaaagattaccccttgtaccttttgcataatgaattaactagtataagacttaacaaaatgaattttagctaagcagcccgaaaccagacgagctactcacaaacagtttaccaagaactaactcatctatgtggcaaaatagtgagaagatttgtaagtagaggtgacatgcctaacgagcctggtgataactggttgtccagaaaatgaatctaagttcagctttaaagataccaaaaattcacataaaccccact

SEQ ID NO: 5872 - DNA, 422 bp, Bos taurus
  unsure (346)...(347): unsure at all n locations; Clone ID: 25-LIB34-036-Q1-E1-G1
agggaactgatgtggttgagtatgaatgtcaggaaggatatactcttgttggagaaggctagaatctcctgcaaatttgtcgggtggtcaccaccggctcctcagtgtaaagctctatgccaaaaaccaaaaatatcaaatggaaagctgtctgtggagaaggatcaatatgtcagccctgaaactgtcaccgtcaggtgtgaccctggctataggatggttggttcccaggacatcctttgctcagagaacaaattctggagtccagatgtgcccaagtgtgagaaggtatctgctgaagtttgtgaggcagtctttaaaggccaaaaactcctaaagtgtctcnncgaatgcatggaagcaaaggtggccctggagttacataaattgtctctggagaatgaaaaactggagcaagaaaa

SEQ ID NO: 5873 - DNA, 406 bp, Bos taurus
  Clone ID: 25-LIB34-039-Q1-E1-G1
caaaaattagaatcggatgtctcaactcagatggaatactgccgcaccccgtgtactgttacttgcaatattcctgtggtgtctggcaaagaatgtgaggaaatcatcaggaatggaggtgaaacatctgaaatgtacctcattcagcctgaggattctagcaaaccatatagagtatactgtgatatgaaaacggaaaaaggaggatggacagtaattcagaaccgtcaagatggtagtgttgactttggcaggaaatgggatccatataaacaacgatttggaaatattgcaaccaatgcagaagggaagaaatactgtggtgtaccacgtgagtattggctcggaaatgacagaattagccagctttacaatatgggacccacagagcttttgattgaaatgg

SEQ ID NO: 5874 - DNA, 418 bp, Bos taurus
  Clone ID: 25-LIB34-039-Q1-E1-G9
ctaaattgaaaccagaccccaatactttgtgtgatgagtttaaggcagatgaaaagaagttttggggaaaatacctatacgaaattgctagaagacatccctacttttatgcaccagaactcctttactatgctaataaatataatggagtttttcaagaatgctgccaagctgaagataaaggtgcctgcctgctaccaaagattgaaactatgagagaaaaagtactgacttcatctgccagacagagactcaggtgtgccagtattcaaaaatttggagaaagagctttaaaagcatggtcagtagctcgcctgagccagaaatttcccaaggctgagtttgtagaagttaccaagctagtgacagatctcacaaaagtccacaacgaatgctgccatggtgacctacttgaatg

SEQ ID NO: 5875 - DNA, 192 bp, Bos taurus
  Clone ID: 25-LIB34-040-Q1-E1-G9
ttacttctcttgtccttctcttcaggtcagcgtattcaaggggtgtgtttcgtcgagatgatcagaagagtcagattgcgtcatgggtttagatatttgggagaagaggattttaagggggctggtactgattgccttttcgcagtatctcgagcagtgtccatttgatgagcagtgtacgatgtagtgaac

SEQ ID NO: 5876 - DNA, 385 bp, Bos taurus
  Clone ID: 25-LIB34-041-Q1-E1-G1
gagcttgccagggtagggctggcatgaggagtgactagcgccttccagaggctcttttcctcgaaaatcaatatagagttgttgactcctctagcttttagcacacctaggccaaagaaagtaaagccagcaatattgcacaagtcacccacccatgacagagtagacatgagtctatgataagatgaactagaattcacatgcagtgcctgagttagcactgactcccacgactggagtgaaatggatcaaagtttgaattatggcctatatcgagataaagtttctttgttgtacttttgaataagagcttctcctgatcactgttatatatttttttctagaaagtctaaaattaagaagagaatatatcgattgattctga

SEQ ID NO: 5877 - DNA, 421 bp, Bos taurus
  unsure (376): unsure at all n locations; Clone ID: 25-LIB34-041-Q1-E1-G9
cccacgcgtccgaacctatggtgacatggctgactgctgtgagaaacaagagcctgaaagaaatgaatgcttcctgagccacaaagatgatagcccagacctccctaaattgaaaccagaccccaatactttgtgtgatgagtttaaggcagatgaaaagaagttttggggaaaatacctatacgaaattgctagaagacatccctacttttatgcaccagaactcctttactatgctaataaatataatggagtttttcaagaatgctgccaagctgaagataaaggtgcctgcctgctaccaaagattgaaactatgagagaaaaagtactgacttcatctgccagacagagactcaggtgtgccagtattcanaaatttggagaaagagctttaaaagcatggtcagtagctcgcctg

SEQ ID NO: 5878 - DNA, 343 bp, Bos taurus
  Clone ID: 25-LIB34-042-Q1-E1-G1
acagtagtacaacttcaactcacagcaaacagtttgtaaccaccagcacaactgtcaacagacgtggctccgcgattgacatcaagcactttaaaatggaagatgaggccgaaagcctagaggatcttggctttaaaggagcacacggcacccagaaacgccatactaaagctcgtcctgccacaggtatccacacttctcctttgggggagccttccctgaccccctacactaagttcattactcctggaacgtgtctcccatagcaccttttacttcgtccttagtcctctatcatgcttaactgacattacatggctttgtttgtgtgtatgtgtgtgta

SEQ ID NO: 5879 - DNA, 370 bp, Bos taurus
  Clone ID: 25-LIB34-043-Q1-E1-G1
tttatttttttttttttttttttttttttttgagaaaacacattttatttgttttaatgatacgcatgcttttcttctgtaaatagacaataaatttttgtagatagtcttggtgtgttatcttaatttcgtatttcactgtgtaaaatcagtgaatatagctcaagtgttagtggactggatgaaaagaaactggttactaagcaagaacaggaagctgtagttaaccatgactacttttagctatgcagactaatacattctgcaggtttacagctcaagagcttcaccttttttcaatgggacttcatgttagggatcaaccacggtaatttttgctgaatctgaagcctggtccgtgggaattgga

SEQ ID NO: 5880 - DNA, 400 bp, Bos taurus
  Clone ID: 25-LIB34-043-Q1-E1-G9
gtagtctcggctcccgctcagcccaaccgacggatgatggggactctgggcgcccggcgcggcctggagtggtttctgggcttctacttcctctcccacatccccatcactctgctcatggacctgcagggggtgctgccacgcgatctctaccccgtcgagctgagaaacctgcagcagtggtatatcgaggagttcaaagaccctctgctccagacccccccggcgtggttcaagtccttcctgttctgtgagcttgtgtttcagctgcctttctttcccatcgcagcatatgccttcttcaaaggaggctgcaagtggatccgcacccctgccatcatctactcggttcacaccatgacaactctgattcccatcctctccacgttgctactcgacg

SEQ ID NO: 5881 - DNA, 395 bp, Bos taurus
  Clone ID: 25-LIB34-044-Q1-E1-G1
acttatataagctgatgctgcggctgggcttccagaaattctatattcaaggcggggactggggggccctgatctgcaccaacatggcccagctggtgcccagccacatcaatggcctgcacttgaacatggctttgattttaacaaatttctacaccctgacccttcctctgggacagtgtttcggggggcttttcggttataccgagagagacatggagctgatatacccctttaagaagatcgtcttcagcttactcagggacagcagctacatgcacatccacatcaccaggctggacaccgtgggctgtgctctgaatcactctcccgtgggacaggctgcctatattctacagaagttttctacctggagcaaatcggaagtccgagac

SEQ ID NO: 5882 - DNA, 164 bp, Bos taurus
  Clone ID: 25-LIB34-046-Q1-E1-G1
ggtcctagattaccgggtccagtccgcgtccgcacagaacttagtcatctgttttccatttctgttggtgttaaaccaacactctcacgaaaaaacgtaaatttctttaaatacattgcgtcgtttgtttgtgccacaattgagaagggagtgaaaagactcta

SEQ ID NO: 5883 - DNA, 421 bp, Bos taurus
  Clone ID: 25-LIB34-047-Q1-E1-G1
cactaataaaaattgtaaacaatgcattcatcgaccttccagccccatcaaacatttcatcatgatgaaatttcggttccctcctgggaatctgcctaatcctacaaatcctcacaggcctattcctagcaatacactacacatccgacacaacaacagcattctcctctgttacccatatctgccgagacgtgaactacggctgaatcatccgatacatacacgcaaacggagcttcaatgttttttatctgcttatatatgcacgtaggacgaggcttatattacgggtcttacacttttctagaaacatgaaatattggagtaatccttctgctcacagtaatagccacagcatttataggatacgtcctaccatgaggacaaatttcattctgaagagcaacaatcatcaacaaact

SEQ ID NO: 5884 - DNA, 431 bp, Bos taurus
  unsure (376): unsure at all n locations; Clone ID: 25-LIB34-047-Q1-E1-G9
agaagaccaacctcaggatcaggcggctgctggacagcctgcctgaggacacccgcctcatcctcctcaacgctgtcgccctgagcgccaagtggaagatagcctttgataaaggcagaacaagcacaaagccctttcacctcaaatcctctgccatcaaagtgcccatgatgaacagcaagaagtaccctgtggcctctttcacagaccggactctgaacgcccgggtgggccgcctgcagctgtctcacaacctcagctttgtgatcctggtgccccagaccgtgaaacaccatctccaagacctggagcaggctctcagcaccgccgtcttcaaagctgtcataaagaagctggagatgaccaagttccatcncactcacctgacgatgcctcgcatcaaagtgcagagcagtcaggacatgctggat

SEQ ID NO: 5885 - DNA, 379 bp, Bos taurus
  Clone ID: 25-LIB34-048-Q1-E1-G1
ccctatccactccactactaattttaaccatatggctcctccctctaatactaatagctagccaacatcatctatcaaaagaaaacctaacccgaaaaaaactatttattactatgctgatctcactacaactattcctaattataacctttaccgccatggaactaatcttattttatattctatttgaagcaacactagtcccaacactcattattattacccgatgaggaaaccatacagaacgcctaaacgccggactctatttcctattctatacactagctggctctctacccctattagtcgcactaatttatatccaaaacacagtaggattcctaaatttcctaatattacagtactgagtacaacctgt

SEQ ID NO: 5886 - DNA, 394 bp, Bos taurus
  Clone ID: 25-LIB34-049-Q1-E1-G1
aacagaaggctctggggtctggtgaataatgctggcatctccacgcccactgcacccaatgagtggctgaccaaacaggacttcatgaagattctggacgtgaacctgttgggggtgattgatgtgaccctgagtgtgctgcccctggtgcggaaggcaaggggccgtgtggtcaatgtttccagcatcatgggccgggtggccctccttggtggaggctattgcatgtccaagtatggcgtggaggccttctcagactccctcaagagggagctctcctactttggggtgaaggtggttatgatcgagcctggttattttaagaccgctgtgaccagccctaaggcactttctcaaggctttcaagcatcatggaatcaggccagcccagaga

SEQ ID NO: 5887 - DNA, 431 bp, Bos taurus
  Clone ID: 25-LIB34-050-Q1-E1-G1
acaaaactttggcacaatgaagtgggtgacttttatttctcttctccttctcttcagctctgcttattccaggggtgtgtttcgtcgagatacacacaagagtgagattgctcatcggtttaaagatttgggagaagaacattttaaaggcctggtactgattgccttttctcagtatctccagcagtgtccatttgatgagcatgtaaaattagtgaacgaactaactgagtttgcaaaaacatgtgttgctgatgagtcccatgccggctgtgaaaagtcacttcacactctctttggagatgaattgtgtaaagttgcatcccttcgtgaaacctatggtgacatggctgactgctgtgagaaacaagagcctgaaagaaatgaatgcttcctgagccacaaagatgatagcccagacctccctaaat

SEQ ID NO: 5888 - DNA, 287 bp, Bos taurus
  Clone ID: 25-LIB34-050-Q1-E1-G9
ttcccggtttccacccacgcgctccgaataaaaacaaggaaaaaaaaataaaaaaaaaaaaaaaaaaaaaaaaaaaaaaaaaaaaaaaaaaaaaaaaaaaaaaaaaaggcaacagctcaaaaggataaaagcttcaattacacatgtaatttgggggcatgctcttcaatattgtcctccttcttaatttcaggggccgtccttttaaaggttcctcattgtaaatcctctggcgttgctaaacttaatctttttccgcaaaatccccctttctccagttctttttt

SEQ ID NO: 5889 - DNA, 234 bp, Bos taurus
  Clone ID: 25-LIB34-051-Q1-E1-G1
ggaaactgcgctgaaggtgtggggatgaactaccgagggaacgtgagcgtcacccggtcaggcatcgagtgccagctgtggagaagtcgctacccacataagccagaaatcaactctaccacccacccgggggctgacctgcgggagaatttttgccgcaacccggatggcagcattactgggccctggtgctacaccacatccccgactctgcggagagaagagtgcagcgtc

SEQ ID NO: 5890 - DNA, 246 bp, Bos taurus
  Clone ID: 25-LIB34-051-Q1-E1-G9
gcagagcccctgcccgcaccctcgatctcaaccagtcccgtgtcctggatcacacccggcctgaacaccacactgctgtgcctctcgggacttcgaggtgtgactttcctgctgaggctggaaggagaggaccagtttctggaggtggctgaggccccagaggccacgcaagccaccttcccggtccaccgggctgggaactacagctgcagctaccggacccacgcggcaggcaccccctcggag

SEQ ID NO: 5891 - DNA, 243 bp, Bos taurus
  Clone ID: 25-LIB34-054-Q1-E1-G1
gccgcggtggaagcgggtgcgcgggtcgcctctctgagttatccagttccatccttgtcgctgcggcgacacccgcattctccgtcgccatgactgaacagatgacccttcgtggcaccctcaagggccacaacggctgggtgacccagatcgctaccactccccagttcccggacatgatattgtccgcctctcgagataagaccatcattatgtggaagctgaccagagatgagaccaact

SEQ ID NO: 5892 - DNA, 352 bp, Bos taurus
  Clone ID: 25-LIB34-055-Q1-E1-G1
gtcagttgtaaccttttcctttctgattttattgatttgagctctcttttttccttgatgagtctatctaaaggtctatcaattttgtttatcttttcagagtcagcagtcagtttagttgatgttttctattgtttttttttttaaattttatttacttattgatctttgttcttttatacagttgataaggttctcaaggcatgtatattgggtggtttgctattccctcctccggtggatcagattttgtcagaactctccactatgacccattagtcttgggtggccctacgcagcatggctcacagcttcatcgaattatgcaagccccttcacaacgacaaggcag

SEQ ID NO: 5893 - DNA, 343 bp, Bos taurus
  Clone ID: 25-LIB34-055-Q1-E1-G9
tggtctagaactgggagaatatggtttccatgaatacacagaagtcaagatggtcacaatcaagatttctcagaagaactcataaactatgagagtacagagatgactcctcaatagctaagcatctcctgcagtggctaatatatcttagtggttttaaatgcaaaattgttctttccttgattctttaaacataagctaatcatattagcattaatactacacatagaaaacttgacatgtatattattctgaaagaatcatcagccttctgctatgacacccaagccctccctgaaataaaaataatggacgtggatgcaatctctctagctctgtaata

SEQ ID NO: 5894 - DNA, 348 bp, Bos taurus
  Clone ID: 25-LIB34-056-Q1-E1-G1
acacagtgggaccatggaagcccccaggggctggttggtgatcagcgtgctggccatttccctggcctcctccgtgactgacgacgtgtgccgagccccggacgggactcacgggagcgcaggaatacctggccgaccgggacggccatgcctcaagggggagcgacgggagcccggggcgcctgccatccagacaggcatccgaggccttaaatgagaacattgcgacacctggacccctggaaaaccaaggcagaatggggctaccaggaccctccggtcccatggggcccgctggccctccaggattgaaaggcaacaatagcaacccccggaacatcaatgaac

SEQ ID NO: 5895 - DNA, 224 bp, Bos taurus
  Clone ID: 25-LIB34-057-Q1-E1-G1
gcgcatcgtctcaggtcagcgcggcgctgctactcgagctccgagaggcccacgggcggcgtccaccatgttgtcgcgggcggcgtgcagcacgagcaggagactggcgccggccctgagcgtgctgggctcccggcagaagcacagcctccccgacctgccgtacgactacggcgccctggagccgcacatcaacgcgcagatcatgcagctgcaccacagca

SEQ ID NO: 5896 - DNA, 225 bp, Bos taurus
  Clone ID: 25-LIB34-058-Q1-E1-G1
gtaaactgaaggaatgctgtgataagcctttgttggaaaaatcccactgcattgctgaggtagaaaaagatgccatacctgaaaacctgcccccattaactgctgactttgctgaagataaggatgtttgcaaaaactatcaggaagcaaaagatgccttcctgggctcgtttttgtatgaatattcaagaaggcatcctgaatatgctgtctcagtgctattga

SEQ ID NO: 5897 - DNA, 214 bp, Bos taurus
  unsure (187): unsure at all n locations; Clone ID: 25-LIB34-059-Q1-E1-G1
agcgaccggcgggtgcgcgggtcgcctctctgagttatccagttccatccttgtcgctgcggctacacccgcattctccgtcgccatgactgaccagatgacccttcgtggcaccctcaagggccacaacggctgggtgacccagatcgctaccactccccagttcccggacatgatattgtccgcnctctcgagcataagaccatccattatg

SEQ ID NO: 5898 - DNA, 117 bp, Bos taurus
  Clone ID: 25-LIB34-061-Q1-E1-G1
acaacataaaaataaaatgacaatttccccttatgaaaaaaataacttttctaccaacaatagtcgtattatctaccataatactaccactcacgccaatactatcagtgttagaat

SEQ ID NO: 5899 - DNA, 400 bp, Bos taurus
  Clone ID: 25-LIB34-061-Q1-E1-G9
caacaatgagttcactgtcctggtgctagtcaacaccatttacttcaagggcctgtggaagtcaaagttcagtcccgagaacacaaggaaggaactgttctacaaggctgatggggagtcatgttcagtactcatgatgtaccaggaaagcaagttccgcttatcggagagtaccagaaagcacccaggtgctcgagtttgccttcaagggtgatgacatcaccatggtgctcatcctgcccaagctggagaagaccctggccaaggtggaacatgaactcaccccagacatgctgcatgagtggctggatgagctgacagagacgctgctggtggtccacatgccccgcttccgcatcgaggacagcttcagcgtgaaggagcagctgcaagacatggg

SEQ ID NO: 5900 - DNA, 206 bp, Bos taurus
  Clone ID: 25-LIB34-062-Q1-E1-G1
gacccacacgtaccgacaaatcttgcagccacgaaatccttcaaagtcaagcgatcaaaaaacattctctacacggagtcagttcctttattgtctcagatgccatgtagagaataaaggaactgactccgtccttgctggatgtaaagaacttaccagttggcgatggcaaaccaaaggccatcgacccagagatgtttaagcta

SEQ ID NO: 5901 - DNA, 211 bp, Bos taurus
  Clone ID: 25-LIB34-062-Q1-E1-G9
atcgccacctgcaaaaaaggctacgagcttgtggaggggaacaaggcactcctgtccttcacagctgtctgccaggatgatggcacatggcaccgtgccatgcccaggtgcaggatcaaggactgcgggcagccccgaagcctgctcaacggggccttcaattacaccaccagagagggggtgaacacctacgaggcgcgtatccagtacc

SEQ ID NO: 5902 - DNA, 384 bp, Bos taurus
  Clone ID: 25-LIB34-063-Q1-E1-G1
gcgtctggaaaggactggattcactgcccacacaccgctctcgcagacatgaggacagagagaacttccttcctcctggctctggggctcctggtgtctgggttctgctccagggtccaatgcctcccagagaatgtgaccccagaagaacagcacaaagggacgtctgtggatggccactcattagcctccagcaacactgacttcgccttcagcctctacaagcagttggctttgaaggaccccaataagaatgtcatcttctcccctctgagcatctccatagccttggccttcctgtccctgggggctcatgaccacactgttacagagatcctggaaggtctcaaattcaacctcacagagacccccgagacagaaatc

SEQ ID NO: 5903 - DNA, 225 bp, Bos taurus
  Clone ID: 25-LIB34-065-Q1-E1-G1
agcaaccgttccgccagttccattaccatgagtctgaaccatgcaattttgctcttgtttacattcctgtgtcttgttcagtcatttgtgaatacgagcacgcattcattctgcaaatacttgctgaacacctaccacaagcaccgaactctgctttttaagtcttagctttgtgatttaactctacacctccagaggaaaacatgtatttgtaaccaaaaacca

SEQ ID NO: 5904 - DNA, 237 bp, Bos taurus
  Clone ID: 25-LIB34-067-Q1-E1-G1
gttgaataaggaaagaaatctgcctattgaattcctgcttctattgtgactatggccagatgggagatggtagctcaggtaagaagagaccatttacaactttatcaagacttaagtggcccagaagctgattttcacaaaaatctgcagctccaggttgagggtgaaaggttgtgaacaattttacttcagagcacagtgcctctcccttgacactagggctgtttggttttatga

SEQ ID NO: 5905 - DNA, 195 bp, Bos taurus
  unsure (111): unsure at all n locations; Clone ID: 25-LIB34-068-Q1-E1-G1
acaactcatatgtctatagaacacaatgacgcatcaaaaattcacatctaagaggctctctcggtgttctgcaaagctggtgtgaagacagctttccaggcttacgtgtcntgcatgatgttcctgctgcaaggtgcccagatgctgcagatgctggagaaatccttgaggaagagccttcctatgtccttaaag

SEQ ID NO: 5906 - DNA, 216 bp, Bos taurus
  Clone ID: 25-LIB34-069-Q1-E1-G1
aagatgactgtgtttcccaagtctcctgtaatgctgggccagcccaacaccctcatctgtcacgtggacaacatctttcctcctgtgatcaacattacatggttgaggaacgggcacttggtcatagagggtatttctgacaccagcttcctctccaaggatgatcattccttcgccaagatcagttacctcaccttccttccttctgatgatgat

SEQ ID NO: 5907 - DNA, 241 bp, Bos taurus
  unsure (224)...(225): unsure at all n locations; Clone ID: 25-LIB34-070-Q1-E1-G9
gatagaggagcctggaaggcagagcaactggacctcgcctaagctgtgtctctgactcatttctgactttaggcaagttcttccaatgggaaaaatggcgaagatgtttagtttcatccttgtcaccactgctctggtaatgggcaggggaagctcggctctggagaactgcctccaggagcaggcgcggctcaagagcccaagttgtacctgctggagacccnngggtcaagcagcaaca

SEQ ID NO: 5908 - DNA, 411 bp, Bos taurus
  unsure (368): unsure at all n locations; Clone ID: 25-LIB34-071-Q1-E1-G1
agtcatttaaaagaaacatgtatttgcttttgacagctgattattcacttaaaatgactagaatgaaagtttctagcagaaatatgattttatttgaccagaaaaagtcttagtgacatttatgtttacatatcatctcatgacctattttttaaaaatatcactgtaattatataagaagaaaagataaagataatttactgagaaatttaaatttttctcagttcccatgaggaagaacacattgctgtcttttgaaaataacttcagcaccatcatggcttgatgtttattcctgctttgaattaatcaggttttttaaaacttgcaattacatttatcctaatacagcactgattttgcagtanactgatttgtaattgctttcctttttccaataaaataatctgt

SEQ ID NO: 5909 - DNA, 378 bp, Bos taurus
  Clone ID: 25-LIB34-072-Q1-E1-G9
actagatctaagatcgcgagcggccgccctttttttttttttttcgtcatttacagtagaataaatattttgttgctattgctacactttaaatttacattctaacctattaaatgcagaaagctagtgtaaagcatatagattaagtgtaggtcccatacgtatgacagtttgttcaagactagtaggtttttgtatctttttttaaacttttttaaatggctagtgggaaagatgtgtgcttgtgatcagctcttaacttcaatttttacatcaaagcgtccctgaaaacggtctttctcactgtacccaatgttctcaccatacgccttacactctatgcggatttcagtgtccatggtgaggttggtgaactgc

SEQ ID NO: 5910 - DNA, 442 bp, Bos taurus
  unsure (5),(242): unsure at all n locations; Clone ID: 25-LIB34-073-Q1-E1-G1
attcncaggacttcttgcaccttcgaaaaatttaaaaccatgaaacatctattactgctacttttctgtgcttttatagttcaggcccaatttcctactgactatgacgagggacaagatgacagacctaaggtaggtttgggtgcccgcggtcatcggccctatgacaagaagaaggaagaggcccccagcctgagacctgtgccccctcccatcagcggaggtggctatcgggctcgtcncgccacagcaactgtgggccagaagaaagtggagagaaagccccctgacgctgatggctgcctgcacgcggacccggatctgggtgtgttgtgtcctacaggatgtaagttgcaagatactttggtaagacaggagagaccaatccgaaagagtatagaagatttacgtaatactgtggactctgtttcccggacctctt

SEQ ID NO: 5911 - DNA, 430 bp, Bos taurus
  unsure (295),(391): unsure at all n locations; Clone ID: 25-LIB34-074-Q1-E1-G1
aaagccttctaattcgcgctgaattaggccaacccggaactctgctcggagacgaccaaatctacaacgtagttgtaaccgcacacgcatttgtaataatcttcttcatagtaataccaatcataattggaggattcggtaactgacttgttcccctaataattggtgctcccgatatagcatttccccgaataaataatataagcttctgactcctccctccctcattcctactactcctcgcatcctctatagttgaagctggggcaggaacaggctgaaccgtgtaccctcncttagcaggcaacctagcccatgcaggagcttcagtagatctaaccattttctctttacacttagcaggagtttccccaattttaggagccatcancttcattacaacaattatcaacataaagcccccgcaatg

SEQ ID NO: 5912 - DNA, 385 bp, Bos taurus
  Clone ID: 25-LIB34-075-Q1-E1-G9
agagagtcgtattaagtcatcagaagagttttgactgtcatcgtcgtgaggcaaactttttgacaagtggtcgcaggcacacgtggcgggcaagttaatgtttccttgtcaaatggaaaagacgattcagaacgaattgttgctgtagaacttgcagacctagatacaacaatgtctgtgtgtcgagacagctggagcattactgaggccaacgtggcctgcattgatcgtggatttcagactgggtgcacttgatactcagacaaaagatactgatccatattctgctgaatgtctgcatgttcgttgtccaggattatttaccaatttggactaatgtactttcactaacggactacactgttcggaggggttggctggtgtg

SEQ ID NO: 5913 - DNA, 229 bp, Bos taurus
  Clone ID: 25-LIB34-076-Q1-E1-G1
cacgcggccggatacctgtcgacaggaggaagagttagtgcagtcaaggctgatttgggtaaaatcgtcttgactaatcctgtgtgcacagaagtaggagaaaagattgcacttagccgaagagttgagaaacactggcgtttaattggttggggtcaaataagaagaggagtgacaatcaagccgacagtagatgatgactgaagaattaaataacagatctgaatga

SEQ ID NO: 5914 - DNA, 422 bp, Bos taurus
  Clone ID: 25-LIB34-077-Q1-E1-G9
cctatagtacgtcgtattatggatttctcttctccttctcttcagctctgcttactccaggggtgtgtttcgtcgagatacacacaagagtgagattgctcatcggtttaaagatttgggacaagaacatgttaaaggcctggtactgattgccttgtctcagtatctccagcagtgtccatttgatgagcatgttaaattagtgaaccaactaactgagtttgcaaaaacatgtgttgctgatgagtcccatgccggctgtgaaaagtcacttcacactctctttggagatgaattgtgtaaaattgcatcccttcgtgaaacctatggttacatggctgactgctgtaaaaacaagagcctgaagaaatgaatgcctcctgagccacaaagatgatagccccagactccctaaattgaaa

SEQ ID NO: 5915 - DNA, 426 bp, Bos taurus
  Clone ID: 25-LIB34-078-Q1-E1-G1
agtagaatgtagataaaatcaagtttgcagattgatcctgatagaagccataacttcacaacaatactcagtgacataaacctcccccgaaaaagggttttaagcatatgttcttgatcatgttgaaagaagtcaattttttttttttaaagttctcctttctgaatgtgaaataccccataattggagaaaatttctgattgaaaggcatgggaggcatttaaacttattgctaagagtagagggataagcttcgtaatattttccaaaaatgggaattttagttctagacataaaattaatgcatactccttataacaacaaatagtataaaaaataatttagatattccactaaccagagataattgcagtgatcaactttctagatagtcgtttagataattttcccaacatgaacatacat

SEQ ID NO: 5916 - DNA, 351 bp, Bos taurus
  Clone ID: 25-LIB34-079-Q1-E1-G1
atcccctctgagcatctccatagccttggccttcctgtccctgggggctcatgaccacactgtgacagagatcctggaaggtctcaagttcaacctcacagagacccccgagacagaaatccacaagggcttcaagaacctcctgcagacgttcaatcagcccagcaaccagctgcacctgagcgtgggcaacgccatgtttgtgtcagaggacctgacgctgctggacaaattcaggaaagatgccgaggctttttacgcctctgaggttttatccactaacttcaaggattctgaagctgccgtaaagcttatcaatgaatatgtgaagaataaaactcatggaaaaat

SEQ ID NO: 5917 - DNA, 432 bp, Bos taurus
  Clone ID: 25-LIB34-080-Q1-E1-G1
ccgggccgaccacgcgtccggttcaagatcgcgagcggccgcccttttttttttttttttttttttttttttttttttttttttttttttttttttttttttttttttttgacagggacagtcagggccagcagcacctgcacctttatccacaggctgggcggccgggccgagataccattgaatcactccataaaacccatagcaaacaaggagaaagtgcgagtccggggaacggggcccaggtcatgcagagaggtcactgttatcaaaacgcccctggtcatacacttcagccaacaccttgcggccagtaaaccagcgcccattgagggcctggatggccttgtgagtctcagagggtacggaaaactccacaaaaatcttgacaatgatctccgggtccctcttcctcgccctgcttctcttggg

SEQ ID NO: 5918 - DNA, 445 bp, Bos taurus
  Clone ID: 25-LIB34-081-Q1-E1-G9
gacccacgcgtcaaaagcatttggctttgaaggaccccaataagaacgtcatcttctcccctctgagcatctccatagccttggccttcttgtccctgggggctcatggccccactgtgacagagatcctggaaggtctcaagttcaacctcacagagacccccgagacagaaatccaccagggcttccagcacctcctgcagacgttcaatcagcccagcaaccagctgcagctgagcgtgggcaacgccatatttgtgccagaggagctgaagctgctggacaaattcaggaaagatgccgaggctttttacgcctctgaggttttatccatcaacttcaaggattctgaagctgccgtaaagcttatcaatgaatatgtgaagaataaaacgcatggaaaaattgagaagctcttaaatgatcttgacgtgctcacaaattt

SEQ ID NO: 5919 - DNA, 418 bp, Bos taurus
  unsure (340): unsure at all n locations; Clone ID: 25-LIB34-082-Q1-E1-G1
aggccgcagtggaagcgggtgcgcgggtcgcctctctgagttatccagttccatccttgtcgctgcggcgacacccgcattctccgtcgccatgactgaacagatgacccttcgtggcaccctcaagggccacaacggctgggtgacccagatcgctaccactccccagttcccggacatgatattgtccgcctctcgagataagaccatcattatgtggaagctgaccagagatgagaccaactatggtatcccacagcgtgctcttcggggtcactcccactttgttagtgatgtggtcatttcctcagatggccaatttgccctctcaggctcctgngatggaactcttcgcctttgggatctcacaacgggcaccaccactcgccgatttgtaggccataccaaagatgtgctg

SEQ ID NO: 5920 - DNA, 407 bp, Bos taurus
  unsure (312): unsure at all n locations; Clone ID: 25-LIB34-083-Q1-E1-G1
agggccactccagctcaccatggctcgggcattgagagtgccagttgcactgtggctgttgggcttgtgctggtctttggctaaagcccaccctctggctagagctcctgagcttgggcacggagttgaaggtgggaatgtggccaagccggatccagaagtgacggaacgctgctcggatggctggggctttgatgctaccaccctggatgagcatgggaacatgctgtttttaaaaggggagtttgtgtggaagggtcatgcctgggcccggcagttgatctcagagaggtggaaggatgcccccagtcncgtggatgctgcattccgctatgatcgtaacagtgtccttctgatcaagggggacaaattctgggtatatcctcctgagaagggggaagaatatc

SEQ ID NO: 5921 - DNA, 391 bp, Bos taurus
  Clone ID: 25-LIB34-084-Q1-E1-G1
accgctacctcctttcctcaggcatcaaagcagagaccacgggaacctagttcaccaggctcgaggctggaggccccgccatgacatccctaaggccccttctgatgctggccctgctggcgtgggttgttgtggctgaccaagagtcctgcaagggccgctgcaccgagggcttcaacgccaccaggaagtgtcagtgtgacgagctctgttcttactaccagagctgctgtgccgacttcatggctgagtgcaagccccaagtgactcgtggggatgtgttccatctgccagaagatgagtacgggttccatgactacagcgacgcgcagaccgtcaacagcaacgtggaagcacagcccgagagcaccaccctgggcccttgttctgc

SEQ ID NO: 5922 - DNA, 273 bp, Bos taurus
  Clone ID: 25-LIB34-084-Q1-E1-G9
ccacgcggtcaaaataatttaccatgcatgtgattacatgcgaaactactgacaacaccatgttttggaccactttgacccaaccaatctgctgctgcccctgcccacatgttacccccatccaggcctcacacttgctgatttatttcaacttactctcattaatcccttttttccttgagtttttaaaatacaaatatcaataaatgtagttttcaattcctcaaaaaaaaaataaaaaaaaaaaaaagaaaaaaaaagggcggccgctct

SEQ ID NO: 5923 - DNA, 393 bp, Bos taurus
  unsure (388): unsure at all n locations; Clone ID: 25-LIB34-085-Q1-E1-G1
accactaataaaaattgtaaacaatgcattcatcgaccttccagccccatcaaacatttcatcatgatgaaatttcggttccctcctgggaatctgcctaatcctacaaatcctcacaggcctattcctagcaatacactacacatccgacacaacaacagcattctcctctgttacccatatctgccgagacgtgaactacggctgaatcatccgatacatacacgcaaacggagcttcaatgttttttatctgcttatatatgcacgtaggacgaggcttatattacgggtcttacacttttctagaaacatgaaatattggagtaatccttctgctcacagtaatagccacagcatttataggatacgtccctacatgaggacanatatc

SEQ ID NO: 5924 - DNA, 464 bp, Bos taurus
  Clone ID: 25-LIB34-086-Q1-E1-G1
cacaaccagtatccaactgagtttgaattcaatctctattacttaaagttcttggctttccactatgtgtctaatcgctttaaaacatttctcctggattcagactatgaaagattagagcacggaactttatttgatgataaaggagacaagcatgctaaaaaaggaatttgtatttgggagtgtattgatagaatgcacaagaggagtcccattttctttaattatttatattcaccagtggaaatagaggccctgaagcccaatgtaaacgtttccagcctcaagaagtgggattactacatagaggagacgctttccacggggccctcgtatgactggatgatgctgacccccaagcagctgccctccgaagactctgagctggccggaggagccaggccccagagccagaggagaaacgtgtggccgtgctacgatgatgtcagctgcgctcagcccga

SEQ ID NO: 5925 - DNA, 417 bp, Bos taurus
  Clone ID: 26-BOVMS1-001-Q1-E1-G5
caaccatcccctgggaagggtttcatttcgctggccatgagatccggatcaatgaagccacggattgttacggcgctgttgtttggccatcggcccttgttctgtgctattttctggaaactaacgtaaagcaatataacctggtcgacaaaaatgtgattgaaattggagctggaacggggctcgtctccattgtggcgagtttacttggcgcacacgtgactgccacagatttacctgagttacttggaaacctgcagtataatatttctcgaaacaccaaaacgaaagctaagcatctgcctcaggtcaaagagctctcctggggtgtagctctagacaagaacttccccagggcttccatcaactttgactacatcctggcggccgacgtggtctatgctcatccatttctcg

SEQ ID NO: 5926 - DNA, 369 bp, Bos taurus
  Clone ID: 26-BOVMS1-002-Q1-E1-G5
atgcgacgtcatagctcttctatagtgtcacctaaattcaattcactggccgtcgttttacaacgtcgtgactgggaaaaccctggcgttacccaacttaatcgccttgcagcacatccccctttcgccagctggcgtaatagcgaagaggcccgcaccgatcgcccttcccaacagttgcgcagcctgaatggcgaatgggacgcgccctgtagcggcgcattaagcgcggcgggtgtggtggttacgcgcagcgtgaccgctacacttgccagcgccctagcgcccgctcctttcgctttcttcccttcctttctcgccacgttcgccggctttccccgtcaagctctaaatcgggggctcccttta

SEQ ID NO: 5927 - DNA, 438 bp, Bos taurus
  Clone ID: 26-BOVMS1-004-Q1-E1-G9
atccatacctgctcccggccgaggctgctgaggtacctctgtcgaccgatacatgattttctgccgtttgttggcaaaaatggcaactggtgatgctgttctgaagagattggagcagaagggtgcagaagcagatcaaattattgaatatcttaagcagcaagttgctcttcttaaggagaaagcaattttgcaggcaactttgagagaagagaagaaacttcgagttgaaaatgcgaaattgaagaaagaaattgaaggattgaaacaagagctaattaaggcagaaattcaaaatggagtaaaacaaataccatttccatctgatactccactaaaaactgattctacagtttctgaaaatgagatacagtctataccaataacagccatatcttctggtgctaaagagcaagtaaaaggaggaggagaagaaga

SEQ ID NO: 5928 - DNA, 259 bp, Bos taurus
  Clone ID: 26-BOVMS1-006-Q1-E1-G5
atgcactgatgccaataatgaatactggatgtctgctcacaaatatgtggttgaaagtgcatatgaggtgattccactgatatgctacagaacgtgctgcagcgacatgtgagtgaccgtattggtagaaagtacaatgaagagtcttacgcgggtgtcacctagttccagcattattaaaggtctcaatggcatctgctatgacgtcttccttaatggtcagtgcatcttgggacatcatgacttctcatacgttgtg

SEQ ID NO: 5929 - DNA, 425 bp, Bos taurus
  Clone ID: 26-BOVMS1-006-Q1-E1-G9
gggtcggaccacgcgtccggacgaaggtgtcagagctgtacgacgtcacttgggaagaaatgcgagataaaatgagaaaatggagagaagaaaactcacgagatagtgagcaaattgtggaagttggagaggaattaattagtgaatatgcttctaagcttggagatgatatttggatcatatatgaacaggtgatgattgcagccctcgactatggtcgggatgacttggcattgttttgtcttcaggagttgagaagacagttccctggaagtcacagagtcaagagactaacgggcatgagatttgaagccatggagagatacgatgatgctattcagctatatgatcgaattttacaagaagacccaactaaaactgctgcaagaaagcgtaagattgcaatccaaaaagcccagggaaaa

SEQ ID NO: 5930 - DNA, 378 bp, Bos taurus
  Clone ID: 26-BOVMS1-007-Q1-E1-G5
atgcgacgtcatagctcttctatagtgtcacctaaattcaattcactggccgtcgttttacaacgtcgtgactgggaaaaccctggcgttacccaacttaatcgccttgcagcacatccccctttcgccagctggcgtaatagcgaagaggcccgcaccgatcgcccttcccaacagttgcgcagcctgaatggcgaatgggacgcgccctgtagcggcgcattaagcgcggcgggtgtggtggttacgcgcagcgtgaccgctacacttgccagcgccctagcgcccgctcctttcgctttcttcccttcctttctcgccacgttcgccggctttccccgtcaagctctaaatcgggggctcactttaaggttccga

SEQ ID NO: 5931 - DNA, 146 bp, Bos taurus
  Clone ID: 26-BOVMS1-008-Q1-E1-G5
tacaactgctcgatttcagttactcggttagaattttcttaaaaataagctttatttatttgtgataatagagtcatggttcctctactactattatgacagtgacacaccataactacactaataaatgccaactggtcactgtg

SEQ ID NO: 5932 - DNA, 419 bp, Bos taurus
  Clone ID: 26-BOVMS1-008-Q1-E1-G9
agctacatcaactatgacgcttttggcaggcacatcatgtctaactaaatggatctctcaggatgaagcattgcttatcaagactggctgaaccttattttatgaagacgcatgactaactgtccaaatctgtttacgatcatttagcgcatcaaaacagtttgctctagttctaaactgtaggactccctgactttttatacattttatgtttctcactgacttctattcataccagacagcctaagtgtctgcttgatcacacaagaatggtgatatactgacagatctcagatcgatgccctgcacattattgtatgccatgagtcaaacaacatccgtagaatagtcagtcactaaattagtttggtccatctgtgacctggaagatgaagtctatgcacagaagatgaagtaca

SEQ ID NO: 5933 - DNA, 463 bp, Bos taurus
  unsure (370),(408),(410),(428),(437): unsure at all n locations; Clone ID: 26-BOVMS1-009-Q1-E1-G5
atgcgacgtcatagctcttctatagtgtcacctaaattcaattcactggccgtcgttttacaacgtcgtgactgggaaaaccctggcgttacccaacttaatcgccttgcagcacatccccctttcgccagctggcgtaatagcgaagaggcccgcaccgatcgcccttcccaacagttgcgcagcctgaatggcgaatgggacgcgccctgtagcggcgcattaagcgcggcgggtgtggtggttacgcgcagcgtgaccgctacacttgccagcgccctagcgcccgctcctttcgctttcttcccttcctttctcgccacgttcgccggctttccccgtcaagctctaaatcgggggctccctttanggtttcgatttagtgctttacggcaactcgaccccaananacttgattagggtgatgngtcacgtantgggccatcgccctgatagacggttt

SEQ ID NO: 5934 - DNA, 401 bp, Bos taurus
  unsure (327),(356): unsure at all n locations; Clone ID: 26-BOVMS1-010-Q1-E1-G5
cctaaattaggcactgatgcagataaggaacagtggaaagcggttcacaaacaagtggttgacagtgcttatgaggtgatcaaactgaaaggctacacatcctgggccattggactgtcagtggccgatttggcagaaagtataatgaagaatcttaggcgggtgcatccgatttccaccatgattaagggtctctatggaataaaagaggatgtcttccttagtgttccttgcatcttgggacagaatggaatctcagacgttgtgaaagtgactctgactcatgaagaagaggcctgtttgaagaagagtgcagatacactttgngggattcagaaagaactgcagttttaaangtcctctaatgttgtatcatttcactgtctaagctacacaggatt

SEQ ID NO: 5935 - DNA, 222 bp, Bos taurus
  Clone ID: 26-BOVMS1-012-Q1-E1-G5
gttaacagctaacatcactgcaggacagctattagttcacctaatcggtggagctacacttgcatctaataagcattagcactacatcagctctaattacattcaccattctaatcctactaacaattctagagtttgcagtagctataatccaagcctatgtaatcactctcctagtcagcctatatctgcaggacaacacataatatttagaaaaagata

SEQ ID NO: 5936 - DNA, 388 bp, Bos taurus
  unsure (307): unsure at all n locations; Clone ID: 26-BOVMS1-013-Q1-E1-G5
atgcgacgtcatagctcttctatagtgtcacctaaattcaattcactggccgtcgttttacaacgtcgtgactgggaaaaccctggcgttacccaacttaatcgccttgcagcacatccccctttcgccagctggcgtaatagcgaagaggcccgcaccgatcgcccttcccaacagttgcgcagcctgaatggcgaatgggacgcgccctgtagcggcgcattaagcgcggcgggtgtggtggttacgcgcagcgtgaccgctacacttgccagcgccctagcgcccgctcctttcgcattcttcncttcctttctcgccacgttcgccggctttccccgtcaagctctaaatcgggggctccctttagggttccgatttagtgctt

SEQ ID NO: 5937 - DNA, 454 bp, Bos taurus
  Clone ID: 26-BOVMS1-014-Q1-E1-G9
gagaggccgcccttttttttttttttttgtttattctatatttatttttttattttattcttgttttttaggtctgggcaagcatatatcggctgccgaagtaactgaatcagaaagcttggattattgctaatgaaaacatcaagaattgtaaataagattacaatgattaatgtagttaggagatgttgtatgtgcaaatgcttaataatgcaattgaatctcctccgattaggtgaattaataggtgtcctgcagtgatgttaggtgttaaccgcacggcgatggctacatgtttaacaataatgctgacattttcaataattactagtattgggaatatcagggtaggtgttccctgttgaaagaaatgggcaagtgaaagccttagctttaatgcggtaacctgtaattacggatcctgctcatatggggatggctatgcctacgttta

SEQ ID NO: 5938 - DNA, 383 bp, Bos taurus
  Clone ID: 26-BOVMS1-017-Q1-E1-G9
agggatcttctaatccccaccgcacagtgcagctatggctcggggtcccaagaagcacctgaagcgtgtagcagctccaaagcactggatgctggataagctgaccggcgtgtttgcccctcgtccatctactggtccccacaagctgagggaatgtctccctctaatcattttcctaagaaaccgacttaagtatgccctaacaggagatgaagtgaagaagatttgcatgcagcgtttcattaagatcgatggcaaagtccgcaccgatgtaacctaccctgctggttttatggatgtcatcagcattgataagattggagagaattttcgtttgatctatgacaccaagggtcgctttgctgttcatcgtagtacacctg

SEQ ID NO: 5939 - DNA, 244 bp, Bos taurus
  Clone ID: 26-BOVMS1-018-Q1-E1-G9
attacatctcagatcgtaggtcatgactacacaacttggtgcatcaactattgatcttttctcattcacttcagtgtcccaataaatgtttctctcattatgtgccaatctttatggggactgggagtacattacttttaacttctatgatgtcttacagtctaaatttgtatataatcatttataaatccctatcaaatttgtactatactactctttgtttccccctaactttttacaaatt

SEQ ID NO: 5940 - DNA, 387 bp, Bos taurus
  Clone ID: 26-BOVMS1-019-Q1-E1-G5
tcttaatcctcctttaaattttaagaacctcaagattaaagttgctaaattgatttctggatcaagaacagttttttttttttttttttttttacttaaagacaagcccacagagctttgccagcaatcaaagaacagtccttttgctggttaccagggaatgatagaaaaagccaataatgaaaattcaaattttaaaaaccatcctttttaaaaaaaaacaaaaaccagttccaggcaacaagcattttcctgggtgttctttatcaacatctgggatttaattacagtactggagtcagaattgtttccttaccgggtgccaaccttacaatggatgtgaaaacctatggccaaatacttgaaaacactcataattgcacagtc

SEQ ID NO: 5941 - DNA, 428 bp, Bos taurus
  Clone ID: 26-BOVMS1-020-Q1-E1-G5
gtgactaagtcttcaggcaaagtgaacagcttgctggtcatcagagtgttcattctggagagaaaccttacaaatgtaatgagtattgcaagcattttagtcaaccttcacagttcttaagtcataagagattacatactggagagaaaccttacaatgtgatgaatgtggcaaggcctttcatgtaaagtcaatccttttaagtcattggacagttcatagtggagagaaacattacaaatgtcatgagtgtggcaaggcctttactgacagcccaaacctcgggagacatcagaaaattcatacaggacagaaattatttaaatgtgatatatgtgacaaagtcttcagccgaagttaacaccttgctgggcatcagagcgttcatttggagagagaccttacaaatgtaatgagtattacaagca

SEQ ID NO: 5942 - DNA, 199 bp, Bos taurus
  Clone ID: 26-BOVMS1-020-Q1-E1-G9
tttctctatgggaagcagggccagcaggaggagcagaaattgccaacactgcaaagccaggctgggtgcagcctaggagagccctcaccacatccgctgcccatcctggcacttgcttcatccttctatatccatccactcctccctctactgtcggcctccacactctctgctgcttaataaactccatttggtctcc

SEQ ID NO: 5943 - DNA, 290 bp, Bos taurus
  Clone ID: 26-BOVMS1-021-Q1-E1-G5
gtacattcaggttgtctaccttcacaacatcaatatctctgcaatcggctcaaacgacttctgcccacccggatacaacaccagaaaggcttcctattcatgactgacccctttcagcaacccagtccagtactgggatatccatccatccaccgtccgaagtgtccatgtgcgtgctgccgtacaccttggcaactacaagtcggactcaccatcaggctcatttttagaagctgacactatctcattaatgtcactgcgcagaaacacagcccaacgagattccgacg

SEQ ID NO: 5944 - DNA, 433 bp, Bos taurus
  unsure (339): unsure at all n locations; Clone ID: 26-BOVMS1-022-Q1-E1-G5
ctctgctactgtgaatataaatattcgatccatttaagagggcctgtgctctcacactcagactcattcttaacctttcccaaatgattcacatggactaatctttctatctttctgatctgtaaatacttaaaaaaaagagtagttttgtatcaacctaaatgagtcgaagttcaaaaataatacatttcagtcttttcataattgttgacctaagaagattacacattttctagtgacatgtacatactgtatatagccggattaacggttataaagttttgtaccatttattttatgacattttacactgtaactattgaaactaacggttggtangagaaagtttcttatggaacgaataccctgctcaacacttaatcaatctttgtgcctcaacatactgttgatgtctaagtatgcctcagtgggt

SEQ ID NO: 5945 - DNA, 444 bp, Bos taurus
  Clone ID: 26-BOVMS1-022-Q1-E1-G9
ctaataaaaattgtaaacaatgcattcatcgaccttccagccccatcaaacatttcatcatgatgaaatttcggttccctcctgggaatctgcctaatcctacaaatcctcacaggcctattcctagcaatacactacacatccgacacaacaacagcattctcctctgttacccatatctgccgagacgtgaactacggctgaatcatccgatacatacacgcaaacggagcttcaatgttttttatctgcttatatatgcacgtaggacgaggcttatattacgggtcttacacttttctagaaacatgaaatattggagtaatccttctgctcacagtaatagccacagcatttataggatacgtcctaccatgaggacaaatatcattctgaggagcaacagtcatcaccaacctcttatcagcaatcccatacatcggg

SEQ ID NO: 5946 - DNA, 298 bp, Bos taurus
  Clone ID: 26-BOVMS1-023-Q1-E1-G5
atgcgacgtcatagctcttctatagtgtcacctaaattcaattcactggccgtcgttttacaacgtcgtgactgggaaaaccctggcgttacccaacttaatcgccttgcagcacatccccctttcgccagctggcgtaatagcgaagaggcccgcaccgatcgcccttcccaacagttgcgcagcctgaatggcgaatgggacgcgccctgtaacggcgcattaagcgcggcgggtgtggtggttacgcgcagcgtgaccgctacacttgccagcggcctaacggccgctcctttcg

SEQ ID NO: 5947 - DNA, 434 bp, Bos taurus
  unsure (392): unsure at all n locations; Clone ID: 26-BOVMS1-023-Q1-E1-G9
taaagaacaagaagaaagaaaaccttctgccacccagcagaagaaaaacaccaaactctctagcaaaaccactgctaaattatccactagtgctaaaagaattcagaaggagctagctgaaataacccttgatcctcctcctaactgcagtgctgggcctaaaggagataacatttatgaatggagatcgactatacttggtccaccaggttctgtatatgaaggtggtgtgttttttctggatatcacattttcatccgattatccatttaagccaccaaaggttactttccgcaccagaatctatcactgcaacatcaatagtcagggagtcatctgcctggacatccttaaagacaactggagtcctgctttgactatttcaaaggttntgctgtcaatttgttctcttttgacagactgcaaccctgcgg

SEQ ID NO: 5948 - DNA, 418 bp, Bos taurus
  unsure (269): unsure at all n locations; Clone ID: 26-LIB188-001-Q1-E1-G5
acaagaatagttaagtattttgcacaaaggaaatttgttgatgatccagtagaactgatgcccatagaacgcagtttcttaaggattttgttttgcttctttgacggaggcggccatcgtcattgtcagttcagctgggggttccttccttcatgctgaggacctgtgtctttgaagttgctgacgtcctcggaatcccaggcaggctggtgaatgctcacgggctcccatggaggcatctggtggcctcgggccccctttgcttgtangaggcttagcaagttccttgtcgcttcttcccactgggcatactccctcagctgctccttcaggctctcctcctcatgaacttgtggggactctgccacactcttttttcccattaagtgtccgacagcccagtggttgccgcgcgtgt

SEQ ID NO: 5949 - DNA, 313 bp, Bos taurus
  Clone ID: 26-LIB188-001-Q1-E1-G9
acagacacattcagatgcagctgcagaaagaggggtccagtgatctgaagtcacatagcgggatgcagcattactcagtccccacaaggcagctgtctcaaactttaggaaccgtgagagacacatcagagccctggtcactgtcaccacttgcagcctgggtgtaggtctgtcttttttcacctgagcgcttcttcctccagatcacagctccagccaccacagctactacgaggagaaccaggccaacaatgatgcccatggtgaggaaggaggtctgaggaggttcccatctcaaggtgaggggctcctg

SEQ ID NO: 5950 - DNA, 420 bp, Bos taurus
  Clone ID: 26-LIB188-002-Q1-E1-G5
acagtattaaaaatgctattactcgggtattaattttgttgttgtttagtcgctaagttgtttctgactcttttgagaccccacagactgtataccgctaggctcctctgtccatgggacttcccaggcaaggatactggagtgggttgccatctcctcccctaggggatcttcccaactgagggactgaacctgtgtctaatgcatcgcaggtggagtctttaccactgagccaccagggaagcccacttcttttgttcatctcctcttattagttaacagggaaagtaaaaaaagggggtctgtaagaatctttcattcttgttttcaacttcctgtgatacagtatcttctcaaagggtttgaaaggagcacatctccttgtttagactgaaaagactggaaatctcttctgtgcac

SEQ ID NO: 5951 - DNA, 437 bp, Bos taurus
  Clone ID: 26-LIB188-004-Q1-E1-G5
acaccccaaatggtaaggcaggggctgcagccagcgagtccctcttcatctctaaccacgcctactaagccgacgtgttctaaggctgccccctcaacactccaggccccgtcccctcccacactcactcttgaagaagaggggggggggttcatctggggctccaggctgctctttcccgtcactcttgcctccttgtgacattggtgcctggtgttgtctgtgtacctgcagggaagattgctattgacagaggctatgacatcgcccagatatcccgacacctggacttcatcagccttttgacctatgactttcacggagcctggcgccagacagtcggacaccacagccccctgtttcgaggccaggaagatgcaagttctgacagattcagtaacgctgactacgctgtgagctacatgctgaggttgggg

SEQ ID NO: 5952 - DNA, 430 bp, Bos taurus
  Clone ID: 26-LIB188-005-Q1-E1-G5
acatgttcctggctggtctcgggctgctggttgtcgttggccttcatcagctcctggaatctagaaagcgcaagaggcccattcagaaggtagagatgggaacctcgagtcaaaacgacgtcgacatgagctggattcctcaggaaactctgaaccagatcaataaagcttcaccaagaaggttgcccaggaaacgggcacagaagagatcagtgggatctgatgagtaaatgttcctttgtgcaacaattcggtctttacttaacccgccctaatgtttttcggcctgatgggaattagtgcagagaagccatatcaccatagaaggcggctactacttatgtgtggactgagcaatccgagtctgtggcgatcatattgctgaaaatgcactgcatttaattttctaaagtaacaaatttggtttttt

SEQ ID NO: 5953 - DNA, 416 bp, Bos taurus
  Clone ID: 26-LIB188-006-Q1-E1-G5
gccatgggcgcgggataccttgccgtggcagttgtcaagaaagcaaatgaggggctcacatggaattctctgaaagacaagaagtcgtgccacaccgccgtggacaggactgcaggctggaacatccccgtgggcctgatcgtcaaccagacaggctcctgcgcatttgatgaattctttagtcagagctgtgcccctggggctgacccgaaatccagactctgtgccttgtgtgctggcgatgaccagggcctggacaagtgtgtgcccaactctaaggagaagttcgagcggccgcccgggcaggtggcgattggattttgtcttagggccatggaaagtggccaccagagctggaattgcagaacaaatatttactgacttcctgaggctcggaaacctacatgtccacagac

SEQ ID NO: 5954 - DNA, 393 bp, Bos taurus
  Clone ID: 26-LIB188-006-Q1-E1-G9
gcgatgggcgcgggatactgcggaaagaggccgcagtttgtcgccagcagcaggaacaacaagatcactgtccacttccactcggaccagtcctacaccgacaccggattcctggcggagttcctgtccttcgatgcccgagacccgtgcccgggcagtttcatgtgtaacacggggcggtgtatccggaaggaacttcgctgtgacggctgggccgactgcactgactacagcgatgagctcgactgcaagtgcaacgccacctaccagttcacatgcagggacaagttctgcaagcccctgttctgggtctgtgactctgtgaaggactgtgaggacggcagcgacgaggagggctgcagctgcccgcccaatacctttaagtgcggcaac

SEQ ID NO: 5955 - DNA, 348 bp, Bos taurus
  Clone ID: 26-LIB188-007-Q1-E1-G5
acttatgatcggccagcccaccgggcactttgacaagcttgttgttgttcaaatgaagttccctcaaatgaggagtgttggccaaagagccattgtcaaccgcagagatgctgttgaaactcagtcccaacttagccaaattattcagtcctttcaggctagctgcatcaactttggtgattttgttgccatcgagatgtaattcagtaagggaaggaggaagaccttgagggatggtagttatatttgtgtcagcaatgcggatgtaggagagcttcttcattccctgaaaggctccattttcaatgcctgagctcttcagcgggttggtgccaagttctacgacga

SEQ ID NO: 5956 - DNA, 383 bp, Bos taurus
  Clone ID: 26-LIB188-009-Q1-E1-G5
gggatacaggctcacggccagcacggcagggaagttcctgacggacacgctgtcgccattctggttccaggtcacgctcaggggtgccgacgggaagaagccctggaccaggcagccgatgaccacctgcccggctgggtcgttgttcccaaggctcagcgggaagatgctggggctggtttcactctctgaggaaacggtgaccaggagtccttggccccaggcatcgacgaaggtaacttcgtatccaggacaaattgcaacattataagtatagcccgcagcattatttttcacacagtagtatgtggccatatctttcgttgttacattacgcagggactgagaaacttggctcttggagttgtccgtggtgatgctga

SEQ ID NO: 5957 - DNA, 422 bp, Bos taurus
  Clone ID: 26-LIB188-010-Q1-E1-G5
accgtgccttgtttttgacactctcctggtcgtcatacgccacccactggttgcccttggtggcataggggacctgctggtcacggaatctgtgggtggtggctccgtggaggaagtcacagatctcataataggcaaggatccctttctccttggtgaactggcctggaattcctggccctgagatgggggctcccacatctgtcttggaagaggccagagtgtagctcctcccaaaagtggggatacccatcaccagcttattggctggagcccccagcctcagcatgtagctcacagcgtagtcagcgttactgaatctgtcagaacttgcatcttcctggcctcgaaacagggggctgtggtgtccgactgtctggcgccaggctccgtgaaagtcataggtcaaaaggctgatgaag

SEQ ID NO: 5958 - DNA, 406 bp, Bos taurus
  Clone ID: 26-LIB188-010-Q1-E1-G9
acagcgccgaatctaccttcgaggggatcctcaaaaacccaagagcagagtctttgaacagcaggtccctctggccgggtggagagccaaagagctggaagctccgagacttgttttttccaaatttctcctgcgccttgctgagaagcttccagatcaagtcttccttgccatccacacttcgggccacgacagcatgagaagggacctgggccaggtggcactccttgaacgcatccactggcgcccgactgttgttcaggcagagaagctcatactggtccctgtcagccttctctggcaagttctcaaacactgtcgtctctttaacaaaagccacgtctccagccccgtcctgcagacacttgaaggcaccagaataaccgaagtatggttcccgggaaga

SEQ ID NO: 5959 - DNA, 423 bp, Bos taurus
  Clone ID: 26-LIB188-011-Q1-E1-G5
actcctggatctgccgctcggtgtcagctcgcacgtcactcagctgggcttcgataccactgatcagcgcctggatctgcgccagctgggctccgaagcgagcctccgtttccgccagtgtgccttccagggcggctttcatgctgagctgagactgcagctcgatctccagaccctggagggtgcgccgcaggtcggtgacctccgtcttgctgatctgcagctgctccgtgcggccagcgacctccctgttcagctcctcggtctggctgatgaaccaggcctcagcatccttccggttcttctcagcaatgacctcatattggcttcccatgtcactcaggatcttggctaggtcgatgcccggagcagaatccacctcaacactgacctggccacacacctggcccttcagcacactca

SEQ ID NO: 5960 - DNA, 441 bp, Bos taurus
  Clone ID: 26-LIB188-012-Q1-E1-G9
actctgccatgccagatccaggagcccccatcttgcgcaggttggttatgtggtcacccaattctttgatggcttccacctgctcattcaggtaatgagtctcaatgaaatcacacagatggggatcatttttttcagtggccagtttgtgcagttccagtagtgactgattcacacttctctccaagcacagcgcacattccattgcagtcagcccattctcccagtcatcacggtctggtttcttgatatcctgaaggaagattcggccgcctcgctggttctgcagcttcatcagtctctcagcatgttccctctcctcatgagattggtgaagaaagtatttggcaaagttcttcaaagccacatcatcacggtcaaaatagtacaagttcccctcggcccgtctgcccagcaaggccccaagttcaaagtgctggg

SEQ ID NO: 5961 - DNA, 409 bp, Bos taurus
  Clone ID: 26-LIB188-013-Q1-E1-G5
actaccacgctaagaacggccgcgcgttcgtggaatccccagcccgaaaactctcgcagtcttttgccctgcctgtcacaggaggcactgtggtaacgcccaagcagagcctgctgacagccatccacatggtgctgacagagcacgaccctttcaagcgcagtgcagactcggagctgaaagccttggtgtgcatggcgctgaacgagcagcgtctcgtgtcctggatgaacctcatctgcaagtcggggtcgctcatcgagccccactaccagccctggagctacatggcacacacaggctttgagagcgccctcaacctgctcagccgcctcagcagcctcaagttcagcctccctgtagacctggctgtgcgccagctcaagaacatcaaagacgccttttgatg

SEQ ID NO: 5962 - DNA, 397 bp, Bos taurus
  Clone ID: 26-LIB188-014-Q1-E1-G5
acagaattttaaaaattatcactgagaaatatattaaggtcattaaatgcacaacattaattactggtcagctaataatgatattctgtttcttcattctcccaaggaaaacttgaaatttcggcagaataatcttcaaatatacattattagcaaaatgagagcttctgtttacatactttttgtattttgctatttctaactttattctaaaactcaattttaccccaaaccatgattaccatattaactttgtaatgcacagttgtttgcaactcagcaaagcagtagtaaaccatcaggttctattcacccagcacttagaaaaaacagaattgatcacacccatttaaaaacaaatctcatgctatttcccaatgtagagtttcaatctaag

SEQ ID NO: 5963 - DNA, 380 bp, Bos taurus
  Clone ID: 26-LIB188-015-Q1-E1-G5
acctgctcttctgcatggaaatgactgctgatgctgaaataacccatgttctgcgactgcttgacctcgacacccgttgtggataacaatgtcatggagactgtcgtcatatacttcaacgccatgcccatgtagatccaggtgtccttcatcccaattcatgatggatgaacagtgccacatctacgctgatgcccctagatgtgactcttggaggctcgagagccttgagctcctcaggggatatcaccatgtcatcgcagcatgtacaatcaggggactaccatgacacatgtagaaattcacatctcatgggatccaagtccatccaagttcatcatggggactcgtatccttggctactcctcgatcagtaatat

SEQ ID NO: 5964 - DNA, 403 bp, Bos taurus
  Clone ID: 26-LIB188-016-Q1-E1-G5
accattctcccattagaaccctggtgctaatataactttatagccttaacccttgtaaaggacaatctggacctcatctccagcccccacccctagcattcagtcataatgtgattcctagagagggtggggggagccaagtgaaagggtgctcgggcccaatggccttcactctggaaagctgtgcccggcatcgtcactgactatcctgtaaggaacaccaccaggtcctggcttcagcccagggaaagaaaggagtgttgcaaaagggactccagaggcaggcaggcaactgcttccatttactgtggggggggttctccccacaacctaagtgaggagcaaccctcacccgcagagagaggcctgggctcacctcagccacacttcagcaatatgactg

SEQ ID NO: 5965 - DNA, 361 bp, Bos taurus
  Clone ID: 26-LIB188-016-Q1-E1-G9
acttgagctggacagagtcactcgagcccctccagggagctgtggctaaattcttctctgccagctgtgttccctgcattgatagacaagcataccccaacctgtgtcaactgtgcaagggggagggggagaaccagtgtgcctgctcctcccgggaaccatacttcggttattctggtgccttcaagtgtctgcaggacggggctggagacgtggcttttgttaaagagacgacagtgtttgagaacttgccacacaatgctgacagggaccagtatgagcttctctgcctgaacaacagtcgggcgccagtggatgcgttcaaggagtgccacctggcccaggtcccttctcatgctgt

SEQ ID NO: 5966 - DNA, 295 bp, Bos taurus
  Clone ID: 26-LIB188-017-Q1-E1-G5
gccatggcggcgggataccgcgtggacagcgccctgcccatccagcaccaggactggactggaggaaaggagttcaagtgcaaggtcaacaacaaaggcctctcggcccccatcgtgaggatcatctccaggagcaaagggccggcccgggagccgcaggtgtatgtcctggacccacccaaggaagagctcagcaaaagcacgctcagcgtcacctgcatggtcaccggcttctacccagaagatgtatccgtggagtggcagagaaaccggcagactgagtcggaggacaagt

SEQ ID NO: 5967 - DNA, 391 bp, Bos taurus
  Clone ID: 26-LIB188-018-Q1-E1-G5
acccttccataggtctcagcacacaatctaggctactgtgtttggaggagttccggttcactgccatgacaggcatcaggccacacttgcccgcagtgtacatagatcccccatccaagttcagggcatctgcgtcccctttcagcaccatgacgatgcattcgtcagtggtggacgccgtggcacatgtcacgttctggccgctctgctggctccactgctggcacttcttctgctcctcaggtcccacggcacatcacatgaccctggtgtaccagtgagggcacctgctcacactcaagtgccacttctggtgcccacttgcttgtttggggatcacactgatgggtgaccacggctccctgacctatacaggcctccgctatagggg

SEQ ID NO: 5968 - DNA, 273 bp, Bos taurus
  Clone ID: 26-LIB188-019-Q1-E1-G5
acccttccgttggtctcagcacacaatctaggctactgtgtttggaggatttccggttctctgccaggacaggcaccaggccacacttgcccgcagtgtagatatatcctccatccaagttcagggcatctgcttcccctttcagcaccaggacgatgcagtcgtcagtggtggacgccgtggcacaggtcacgttctggccgctctgctggctccactgctggcacttcttctgctcctcaggtcccacgacacaccacacgaccctggtgt

SEQ ID NO: 5969 - DNA, 158 bp, Bos taurus
  Clone ID: 26-LIB188-020-Q1-E1-G5
actacaataaagccacaggtggcaaatatgtccctcgtgctatcttggtggatctagaacccggaaccatggactctgttcgctcaggtccttttggtcagatcttcagaccagacaactttgtttttggtcagtccggggcaagcaacaactgggcc

SEQ ID NO: 5970 - DNA, 355 bp, Bos taurus
  Clone ID: 26-LIB188-020-Q1-E1-G9
gccatgggcccgggatacatgacctcattggggcccagctggtggactgtgtctccaccacttctggaaccctcctccgcctgccagagacctgaggactctgttcatcattgcacacctccccagggtggggattgaggggcccagaagggctgcctgccctggctcaggcagggtcaccttgggaaggctcggaagcacaaatgagtgctgggcttgctgctgtgccaagggtcatatgtgactgccgctgttgacctgcgctgcgtcacagtggaggggtttgggcctgtgcttctctgccctttcacgaaagtggagccagaaaccttgccaaggccatggctgctgtctt

SEQ ID NO: 5971 - DNA, 393 bp, Bos taurus
  Clone ID: 26-LIB188-021-Q1-E1-G5
accggctgaggcatggcaggcggctctggcttcccacccttctgttcacagatgggggtggtgggcagtatttcatctttgggttccacaatgctcacgtgatcaggcagaggcttcttagggccaatcttaccaatcgggtcccaaggcagcatgatctttaccttgatgcccagcacaccctgtctgatcagcacatggcgcacggcggtgtccacatagtagttaacagggtccccactgtggatcatgaggccatccacaaacttcatggatttagccctctgtcctcgaagtttcccagacaccacgacctcgcagcctttggccccactctccatgatgaaccgcagcataccatagcaggccctccgcacagcaaggcctcctaag

SEQ ID NO: 5972 - DNA, 426 bp, Bos taurus
  Clone ID: 26-LIB188-022-Q1-E1-G5
actgcatcccgggagcaattaaaatgtgaaaatggcaaactgccaccaaagggaaggacaatgtcacaacttgacccgtgacctctcatcttccttccagatgaacacctgtgtgcaggccctattcccaggaaggaaagccatctgctggcactgctctgcctggctggggccaggctgactcacctgtttgtgtaggagatggagcaaagcaccccaggcatccgcctcatgctgctgctggggtgggagatcgccacagcggcgcatcaaacaccagctccacgcccacccgccttccatggcacctggccctgaagatcccatgggcttaaattcttcggtggatgggttattgccattggaaaacaattaatctctagtagtgtaaacagtgccctttggtctctctgactgtcactgtgc

SEQ ID NO: 5973 - DNA, 401 bp, Bos taurus
  Clone ID: 26-LIB188-022-Q1-E1-G9
actcctggttctgccgctcggtgtcagctcgcacgtcactcagctgggcttcgataccactgatcagcgcctggatctgcgccagctgggctccgaagcgagcctccgtttccgccagtgtgccttccagggcggctttcatgctgagctgagactgcagctcgatctccagaccctggagggtgcgccgcaggtcggtgacctccgtcttgctgatctgcagctgctccgtgtggccagcgacctccctgttcagctcctcggtctggctgatgaaccaggcctcagcatccttccggttcttctcagcaatgacctcatattggcttctcatgtcactcaggatcttggctaggtcgatgcccggagcagaatccacctccacactgaactgggcacca

SEQ ID NO: 5974 - DNA, 452 bp, Bos taurus
  Clone ID: 26-LIB188-023-Q1-E1-G5
catggccgcccgatactctttcttgatcggtgatagagatgatctttgccgccatcttttttgttgtctacatgtgtgacctgcacaccaagatacagatcatcaactggccttggagtgatttcttccgaacccttgtagcggccattctctacctgatcacctccattgtggtgctcgttgagagaggaaacggctccaaaatcgctgcaggggcgctgggcctatgcgctgcaggcctctttggctatgatgcctacattaccttccccttgcggcagcagagacatacagcagcccctactgatcctgcagatggcccggtgtaggtgaactctcttcatttctctcagcagtctgcaaataacacctctattgaaataattcctccccacccctataacactcccagtcaactcccagctccctattgaggtaaaagtgcctttgtc

SEQ ID NO: 5975 - DNA, 401 bp, Bos taurus
  Clone ID: 26-LIB188-024-Q1-E1-G5
acggcggcccctaccacattgcgggcagccccttcaaggccagagtcgcaggtcaccgcctcgtcagcaaccacagcctccatgagacatcatctgtgtttgtggactccctgaccaagactgccaccatcccccagcacagtgccccaggcccgggtcccactgatgccagcaaggtgctggccaaaggcgtggggctgagcaaggcctacatgggccagaagagcagcttcacggtggactgcagcaaagcaggcaacaacatgctgctggtgggcgtgcatgggccccggacgccctgtgaagagatcctggtgaaacacgtgggcagcaggctctacagtgtgtcctacctgctcaagggacaaggggaattcactggcaattccctggccttccct

SEQ ID NO: 5976 - DNA, 428 bp, Bos taurus
  Clone ID: 26-LIB188-025-Q1-E1-G5
acacggacagcggtttcatggcgacgtctttgggcttggagacggcgttcttttctgggaagggcaggtccgagtgggccactgtgcacgtgaactcctctccggactcccagtcctccgagcagaccgaggcctcaccccgggcgctgaaggtgtcgttgaggtgtcgctcaaaatacgtgtgggtctccagggccttgccgttctgacgggaccagctgatgttcaggccatcataggaggccaggtttgtgaccaaacaggacagcttggctgacttcgtgaggaagatgtcggcgaaggatggggggatggtgaagaccccgatgggagatggtggtgcaacatcacatgaggaggacacgttcttctggaaggtttccttgttgtgttctacctgccaggtgtaccaccgaacacagcgacac

SEQ ID NO: 5977 - DNA, 326 bp, Bos taurus
  Clone ID: 26-LIB188-026-Q1-E1-G9
gggatacaagcaatttttttttttgtgtttttttttttttgctttttttttttttttttttcttccattttttctgttttttcgtgtcttccgctcctccctcctcgcatcgccgcacgtacgggggatccccctgcccacacagcagccaccagcgaggcgccccccgggggcggccacgcggcggcaggccgaggccgccacccagccggcgggacgccgcgaccccagggccgcccgcggagagcacccggggggcgccggcgggaaagccccaggccaccccggccggagcccccgcccccagggggcgccgggcagccccc

SEQ ID NO: 5978 - DNA, 382 bp, Bos taurus
  unsure (315): unsure at all n locations; Clone ID: 26-LIB188-028-Q1-E1-G5
acaggcattctatgtcttcatatactttggtcgatgaccaacgtatgtggacttgtcctgtaatgtctggcggggcaagagccctgccaccttgtgctcccggtccatccggacatccatgaccttggtgatcttccagaggtcgatgaggaccccaatgaagacgctgacctggaccacgaagttggtctcgttgtccaggatgtagagcaggaccacgaaggactggaagacgccgaagaagacggagcgcacggacaggccctccatggactgccggctgttccagaactggatatcattcttgaaggccangaactcaaagacactgtggacgatggacacgatgatggtgagtgccagcaggtaggggttggtctcc

SEQ ID NO: 5979 - DNA, 326 bp, Bos taurus
  Clone ID: 26-LIB2809-002-Q1-E1-G5
accgcctttccttcagcctgaagtaatgggagtctccaaagtgaaggaggctatggctcctaagcacaaagaaatgcccttccctaaatatccagttgagccctttactgaaagccagagcctgactctcactgatgttgaaaatctgcaccttcctctgcctctgctccagtcttggatgcaccagcctcaccagcctcttcctccaactgtcatgtttcctcctcagtccgtgctgtccctttctcagtccaaagtcctgcctgttccccagaaagcagttccctatccccagagagatatgcccattcaggcctttctgctgt

SEQ ID NO: 5980 - DNA, 471 bp, Bos taurus
  Clone ID: 26-LIB2809-003-Q1-E1-G5
actttgtattttttcagtctgagaagctgttccagataacccaggtaacgctcagagggcacatcttccttttgaatgtgcttctcaacactattgggaacaatttcctcacttgacgaaatgctttcagcttccatttgcttaatatcttccatggcttgatcctcagttgattcactcccaatatccttgctcagttcattgaccttctcctttccaaacacttctggaaaaggtgccacaaaaaacctgagtaaattttcattgaggacttcttgagggagtccttggtgcttgataggatgtttaggcctggcaagagcaacagccacaagacaggtaaggatgagtaatttattgaaaagaagaaagacaaaatctcattaatgcacacaattatttgatatgatggcacttacaggagaagtgattcaaaggcttttaaaacattttccatacagaaatttaatg

SEQ ID NO: 5981 - DNA, 249 bp, Bos taurus
  Clone ID: 26-LIB2809-004-Q1-E1-G9
catacaccttggccaaggcggccagcgacatctccctgctggacgcccagagtgcccccctgagagtgtatgtggaggagctgaagcccacccctgagggcgacctggagatcctgctgcagaaatgggagaatgatgagtgtgctcagaagaagatcattgcagaaaaaaccaagatccctgcggtgttcaagatcgatgccttgaacgagaacaaagtccttgtgctggacaccgactacaaaaagt

SEQ ID NO: 5982 - DNA, 386 bp, Bos taurus
  Clone ID: 26-LIB2809-006-Q1-E1-G5
acctggtaagattgtggaaagcctttcaagcagtgaggaatctattacacgcatcaataagaaaattgagaagtttcagagtgaggaacagcagcaaacagaggatgaactccaggataaaatccacccctttgcccagacacagtctctagtctatcccttccctgggcccatccctaacagcctcccacaaaacatccctcctcttactcaaacccctgtggtggtgccgcctttccttcagcctgaagtaatgggagtctccaaagtgaaggaggctatggctcctaagcacaaagaaatgcccttccctaaatatccagttgagccctttactgaaagccagagcctgactctcactgatgttgaaaatctgcaccttcctc

SEQ ID NO: 5983 - DNA, 155 bp, Bos taurus
  Clone ID: 26-LIB2809-008-Q1-E1-G5
gccatgggcccgggatacagcagaaaggcctgaatgggcatatctctctggggatagggcactgctttctggggaacaggcaggactttggactgagaaagggacagcacggactgaggaggaaacatgacagttggaggaagaggctggtgagg

SEQ ID NO: 5984 - DNA, 342 bp, Bos taurus
  Clone ID: 26-LIB2809-009-Q1-E1-G9
gggatccaactgagtggcctgactcacaataactctctggcgatcagtgactgctttctggtcaacaggcatgactttggactgacaaagggacagcacggactgcgcaggaatcatgacggttggaagaacacgctggtcaggctggtgcagccattactggatcacaggcacaggattgtgcacattttcaacatcaatgatattcaggctctggctttcagtaaagggctcaactggatatttacggaagggcatttccttgtgcttaggagccatactctccctcactttgaacagtcccattacttcacgctgaacgcacagcggcattaccaccag

SEQ ID NO: 5985 - DNA, 364 bp, Bos taurus
  Clone ID: 26-LIB2809-010-Q1-E1-G5
acagcataaaggcctgaatgggcatatctctctggggatagggcactgctttctggggaacaggcaggactttggactgagaaagggacagcacggactgaggaggaaacatgacagttggaggaagaggctggtgaggctggtgcatccaagactggagcagaggcacaggaaggtgcagattttcaacatcagtgagagtcaggctctggctttcagtaaagggctcaactggatatttagggaagggcatttctttgtgcttaggagccatagcctccttcactttggagactcccattacttcaggctgaaggaaaggcggcaccaccacacgggtttgagtaagacgatggatgttttg

SEQ ID NO: 5986 - DNA, 397 bp, Bos taurus
  Clone ID: 26-LIB2809-010-Q1-E1-G9
acccaactctctgtgatcctatggatatagccctccaggctcctttgttcatggaattctcaaggtaagaatactagagtgggttgccatgccctcctccaggggattttcccaacccagtgatcaagcctgagtctcctgcattggtagaggggttccttaccactagcaccacctgggaagccccatttgttttctgatttttgcaaattaaatcagaatattggatgaagggaaaaatgatgtttctgatactagccacatttaccgagggcttacttcgcaattcaaaatggctcagacggtaaaccgtctgtctacagtgcgagagacctgggttcgactcctgggttgggaaaatcctctgcagaaggaaatgttgcctggaaaatcccat

SEQ ID NO: 5987 - DNA, 295 bp, Bos taurus
  Clone ID: 26-LIB2809-014-Q1-E1-G5
actgagcaggattaccatggcaacaacacatcatcagtagggtaaaactaacctgtctcacgacggtctaatcccagctcacgttccctattagtgggtgaacaatccaacgcttggtgaattctgcttcacaatgataggaagagccgacatcgaaggatcaaaaagcgacgtcgctatgaacgcttggccgccacaagccagttatccctgtggtaacttttctgacacctcctgcttaaaaccccaaaggtcagaaggatcgtgaggccccgctttcacggtctgtattcgt

SEQ ID NO: 5988 - DNA, 433 bp, Bos taurus
  unsure (361): unsure at all n locations; Clone ID: 26-LIB2809-014-Q1-E1-G9
acagcagaaaggcctgaatgggcatatctctctggggatagggcactgctttctggggaacaggcaggactttggactgagaaagggacagcacggactgaggaggaaacatgacagttggaggaagaggctggtgaggctggtgcatccaagactggagcagaggcagaggaaggtgcagattttcaacatcagtgagagtcaggctctggctttcagtaaagggctcaactggatatttagggaagggcatttctttgtgcttaggagccatagcctccttcactttggagactcccattacttcaggctgaaggaaaggcggcaccaccacaggggtttgagtaagaggacggatgtnttgtgggacgctgttagggatgggcccaaggaagggatagactagagactgtgtctgggcaaaggggtggat

SEQ ID NO: 5989 - DNA, 364 bp, Bos taurus
  unsure (316),(351): unsure at all n locations; Clone ID: 26-LIB2809-017-Q1-E1-G5
acagcagaaaggcctgaatgggcatatctctctggggatagggcactgctttctggggaacaggcaggactttggactgagaaagggacagcacggactgaggaggaaacatgacagttggaggaagaggctggtgaggctggtgcatccaagactggagcagaggcagaggaaggtgcagattttcaacatcagtgagagtcaggctctggctttcagtaaagggctcaactggatatttagggaagggcatttctttgtgcttaggagccatagcctccttcactttggagactcccattacttcaggctgaangaaaggcggcaccaccacaggggtttgagttagangagggatgttttg

SEQ ID NO: 5990 - DNA, 404 bp, Bos taurus
  Clone ID: 26-LIB2809-018-Q1-E1-G9
gccatggcccgggataccccagatggaaattgttcccaatagtgctgaggaacgacttcacagtatgaaagagggaatccatgcccaacagaaagaacctatgataggagtgaatcaggaactggcctacttctaccctgagcttttcagacaattctaccagctggatgcctatccatctggtgcctggtattacgttccactaggcacacaatacactgatgccccatcattctctgacatccctaatcccattggctctgagaacagtgaaaagactactatgccactgtggtgaagagtcaagtgaattctgagggactccacagttatggtctttgatggttctgaaaattccatgctctacatgtcttttcatctatcatgtcaaaccattctatcca

SEQ ID NO: 5991 - DNA, 384 bp, Bos taurus
  Clone ID: 26-LIB2809-019-Q1-E1-G5
acattgactgttcatcttatctaaattacccaggaatttgtggctaaaatcagtttaccacagataagctatgatgtgtctggttaattagcatttttatcttgaatgtaaattaatgtcataaaactaacaatacatgttttttattttttaaggaaattgttcccaatagtgttgaggtgagatatatctactaaatttaaaatatattaacatcatccaggatatcttaaaatttaattaaactttttattttttgaattttttagcagaagcacattcaaaaggaagatgtgccctctgagcgttacctgggttatctggtaaaattttattaaaagttaatcaaagaccaatgtatcacggaatgagcaagaatgttgt

SEQ ID NO: 5992 - DNA, 403 bp, Bos taurus
  Clone ID: 26-LIB2809-019-Q1-E1-G9
acagtatactttaaaattttctttttaaattgaaagccaacaactctgcctttatgatgctaagctcatgttcttatttcttctcctatcttctttctcttctgttcccattatccttccctttgttttgtccctgtcaccttcctttctccttctcctcattgccccccaggcaagcaggtggtcagtcattggtgggtttccagcttccaaagcctagacaaccctgctgtagtctcaaactagtggtctttgccccggctgaccctttccttgagctgtctgagctttaaggtggatggctcaagctagagatatgacagaatcttctgggaagggccttgatgatcttcagcccagacttttgctaaatgaaatggaaaaataactttattttggcacc

SEQ ID NO: 5993 - DNA, 328 bp, Bos taurus
  Clone ID: 26-LIB2809-020-Q1-E1-G5
actttgtattttttcagtctgagaagctgttcctattcaaaaagaaaaaatattgtcaatttcgtggataccatctatcatagtatctctttcccaggagtaaataatgagaaactaataatcttactttagtgttgtttctaccacagagaatttggattagcctaattcttcttctttttttttttttttaatattaggaaaactactttgttacattatttttaacttaaaatatattataatgcagtcagatataaataagtattcagtcaatcctaagagaaatcagtcctgaatattcactggaaagacgtttgctgaaact

SEQ ID NO: 5994 - DNA, 425 bp, Bos taurus
  Clone ID: 26-LIB2809-021-Q1-E1-G5
acagcaaaaaggcctgaatgggcatatctctctggggatagggcactgctttctggggaacaggcaggactttggactgagaaagggacagcacggactgaggaggaaacatgacagttggaggaagaggctggtgaggctggtgcatccaagactggagcagaggcagaggaaggtgcagattttcaacatcagtgagagtcaggctctggctttcagtaaagggctcaactggatatttagggaagggcatttctttgtgcttaggagccatagcctccttcactttggagactcccattacttcaggctgaaggaaaggcggcaccaccacaggggtttgagtaagaggagggatgttttgtgggaggctgttatggatgggcccagggaagggatagactagagactgtgtctgggcaaag

SEQ ID NO: 5995 - DNA, 373 bp, Bos taurus
  Clone ID: 26-LIB2809-021-Q1-E1-G9
catggccgcgggaaaccccagatggcaattgttcccaatagtgctgaggaacgacttcacagtatgaattatggaatccatgcccaacatctagaacctatgataggagtgcatcacgaactggcctacctctaccctgagcttttcagacaattctactcagctggctgcctatccatctggtgcctgctattacgttccactaggcatacaatacactgatgccccatcattctctgacatccctaatcccattggctctgataacagtgaagagatctactatgccactgtggtgtacagtctcgtgcattctgacggactccacagttatggtcattgatggttctgaaaattctatgctctacatgtc

SEQ ID NO: 5996 - DNA, 202 bp, Bos taurus
  Clone ID: 26-LIB2809-023-Q1-E1-G5
ttttcttttcatattgatcggcaacaactctgcctttatgatgcggagctcatgttcttaattcttctccgatcttctttctcttctgttcccattatcggtgcctttgttttgtcgctgtcaccttcgtttcgccttctcctcattgccccccattcaagcatgtggtcagtcattggtgggtttcgagcttccatcgcct

SEQ ID NO: 5997 - DNA, 403 bp, Bos taurus
  Clone ID: 26-LIB2809-026-Q1-E1-G9
acagtatactttaaaattttctttttaaattgaaagccaacaactctgcctttatgatgctaagctcatgttcttatttcttctcctatcttctttctcttctgttcccattatccttccctttgttttgtccctgtcaccttcctttctccttctcctcattgccccccaggcaagcaggtggtcagtcattggtgggtttccagcttccaaagcctagacaaccctgctgtagtctcaaactagtggtctttgccccggctgaccctttccttgagctgtctgagctttaaggtggatggctcaagctagagatatgacagaatcttctgggaatggccttgatgattttcagcccagacttttgctaaatgaaatggaaaaatagctttattttggcacc

SEQ ID NO: 5998 - DNA, 376 bp, Bos taurus
  Clone ID: 26-LIB2809-027-Q1-E1-G5
gggatacagcaaaaaggcctgaatgggcatatctctctggggatagggcactgctttctggggaacgggcaggactttggactgagaaagggacagcacggactgaggaggaaacatgacagttggaggaagaggctggtgaggctggtgcatccaagactggagcagaggcagaggaaggtgcagattttcaacatcagtgagagtcaggctctggctttcagtaaacggctcaactggatatttagggaacggcatttccttgtgcttaggagccatagcctccttcactttggagactcccattacttcaggctgaacgaaaggcggcaccaacacacgggtttgagtaagacgagggatgtttttgtggaag

SEQ ID NO: 5999 - DNA, 394 bp, Bos taurus
  Clone ID: 26-LIB2809-028-Q1-E1-G5
tggaaagggaaaggataaatattgaaggaatttactatttaaatgttcatcacaaatgttctttgaaagatctaggctggaaaggcaaggctaagtgtgaccacagctataagtcaccttgagaagacgagaggttctcagaggcgacaacaacaccaaagtcaggtttagacttgattagccatacaagaagagaaaaggacattagattttaaggcagggagaactaaacaccaacacgaagagtagttaaggaagaaagagctagaagaatataaagactctgcaggaaacatggtgtttcaccctacacacagaaagggacctcagcgaaactgcagagggctgatcctcaaaccgatcacgtctttgccaatctctgtcaccgtagtga

SEQ ID NO: 6000 - DNA, 263 bp, Bos taurus
  Clone ID: 26-LIB2809-031-Q1-E1-G5
cgccatgggcgcgggatactccttagccatggcggccagcgacatctccctgctggacgcccagagtgcccccctgagagtgtatgtggaggagctgaagcccacccctgagggcgacctggagatcctgctgcagaaatgggagaatgatgagtgtgctcagaagaagatcattgcagaaaaaaccaagatccctgcggtgttcaagatcgatgccttgaacgagaacaaagtccttgtgctggacaccgactacaaaaagt

SEQ ID NO: 6001 - DNA, 436 bp, Bos taurus
  Clone ID: 26-LIB2809-032-Q1-E1-G5
actttgcccttccctgtccatcccagacctactcagctcccaccgtgcctaagaaaacgggatggcttgaggactgggtgccagagacccctgggcgggggcgaggaagaggagggagggagaggtgactgggagggagacactgcctgcccccaggtcagctacaatcaggagggcgggcggaggaggcagctttttttttttttttttttttttttttcttagtgccttaaaatgtaatttattgaaaagaagaaagacaaaatctcagttaatgcacacaattatttgatatgatggcacttacaggagaagtgattcaaaggcttttaaaacattttccatacagaaatttaatgaagactttaattccctttgactcagtggcctttataccagcatgatactactggaatttaggtaacaagctgttagg

SEQ ID NO: 6002 - DNA, 365 bp, Bos taurus
  Clone ID: 26-LIB3057-001-Q1-K1-G9
atcgcgacggccgccctttttttttttttttgaaacttgaaaggttttatttcttaactacagacagctttaagagtcgggatacctggcgccatcactgcctgggcgaatcctcacccaggctgcgaggcggcaggagggcagaagagaggccttcggggtcaactttccgcggagagagacccctgcccgctgcgccctcactggcccttcttgtgggcgttcttgatgatggcgtttttgaacagcgtgacaaggggcgtttggctcttctcggaggtcatgaacccaccgtagcgcttgtccttgggcgggctgccccagcggaagtgttccatcttatagggccccgagtccttcttctc

SEQ ID NO: 6003 - DNA, 363 bp, Bos taurus
  Clone ID: 26-LIB3057-003-Q1-K1-G5
ccctattctatatcaacacttattctgattctttggacaccccgaagtctatatttgaatcttacctgggtttggaataatctctcatatcgtgacctactactcaggaaaaaaagaaccattcggatatatgggaatagtttgggctataatgtcaatcggatttctaggtttcatcgtatgagcccaccatatattcactgtcggaatagacgtctacacacgagcctacttcacatcagccactataattattgctattccaaccggggtaaaagtcttcagctgattggcaacacttcatggaggtaatatcaaatggtcttctgctataatgtcgagcctctaggctttatttttctt

SEQ ID NO: 6004 - DNA, 363 bp, Bos taurus
  Clone ID: 26-LIB3057-003-Q1-K1-G9
aacgaatttgataaacggtatgcccagggcaaagggttcattaccatggccctcaacagctgccatacctcctcccttcctacccctgaagataaagaacaagcccaacagacccaccatgaagtccttatgagcttgattcttgggttgctgcgctcctggaatgaccctctctatcacctagtcaccgaggtgcggggtatgaaaggagccccagatgctatcctatcgagggccatagagattgaggaagaaaacaaacgacttctggaaggcatggagatgatatttggccaggttattcctggagccaaagagactgagccctaccctgtgtggtcaggactcccgtccctgcaaact

SEQ ID NO: 6005 - DNA, 177 bp, Bos taurus
  Clone ID: 26-LIB3057-005-Q1-K1-G5
gtctaccggaagcggccgccagctgtgccttctagttgccagccatctgttagatgcccgtattgcgtgcctaacttgaccctttaaggtgccactcgcactgtcctttgctaataaaatgaggaaattgcatcgcaaatggcataaaggagaaggaggcaagaaaggattaaaaac

SEQ ID NO: 6006 - DNA, 342 bp, Bos taurus
  Clone ID: 26-LIB3057-005-Q1-K1-G9
ctagatcgcgagcggccgcccttttttttttttttttttttttttttttttttgtttgtttttttttttttttttttttttttttttttttttttacaaaatagttcacaatatttattgggcaagcattgccctgaaaacaactttaccccccgtagggcaacctacaataagcaaaccgaaagggggggcaaaaaccaacaggttggtcacccttctggggggtcccccctgggcttggcttacaaaccttccatccttgaaatggtggacccccattaaaacagtccacccaatccccagaggggcccaatttttgaccccggttctggaaaggaaaag

SEQ ID NO: 6007 - DNA, 354 bp, Bos taurus
  Clone ID: 26-LIB3057-006-Q1-K1-G5
cggacgcgtggggaagaaaagtgaccgagaggccgctgaacatcctcgccccggcgcagcgggagccgtccgaggcagcttgcccgtgacagagcctcagcctgcctggaagatgccgagactgtgcagcagtcgttcgggcgccctgctgctggccttgctgcttcaggcctccatggaagtgcgtggttggtgcctggagagcagccagtgtcaggacctcaccacggaaagtaacctgctggcgtgcatccgggcctgcaagcccgacctgttcgtcgagacgccggtgttgcccggcaacggcgatgagcagccgatgactgagaacccccggaagtacgtcatgggcca

SEQ ID NO: 6008 - DNA, 412 bp, Bos taurus
  Clone ID: 26-LIB3057-007-Q1-K1-G9
cccacgcgtccgcccacgcgtccgattctctgtatttcagggttgaaaattcacacgttgaattgaaatttggaaatcgtgacaccaaccctacaccaccatggcctccgtagacaaattttgggcttttgccctcgctcttctcctccttgcctaccctctcctccaagttgctaggtgtcagtcagactccgaagatgtagtggaggctgctgaagaatcaagtgatatcggcattgttggtgatgatgtccaagactttggtgatgggaccttcccttctgctccaggaattgaaacaataagtgtttttccaaaaaatagtgcgagattgataacagctggagaagagacagagctgcttgttggtgttaaaaatgatggggattcaagcttgaatgttattgcgatc

SEQ ID NO: 6009 - DNA, 277 bp, Bos taurus
  Clone ID: 26-LIB3057-008-Q1-K1-G9
attcggctcgagttcaaatcttactgtcccaaaaatcctttctttattgaagagccattagacttcaggctgtacagcaaagtcctacatctatgcattccaattcccatgacaaatcgctatgacagtaaccccttcgatgaggaataagctaaccccttctataatcctggaactgttctcactgccactaattcaaggcttacacctatgaatccagaacctgatgattataactatagatgtactgcgacagctgatatacctcttgattcat

SEQ ID NO: 6010 - DNA, 384 bp, Bos taurus
  unsure (323): unsure at all n locations; Clone ID: 26-LIB3057-009-Q1-K1-G9
cggacgcgtggggcgcacgttgcagtccaagtttgtgctgttcggccgtgaggtgagccctgcccatcagtatgctctggctgggggcgtctcctttcccttcttctggctggctggcgcaggctccgctgtcttctgggtcctgggagccactctcgtagtcatcggcttccacgccgtcttccaccagatagaggctgtggacggggaggagctgcagatggaacccgtgtgatggggcttcgtgggcccaccaggcttccgagctagctgtccctgttcacccggtcccactcagctctgcagctctggccaaaggcccncttaccacatcaagaccagggagggactccacctttggaaataaaactgttacagttgttc

SEQ ID NO: 6011 - DNA, 427 bp, Bos taurus
  Clone ID: 26-LIB3057-011-Q1-K1-G5
gagcgatggcactacctgccgtgccctctgcccgtccgccggtctggcaccgggaggagcctcctgcaccgcgcctacctgactttgtgcctgcaccctgcccctgctccaggccaaggacgagctgaatgaaaaggaagagacccgggaagaggcagtgcgggagctacaggagctggtgcaggcggaggccgcctcggggcaggagctggccgtggccgtggcggagagggtgcagggaaaagacagtgccttcttcctgcgcttcatccgcgcgcgcaagttccacgtggggcgcgcctacgagctgctcagaggctacgtgaacttccggctgcagtacccagagctcttcgacagcctgtccccagaagctggccggtgcaccgttgaggctggctaccctggtgtcctctccacgcgggac

SEQ ID NO: 6012 - DNA, 409 bp, Bos taurus
  Clone ID: 26-LIB3057-011-Q1-K1-G9
gtgtaagttctatatcgcctctgatgtctggtctttcggagtgactctgcatgagctgcttacttactgtgattcagattccagtcccatggccttgttcctgaaaatgataggcccaactcatggtcagatgacggtaacaagactcgtgaatacattaaaagaaggaaaacgcttgccatgtccaccgaactgtccagatgaggtttatcaacatatgcgaaagtgttgggaatttcaaccgtctaatcggacaacctttcagaaccttattgaaggatttgaagcacttctaagaagcatgagtaacatttaaattctaatgtgtcctcctacccccaaccagtacccaagccatttacaaaaattgttactggaaaaaaagtttgtattctgtctaaaaagatac

SEQ ID NO: 6013 - DNA, 385 bp, Bos taurus
  unsure (273): unsure at all n locations; Clone ID: 26-LIB3057-012-Q1-K1-G9
gctggagctgatagactccagacaggtatgcgcggtgcctttggaaagccccagggcgcagtggccagggtccacattggccaggtcataatgtccatccgcaccaagctgcagaacaaggaacatgtgattgaagccctccgccgggccaagttcaagttccctggccgccagaagatccacatctctaagaagtggggatttaccaagttcaacgcggatgaatttgagaacatggtggcagaaaagcgactcatcccagacggctggggngtcaaatacattcctaaatcgggtcccctggacaaaatgccggccctaaaattatgagcatcagtgctgtcccctcctaatcatgctcaccaataaatgctatttcctgtcc

SEQ ID NO: 6014 - DNA, 389 bp, Bos taurus
  Clone ID: 26-LIB3057-013-Q1-K1-G5
cgggacacaggtgtcgtgaaaaccaccgttaaacctaagccaaaatgggaaaggagaagacccacatcaacatcgttgtcattgggcacgtagattcagggaagtctaccacgactggccatctgatctataaatgtggcgggatcgacaagagaacaattgaaaagttcgagaaggaggctgccgagatgggaaagggctccttcaaatatgcctgggtcttggacaaacttaaagctgaacgtgagcgtggtatcaccattgatatctccctgtggaaatttgagaccagcaagtactatgttaccatcattgatgccccaggacacagagacttcatcaaaaacatgattacaggcacatcccaggctgactgtgctgtcctgatc

SEQ ID NO: 6015 - DNA, 350 bp, Bos taurus
  Clone ID: 26-LIB3057-013-Q1-K1-G9
tttcaatagatcgcagcgagggagctgctctgctacgtacgaaaccccgaccgagaagcaggtcgtctacgaatggtttagcaccaggcgccccacgaacgtgcggtgcgtgacgggcgagggggcggccgcctttccggccgcgccccgtgtcccgggacgaagggctctccgcaccggaccccggtcccgacgcgcggcgggggcgcgccgcgccgcgccccgggggacgcgggcgacggcccgccggcggggacggcgggggaccggctatccgaggccaaccgaggctcccgcggcgctgccgtatcgttccgcctgggcgggattctgacttagaggcgttcagt

SEQ ID NO: 6016 - DNA, 318 bp, Bos taurus
  unsure (54): unsure at all n locations; Clone ID: 26-LIB3057-015-Q1-K1-G5
tcccggtctacccactcgtcctatctcgagcttcctcccttttttttttttttnactccactctccaatcactacgtactgtttcatttgaaggtatcgtcaacaaataacataatataccaacaatctcatcacttacaatcactaattcccttaaagtttaaactttaatgacgtaaaaagtttctattgtatttcacttatagtatttctcatccccttcaaatttatccttttttacattaaatcctttttgaaatatattttctttctttattacaattatatttaactaatctttttatattccttattatt

SEQ ID NO: 6017 - DNA, 399 bp, Bos taurus
  Clone ID: 26-LIB3057-016-Q1-K1-G5
cacgttcattctccgtcctcgcgccccttttcctacactttcctcttctgtccgaccgggggagtcgctctgcccgcgcggtgcattctggggagccaggtcgagcccgccgccgccgtcgcttgaggaaagcgagaagaggccgcgactggggagaagacgccggagtcgccaccggagaggagtcgcctgcccaggagctgccgccggagaggcccgccaacccgttcgcccgtccccctgccccgtttcacgatgcaacctgcttctgcaaagtggtacgatcggagggactatgtcttcattgaattttgtgttgaagacagtaaagatgttaatgtaaattttgaaaaatcgaaacttacattcagttgtcttggaggaagtgataattttaaa

SEQ ID NO: 6018 - DNA, 327 bp, Bos taurus
  Clone ID: 26-LIB3057-018-Q1-K1-G5
ccgagccatggggcggctgctggcgctgagcttgctggggatcgcgctggcgctggtgggggagaggctcctggcgctcaggaatcgacttaaagcctccagagaagtggaatctgtagaccttcctaattgccacctgattaaaggaatcgaagccggcgctgaagatattgacatacttcccaacggtctggctttctttagtgtgggtctaaaatgtccaggcctccacagttttgcaccagataagcctggaggaatactaatgatggatctaaattaagaaaacccaagggcactggaattaagagtcatccgtggatttaa

SEQ ID NO: 6019 - DNA, 341 bp, Bos taurus
  Clone ID: 26-LIB3057-019-Q1-K1-G9
cgcggcggcaagatggccgtgcaaatttccaaaaagaggaagtttgtcgctgatggcatgttcaaagctgaactgaacgagtttctcactcgggagctggctgaagatgggtactctggagttgaggtccgagttacaccaaccaggacagaaatcattatcttggccaccaggacacagaatgtacttggtgagaagggccggcggatccgggaattgactgctgtggttcagaagagatttggcttccctgaaggcagtgtagagctttatgctgaaaaggtagccacaagaggactgtgtgccattgcccaggcagagtctctgcgttacaaaactct

SEQ ID NO: 6020 - DNA, 437 bp, Bos taurus
  Clone ID: 26-LIB3057-020-Q1-K1-G5
cggaaatgttcaacgaatttgataaacggtatgcccagggcaaagggttcattaccatggccctcaacagctgccatacctcctcccttcctacccctgaagataaagaacaagcccaacagacccaccatgaagtccttatgagcttgattcttgggttgctgcgctcctggaatgaccctctctatcacctagtcaccgaggtgcggggtatgaaaggagccccagatgctatcctatcgagggccatagagattgaggaagaaaacaaacgacttctggaaggcatggagatgatatttggccaggttattcctggagccaaagagactgagccctaccctgtgtggtcaggactcccgtccctgcaaactaaagatgaagatgcacgttattctgctttttataacctgctccactgcctgcgcagggattca

SEQ ID NO: 6021 - DNA, 426 bp, Bos taurus
  Clone ID: 26-LIB3057-020-Q1-K1-G9
cgcgtgacccgggcccacctgcaaagttctgcatcgccactcagacatcatggcggacaaccgggatccagccagcgaccagatgaaacactggaaggagcagagggccgcgcagaaacctgatgtcctgaccactggaggtggtaatccagtaggagacaaactcaatagtctgacagtagggccccgagggccccttctcgtccaggatgtggttttcactgatgaaatggctcactttgaccgggagagaattcctgagagagtcgtgcacgccaaaggagcaggggcttttggctactttgaggtcacacatgacattaccagatactccaaggcgaaggtgtttgagcatattggaaagaggacgcccattgcagttcgcttctccactgttgctggagaatcgggctcagctgacacagt

SEQ ID NO: 6022 - DNA, 430 bp, Bos taurus
  Clone ID: 26-LIB3057-022-Q1-K1-G5
aaagaggtcacatacattcaaaatctgtcacaggaaatagcctgcattggtgtgtgttagagtattttgcttaatgaaggccccagttctgaatattgatacaagtagttaaaagtaaactggggccatcttatgtgtttatccatgtcaagtttttctggtattaagaaataatctacacatattttgatcctgtgaaagattctaggtagagaaaagaaagagacctaaccttcaacaaagttatttttggaaacatgatttttgtcattaaatgttatattatttcacatatataaaacagatgttatgtaagaatgttgtatattttaacataaacccatttagagagattatctagattcattaattttcatagtgcctttttcacatgaatcagctggaaagtctgcaataaacagtatttgct

SEQ ID NO: 6023 - DNA, 319 bp, Bos taurus
  Clone ID: 26-LIB3057-023-Q1-K1-G9
ctcgacagctgccatacctcctccctttctacccctgaagataaagaacaagcccaacgtacccatcatgaagtccttatgagcttgattcttgggttgctgctctcctggaatgaccctctctatcacctagttacctatgttcttgtttattaaaggagccccagatgctattctatctatggccatatatattgatgtataaatctaacgactttttgaaggcatttatatgatattttgttcctaaacattgtggctggactcatgctcagtggttcaataagagtgctggatttttactactcatgctcaaata

SEQ ID NO: 6024 - DNA, 350 bp, Bos taurus
  Clone ID: 26-LIB3057-025-Q1-K1-G9
ctagatcgcgagcggccgctcgcgatctagaacagtgggagttagggaggtaggtggggggttcctcgccgtctccggtccacagccgctcctctttctgtacttctgccgctgtaccacgatgccgcagtaccagacttgggaggagttcagttgcgcagcggagaaactctacctcgccgacccaatgaaggcccgtgtggatctcaaatataggcattctgatggcagtttgtgtattaaagtaacagatgatttagtttgcatggtgtatagaacagaccaagctcatgatgtaaagaagattgagaaattccacagtcaactaatgcgacttatggtggccaaag

SEQ ID NO: 6025 - DNA, 352 bp, Bos taurus
  Clone ID: 26-LIB3058-001-Q1-K1-G9
ctgggcgcggggggcctcaaggagggtataggggggtcacccctttcaagcaacaagcgtgcacgtaccagatcattgtctattccaaaatggtccttgaaaagttcaatggctaatcatgatatccatggatggtaccttcgctgataagactaagatgatccttctccaatctcattattgatgctgatgtactcacacaatgtttcttctacagagctctgattgcttacttgattacaccaatgctacatctttacatcacatcgtctcacagtgattggttacaagagccatagccatgtaatggctgttggtgatgtgtgtggttcaatttgcattcttggcctta

SEQ ID NO: 6026 - DNA, 469 bp, Bos taurus
  unsure (381): unsure at all n locations; Clone ID: 26-LIB3058-005-Q1-K1-G9
cggacgcgtgggttgaaatacaatacataatgtcagagtcagatattcttccttcacggcgcttgctccgtgcaaaggcccagggtgatttgtgaatggccttgctagtgaccgttccgctctctgccaatcagccactcatcttttcgtctcactgggcaccacgttttgctgggcagttaagtagctgccgtccactggggttcttagggatatgccttgacctcttggcatatcaggtgggaaccagttacaggtaaaatacttaaaagttctctggggccaagagcctctgacagtgactctgaaggggttagagatggactaattgggaccagattggggcatcatttcggccactggttgccttccttgcttcanactgaaattcagtttggcttcaagtatagggacacgtggtggtggattcatctacttcagtgtttgttttgaccaaaagtttattttt

SEQ ID NO: 6027 - DNA, 390 bp, Bos taurus
  Clone ID: 26-LIB3058-006-Q1-K1-G5
tcggttttgaatcaatgttactgttttcaaacttggaattcctacactttgggctccaggttccttcagggagaaaactaaagaatgactattacccagaaaaatcggtcggtccggttccaaagccatggtcattgcagcaacttctggggacactggggtgtcttgttacatattgacatctgttctgtccagctctgccctcaccctcctgtcttgtagatctgccttctggacggttgacgaggtttgccaagggctgtggaggctcagagtgtgcactcacaggcatggtctcagaactggcccgctgaggcagcatggggtcagcggctgaagccccctccctcctgtgtggtttcccttcgtcgagtagctgcatgttacctc

SEQ ID NO: 6028 - DNA, 422 bp, Bos taurus
  Clone ID: 26-LIB3058-007-Q1-K1-G5
agcagcctccccccttgagccccctcgcttcccgacgctccgtcccccctgcccgccttctcccgccgccgccttccgcaggccgtttccaccgaggaaaaggaatcgtatcgtatgtccgctatccagaacctccactctttcgacccctttgctgatgcaagtaagggtgatgatctgcttcctgctggcactgaggattatatccatataagaattcaacagagaaacggcaggaagaccctcactactgtccaagggatcgctgatgattacgataaaaagaaactagtgaaggcgtttaagaagaaatttgcctgcaatggtactgtaattgagcattcagaatatggagaagtaattcagctacagggtgaccagcgcaagaacatatgccagttcctggtatagattggactggc

SEQ ID NO: 6029 - DNA, 299 bp, Bos taurus
  Clone ID: 26-LIB3058-008-Q1-K1-G5
aagtagccattctactggctgtgaagtcgcagtttaatttgcatttctccaatgactagtgttgcgaaatatcttttaatgcactcattgttcattgtcaatcttctctagagaaatgtctattcaatcatttgccaatttttaaattgtgttgtttttctagatgttgagttgtagttctttatatactctgaattaataacccttatcagatatgattttcccccatttcataagttgtgttttcaacgtgtcctctgatgtaccgaacgttttcttgtgaactccaaatttttttt

SEQ ID NO: 6030 - DNA, 424 bp, Bos taurus
  unsure (312): unsure at all n locations; Clone ID: 26-LIB3058-008-Q1-K1-G9
gcactaacatccacatggctgctgcttcttaaaccttcagaatgttccttcctgacttagaatcccaagtgctggggcagaagaggaaaagaatatatattagcatcgaaagcgggatgagggggtctgacatcacttttgcttttcatccttagcgtttctctctctgtggtgacttagggtacactgcttcctcagagaaggggcctcttaagtgcttttccaagttcaagtccagcaggactggttctccctaaaacaagctcagatgaccagagtcatagccttgggacccaccttgggacccacccnctgccccccgaggcccccaggttctctggctcatcatcagcgtgaccccagtcaggggcaggtacacccctcacctcagtgttacggctgccctggcctgagaaccatgccc

SEQ ID NO: 6031 - DNA, 426 bp, Bos taurus
  Clone ID: 26-LIB3058-009-Q1-K1-G5
cgcgcgggcagcggtgaccgaggcgtgctgggattccagaagtggagaaggaggcaagatgaagactctactgctgttgatggggctgctgctcagctgggagagtggctgggcaatctcggacaaagagctccaggaaatgtccaccgaggggagtaagtacgtgaataaagaaattaaaaatgccctcaaggaggtgaaacagataaagacccaaatagaacaaaccaatgaagagcgcaaattactgctcagctccctagaggaagccaagaagaagaaagaggacgccctgaatgacaccagggattctgaaaacaagctgaaggcgtcccaaggggtgtgcaatgagaccatgacagccctttgggaggaatgtaagccctgcctcaagcagacctgcatgaagttctacgcgcgggtgtg

SEQ ID NO: 6032 - DNA, 435 bp, Bos taurus
  Clone ID: 26-LIB3058-010-Q1-K1-G5
agatgtcgatcctaacgaccaagaggaagatggtgcaaacattgatctagactcccaaaggaagggcaagtgcgcagtgatcaaaacctctacgcggcagacctacttcctgcctgtgattggcttggtggatgccgaaaagctgaagccgggagacttggtgggtgtgaacaaagactcctatctgatcctggagaccctgcccaccgagtacgactcgcgggtgaaggccatggaggtggacgagaggcccacggagcagtacagtgacatcgggggcctggataagcagattcaggagctagtggaggccattgtcctgccaatgaaccacaaggagaagtttgagaacttagggatccagcccccaaagggcgtgctgatgtacgggccttcaggtacagggaagaccctgctggccagggcctgtgctgc

SEQ ID NO: 6033 - DNA, 320 bp, Bos taurus
  Clone ID: 26-LIB3058-011-Q1-K1-G9
tcgccggacggcccagagagaaggccgggatcgtgaccgggaccgacgtcgaagccaccgcagcgagcgggagcggcgccgggaccgagatcgcgaccgggaccgggagcacaagcggtgggagcggggcggcgatcggggcagggatgaggcccgaggtgggggttgcggtggccaggacaacgggctcgagggtctgggcaacgacggccgagacatgtacatggagtccgagggaggcgacagggatctcgctccggagaacgggtatctgatggaagctgcgccggagtgaagaggccgttcaacggatgtttgga

SEQ ID NO: 6034 - DNA, 359 bp, Bos taurus
  Clone ID: 26-LIB3058-012-Q1-K1-G5
tcatggaattaagttaaacatgacatcaccaaggggaacttgtaaaactccagtaactcaaagaaatggagatctataatttgcctgaaaaagaattcaaaaaaatctcttgaagaagctcaatgaaaggcaagagaacacaggtagacaactaaacaaaatcaggaaagcaatgcatgaacaatgcatgaactttaacaaagaagtagaaaccataaaaaagaggcatgcagaaatactgcagctgaagaatacaaggacagaactgaaaaattcaatagaaaatttcaacaaaaatccttgatcatgcagaagaaccagtgaactcaaggacagataatttgaaattaaccagtgag

SEQ ID NO: 6035 - DNA, 240 bp, Bos taurus
  Clone ID: 26-LIB3058-014-Q1-K1-G5
gcttccgccgattcttatccgaatgatctgtgaacgcgggacgcgagtgcggagctcggttttcggagcgtggctagcagctggcacgatgggcggttagcaggaggaggatcggttcgacggcatgttgctgaccatggcgcagcttcacgagggcggcttgcaagatctgttgaacactttattcagctttcttcgactcaaaacagacttctttgttggaggataggacggcatggc

SEQ ID NO: 6036 - DNA, 337 bp, Bos taurus
  Clone ID: 26-LIB3058-015-Q1-K1-G5
tcacaaccagctcaatgacgcagtgtgtgactgagtgacctccattcgtggccacacgcaacagtgagagctgtgaccacgggtctcaaggaaagtatgcactgttcttgagtattgaaataaagtaatacacttttaatgaaaaaaaaaaaaaaaaaaaaaaaaaaaaaaaaaaaaaaaaaaaaaaaaaaaaaaaaataaaaaaaaaaaatatttaataatattaaatatcacattttttttatataatgtaacttaattttaatttgttaaatatattatatttatttgagtttatatgtttgattaatgttttctttttttaatttttttttta

SEQ ID NO: 6037 - DNA, 298 bp, Bos taurus
  Clone ID: 26-LIB3058-016-Q1-K1-G5
tcgcaaatacagggaatggcaccatttcctggtggtcaacatgaagggcaacaacatcagcagtggcacggttctctccgattatgtgggctctgggcctcccaagggcacaggcctgcaccgctatgtctggctggtttacgagcaggaaggaccactgaagtgtgatgagcccattctcagcaaccgatctggagaccaccgtggcaaattcaaggtgggctctttccgcaaaaagtacgaacttgggggcccagtggcccgcacgtgttaccaggccgaatgggatgataatgtg

SEQ ID NO: 6038 - DNA, 450 bp, Bos taurus
  Clone ID: 26-LIB3058-018-Q1-K1-G5
cggacgcgtgggtgatttttttttatattctttttagtattcagtggaaattttgttcctgaaaaagacaaagggttagagttaatgtgctgtagatacacacacagagaataggccatatatttactagaagcagctttatgtctagcttgtgtctttttgtttgttggcttgtttgtttttaataattcctgagagatgtctctggaaggaaaagtgttttgaaaactaatgactatttttgaggacaaaaatgacaacttaagctaatttcttaaatacagtaggataactttcaggacaatattgcctcacaaccctgctcacattgagaagtctttttttcgtttccccttagctgttctgactggatttttctacagaagctatggaagattatctttgttctcgtttgctgctatttcctgtcctactttaagaaatataaat

SEQ ID NO: 6039 - DNA, 461 bp, Bos taurus
  Clone ID: 26-LIB3058-022-Q1-K1-G9
gtatctttaaactcacacgttatctcaatgcgcgtacaagaagtcgtccagtgctacagtgcggagtcgaacctctgccatctgtctgcacaagtgaaggctggacagatgacggacggtccacgagggagctgtggaaacctttacatacagcactagctccgagtctcgatgtcgatttccaagacctcacctgaagactgccagtgtagtgcttgatattcgctgacgaccacttctcggctctgtcttgccctgcttgcccttatacaaagctgacatttgtatgttaacaggtggaaccccatgatcgcagtagccatgacctgatccccaaggtgaaacgtcacacttgtacttgcacacacaagcgtttggaaatatgaagtgactggtcgacttgagcatgttactgacaagggagtattggcgtatttttccgtgggactagcatgtcacta

SEQ ID NO: 6040 - DNA, 419 bp, Bos taurus
  Clone ID: 26-LIB3058-023-Q1-K1-G5
cggacgcgtgggcggacgcgtgggctacagaaccatgtgcagaggagaaaattccatgcttggacaattaaaagcagagattggcaatcagtggataaattatatatccttctgtggtcttagaacacatgcagagcttgaaggaaacctagtcactgagcttatctatgtccacagcaagttgctaattgctgatgacaacactgttattattggctctgccaacataaatgaccgaagcatgctgggaaagcgagacagtgaaatggctgtcattgtgcaggacacggagacagtcccttcggtaatggatggaaaagagtaccaagctggtcgatttgcccaaggacttcggcttcaatgctttccgggttttgggttttgctcggctatctttctgacccgagtgaagacattca

SEQ ID NO: 6041 - DNA, 413 bp, Bos taurus
  Clone ID: 26-LIB3058-024-Q1-K1-G9
aaattttaagtaatttaaaaaatgctttaagattctatatttctggagtacctatgaagtggtatgactacatcatgtgaaatatttattttcttctttaactttggagtagcagtttttattttaattaaataaaattccaattttttcaacaaattcagggaagatttggtcacattgaagatacagtatttttgtagtatttataagctgtcctatgtgatagacttttagaaagcattttttttatatgaaggtaaaccagtccattatatagctcgttcagactctgtgaacattacacctactaggtttcgatttatcacgtggcacagaatctgcctttgcactgagtaccttttcattcgcatctcctctgccttagtcacagtggcagcagtgcagaaaactct

SEQ ID NO: 6042 - DNA, 419 bp, Bos taurus
  Clone ID: 26-LIB3058-027-Q1-K1-G5
gtaccccggcatcgcggacaggatgcagaaagagatcactgccctggcacccagcacggtgaagatcaagatcatcgcgccccctgagcgcaagtactccgtgtggattggcggctccatcctggcctcgctgtccaccttccagcagatgtggatcagcaagcaggagtacgatgagtccggcccctccatcgtccaccgcaaatgcttctaggcggactgttagctgcgttacaccctttttcttgacaaaacctaacttgcgcagaaaacgagatgagattggcatggctttatttgtttttttttttttgtcttttttgatttttttttttttttggcgcttgactcaggatttaaaaactggaacggtgaaggtgacagcagtcggttggatcgagcattcccaaagttctaca

SEQ ID NO: 6043 - DNA, 274 bp, Bos taurus
  Clone ID: 26-LIB3058-028-Q1-K1-G5
aaaaaggagttgtccgacattgccctgcggattgaggccccaggcaaaggcgggctggccacaaatgaggcagggggcagcatgaccaagccactgagccaaaaacggcatgagaacaccggctaaaacaccatcgtaggaaactcagcttgggggcacagcacgagggcactttgcataacaacgagtgcggtcgaaaattcgatcccagggaaaagagctgaaatccaacatgcctaggggccatagaagcaaaacataaaacagacgcaat

SEQ ID NO: 6044 - DNA, 395 bp, Bos taurus
  Clone ID: 26-LIB3058-028-Q1-K1-G9
atcgcgagcggccgccctttttttttttttttttgtttttttttattttactggcttggttggcgttaacgagactttactgaaaacaacaccgggcgaaccaaggattacaaacacggaatgtggactcttagcaaaacaaagcaaaaaaacaaacgcgaggaaaagggcggcaggagggggtgtcggagggatggaaggggaggggaagcctgagcgtggaaaggggagagagggcttacacattgcaatcatattaaccatttccttaaaaaacctacacaggtgaacacacacacatacaaccaacgttagttcccgagtcgaaacataaatagggctaaatcgaacactatgttctatcttccaaagtcaaaaaagaacataaggggggg

SEQ ID NO: 6045 - DNA, 423 bp, Bos taurus
  Clone ID: 26-LIB3058-029-Q1-K1-G5
gtaagtccttgtgtttatctattttatacatggtagtgtgcatctgttaataccatgctctcaatttatccctcccagcttccccctttggtaaccgtaagtctgttctcatgtctgtggggctatttctattagattctatttctattagattccacatataagtgatatcataaacttgcctttctgtctcacttcacttaatttctagatccatccatattgttacaaatggtattgtttcattcttttctatggctgagtaatatgccatcacatatatgtaccacaacttctttattcattcttctgttgatggacacttaggtttcatccatgtcttggctactgtaaacagtgatgttatgaacattggagagcatgtccagatatatgccctagaatgggattgctggatcatat

SEQ ID NO: 6046 - DNA, 413 bp, Bos taurus
  Clone ID: 26-LIB3058-030-Q1-K1-G9
aaaagaccctgatgctgggaaagattgaaggcaggagaagaaggggatgacagaggatgagatggttggatgacatccctgactccatggacatgagtttgagtaagatttggaagttggtgatggacaggaaagcctggattgctgcagttcacgggatggcaaagagtcgaatacgactgagcaactgaactgaactgaaatatatatgtttggggaatcatgatttgtattacagaaataccaagtctgaactgccataccacccagcaatgccactgctgggcatacacactgaggaaaccagaattgaaagagatatttgtaccccaatgttcaccgcaacactgtttgtaatagccaggacatggaagcaacctagatgtccatcagcagatgaatggattagaaag

SEQ ID NO: 6047 - DNA, 400 bp, Bos taurus
  Clone ID: 26-LIB3058-032-Q1-K1-G5
cggcggcgtcccctatggacgacggttcctgagcctggatctcccacctatgtgctggacagggacaggccagaatgggctgatatagatccagtgccgcagaatgatggccccaatccagtggtccagatcatttatagtgagaaatttcaggacgtctatgattatttccgggctgtcctgcagcgcgactagagaagtgagcgggcttttaaattaaccagagatgctattgagttaaatgctgccaactacacagtgtggcatttccgaagagttctgtttaaagtctctttcataggatctacatgtggattttttctacattttgtctataattgatgtgcatcctataaacttattaagtattatttttgtgtgtttactatatttttttttc

SEQ ID NO: 6048 - DNA, 436 bp, Bos taurus
  Clone ID: 26-LIB3058-037-Q1-K1-G5
cggacgcgtggggtaaacccatgcccttgacctcttacaggagctttgtctgccctcttaataacatccggcctaaccatgtgatttcactttaactcaatgaccctgctaataattggcctaacaacaaatatactaacaatataccaatgatgacgagatgttatccgagaaagcaccttccaagggcaccataccccagctgtccaaaaaggcctccgttatggaataattctttttattatctccgaagtactattctttaccggatttttctgagctttctaccactcaagcctcgcccccacccctgaactaggcggctgctgacccccaacaggcattcacccactaaaccccctagaagtcccactgctcaacacctctgtcctattggcttccggagtttctattacctgagcccatcatagtttaa

SEQ ID NO: 6049 - DNA, 425 bp, Bos taurus
  Clone ID: 26-LIB3058-038-Q1-K1-G5
gccggtggagggcttccgggtgaccctgttggacgagggcgacctgtacaactgggaggtggccatcttcggaccccccaacacctactacgagggcggctacttcaaggcacgcctcaagttccccatcgactacccttactcccctcccgcctttcggttcctgaccaagatgtggcaccccaacatctacgagactggggacgtttgcatctctattctccaccctccggtggatgacccccagagcggggagctgccctcggagcggtggaaccccacgcagaatgtcaggaccatcctcctgagtgtcatctccctcctcaacgaacccaacaccttctcgccagccaacgtggacgcctctgtgatgtacaggaagtggaaagagagcaaaggcaaggaccgcgagtacacggacatca

SEQ ID NO: 6050 - DNA, 367 bp, Bos taurus
  Clone ID: 26-LIB3058-039-Q1-K1-G9
ctactccacaatatgctaactgaaactgtcatcatcatcagcattaaaatgttaaattttacattgactttaccacttttgatcttctgaacaattttattgagcaaaataagataaaagattacatgtttattttatcttcaggaatgtaaaggtctaattattcaaacagtttttattataaaactaaactctgaaggtgtctacagagttggctttattctctctttaaatcagtagtctaacaaggattataaaagacaaaactctgttcagtgattctgacaaagtaaaaagggtgaaaacataaataaacgtttaattaggcaaaatataatacaatgactactttttgccttgaatgaac

SEQ ID NO: 6051 - DNA, 369 bp, Bos taurus
  Clone ID: 26-LIB3058-040-Q1-K1-G5
gcgcggactcctatgcaataatactctcaattgacaagcgaaaaaagaatatcaagccactgtctagtactgagaagggattgtaggaacacggaccatccatgagccgcgtgtcacaccagcccaagactcgtcctctgggatgtagatctccgttgagacccatttaggacagcggcttttaacgaaaacgcctcatagcctctgctaagtcgcctcagacatgcctgactgtacaatacctcacacataggagccctacgcgcttaactacagccttgctcttctccactcaggacaactgaactggggtgccatcccctcctgaacaggatcttgctgacccagcatcaaacactggactcttaa

SEQ ID NO: 6052 - DNA, 285 bp, Bos taurus
  Clone ID: 26-LIB3058-042-Q1-K1-G9
cgcgagcggccgcccttttttttttttttttttttttttgaacattgaaaagcacttggtcgttcttttttggacgcaggtggtacagagaaaaagaaaggcagaggggacacaagaggacacaagcatagcccatgtcaggttaaacagacgtttaaaagaacaaatcctgcagcttatacctttccccctaattcggaaggagttcatctaccctgacccctaatatgaaagatgcaatgcacatgcattcccgaggctctagaatccaattttttttttctt

SEQ ID NO: 6053 - DNA, 395 bp, Bos taurus
  Clone ID: 26-LIB3058-043-Q1-K1-G5
ccagacctacagtccatggagcagatccttcgtatcatgcggcccacagatgtgcctgaccagggcctgctctgtgacctgctgtggtctgaccctgacaaggacgtgcagggctggggtgagaatgaccgcggcgtctcctttacatttggagctgaggtggtggccaagttcctgcacaagcatgacctggacctcatctgccgggcacaccaggtagtagaagacggctatgagttctttgccaagcggcagctggtgacactcttttcagcccccaactactgcggcgagtttgacaatgcaggtgccatgatgagtgtggacgagacgctcatgtgctccttccagatcctcaagcccgctgacaagaacagggggaatacgggcagttc

SEQ ID NO: 6054 - DNA, 381 bp, Bos taurus
  Clone ID: 26-LIB3058-044-Q1-K1-G5
cagaacacaactgttatcatagtccagtatctgacaccaacaaaaatattaagacaaaggccccttgagaaacataatgaacgaaaatttatttacctcttttattacccatgtaattataggtctgcctatcgtaacccttatcgtactattcccaagcctactattcccaacatcaaaccgactagtaagcaatcgctttgtaaccctccaacaatgaatactttaacttgtatcagaacaaataatgagtatccacaattctaaaggacaaacatgaacattaatattaatatctctgatcctatttattggatcatcgaacctactaggactatttccactttcattcacaccaacaacacaactatcaataaacct

SEQ ID NO: 6055 - DNA, 434 bp, Bos taurus
  Clone ID: 26-LIB3058-044-Q1-K1-G9
caacagtccggccaccagcaagcctcctgtgacgctgaggctggtggtccctgctagccagtgcgggtccctgattggcaaaggcggctccaagatcaaagagatcagggagtccacaggtgcccaggtccaggtggccggggacatgctgcccaactccacagagcgggcagtgaccatctcggggaccccggacgccatcatccagtgtgtcaagcagatctgtgtggtcatgctggagtccccaccgaaaggtgccaccattccctaccgcccaaagcccgcctccacccctgtcatttttgcaggtggtcaggcctacacgatccagggacagtacgccatcccccacccagatttgaccaagctccaccagctggccatgcagcaaaccccctttcctcccctcggacagaccaaccccgctttccccg

SEQ ID NO: 6056 - DNA, 285 bp, Bos taurus
  Clone ID: 26-LIB3058-046-Q1-K1-G5
gtgaaactctcacaaggatgttctaattaccagtttgtatggatgaaatgggtacctttgtaatcccaacagtttctattttctagaacctttgtccccgtggtttttctatgggctggaatcctgtcgtcttggttggggtggaagggtggtggaggcggtgcgggccttgggtcccaggtggagactgttactgggtgtcttgcttatttgctgttgtttcacccaccagagagacagcccctctcagatgcggtgctttctggccttgatcttcccctaccc

SEQ ID NO: 6057 - DNA, 437 bp, Bos taurus
  Clone ID: 26-LIB3058-046-Q1-K1-G9
ggaattctctggagttaagatcagtatttagagctctggggaatagagctcaaaggcaaagaaaatgctagttaatagtacattgttaatgttaaattgttacttgaaaagtttctacaatgcttaaaactgctaagtgtggggaaggaaaaaagcaaaattgttttgctttgctacaagaaggggaagactgaaaagttaactgaaacctggatatcagtctcttgaaagattgttagggacttgcatcagcagattaacatctttcactcctttgcaagcttcttaagtggtttatctgaaggtgtgcaatgttcagggactagtttcagaaaagactttcagtaccctaattgtgggcttttaaagtattttaagatttggtacaggcttagatgccctcttctgggtttgtaacatttttgttcacttgatat

SEQ ID NO: 6058 - DNA, 434 bp, Bos taurus
  Clone ID: 26-LIB3058-047-Q1-K1-G5
ggggagcttcgccggctttagtctccttttctcccatctcctgtgttaggtctgaccgccggccgatcgtccgccgccgcacggcttgccgccatggccctcagcgatgccgacgtgcagaagcagattaagcacatgatggcttttattgaacaagaagccaatgagaaagcagaagaaattgatgcaaaggcagaagaagagttcaacattgagaaaggtcgtcttgtccaaacccaaagactgaagattatggaatattatgagaagaaagaaaagcagattgagcagcagaagaaaattcagatgtccaatttgatgaatcaagcgaggctcaaagtcctcagagcgagagatgaccttatcacagacctactaaatgaagcataacagagactcagcaaagtggtaaaagatacaaccaggtaccaagt

SEQ ID NO: 6059 - DNA, 405 bp, Bos taurus
  Clone ID: 26-LIB3058-047-Q1-K1-G9
aactgatccaaaaaaataatgtcatagtgtattctgcctttgtttttatctagaagtttatagtatttggccttacatttaggtctttgcttccctggtggatcagaggttaaagcgtctgcctgcattatgggagacctgggttcaatccctgggtcaggaagatcccctggagaaggaaatggcaacccgctccagtattcttgcctagaggatcccatggatggaggagcctggtgggctatcgtccatggggtcacaaagagtcggacatgactgagtgactttaggtctttaatccatttcgagtttatttttgtatatggtattagaaaacattctgatttcatttaaaacatgtatatgtaaaagaatttgtcccttttcaccctggcaccttaccct

SEQ ID NO: 6060 - DNA, 443 bp, Bos taurus
  Clone ID: 26-LIB3058-048-Q1-K1-G5
gcggagcggcggtgggcgcagctagcgttatgggcgcggagcgggggtgcagcttggttgccccccgacacccctccccctcaaacgcgagccccacccctccgccggccaggcccacccggccgaactatcccctgcggcgcgagcccggggcggctccgggcgcccctccagcagaaccccccaccatgggcagccagagctccaaggctccccggggcgacgtgaccgccgaggaggcagcaggcgcttcccccgccaaggtcaacggacaggaaaaccggccacgtgaaaagcaatggagacttatccccccaaggtgaaggggagtcgccccccgtgaacggaaccagaggaggcagcgggggccactggtgatgctatcgagccagcaccccctagccagggcgctgaggctaagggggaggtcccccccaaggaga

SEQ ID NO: 6061 - DNA, 392 bp, Bos taurus
  Clone ID: 26-LIB3058-048-Q1-K1-G9
cggacgcgtgggtctatatccagaaacttgatgctcctttgcacggaatattatttaaattcagagttgtgagggggatggggtgaagcacacctattttcaatttctcgattgcagtgatttcaaacttaggatttgttttgttgttcacttagtttcctgttatttcccatttgttcagcagcttagtgtaattagttttcattctttgcatactagaattttatggtgattggggaagtgagttaagagtcactaacctgacagttgttgccaggcgttgttcatggctagtatattagtaaccctagatctcagaatcacaatagtaacaaagtaaacaacaggggtcatgtttcctaacttgctctatgttcagatgtggaatctct

SEQ ID NO: 6062 - DNA, 434 bp, Bos taurus
  Clone ID: 26-LIB3058-049-Q1-K1-G5
cggacgcgtgggccgcgcgccaccgtcttctcggcccgccatgctgctacccgtgccgctgctgctcggccttctcggcctggccgccgctgatcccaccgtttactttaaggagcagtttctggacggagacgggtggaccgagcgctggatcgaatccaagcacaaaccggattttggcaaattcgttctcagttccggcaagttctatggtgaccaagagaaagataaaggcctgcagactagccaggatgcccggttctacgctctgtcggccagatttgagcccttcagcaacaagggtcagacgctggtggtgcagttcacagtgaaacacgagcagaacatcgactgtgggggcggctatgtgaagctgtttccagctggtttggatcagacagacatgcacggagactccgaatacaacataatgt

SEQ ID NO: 6063 - DNA, 422 bp, Bos taurus
  Clone ID: 26-LIB3058-049-Q1-K1-G9
gttttgtttggttctgatcttgggtgtgtctgtgtgtgtgtgtgtgtgtgtgcgtgcgtgcgtgcgggggaggggaggggcgctactatcactgataggtatgttcaccaatctgtcgaatgccaatataaaagtcagttcttggttgctgaagggaactgtatgacttggtattaaaagaaggtatgtggcatgaaatcgcattttctgaaggaaaacgacgtcgttctttcttccaggtggcagtttgaggatgggagaagcaaaggaatgggtacagaatgggatcaggaggttgtagggaacgtggacccccagaaaagagtgttgtgcctagcacaaggtttcttgagaggttgaactgcctttgctaatggattttaagtttctttacctcttccgtgatctcttctaggttgacc

SEQ ID NO: 6064 - DNA, 435 bp, Bos taurus
  Clone ID: 26-LIB3058-050-Q1-K1-G9
cccgcgcctgcgtgagccacggtctgttggttgctgccctctcttcctggctggttgagagtttaccccgccgagctgcgcaatgcggaggctgcaggtggtgctgggtcacctgaagggccggcccgcttcggacccggagccgcaggccaccccgtgttggagcggcgcgcggcgggcgtccgcagaggatgtcgtggtggtgcacgggcggcgcacggccattggccggtcgggccgcggcggcttcaaggacaccacccccgacgagcttctctccgccgtcatgaccgcggttctccaggacgtcaagctgagcccggcccagctgggagatatctgcgtgggaaacgtgcttcagcctggggccggagcgaccatggcccgaattgcccagtttctgagtgacatcccggagactgtgcctttgtcagc

SEQ ID NO: 6065 - DNA, 215 bp, Bos taurus
  Clone ID: 26-LIB3058-056-Q1-K1-G9
gtcattgttgggttcctgagtcgtcttggatgtgactcggcgtcactgaatttgcggcatcttcgcattcactcacaggtcataatgcaaatcttcgtgtaaaccctgacctgcaagaccatcacccttgaggtggataccagtgtcactattcagaatgtgttggccaagatccatcataaggaatgcattccttttgaccagcacaggcttat

SEQ ID NO: 6066 - DNA, 400 bp, Bos taurus
  Clone ID: 26-LIB3058-058-Q1-K1-G9
cggacgcgtgggttctagatcgcgagcggcactcctatatatatactcataccccaatagtaacaaattcttcaaatatctactcctattcctcattactatgctcatccttgtaacctcaaacaacctcttccagctatccattgactgataaggcgtcagaatcatatcatttctactcatcatatgatgatactgaccagcagatgcaaacacaacatccctacaagcaattttatataaccgcatttaccacattggtttcattttatcaataacatggttcctaacaaacttcaatacctgaaacctcctacagatctttatactaaacccaatcgactcatacatacccttgattggactatcattaacttcaacccgtaaaatccttccaatt

SEQ ID NO: 6067 - DNA, 362 bp, Bos taurus
  Clone ID: 26-LIB34-001-Q1-E1-G5
gttaaatcagcccagcaaccagctgcagctgagcgtgggcaacgccatgtttgtgtcagaggagctgaagctgctggacaaattcaggaaagatgccgaggctttttacgcctctgaggttttatccactaacttcaaggattctgaagctgccgtaaagcttatcaatgaatatgtgaagaataaaactcatggaaaaattgagaagctcttcaatgatcttgacgtgctcacaaatttaaccttgttgaattataccttctttaaagcccattggaagacgccatttaatcctaaccatacttacgaatcagagttccacgtgagccagaacgagagggtgattgtacccatgatgaccc

SEQ ID NO: 6068 - DNA, 300 bp, Bos taurus
  Clone ID: 26-LIB34-002-Q1-E1-G5
accccacaaaactttggcacaatgaagtgggtgacttttatttctcttctccttctcttcagctctgcttattccaggggtgtgtttcgtcgagatacacacaagagtgagattgctcatcggtttaaagatttgggagaagaacattttaaaggcctggtactgattgccttttctcagtatctccagcagtgtccatttgatgagcatgtaaaattagtgaacgaactaactgagtttgcaaaaacatgtgttgctgatgagtcgcatgccggctgtgaaaaatcacctcacactctc

SEQ ID NO: 6069 - DNA, 416 bp, Bos taurus
  Clone ID: 26-LIB34-004-Q1-E1-G5
gctgcctcgagcagggagctggtggctcttccatccccagaccagccaagcctgtgagtgacaccccagacagaggaaccagagccatgcggagtctcagcggactgctgttgttactgactgcctgcctggcagtaaacgccagctccgtgcccacattgcccgatgacattcaagtgcaggagaacttcgacctgtctaggatctatgggaagtggttcaatgtggccgtgggctccacctgcccatggctgaagaggttcaaggagaagatgaccatgagcacagtggtgttgaaagcggggccgacgagcaaggagatcagcgtcaccaacactcacaggcggaaaggtgtctgtgaatcgatctctggtacttatgagaaaacaagcactgatgggaagtttctctatcac

SEQ ID NO: 6070 - DNA, 422 bp, Bos taurus
  Clone ID: 26-LIB34-004-Q1-E1-G9
gaagcttcacactgagaggcaggcagagaacatcacacacagctgaaaggaaactcagaggagggaatcgccaagaaaagtggccatggagctaatcccaaacttttccgtggaaacctgggttctcctggctatcagcctggtgctcctctatctatatggaacttattcacatggactgtttaagaagctgggggttcctggcccaagacctctgcctctttttggaaacgttctatcctaccgaaagggtgtttgtgagtttgatgaagaatgttttaaaaagtatgggaaaatgtgggggatttttgaaggtaaacatcctctgttggttatcacggatccagacatgatcaaaacagtactagtgaaagaatgttattctgtcttcacaaaccggagggtttttggtccaatgggag

SEQ ID NO: 6071 - DNA, 407 bp, Bos taurus
  unsure (371): unsure at all n locations; Clone ID: 26-LIB34-005-Q1-E1-G5
attggcgacaccattgagttccggggccccaacgggctgctggtctaccagggcaaaggaaagtttgccatccgtccagacaagaagtccgaccctgtcatcaagacggtgaaatctgtgggcatgattgcaggaggaacgggcatcaccccaatgcttcaggtgatccgcgccatcatgaaggaccctgatgaccacaccgtgtgccacctgctctttgccaaccagaccgagaaggacatcctgctgcggcccgagctggaggaactgaggaacgagcactctgcacgcttcaagctctggtacacggtggacaaagcccctgaagcctgggactacagccagggcttcgtgaacgaggagatgatccngggacacctgccgcccccagaggaggaaccgctggt

SEQ ID NO: 6072 - DNA, 284 bp, Bos taurus
  Clone ID: 26-LIB34-005-Q1-E1-G9
ctctcagcagttctagtaaatgcagtggtgtgaggactgtatatatgattttaaacctaagttgatttttttttctcactcttgaaaggagtacctctttgtgaaagcagttcttacagctttgttttcaaccagctaaaaatgttttacatattactctaaccgtgttgtccaccaaattctagtgtcttaattggactgttttctgatttgtagttatgtcttgagacagtaactttttgaagaagcctaaacctacagtagataagtgatggtgccaatga

SEQ ID NO: 6073 - DNA, 380 bp, Bos taurus
  Clone ID: 26-LIB34-007-Q1-E1-G5
aagacagcacagccatgctggaggcactgggctccctggtggctgccctctggaccacgctccgtcctggcattgtcctactgggggcctttgtctttctcctctttgctgatttcctcaaaaggcagcacccaaagaactacccaccagggcccctgcgcctgcccttcataggcaatttcttccacctggacttggggaaagggatcttggttcctcagcaggttgtgaagaaatatgggaacattattaggctagattttggtgtaattcatttcatcgttataactggattgccctatatcaaagaaacccttgtcaaccaggaacaaaactttgtaaaccgccccatgatacctcttcagaaacatatctttaac

SEQ ID NO: 6074 - DNA, 403 bp, Bos taurus
  Clone ID: 26-LIB34-007-Q1-E1-G9
cgatattcggtacttgctagacattggtagaaatcgcaaaaaccccagggaggaaaatctggatatctatgtgttcggggttggacctctagtgaaccaagagaacatcaatgctttggcttccaagaaggataaagagaaacacgtgttcaaactccaaggcatggaaaacctggaggatgttttcgtccaaatgcttgatgaaagccggacactgggtctctgtggcatggtttgggagcacaaggatggtactgcctaccacaagcaaccgtggcaggccaagatctcggtcactcgcccttcaaaggggcatgagagctgtatgggtgctattgtgtctgagtactttgtgctgacggctgcacactgtttcactgtggatgatgagaaacactcaatc

SEQ ID NO: 6075 - DNA, 418 bp, Bos taurus
  Clone ID: 26-LIB34-008-Q1-E1-G5
ggggcctggccgttggtgagcaccggctcagcaacaagctgctggcctggagcggtgtcctggagtggcaggagaagcgcagaccctactcggactccaccgcgaagctgaagcgggcccttccctgccaggcctacgtgaaccagggcgagaacctggagactgaccagtggccgcagaagctgatcatgcaactgatcccgcagcagctgctgaccaccctgggccccctgttccgcaactcccagctggcgcagttccacttcaccaacagagactgtgactccctcaaggggctctgccgggtcatgggcaacggcttcgcgggctgcatgctcttcacgcacatctcgccatgcgaggtgcgcgtgctcatgctgctgtactcgtccaagaagaagatcttcatgggcctcat

SEQ ID NO: 6076 - DNA, 412 bp, Bos taurus
  Clone ID: 26-LIB34-010-Q1-E1-G9
agccatcgtccacagtgtctttgagttcctggccttcaagaatgatatccagttctggaacagccggcagtccctggagggcctgtccgtgcgctccgtcttcttcggcgtcttccagtccttcgtggtcctgctctacatcctggacaacgagactaacttcgtggtccaggtcagcgtcttcattggggtcctcatcgacctctggaagatcaccaaggtcatggatgtccggctggaccgggagcacaaggtggcagggctcttgccccgcccgaccttccaggacaagtccacatacgttgagtcctcgaccaaagtgtatgacgacatggcgttccggtacctgtcctggatcctctttccgctgctgggctgctatgccgtctacaacctcctgtacctggagcac

SEQ ID NO: 6077 - DNA, 431 bp, Bos taurus
  Clone ID: 26-LIB34-010-Q1-E2-G5
gatttttgaaccttaaacagtacaactggagtatttgtgtgaatgtaccactgggaaaatctaacatgttgatgttaatcaatgtccttctcaccttgtggttttacactgctcatggacaggggaaacattgtaattatccagtaataagacatggacggctatatcagtcatacagtggatactttccagcacgtgtaaatcaacagtttctctataactgtgatcagtattttgtgcctccttcactatattcctcggattacctgacttgcacagcacaaggatggtttccagaagaaccatgccttagagaatgtattttcaataatttggaaaatggatataccccaagtagtgaaagacaagctgtacagggtgacacagtaagggttcgctgctattatggctacagtcttcaaaataatcag

SEQ ID NO: 6078 - DNA, 379 bp, Bos taurus
  Clone ID: 26-LIB34-011-Q1-E1-G5
acgaggctttgatgctaccaccctggatgagcatgggaacatgctgtttttaaaaggggagtttgtgtggaagggtcatgcctgggcccggcagttgatctcagacaggtggaaggatgcccccagtcccgtggatgctgcattccgctatgatcgtaacagtgtccttctgatcaagggggacaaattctgggtatatcctcctgagaatggggaggaatatccaaagttgctccaagagaagtttcctggaatcgcattcacactggatgcagctgtggaatgtcaccgcggagaatgctctcatgaaggtgtcttcatcttccaaggcaaccacacgtggttctgggacttctccacaacaaccataacggaaacg

SEQ ID NO: 6079 - DNA, 405 bp, Bos taurus
  Clone ID: 26-LIB34-012-Q1-E1-G5
aatgaccacaagctggcagtttcccacgtgatccacaaggctgtgctcgacgtgggcgaggagggcacggaaggagctgctgtcacggctgtcgtaatggctacctcatcactcttgcacacgctaactgtcagtttcaacaggccctttctgctttccatattctgcaaagagactcagagcatcatctttttgggcaaagtcaccaaccccaaggaagcctagagctcccctcctccctaaggagctgggtgcccaggtccctggaagcagcctggccccctctgctcatccctggaaggtgacagcgacagtgctaggggctccaggtgcacgggcgctgtatgtcctggtgacaaggaggctctgggccacagaacagcaataaagcaacttccttgggaa

SEQ ID NO: 6080 - DNA, 331 bp, Bos taurus
  Clone ID: 26-LIB34-012-Q1-E1-G9
tcaagcctcgcaaacgatacttcggctactcaagggccttgacgtgtctgatctgatggctctggggatgtggcctttgtcaagcactcaacggtattcaacaacctgcctaacccataagacaggaaacactatgaactgctctgccgggaggggacccagaagtctgtatatcaataccaagaatgatacctggcagtcgatccttcacatgcagttgttggtcgaactgttggcggcaaggaagatatgatttgggaagttctcaatcacgcccactaacattttggcaggtataaaccagacagtttccatcatttccattcccctc

SEQ ID NO: 6081 - DNA, 427 bp, Bos taurus
  unsure (6): unsure at all n locations; Clone ID: 26-LIB34-013-Q1-E1-G5
attcgncggtcgacccacgcgaccgagtggggcttttaggttctgtagctggtcgcaatggcaagcaaaggagggtacatcgtgcttgggctcctgttcctggctgtcctctgccaactcggtcacagcctgcagtgctacagctgtattaaccaagttaactgcacttcaatcgtcaattgttcacataatcaagatgcttgtctcttcgttaaggctgtgccgctaaaattttaccaccagtgttggaagtacgaagaatgcagttttgagttcattgcaaaagccttaggggagaaggagctccactatgactgctgccagaagaacctgtgtaacaaaagtggcgggaggagcgtatccgagaagatactgctgctgctcaccctgctgctggaggcagttctgcacttttatcgctaaatct

SEQ ID NO: 6082 - DNA, 419 bp, Bos taurus
  Clone ID: 26-LIB34-014-Q1-E1-G9
aggacgcgtgggtagttctagatcgcgagcggccgtccttttctctttatctctgcttattctattggtgtgtttcttctatataacacattagttagattgctcatcggtttaaatatttgggataagaacattttaaaggcctggtactgattgccttttctcagtatctccagcagtgtccatttgatgagcatgtaaaattagtgaacgaactaactgagtttgcaaaaacatgtgttgctgatgagtcccatgccggctgtgaaaagtcacttcacactctctttggagatgaattgtgtaaagttgcatcccttcgtgaaacctatggtgacatggctgactgctgtgagaaacaagagcctgaaagaaatgaatgcttcctgagccacagagatgatagcccaaacctccct

SEQ ID NO: 6083 - DNA, 400 bp, Bos taurus
  Clone ID: 26-LIB34-015-Q1-E1-G5
gaacttctaatcagaagagaactgaacttgcaacgtccccatccaagacataaccaagcgtttcctagacagtaccaggactgctccactatgcaaaggctgatgaagtttcgggtcctctggggcatccacatgtcctgccctggcttccaccatgcccctcagcacctgcgctgccgatctttatcaggagctggaaccctaagatggaatgactatgacagacctgaggaatttaactttgcaagtgatgtactggaccactggactcaaatggagaaggagggcaagagaagtccaaacccagccctgtggtgggtgaatgatcaaggggatgaagtgaagtggagcttcagagagatgacagacttaacctgtcgtacagccaacgtcctgacac

SEQ ID NO: 6084 - DNA, 410 bp, Bos taurus
  Clone ID: 26-LIB34-016-Q1-E1-G5
gggagctggtggctcttccatccccagaccagccaagcctgtgagtgacaccccagacagaggaaccagagccatgcggagtctcagcggactgctgttgttactgactgcctgcctggcggtaaacgccagctccgtgcccacattgcccgatgacattcaagtgcaggagaacttcgacctgtctaggatctatgggaagtggttcaatgtggccgtgggctccacctgcccatggctgaagaggttcaaggagaagatgaccatgagcacagtggtgttgaaagcggggccgacgagcaaggagatcagcgtcaccaacactcacaggcggaaaggtgtctgtgaatcgatctctggtacttatgagaaaacaagcactgatgggaagtttctctatcacaaagcca

SEQ ID NO: 6085 - DNA, 418 bp, Bos taurus
  Clone ID: 26-LIB34-016-Q1-E1-G9
gcacctgtgctggattgtcacacagctcacattgcttgcaagtttgctgagctgaaggagaagattgatcgtcgttctgggaaaaagctggaagatggccctaaattcttgaaatctggtgacgctgccatcgttgatatggttcctggcaagcccatgtgtgtcgatagcttctctgattatcctcccctgtgccgttttgctgtgcgtgacatgaggacagacagtcgctgtgggtgtcatcagagcagtggacaagaatgcatctggaactggcaaggtcaccaagtctgcccagaaagctcagaaagctaaatgaatattatccccaatacctgccaccccagtcttaatcagtggtggaagaacggtctcagaactgtttgtctcaagttggcatttaagtttaatagtaaaa

SEQ ID NO: 6086 - DNA, 389 bp, Bos taurus
  Clone ID: 26-LIB34-017-Q1-E1-G5
cggcctcagagccagctctggctgtgttgtgatggggctgccctcgccagggctatggctgaagaggctctgggtcctctttcaggtggccctgcatgtggccataggcaaagtgctcctgacgctgtttcccaggagggtcaagcagaacatcctggccatgggcgagaagactggcatgaccaggaacccacacttctcccatgaaaactggatccctaccttcttcagtacccagtatttctggtttatcctgaaggtccgttggcagagactggaggacatgactgaacaagggggtctggccccaaactgtcctgtagtccgcctgtcaggagagaggtgcagcatctgggacttcatgcaaggcaacagacccttggtgctga

SEQ ID NO: 6087 - DNA, 410 bp, Bos taurus
  Clone ID: 26-LIB34-018-Q1-E1-G5
aggaaaggacaacatgcttgggagtgaagggatttcctgagctgaaacgggcaaacttcagtcttctactgtgtttttgcagtattctatatataatttcctgaatatgtaaatttagtgaccattagctaatgatcatttcatgagtaacaagttgagcagtacaaaattcacagtattctgtccctagcctgtcattctttttcatttcagctgcatgtaaagttggaaagatgatttattgatcattctaaagaggtaacattgttttgtgttgaagtagtctatggggtcgcacagagtcagacatgactgaagcgacttagcagcagcagcagccatattttcaaggggtgaaatctcacacagtgaagacagttgggtctggaatgaaaccacaaggtgatgag

SEQ ID NO: 6088 - DNA, 381 bp, Bos taurus
  Clone ID: 26-LIB34-019-Q1-E1-G5
cattggcacactgaaatgggtgacctttacttctcttcaccttctcctcagttcagcttaatccaacggtgtgtttcgtcacacagacacacattagtcatgtcgcgcagcggattaaagatttggtagatgacaatttcacaggcctgggactgattgccgtgtctcagtatcgccaccactgtccaattgaggagcatgtgatattagcgaactaactcactgattttgcgtcaccatgtgttgctgatgagtctcatgcctgacgtgatcagtcacttcacactctccttggagatgaattgtgtaaagttgcatcccttcgtgaaacctatggtgacatggctgactgctgtgaaaaacaagagcctgaactcaatg

SEQ ID NO: 6089 - DNA, 403 bp, Bos taurus
  Clone ID: 26-LIB34-019-Q1-E1-G9
acgggcttttccgtcttggtggctctgctcctggctggccaggccaccactgcctacttcctgtaccagcagcagggccggctggacaagctgacggtcacctcccagaacctgcagctggagaacctgcgcatgaagcttcccaagcctgccaagcctatgagccagatgcggatggccactcccatgctgatgcgggcgctgcccatggcaggcccagagcccatgaagaacgccaccaagtacggcaacatgacacaggaccacgtgatgcacctgctcctgaaggcagaccccctgaaggtgtacccgcagctgaaggggagcctgccagaaaacctgaaacaccttaaggactccatggatggcttggactggaagctctttgagagctggctgcatc

SEQ ID NO: 6090 - DNA, 440 bp, Bos taurus
  unsure (406): unsure at all n locations; Clone ID: 26-LIB34-021-Q1-E1-G5
caccgcttcctcctttcctcaggcatcaaagcagagaccacgggaacctagttcaccaggctcgaggctggaggccccgccatgacatccctaaggccccttctgatgctggccctgctggcgtgggttgttgtggctgaccaagagtcctgcaagggccgctgcaccgagggcttcaacgccaccaggaagtgtcagtgtgacgagctctgttcttactaccagagctgctgtgccgacttcatggctgagtgcaagccccaagtgactcgtggggatgtgttccatctgccagaagatgagtacgggttccatgactacagcgacgcgcagaccgtcaacagcaacgtggaagcacagcccgagagcaccaccctggcccctgttctgcaggctcagaccctanagactcctgtccaggcaccagtttctcaacctga

SEQ ID NO: 6091 - DNA, 390 bp, Bos taurus
  Clone ID: 26-LIB34-022-Q1-E1-G5
gggagctggtggctcttccatccccagaccagccaagcctgtgagtgacaccccagacagaggaaccagagccatgcggagtctcagcggactgctgttgttactgactgcctgcctggcagtaaacgccagctccgtgcccacattgcccgatgacattcaagtgcaggagaacttcgacctgtctaggatctatgggaagtggttcaatgtggccgtgggctccacctgcccatggctgaagaggttcaaggagaagatgaccatgagcacagtggtgttgaaagcggggccgacgagcaaggagatcagcgtcaccaacactcacaggcggaaaggtgtctgtgaatcgatccctggtacttatgagaaaacaagcactgatgggaa

SEQ ID NO: 6092 - DNA, 371 bp, Bos taurus
  Clone ID: 26-LIB34-022-Q1-E1-G9
ggaagatggaaccatgcaggtttacctgcaaaggaaaaccaatttaccatttcatggggaccagtaccttcagtcagtacactgtggtctcagacgtcaaccttgccatgctagaggacgatgccaatttagagagagtttgtctgcttggatgtgcattttcaactggctatggagctgtcatcaacaatgccaaggtcacacctggttctacctgtgccatctttggcctatgaggtgtcggtctctctgctgtaatgggttgtaaagcatcaagagcttcacgaatcatacttgttgacatcaatagtgagacgtttacacaggccaaagcccttggagccactgactgcctcagtcctaaagaccta

SEQ ID NO: 6093 - DNA, 416 bp, Bos taurus
  Clone ID: 26-LIB34-024-Q1-E1-G5
tgccctgacccatgacagtgaatcgataatggcactctccatcacgcggggccttctgctgctggcagccctgtgctgcctggcccccatctccctggctggagttctccaaggacacgctgtccaagagacagatgatacatcccaccaggaagcagcgtgccacaagattgcccccaacctggccaactttgccttcagcatataccaccatttggctcatcagtccaacaccagcaacatcttcttctcccccgtgagcattgcttcagcctttgctatgctctccctgggagccaagggcaacactcacactgagatcctgaagggcctgggtttcaacctcactgagctcgcagaggctgagatccacaaaggctttcagcatcttctccacaccctgaaccagccaaacc

SEQ ID NO: 6094 - DNA, 417 bp, Bos taurus
  Clone ID: 26-LIB34-025-Q1-E1-G5
ctttcatgaccacacgctaataattgtcttcttaattagctcattagtactttacattatttcactaatactaacgacaaagctgacccatacaagcacgatagatgcacaagaagtagagacaatctgaaccattctgcccgccatcatcttaattctaattgctcttccttctttacgaattctatacataatagatgaaatcaataacccatctcttacagtaaaaaccataggacatcagtgatactgaagctatgagtatacagattatgaggacttaagcttcgactcctacataattccaacatcagaattaaagccaggggagctacgactattagaagtcgataatcgagttgtactaccaatagaaataacaatccgaatgttagtctcctctgaagacgtattaca

SEQ ID NO: 6095 - DNA, 410 bp, Bos taurus
  Clone ID: 26-LIB34-026-Q1-E1-G5
ccactgcccacaccccgctctcgcaggcagacatgaggacagagagaacttccttcctcctggctctggggctcctggtgtctgggttctgctccagggtccactgcctcccagagaatgtgaccccagaagaacagcacaaagggacgtctgtggatggccactcattagcctccagcaacactgacttcgccttcagcctctacaagcagttggctttgaaggaccccaataagaatgtcatcttctcccctctgagcatctccatagccttggccttcctgtccctgggggctcatgaccacactgtgacagagatcctggaaggtctcaagttcaacctcacagagacccccgagacagaaatccaccagggcttccagcacctcctgcagacgttcaatcagccc

SEQ ID NO: 6096 - DNA, 368 bp, Bos taurus
  Clone ID: 26-LIB34-027-Q1-E1-G5
acgcagtggctgtgccatgaacccggctcgagacctgagtcgcatacttttcactgctttggcaggttggggctttgaggtgttcacagttgggaatagcttctggtggagtcctgtactgggacctttggttggtgctgctgctggacgcctcgtctaatttcttctcattgatatccaccatccaggatccgaacccacacttggaagcagaacagccagatgacaaaccaaagaaatatgaactgaatgcaatcatgtgatatcatgctcaggtctgggtttacagttggctacctactgggctttacctttcacaaggcatcttcacacacattatctagttgaaccctcctagggaccatctg

SEQ ID NO: 6097 - DNA, 382 bp, Bos taurus
  Clone ID: 26-LIB34-028-Q1-E1-G9
atttcttgcaacttcgaaaaatttaaaaccatgaaacatctattactgctacttttctgtgcttttatagttcaggcccaatttcctactgactatgacgagggacaagatgacagacctaaggtaggtttgggtgcccgcggtcatcggccctatgacaagaagaaggaagaggcccccagcctgagacctgtgccccctcccatcagcggaggtggctatcgggctcgtcccgccacagcaactgtgggccagaagaaagtggagagaaagccccctgacgctgatggctgcctgcacgcggacccggatctgggtgtgttgtgtcctacaggatgtaagttgcaagatactttggtacgacaggagagaccaatccgaa

SEQ ID NO: 6098 - DNA, 361 bp, Bos taurus
  Clone ID: 26-LIB34-030-Q1-E1-G5
gtttcatgcatttggtttaaacccagatttaatttgatcaagtgttaaccatgaagactgtgaaagtcttctgcatccttttcatgttgcatctatgtctccttgactctggaaggacaggcaaagttcttgtatggcctgcggattttagtcactggattaatttacaagttattctagaagagcttcaccttcgtgggcatgagataactgtcctggtaccttcacaaagtcttctgattgatcgtaccaagattccctatcatgtggagatcctccagctttcagtaactgaagaaactttcatggaagagctcaataccattctctatgaagctacgtttgaactgtcaagactttc

SEQ ID NO: 6099 - DNA, 401 bp, Bos taurus
  Clone ID: 26-LIB34-030-Q1-E1-G9
ccgatccacagacgctgactatggcgatgaccctgggttactgggacatccgcgggctagcccacgccatccgcctgctcctggagtacacagactcaaactatgaggaaaagaagtacacgatgggggacgctcccgactatgacagaagccagtggctgaatgaaaaattcaagctgggcctggactttcccaatttgccctacttaattgatggagctcacaggctcacccagagcaaggccatccttcgctacattgctcgcaagcacaacatgtgtggggagacggaggaggagaagattcgcgtggatgtattggagaaccagactatggacactgctaatgaattggctatactctgctacaaccctgaatttgagaaactaaagtctcaatac

SEQ ID NO: 6100 - DNA, 198 bp, Bos taurus
  Clone ID: 26-LIB34-031-Q1-E1-G5
ggtccgtaacactccgggtccacacacgcgtccggagaaatgaaaactcagagcttattcatctgttttccttttctgttggtgttaaaccaacactctcactaaagaacgtaaatttctttaaatattttgcttcatttgtttgtgctacaattaataaagaatgataagactcgaaaaatcacaacaccatcaaaa

SEQ ID NO: 6101 - DNA, 408 bp, Bos taurus
  Clone ID: 26-LIB34-032-Q1-E1-G5
ctggtttcttgtgtgtgcttcagataatggaacgagctctattccacatggacaactgctataaaatccccaacatccggggcactgggcggctgtgcaagaccaacctgtcctccaacacggccttccggggctttggggggccccaggctctgttcattgccgagaactggatgagcgaagttgcagtgacctgtgggctgcctgcagaggaagtgcggtggaagaacatgtacaaagaaggggacctgacccacttcaaccagaagcttgaggggttcagcgtgcccaggtgctgggatgagtgcctgaagagctctgagtattacgctcggaagagtgacgtcgacaagttcaacaaggagaattgttggaaaaagagaggattgtgcataattcctaccaaat

SEQ ID NO: 6102 - DNA, 421 bp, Bos taurus
  Clone ID: 26-LIB34-032-Q1-E1-G9
ccccacaaaactttggcacaatgaagtgggtgacttttatttctcttctccttctcttcagctctgcttattccaggggtgtgtttcgtcgagatacacacaagagtgagattcctcatcggtttaaagatttgggagaagaacattttaaaggcctggtactgattgccttttctcagtatctccagcagtgtccatttgatgagcatgtaaaattagtgaacgaactaactgagtttgcaaaaacatgtgttgctgatgagtcccatgccggctgtgaaaagtcacttcacactctctttggagatgaattgtgtaaagttgcatcccttcgtgaaacctatggtgacatggctgactgctgtgagaaacaagagcctgaaagaaatgaatgcttcctgagccacaaagatgatagccc

SEQ ID NO: 6103 - DNA, 394 bp, Bos taurus
  Clone ID: 26-LIB34-033-Q1-E1-G5
gcagggcgcgatgagctgggagctgctgctctggttgctggcgctgtgcgcgctgctggcgctcgtggtgcagctactgcgcttcctacgtgccgacgcggacctcaccctgctgtgggccgagtggcaggggcgacgaccagaatgggagctgactgatatggtggtgtgggtgactggagcatcaagtgggattggagaggaactggcttaccagctgtccaaactaggagtttctcttgtgctgtcagccagaataatgcatgagttgggaagggtgaaaagaaagtgccttgagaatggtaatttgaaagaaaaagatatactcattttgccccttgacctgactgacagaagttcccatgagatggctaccaaagcagttctccaggag

SEQ ID NO: 6104 - DNA, 254 bp, Bos taurus
  Clone ID: 26-LIB34-035-Q1-E1-G5
cggacgcgtggggttctagatcgcgagcggccgccctttttttttttttttcatataacatgtatttattgaatgctgactccacactgctaggcgtttgggaatacagaaatgaacatgatagacaaagtccctgcccccatggaacttacagtctagcacgcgtgcgcacacacatatatacacacacatacacacaaacaaaaccatgtaatttcaattaagcaggatagaggactaaggaagaagtaaaa

SEQ ID NO: 6105 - DNA, 406 bp, Bos taurus
  Clone ID: 26-LIB34-036-Q1-E1-G5
aagatgacagacctaaggtaggtttgggtgcccgcggtcatcggccctatgacaagaataaggaagaggcccccagcctgagacctgtgccccctcccatcagcggaggtggctatcgggctcgtcccgccacagcaactgtgggccagaataaagtggagagaaagccccctgacgctgatggctgcctgcacgcggacccggatctgggtgtgttgtgtcctacatgatgtaagttgcaagatactttggtaagacaggagagaccaatccgaaagagtatagaagatttacgtaatactgtggactctgtttcccggacctcttcttccacctttcaatatataactctgctaagatacatgtggaaaggaacgcagaatcaggtacaagataatgaaaatgt

SEQ ID NO: 6106 - DNA, 379 bp, Bos taurus
  Clone ID: 26-LIB34-036-Q1-E1-G9
attaccagaccactgtggacacagatcgactaactttggtatgcatcttatatcacgttgagaacaaacatcagaagccagagagctggtcatagcattccaaatcagctatagccctgatcatgcatcaaagccaggtaggatagagagtgctaccaatacttccatagagtatgatggtagaaattatggaatatgatacactgataacaacacatgattcagcatttcgagttttgcaagatatatatgactcaattagtcacaaaatcgttaacctaagagataaagtggccgagcttgtagcagtctgtcaagagccttgtcatgatacagtgatcgtacatgatgtaactgggatagattgccatgatgttgc

SEQ ID NO: 6107 - DNA, 407 bp, Bos taurus
  Clone ID: 26-LIB34-037-Q1-E1-G9
aaaccagctcaccatggctcgggcattgagagtgccagttgcactgtggctgttgggcttgtgctggtctttggctaaagcccaccctctggctagagctcctgagcttgggcacggagttgaaggtgggaatgtggccaagccggatccagaagtgacggaacgctgctcggatggctggggctttgatgctaccaccctggatgagcatgggaacatgctgtttttaaaaggggagtttgtgtggaagggtcatgcctgggcccggcagttgatctcagagaggtggaaggatgcccccagtcccgtggatgctgcattccgctatgatcgtaacagtgtccttctgatcaagggggacaaattctgggtatatcctcctgagaagggggaggaatatccaaagt

SEQ ID NO: 6108 - DNA, 419 bp, Bos taurus
  Clone ID: 26-LIB34-038-Q1-E1-G5
ggaatcgtatcgtatgtccgctatccagaacctccactctttcgacccctttgctgatgcaagtaagggtgatgatctgcttcctgctggcactgaggattatatccatataagaattcaacagagaaacggcaggaagacccttactactgtccaagggatcgctgatgattacgataaaaagaaactagtgaaggcgtttaagaagaaatttgcctgcaatggtactgtaattgagcatccagaatatggagaagtaattcagctacagggtgaccagcgcaagaacatatgccagttcctggtagagattggactggctaaggacgaccagctgaaggttcatgggttttaagtgcttttggctcactgaagcttaagtgaggatttccttgcaatgagtagaatttcccttctgt

SEQ ID NO: 6109 - DNA, 421 bp, Bos taurus
  Clone ID: 26-LIB34-038-Q1-E1-G9
cttctattacatagatagcctgtcctactccgtggatgcctttgactatgacctgcagacgggaaagatctccaaccgcagaagtgtttacaagctggagaaggaagaacaaatcccagatggaatgtgtattgatgttgaggggaagctctgggtggcctgttacaatggaggaagagtgatccgtttggatcctgagacagggaaaagactccaaactgtgaagttgcctgttgataaaacaacctcatgctgcttcggagggaaggattactctgaaatgtacgtgacctgtgcccgggatgggttggactccaagggtcttctgcagcaacctgaggctggtggaattttcaagataactggcctaagagtcaaaggaattcctccctatccttacacaggatgagtgacatcctcc

SEQ ID NO: 6110 - DNA, 437 bp, Bos taurus
  Clone ID: 26-LIB34-039-Q1-E1-G5
gttctccctgctgccagggctcaaggagttctgggtggacaacaccacctcggtgtcagtccccatgctctctggcaccggcatcttccacttctggagcgacagccagaacaacctctccgtgacccgcgtgcccctgagcgccaacacctacctgctgctcatccagccgcaccacacccccgacctgcggaaggtggaggccctcaccttccagcacaacttcctgacccgaatgaagaacctctctcctcgggccatccacctgaccatgccccagctgacactgaaagcgtcctatgacctgcaggacctgcttgcccaggccaagctgcctaccctgctgggcgccgaggcaaacctgagcaaaatcagcgatgccaaccttagagttggaaaggtgctgaacagcgttctttttgaactaaaagcaaatg

SEQ ID NO: 6111 - DNA, 420 bp, Bos taurus
  Clone ID: 26-LIB34-040-Q1-E1-G5
gaacatccctgcatctctttccaagttggccaaacaatatggacctgtttacactctgcaccttggatcccagaccactgtggtcttacatggatatgaagtggtgaaggaagctctaattgaccaaggtgatgaattccttggcagagcacattttcctattattgacgatacccagagaggatatggactcattttcagcaatggagacacgtggaagcaaatgcggcgcttctcccttatgaccctaaggaactttgggatggggaagaggagccttgaggagaggatccaagaggaggcccagtttctggtggaggagttcaggaaatcagaggctcagccctttaaccctgctgtcaccctgtcctgtgctacctgcaacatcatctgctccatcctcttcaacgaacgtttcca

SEQ ID NO: 6112 - DNA, 400 bp, Bos taurus
  Clone ID: 26-LIB34-041-Q1-E1-G5
cgtgtgctccgttcaattctggagaatttgagaagcaaaatacaaaaattagaatcggatgtctcaactcagatggaatactgccgcaccccgtgtactgttacttgcaatattcctgtggtgtctggcaaagaatgtgaggaaatcatcaggaatggaggtgaaacatctgaaatgtacctcattcagcctgaggattctagcaaaccatatagagtatactgtgatatgaaaacggaaaaaggaggatggacagtaattcagaaccgtcaagatggtagtgttgactttggcaggaaatgggatccatataaacaaggatttggaaatattgcaaccaatgcagaagggaagaaatactgtggtgtaccaggtgagtattggctcgggaatgacagaa

SEQ ID NO: 6113 - DNA, 321 bp, Bos taurus
  Clone ID: 26-LIB34-042-Q1-E1-G5
tttggtacaagaataattgaagttagtggccaaaaaatcaaactgcagatctgggatacggcaggacaggagaggttcagagctgtcacccgaagctactacagaggcgccgcgggagcactgatggtgtacgacatcactagaagaagtacatataatcacttaagcagctggttgacagatgcaaggaatctcaccaatccaaatactgtgataatcctcatagggaataaagcagatctggaggctcagcgggatttgacgtatgaggaagccaaacagtttgctgaagaaaacggttgagtgttccttgaggcaagt

SEQ ID NO: 6114 - DNA, 421 bp, Bos taurus
  Clone ID: 26-LIB34-042-Q1-E1-G9
attcacagtatctcttgtaggactactaatataccgatcccacctaatatcctcccttctatgcttagaaggaataatgctatccctattcgttatagcagccctaacaatcctcaactcacattttacattagctagcataatacctattatcctactagtcttcgcagcctgtgaagcagccctaggtctatctctactagtaatagtatcaaatacatatggtactgattatgtacaaaacctcaacttactccaatgctaaaatacattattccaacaattatacttatacccctaacctggttatcaaaaaataatataatttgggttaactccacagcacacagccttctaattagctttacaagcctcgtcctcataaaccagtttggcgacaacagccttaaatttttcacta

SEQ ID NO: 6115 - DNA, 414 bp, Bos taurus
  Clone ID: 26-LIB34-043-Q1-E1-G5
aaaaagggacgtctgtggatggccactcattagcctccagcaacactgacttcgccttcagcctctacaagcagttggctttgaaggaccccaataagaatgtcatcttctcccctctgagcatctccatagccttggccttcctgtccctgggggctcatgaccacactgtgacagagatcctggaaggtctcaagttcaacctcacagagacccccgagacagaaatccaccagggcttccagcacctcctgcagacgttcaatcagcccagcaaccagctgcagctgagcgtgggcaacgccatgtttgtgtcagaggagctgaagctgctggacaaattcaagaaagatgccgaggctttttacgcctctgaggttttatccactaacttcaaagattctgaaactggcg

SEQ ID NO: 6116 - DNA, 397 bp, Bos taurus
  Clone ID: 26-LIB34-044-Q1-E1-G9
aacagataaaaccaataataatgtttatttttattttgtcctgcagaggcgccaccaccaaattgtgagggcaaccaaatcactcagaccagcgaaaccagatgaagcttatgggtcccatgagctcccatctccatcaggtgttggctccactcttggattttaaggtttgtggaaagtgcatgcttccaggagttttgaggttgagcattgtctcaggttggtcatagctctgacgtagtcatcccctaagtacgagtcatatgtttttttcgcaattgaagccaaacatttagtgtcatccctgaacagaaggtccttggaatttgattggaataaacataaattgctcgtgcagtcggttacagattttccaagagcaacccggccgtttgtt

SEQ ID NO: 6117 - DNA, 420 bp, Bos taurus
  Clone ID: 26-LIB34-046-Q1-E1-G5
ataaccgctgactattctcaaccaaccataaagatattggtaccctttatctactatttggtgcttgggccggtatagtaggaacagctctaagccttctaattcgcgctgaattaggccaacccggaactctgctcggagacgaccaaatctacaacgtagttgtaaccgcacacgcatttgtaataatcttcttcatagtaataccaatcataattggaggattcggtaactgacttgttcccctaataattggtgctcccgatatagcatttccccgaataaataatataagcttctgactcctccctccctcattcctactactcctcgcatcctctatagttgaagctggggcaggaacaggctgaaccgtgtaccctcccttagcaagcaacctaacccatgcaggagcttcag

SEQ ID NO: 6118 - DNA, 453 bp, Bos taurus
  Clone ID: 26-LIB34-046-Q1-E1-G9
gggactacttcagctacacccgccatgaacctgtgggagtgtgtgggcagatcatcccatggaacttcccgctcctgatgcaagcctggaaactgggcccagccttggcgacgggaaacgtggttgtgatgaaggtggctgagcagactccactcactgccctctatgtggccaacctgattaaggaggctggctttcctccgggtgtggtcaatgttattcctggatttggccccacggcgggagctgccatcgcctcccatgaggacgtggacaaagtggctttcaccggctccactgaggttggccacctaatccaggttgctgcggggaagagtaacctcaagagagtgaccctggagctaggaggaaagagtccaatatcatcatgtcagatgctgatatggactgggccgtggagcaggcgcacttcgccctgttcttcaaacaagg

SEQ ID NO: 6119 - DNA, 396 bp, Bos taurus
  Clone ID: 26-LIB34-048-Q1-E1-G5
agcctttcggagcggaacatgaagatcctattcgtcgccgccctggttgtgggctccgtcttcttcctgctgttgcctgtaccatccgcggccgatgagaagaagaaggggcccaaagtcactgtcaaagtgtactttgacctgcgaattggcgatgaagatataggccgggtggtcatcggtctctttggaaagactgttccaaaaacagtggataattttgtggccttggctacaggagagaaaggatttggctacaatgacagcagattccatcgtgtgatcaaggacttcatgatccagggtggagatttcacccggggagacggcactggacgtaagagcatctacggtgaacgcttccccgatgagaacttcaagcttaaacactatggg

SEQ ID NO: 6120 - DNA, 421 bp, Bos taurus
  Clone ID: 26-LIB34-048-Q1-E1-G9
gaacggtctcccagaagcaatttagaatgactggtaaaacgaaatatacccaaagctcgcagcaacaaaaaaggatacagttctttctggccagcttcctgcttctgccctttctgctcgtctgcatcgtagagtctctcctgaagctttttattcctaagaagagaaaatcagtcaccggagagattgtccttattaccggagctggacacggtattggcaggcagactgcctacgaatttgccaaacttaagtgcaagctggtcctgtgggatataaataagcatggacttgaggaaacagccaccgaatgcaagagactgggtgcaaaggctcatacctttgtggtagactgtagtaaccgagaagttatttacagctctgcaaagaaggtgaaggcagaagttggagatgttagtat

SEQ ID NO: 6121 - DNA, 433 bp, Bos taurus
  Clone ID: 26-LIB34-049-Q1-E1-G5
aatagatttaaccattaaggaataacaacaatctccatgagttggtagtttcggttggggtgacctcggagaataaaaaatcctccgagcgattttaaagactagacccacaagtcaaatcactctatcgctcattgatccaaaaacttgatcaacggaacaagttaccctagggataacagcgcaatcctattcaagagtccatatcgacaatagggtttacgacctcgatgttggatcaggacatcctgatggtgcaaccgctatcaaaggttcgtttgttcaacgattaaagtcctacgtgatctgagttcagaccggagtaatccaggtcggtttctatctattacgtatttctcccagtacgaaaggacaagagaaataaggccaactttaaatcaagcggcttaagacaaccaatgataacatctca

SEQ ID NO: 6122 - DNA, 424 bp, Bos taurus
  Clone ID: 26-LIB34-049-Q1-E1-G9
aatttttccatttaatccatttgatcttaccaaggtttggcctcacggcgactatccccttattccagttggtaaattggtcttaaaccggaacccagttaattactttgctgaggttgaacagttggcttttgacccaagcaacatgccgcccggcatcgagcccagccctgacaaaatgctccagggccgcctttttgcctatcctgacactcaccgccaccgcctgggacccaactatctccagatacctgtgaactgtccctaccgtgctcgagtggccaactaccagcgtgacggccccatgtgcatgatggacaatcagggtggggctccaaattactaccccaatagctttagtgctcccgagcatcagccttctgccctggaacacaggacccacttctctggggatgtacagcgc

SEQ ID NO: 6123 - DNA, 435 bp, Bos taurus
  Clone ID: 26-LIB34-050-Q1-E1-G5
aacgctttgactataaagatcagacgagcctgaggctgatgagtctgttcaacgagaacttctacctgctcagcagcccctggatccagctttataataatttctcagactacctacagtacctgcctggaagccatagaaagctactgaaaaatgtgtctgaagtaaaaagttatgctttagaaagagtgaaggatcaccagaagtccctggaacccagctgcccccgaggcttcttggacaccatgctgatagaaatggccaaggaaagacacagtgtggaccctatgtacaccttggaaaacatcgctgtgactgtggccgacctgctctttgcggggacagagaccaccagcaccaccctgcgatacgggctcctgattctcaatgaaataccggaggttgaagagaaacttcatgaagaaattgacaggg

SEQ ID NO: 6124 - DNA, 233 bp, Bos taurus
  Clone ID: 26-LIB34-052-Q1-E1-G5
gcggcggcggcggcagcggcagcggcagcgggctcggaggcagcggttgggctcgcggcgagcggacggggtcgagtcagtgcgttcgcgcgagttggaatcgtagcctcttaaaatggcagatgatttggacttcgagacaggagatgcaggggcctcagccaccttcccgatgcagtgctcagcattacgtaagaatggcttcgtggtgctcaaaggccggccatgtaaga

SEQ ID NO: 6125 - DNA, 241 bp, Bos taurus
  Clone ID: 26-LIB34-052-Q1-E1-G9
gctgaacgtgagcgtggtatcaccattgatatctccctgtggaaatttgagaccagcaagtactatgttaccatcattgatgccccaggacacagagacttcatcaaaaacatgattacaggcacatcccaggctgactgtgctgtcctgatcgttgctgctggtgttggtgaatttgaagccggtatctccaagaacgggcagacccgtgagcatgcccttttggcttacaccctgggtg

SEQ ID NO: 6126 - DNA, 236 bp, Bos taurus
  Clone ID: 26-LIB34-054-Q1-E1-G5
cactcacaatgccagctgacatcatggcgcaagctgggatcattccatgtctgaaagtgtggttgttgttcagttgctcggccgtgtctgcctgtatgtgatcccatggactgcagcacgccgggcttccctgtccttcactgtctcctggagcctgctcagactcatgcccattgagtcgatgataccatcctctgttgtccccttctcctcctgtcctcagtctctcccagcgt

SEQ ID NO: 6127 - DNA, 351 bp, Bos taurus
  unsure (347): unsure at all n locations; Clone ID: 26-LIB34-055-Q1-E1-G5
ctgattctttggacaccccgaagtctatattttaatcttacctgggtttggaataatctctcatatcgtgacctactactcaggaaaaaaagaaccattcggatatatgggaatagtttgggctataatgtcaatcggatttctaggtttcatcgtatgagcccaccatatattcactgtcggaatagacgtcgacacacgagcctacttcacatcagccactataattattgctattccaaccggggtaaaagtcttcagctgattggcaacacttcatggaggtaatatcaaatggtctcctgctataatgtgagccctaggctttattttcttatttacagtangggg

SEQ ID NO: 6128 - DNA, 371 bp, Bos taurus
  Clone ID: 26-LIB34-056-Q1-E1-G5
agataatgaaaatgtagtaaacgagtactcctcagatctggaaaagcagcagttatatatacatgagactgtgaagaataagatcccaactaagcttcatgtgctcagttcaattctggagaatttgagaagcaaaatacaataattagaatcggatgtctcaactcagatggaatactgccgcaccccgtgtactgttacgtgcaatattcctgtggtgtctggcaaagaatgtgaggaaatcatcaggaatggaggtgacacatctgaaatgtacctcattcagcctgaggattctagcataccatatagagtatactgtgatatgaaaacggaaaaaggacgatggacagtaattcagaaccgtcaag

SEQ ID NO: 6129 - DNA, 336 bp, Bos taurus
  Clone ID: 26-LIB34-056-Q1-E1-G9
taataatacactttgtacctaattagaagagacacagcacagtgcctcggactcatttctgactttacgcaagttcttccattgggaaacatcggcagaatgtatagttgcatccttgtcaacactgctctgagtaatggtcatgggaagctcagctctgagaagctgcctccaatagcaggtgcagctcaaagcccacgtctacctgctggcaacccgggtcaagcagcatcacgtcagcatctcgcagcttttgcatgagaaataagtcgagctccttgttacaggataggagaatagtgtcattgaccttggaggaaagacgcactacgcaga

SEQ ID NO: 6130 - DNA, 220 bp, Bos taurus
  Clone ID: 26-LIB34-057-Q1-E1-G5
gctgggtgctcctcttgagtcagccctatccacggcagagatgttttccgtgagggacctctgcctggtcctgagtttggtgggtgcaattaagacagaagatggtagtgatcctcccagtggtgactttttaactgaaggaggaggggtgcgtggcccaagacttgtggaaagacagcaatctgcctgcaaagagacaggctggcccttctgctctgaa

SEQ ID NO: 6131 - DNA, 202 bp, Bos taurus
  unsure (195): unsure at all n locations; Clone ID: 26-LIB34-059-Q1-E1-G5
tgcatgaagacgctgtcacaagagtcagggatccaacaacaggccttgagaaatgtggctcttatacctcctgctgccagtcctgttctacagggtgggaggcgccacacccacccctcagaagctctatggggaggtgatgtccccgctgttccccaagccttaccctaacaatttttgaagcggaccaactgntgatcac

SEQ ID NO: 6132 - DNA, 209 bp, Bos taurus
  Clone ID: 26-LIB34-059-Q1-E1-G9
tctagatcgcgagcggccgctcgcgatctagaactagagctccctgggttcaagatgtaccctatcgactttgagaaggatgatgacaccaacttccatatggatttcatcgtggccgcatccaacctccgggcagagaactatgacattccccctgcagaccggcacaagagcaagctgattgcaggaaagatcatcccagccattgc

SEQ ID NO: 6133 - DNA, 405 bp, Bos taurus
  Clone ID: 26-LIB34-061-Q1-E1-G5
acagacagtcgctgtgggtgtcatcaaagcagtggacaagaaggcagctggagctggcaaggtcaccaagtctgcccagaaagctcagaaggctaaatgaatattatccccaatacctgccaccccagtcttaatcagtggtggaagaacggtctcagaactgtttgtctcaattggccatttaagtttaatagtaaaagactggttaatgataacaatgcatcgtaaaaccttcagaaggaaaggagaatgtttttgtggaccatatgttttgtgtgtggcagtttaagttattagtttttaaaatcagtactttttaatgaaaacaacttgaccaaaaatctgtcacagaatttgagacccattaaaaaaagtttaatgggaaaaaaaaaaaaagaaaaaggg

SEQ ID NO: 6134 - DNA, 211 bp, Bos taurus
  Clone ID: 26-LIB34-062-Q1-E1-G5
ccggaacattcccgggatcaacccaaacgtcggctgaatggttggtcttggtaaggatattgtttacaatgccagaaaatataactgtttgataacctgcattaatagatttccttttgcctacagaaggaaaataaaaataaccaaaggatatttctagaaaggattaagaaagctgtttaagaaggccatgactcaatccttaactgtg

SEQ ID NO: 6135 - DNA, 443 bp, Bos taurus
  unsure (408): unsure at all n locations; Clone ID: 26-LIB34-064-Q1-E1-G5
agcagcgccggcgtgacccacccgccatgctccccccagcgctcgtcttgctgttggggtttctctgccacgttgctatcgcaggacgaacctgccccaagccagatgagctaccgttttccacggtggttccactgaaacggacctatgagcccggggagcagatagtcttctcctgccagccgggctacgtgtcccggggagggatccggcggtttacatgcccgctcacaggactctggcccatcaacacgctgaaatgcatgcccagagtatgtccttttgctgggatcttagaaaacggaacggtacgctatacaacgtttgagtatcccaacaccatcagcttttcttgccacacggggttttatctgaaaggagctagttctgcaaaatgcactgaggaanggaagtggagcccagaccttcctgtctgtgcccct

SEQ ID NO: 6136 - DNA, 212 bp, Bos taurus
  Clone ID: 26-LIB34-065-Q1-E1-G5
ggtatttattatgatccagattgcagcagcaaagacctggatcatggtgttttggtggttggctatggctttgaaggaacagattcaaataacaataaattctggattgtcaagaacagttggggtccagaatggggctggaatggctacgtgaaaatggccaaagaccagaacaaccattgtggaattgccacagcagccagctatccaac

SEQ ID NO: 6137 - DNA, 198 bp, Bos taurus
  Clone ID: 26-LIB34-065-Q1-E1-G9
gtataagaaagcggtgctcttccctgatggccaggctgtcggggagaagatcttcaagacagcaggtgctgtaaagtcatattcagatgcagagcagctctgcagagaggctaagggacagctggcctccccacgctcttcagccgagaacgaggccgtgacacagatggtcagagcccaggaaaagaatgcttacct

SEQ ID NO: 6138 - DNA, 254 bp, Bos taurus
  Clone ID: 26-LIB34-066-Q1-E1-G5
gtagaaatgcaccatgaagcattgagtgaagcccttcctggggacaatgtgggctttaatgtcaaaaacgtgtctgtcaaagatgtccgtcgtggcaatgtggctggtgacagcaaaaatgatccacccatggaagctgctggcttcacagctcaggtgattattttgaaccatccaggtcaaatcagtgctggatatgcacctgtgctggattgtcacacagctcacattgcttgcaagtttgctgagctgaa

SEQ ID NO: 6139 - DNA, 235 bp, Bos taurus
  Clone ID: 26-LIB34-067-Q1-E1-G5
gggcgttcggccggcgagtccccacgcgcattcaacatgcggattgaaaagtgttatttctgttcgggccctatctacccaggccacggcatgatgttcgttcgtaacgactgcaaggtgttcagattctgtaaatccaagtgccataaaaacttcaaaaagaagcgcaatcctcgcaaggtcagatggactaaagcgttccggaaagcagctggtaaagagctcacggtggata

SEQ ID NO: 6140 - DNA, 202 bp, Bos taurus
  Clone ID: 26-LIB34-067-Q1-E1-G9
cattcctcacgcatcaatgcagataccacgggaatctacttcaccagggtcaaggctggaagctccgccatgacatccctaatgccccttctgatggtggccctgctgacgtgagttgttgtggctgatcaccagtcctgcactggccgctgcacctatggcgtcaacgccaccacaaagtgtcagtgtgactagctctgtt

SEQ ID NO: 6141 - DNA, 234 bp, Bos taurus
  unsure (193): unsure at all n locations; Clone ID: 26-LIB34-069-Q1-E1-G9
acgaggttctgaaaccctagaggacgcaactgtgagtgtctctgtcctagcctctcaacttgctttcctgtgtccaatagcactgcagactccagtactagcctgtccagagcagcaagtgagaggaaacaagccagcattgtaagaggacatgcttctcctccctctctccgtgctgctcctgctcacacangccctggagattccctgggagcagaaaatggacaacccttt

SEQ ID NO: 6142 - DNA, 223 bp, Bos taurus
  Clone ID: 26-LIB34-070-Q1-E1-G5
ggggggagttctctccaggcagaggaacctccagtgcaaatacaggagggcaggagagtgtgtgtgttcaaggaagagccagaggcaggtgtggctggaggagcgaggaattgagatgagatccagtgtctggccagatcatgtggacctccaggatattagaaggtgtctgatgtccgtgaaagatgtggactcataagatggtttgactagaagatgacct

SEQ ID NO: 6143 - DNA, 388 bp, Bos taurus
  Clone ID: 26-LIB34-071-Q1-E1-G5
agcacttactcaaaaacatctactcctaatggttatgataatggcattatttgggccacatggaaatcccggtggtattccatgaagaaaaccaccatgaagataatcccacttaacagacttgccatcggagaaggacagcagcaccaactggggggagccaaacaggctggagacgtataaaagaccatttcaaaagtgatttacttttttaaagaactttatctgaaaagaaaaagataatatttttcctatgggacaatggacttgcaaagcctcacttcactttaaaagtaaaaagaacccatgttgagaactccactaacagttttatgccggtgataatttatccacataccatttcaataaatattttgtttcctaagac

SEQ ID NO: 6144 - DNA, 377 bp, Bos taurus
  Clone ID: 26-LIB34-071-Q1-E1-G9
agaagaataatatcccaactaagcttcgtgtgctccgttcaattctggagaatttgagaagcaaaatacaaaaattagaatcggatgtctcaactcagatggaatactgccgcaccccgtgtactgttacttgcaatattcctgtggtgtctggcaaagaatgtgaggaaatcatcaggaatggaggtgaaacatctgaaatgtacctcattcagcctgaggattctagcaaaccatatagagtatactgtgatatgaaaacggaaaaaggaggatggacagtaattcagaaccgtcaagatggtagtgttgactttggcaggaaatgggatccatataaacaaggatttggaaatattgcaaccaatgcagaaggg

SEQ ID NO: 6145 - DNA, 392 bp, Bos taurus
  Clone ID: 26-LIB34-072-Q1-E1-G5
aagaatgtatctgaagtctctaaaacagggagctgaaacagttctcacaccattgagacatacctctaggtactttgaggtatttactaaattcagaaggtttttaggtttactgtaagtgcagtaaacattagacacattggatacagtggagtttttggtagattttacttgaaagaaggtgagtataagccaacttgtggtcattattataatgacgagaatactgctggagtgtgaatccaaaacagatatagcttttaaattttaaagcatttggtaaactgtggctgagttgtttctgttgccaatagcaaactgcttttccatttatggagaattcatgcctttcaagcattttaaatatgacaatatttataaatgtgtggttt

SEQ ID NO: 6146 - DNA, 417 bp, Bos taurus
  Clone ID: 26-LIB34-073-Q1-E1-G5
acttgagtcagccctatccacggcagagatgttttccgtgagggacctctgcctggtcctgagtttggtgggtgcaattaagacagaagatggtagtgatcctcccagtggtgactttttaactgaaggaggaggggtgcgtggcccaagacttgtggaaagacagcaatctgcctgcaaagagacaggctggcccttctgctctgatgaagactggaatacaaaatgcccttctggctgcaggatgaaagggttgattgatgaagtcgatcaagattttacaagcagaatagataaactaagagattcactaattaaattatcagaagaacagtaaggactctaatacattgaccaagaacatagtggaactaatgagaggggattttgccaaagctaacaacaatgataatacat

SEQ ID NO: 6147 - DNA, 401 bp, Bos taurus
  Clone ID: 26-LIB34-074-Q1-E1-G5
agtcagtagctcgcctgagccagaaatttcccaaggctgagtttgtagaagttaccaagctagtgacagatctcacaaaagtccacaaggaatgctgccatggtgacctacttgaatgcgcagatgacagggcagatcttgccaagtacatatgtgataatcaagatacaatctccagtaaactgaaggaatgctgtgataagcctttgttggaaaaatcccactgcattgctgaggtagaaaaagatgccatacctgaaaacctgcccccattaactgctgactttgctgaagataaggatgtttgcaaaaactatcaggaagcaaaagatgccttcctgggcccggttttgtatgaatattcaagaaggcatcctgaatatgctgtctcagtgctattg

SEQ ID NO: 6148 - DNA, 327 bp, Bos taurus
  Clone ID: 26-LIB34-075-Q1-E1-G5
tgggtcgaactatgccgccgagctccgccatgtcatgacacatcttggggagaagccaactgatcaggacgtataccagatgatccgtgaggctgatgtctatggatgatggctagattaactactacgagtttgttaacgtcatgatgagcacttgatccacaacagcataagctcaacgcacagaggattgtgcattgcatattagtcaagaatgattgcatctcttatttcatcgacttccaatgaaacattctgctacttgtagcttttgaaacggatttcacttgcagcattgttcctccctccattgtgttttcagaactg

SEQ ID NO: 6149 - DNA, 426 bp, Bos taurus
  Clone ID: 26-LIB34-076-Q1-E1-G5
gggtcgacgcacgagtccgagaaagaatactggggcgtagcgtcctttctccagaaaggaaacgatgaccactggatcattgacacggactacgagacctttgccgtgcagtactcctgccgcctcctgaacctcgatggcacctgcgctgacagctactctttcgtgtttgcccgagaccccagcggcttttccccgggaatgcagaaaatcgtgccgcagaagcacgacgagctgtgcctggccatgcagtaccggctgattcctcaaaacggttattgtgatggcaagtcagaaagaaacattttgtagcaacatggcacgtgtcctttcattaggaaacttcccattaaccttactcagccctcaactcttaagagtttagtttgctttaactcccctccctgcccctctcgcccctcgcct

SEQ ID NO: 6150 - DNA, 408 bp, Bos taurus
  Clone ID: 26-LIB34-076-Q1-E1-G9
cgatacacgcctcaacagtgagtcgtattagttttagcctaaaaactccaatccacttctcctaagatcacattgtcaaatctcaggatcgtcacttattgaacaagagccttatcataacagcaggcgcatcataatagaagcaatggcagcggtgttctgaggtagacagtctttgcagacacaattcttttgatgaagccctatgtttgccacctgtgaagagtgctcgtactgccacgaacacacatgatcatgagtcatgatgaatcggggattcacactgtggctgatccttggggatgttcatatttgatggaaactctcagaattgatatttatgatgctgccttgaagctcattaatgaattagaggatatgtgttgaatcggtcaagctgtaacacat

SEQ ID NO: 6151 - DNA, 372 bp, Bos taurus
  Clone ID: 26-LIB34-077-Q1-E1-G5
aaccctatagagagtcgtattatgcctttaaaaaagcctttggttaacaactgggcctgtaagcccgagctcacattcatcgcccacctgcccgagcgccgagaaatcatctcctttgggagtgggtaccgcgggaactcgctccttgggaagaagtgcgttgccctcatgatggccaactggctggccaaggaggacgggtggctggcagagcacatgctgattctgggcatcaccaaccccaagggccataagaagtacttcgcggctgcgtttcccatcgcctgtgggaagaccaacctggccatgatgaacactactctcccgggatggaaagtagagtgtgtgggtgatgatatcgccttgatgaaa

SEQ ID NO: 6152 - DNA, 466 bp, Bos taurus
  Clone ID: 26-LIB34-078-Q1-E1-G5
aacaccctatagtacgtcgtattacctcctgctgctctggggtctgtccctgagcccagtgactgagcaggcgacgttctttgaccccaggccatccctgtgggccgaggccggctcaccgctggcaccctgggccgatgtgacgctgacctgccagagcccgctgccgacccaggagtttcagctcctcaaggatggcgtgggccaggaaccggtgcacctggagtcccctgcccatgagcacaggttcccgctgggaccagtgaccagcaccacccggggcctctaccgctgcagctacaagggcaacaacgattggatcagcccgagcaacctggtggaagtgaccggagcagagcccctgcccgcaccctcgatctcaaccagtcgcgtgtcctggatcacacccggcctgaacaccacactgctgtgcctctcgggacttcgaggtgtgactttcctgctg

SEQ ID NO: 6153 - DNA, 444 bp, Bos taurus
  Clone ID: 26-LIB34-078-Q1-E1-G9
gtcgtcttacagcaatgctcactcgctatatggatagtggctttggcatgggttacttcgccacacccctgattcgtggcgtagactgcccttacctggccacctacatggactggcacttcgttgtggagtcccaaacccccaagacactacatgatgccttttgtgtgtttgagcagaacaagggcctgcccctgaggcgacaccactcagattttctttcccactattttgggggcgttgcacagacagtgctggtcttcaggtctgtgtccacgatgctcaactatgactatgtgtgggatatggtcttctaccccaatggggccatagaagtcaaattgcatgccacgggctacatcagctcagcgttcctctttggtgctgcccgaagatacggaaaccaggttggggaacacacactgggccccgtccacacccaca

SEQ ID NO: 6154 - DNA, 350 bp, Bos taurus
  Clone ID: 26-LIB34-079-Q1-E1-G5
agcggccgggcccctacgacctaaggcggagctccgcgatccaagggctctgctcccagagcgaggtggccgggcggctcgggaccgtggccagagccggcatggagcggtggcgtgaccggctggcactggtgacgggagcctcgggaggtatcggcgcggccgtggcccgggccctggtccagcacggtctgaaggtggtgggttgtgcccgcaccgtgggcaacatcgaggagctggctgccgaatgtaagagtgcaggctaccccgggactttgatcccctacagatgtgacctgtcgaacgaggaggacatcctctccatgttctcagcggtccgctctcagcac

SEQ ID NO: 6155 - DNA, 398 bp, Bos taurus
  Clone ID: 26-LIB34-079-Q1-E1-G9
aggaaactgggtgaacaaccaccgtgctctctgtaccctcatcctggtcattgctgctgctataccagccccaggccaagaacatgaacaagctgatgtcttgggtctctgtcctcatcatcctcccagaagcctttgctcagacagacctcagagggaaggtatttgtgtttcctagagaatcttccactgaccatgtgaccctgatcacaaagctggagaaacctctgaagaacttgaccttgtgtctccgagcctatagtgatctctcccggggctacagcctcttctcctacaacatccacagcaaggataacgagctactggtttttaaaaacggaattggagagtacagtctatacattggaaaaaccaaagttactgttagagctaccgag

SEQ ID NO: 6156 - DNA, 423 bp, Bos taurus
  Clone ID: 26-LIB34-080-Q1-E1-G5
aggatttacatattggggaatattctggaaccgctggagactcccttactggaaattttcatcctgaagtgcaatggtgggccagtcaccaaagaatgaaattcagcacgtgggacagagacaacgacaactacgaagggaactgtgcgaaagaggatcagtctggctggtggtttaacaggtgtcactctgcaaacctgaatggcttctaccacaagggtccctacaccgctaaaacggacaatgggattgtctggcacacctggcatggatggtggtattccttgaaatctgtggttatgaaaattaggccaaatgatttcattccaaatattgtttaattgtccctgctggagtttcagttctgcagtttatcttggtttaagtgatttgaaaaatgtagcaaatctgaatattcacatg

SEQ ID NO: 6157 - DNA, 428 bp, Bos taurus
  Clone ID: 26-LIB34-082-Q1-E1-G9
agcttcccgcccgctccccttttcccctcagtcgcctcgcgcctgcagtttttggctttcacccccaccagtgaccaaagacttgaccactcaaagtccagctcctcagaacactgctcgacatggacaccggagtgattgaaggtggattaaatgtcactctcaccatccggctacttatgcatggaaaggaagttggcagtatcatcggaaagaaaggagaatcagttaagaagatgcgcgaggagagtggtgcacgtataaacatctcagaagggaattgtcctgaaaggattatcactttggctggacccactaatgccatcttcaaagcctttgctatgatcattgataaactggaagaggacatcagcagctctatgaccaatagcacagctgccagtagacccccagtcaccctgaggctg

SEQ ID NO: 6158 - DNA, 361 bp, Bos taurus
  Clone ID: 26-LIB34-083-Q1-E1-G9
agtgttgcgccacttgcgccctgggcaaagggatgccctgtggggtgtacaccccccgctgcggctccggcctgcgctgctacccgccccggggcgtggagaagcccctgcacacgctggtgcacggacaaggcgtgtgcatggagctggcagagatcgaggccatccaggaaagcctgcagccctctgacaaggacgagggcgaccaccccaacaacagcttcagcccctgcagcgcccacgaccgcaagtgcctgcagaagcacttggccaaaattcgagaccggagcaccagtgggggcaagatgaaggtcatcggggcgccccgagaggaagcccggcctgtgccccaaggctcctg

SEQ ID NO: 6159 - DNA, 420 bp, Bos taurus
  Clone ID: 26-LIB34-084-Q1-E1-G5
aattctcccgactcgacgtcgtcgttacagggaagaagaagcgggtgagaaaaacttctgtttccaccgttttgcccatttctgcagatttgttccgaggccgaggcatctccaaggcagtgatggctctccagaggacccaggcctttcttctgctcttgctgctgaccctgctggggctagggctggtacagccctcctatggccaggatcgcatgtaccaacgattcctgaggcaacatgtggaccctgatgagacaggaggcaatgacagctactgcaatttgatgatgcaaagacggaagatgacttcacatcagtgcaagcgcttcaacactttcattctgaagatctttggaacatccgtagtatctgcagcaccaccaacattcagtgcaagaatggccagatgaactgcca

SEQ ID NO: 6160 - DNA, 411 bp, Bos taurus
  Clone ID: 26-LIB34-085-Q1-E1-G5
aggtcccttggacagaagggagatcaagccagtcaatcctaaaggaaatcggtcctgaatattcattggaaggactgatgctgaagctgaagctccaatactttggctacctgatgtgaagaactgactcattggaaaagaccctgatgctgggaaagattgaaggcaggaggagaagggcacaacagaggatgagatggttggatggcatcaccgactcaatgggcatgagtttgagcaagctctgggagttgatgatggacagggaagcctggcgtgctgcagtccatggggttgaaagagtcagacacgactgatcgactgaactgaactgatgtttgtcttttgcttctttcttgtttctttggatatttcttttattccaataccatagttaaattcttaactgtt

SEQ ID NO: 6161 - DNA, 436 bp, Bos taurus
  Clone ID: 26-LIB34-086-Q1-E1-G5
ggcagtatattgtcaccctgcttatttaacttctatgcagagtacatcatgagaaacgctggactggaagaaacacaagctggaatcaagattgccgggagaaatatcaataacctcagatatgcagatgacaccacccttatagcagaaagtgaagaggaactcaaaagcctcttgatgaaagtgaaattggagagtgaaaaagttggcttaaagttcaacattcagaaaatgaagatcatggcatccagtcccaccacttcatgggaaatagatggggaaacagtggaaacagtgtcagactttattctttgggctccaaaatcactgcagatggtgactgcagccatgaaattaaaagacgcttactccttggaaggaaagttatgaccaacctagatagcatgttcaaaagcagagacattactttgccaac

SEQ ID NO: 6162 - DNA, 414 bp, Bos taurus
  Clone ID: 27-BOVMS1-001-Q1-E1-G3
atcctttttttttttttttttttttttttttttttttttttttttttttttttttttttttttttggttttttttgtttttattttatactattaatctatttttttttttgtttaaaggggttcaaggggacttaatataaaaaccaaaaaacgaaaaaaaaaacccggtaaaaaaaaaacagggcaacacaagagccaggaaaaaattggaccaaaaaaaatcggcggctcaaaaaacaaaaattcctgatgccaagtcaaatggggacccaaagcaaccgggaggcccaggaaaacaacacccaaagcccttttccagggggaaaaaaaagtgtaaacaagggccgcgaaacacaaaaaaaaccccaattacgaatctcggggaaaatataaaaaggcccacgcccacccc

SEQ ID NO: 6163 - DNA, 338 bp, Bos taurus
  Clone ID: 27-BOVMS1-002-Q1-E1-G3
aaaaaaaaaaaaaaaaaaaaaaaaaaaaaaaaaaaaaaaaaaaaaaaaaaaaaaaaaaaaaacataaaaaaaaaaaaaaagacttccattcaaaacaattcgggtttcccctctgggggcttcaaccttacttacgcttctagactgtctcataatttttcttaactggccgtggctttcaattctttggccttctttttccctctccttgactggcaaaccccttttgtctcccatctgaattcccttgcagggcttcccttttttctccacctggcctgttaaccttggggctcgccccgttttcccgccctaacagttgcaccccctttgtgccg

SEQ ID NO: 6164 - DNA, 125 bp, Bos taurus
  Clone ID: 27-BOVMS1-003-Q1-E1-G3
atgcgacgtcatagctcttccaaagtgtcacctaaattcaattcactgggcgtccttttacaacgtcgtgactgggaaaaccctggcgttacccaacttaatcgccttgcagcacatcccccttt

SEQ ID NO: 6165 - DNA, 321 bp, Bos taurus
  Clone ID: 27-BOVMS1-004-Q1-E1-G3
gggtcgccgacgcgtccgattgaagacgggcggccctttttttttttttttttttttttttttttttttttttttttttttttttttttttttttttttttttttttttttttttttgggaaaaatcctttattaaaccaggtgtcactcccctacctgaaaagggacatttatgttgcaaacaccatgcctccatgcctccctaaggctgggtgtggccgtcccacccgggccacacttccttctcagggcaagcaagacactctgctgtcttcaaggggctgggtgatggggtcaaaaaaattaggctggagtttatgt

SEQ ID NO: 6166 - DNA, 416 bp, Bos taurus
  Clone ID: 27-BOVMS1-005-Q1-E1-G11
attttattggtctttcccagtttttcattaccttaatggtttggagctatactggtcaagtattttatagaatattcctcaagtgtggcttatcttatatagtctcataattagaatgtggttatgagttttgggaagaaacaccacagaggtaatgcctttcttatatcacatcagagagtatatgacattcgcatgatgtcattgataatataaatcaatatatctacaggattctgcactacaaaattactatttttttttcctttttataccctattctttggaagtgagtcaataagtccaatccaccctcaatagtacatcaaaattctgtaaggaaaatttgccaatcaactccaataaattaatttggcaattaattaaaacaataagggcaaaattggaattaattt

SEQ ID NO: 6167 - DNA, 179 bp, Bos taurus
  Clone ID: 27-BOVMS1-005-Q1-E1-G3
cagaattccaaccaatgggctccagactctgggttctggccaatgaaaaacctcccttacagtctcctcttctttttccccaagctccgcccaccatcgggagctctggctaatggagctcacctggagctgttgctttttctctactcaaagcaacaaataaaagcaatggtggcctt

SEQ ID NO: 6168 - DNA, 346 bp, Bos taurus
  unsure (6): unsure at all n locations; Clone ID: 27-BOVMS1-006-Q1-E1-G3
gggtcngcccacccgtccgtttaaccatgaattaggcactgatgcagataaggaacagtggaaagcggttcacaaacaagtggttgacagtgcttatgaggtgatcaaactgaaaggctacacatcctgcgccattggactgtcagtggccgatttggcagaaagtataatgaagaatcttaggcgggtgcatccgatttccaccatgattaagggtctctatggaataaaagacgatgtcttccttagtgttccgtgcatcttgggacacaatggaaacgcagacgttgtgacagtgactctgactcatgatcaatacgcctgtttgaagaacagtgcatataca

SEQ ID NO: 6169 - DNA, 370 bp, Bos taurus
  Clone ID: 27-BOVMS1-007-Q1-E1-G11
gctgaccactcagtgtgaccgcttctcccaggaagagatcaagaacatgtgggctgccttcccccccgacgtgggcggcaacgtagactacaagaacatctgctacgtcatcacgcatggtgacgccaaggaccaggagtagagcgggcccttttcggtctctgctaatcaacaccttcctgccagtccgacctccccacccagactcctaataaattgaaagggtctcatttcttaaaaaaaaaaaaaaaaaaaaaaaaaaaaaaaaaaaaaaaaaaaaaaaaaaaaaaaaaaaaaaaaaaaaaaaaaaaaaaaaagggcggccgctcccaatgactgacaatgatcttatcaaaattcttgacccttt

SEQ ID NO: 6170 - DNA, 311 bp, Bos taurus
  Clone ID: 27-BOVMS1-007-Q1-E1-G3
gaaaacgaccatgttatgaagtggagtctcttagcacgatcagatcacgtgtattcaacatgcgtcattatatgtttgctagataaacttacagcatggatccttaatgccgcttcactgaaatatggaacatggtaattgatacatgtgattacatttgtgtttgggtaatattgcagtaataatttctcaattaactctgtacatgattcaccttgatcggcacaaatttaatcgaatgaatctgaagcggattctcagtagacaaaagcaacccttacccgattctgggcggtcgatctaaacgttcc

SEQ ID NO: 6171 - DNA, 390 bp, Bos taurus
  Clone ID: 27-BOVMS1-009-Q1-E1-G11
atgcgacgtcatagctcttctatagtgtcacctaaattcaattcactggccgtcgttttacaacgtcgtgactgggaaaaccctggcgttacccaacttaatcgccttgcagcacatccccctttcgccagctggcgtaatagcgaagaggcccgcaccgatcgcccttcccaacagttgcgcagcctgaatggcgaatgggacgcgccctgtagcggcgcattaagcgcggcgggtgtggtggttacgcgcagcgtgaccgctacacttgccagcgccctagcgcccgctcctttcgctttcttcccttcctttctcgccacgttcgccggctttccccgtcaagctctaaatcgggggctccctttagggttccgatttagtgcttta

SEQ ID NO: 6172 - DNA, 469 bp, Bos taurus
  unsure (171),(428): unsure at all n locations; Clone ID: 27-BOVMS1-009-Q1-E1-G3
aacattctctatatggttggaaatattacgacaggaaattaatgttatgggactaaaagaatcctcccctcctttttttttaaaaaaggcctcccctgtgggtactggaataaagaaacaacaaacatctaggttgtacttcacgctaacttcatgagccatttggagcanagatccatcagccaagctaactgatttagctattctagaaatagactccaatgtccactttaaagagtttattttctgacctctcagaggtgggttcaatggaaacaaagtttcacttatggcttcatttctaatcagagtcaaaatgttttacagaagcctatctgaagcctctcttgtattacacttctcagaggctttttcaatgagagtaatatatcagtttacagtcttaaggattcaatttcctgtgttangaaccctttaataagcaactacaagatgtcagaattttgtg

SEQ ID NO: 6173 - DNA, 181 bp, Bos taurus
  Clone ID: 27-BOVMS1-010-Q1-E1-G3
ccttgaatgcgacttcaaagcccttcaaaaatgtcacctaaattcaattcaatggccgtcctttaaaaacgtcctgactgggaaaaccctggcgttacccaacttaacccccttgcaaaaaatccccctttcccaaactggcttaataacgaaaaggcccccaccgtttgcccttcccaaa

SEQ ID NO: 6174 - DNA, 330 bp, Bos taurus
  Clone ID: 27-BOVMS1-011-Q1-E1-G11
cttaaggatcccatacgactaataaatttaacaaaacacaaaccaagactgtcattcataccattcacacctataagactgaattttatctgttttgaaaatgaactactcctgctacacagaagtaacaatatggtagtcagttttgtatttagaaatgtattggtagcagggatgttttcataattttcagagattatgcattcttcatgaatacttttgtattgctgcttgcaaatatgcatttccaaacgtgaaatataggtgtgaacagtgtgtaccagtttaaagctttcccttcatctgtgttttttaattaatgatttaaat

SEQ ID NO: 6175 - DNA, 463 bp, Bos taurus
  Clone ID: 27-BOVMS1-014-Q1-E1-G3
ggggagcagtgctgtgtcctttccaccatgtcacctaagaaagccaagaagagagcagagggagccaattccaatgtgttctccatgtttgaacagacccagatccaggaatttaaggaggccttcaccatcatggatcaaaacagggatggcttcatcgacaagaatgacctgagggacacctttgctgctctggggcgtgtgaacgtgaaaaatgaggaaattgatgaaatgctcaaggaggctccaggtcccattaactttactgtgttcctacagatgttcggggagaaacttaaaggagcagatcccgaggagaccattctcaacgcgttcaaagtgtttgaccctgaaggcaaaggagtgctcaaagctgattatatcaaggagatgctgacaacgcaagcggagaggttttccaaagaggagattgaccagatgtttgccgccttcccccctgatg

SEQ ID NO: 6176 - DNA, 76 bp, Bos taurus
  Clone ID: 27-BOVMS1-015-Q1-E1-G11
aaaaaaaaaaaaaaaaaaaaaaaaaaaaaaaaaaaagaaaaaaaaaaaaaaaaataaaaaaaaaaaaaaaacaaaa

SEQ ID NO: 6177 - DNA, 221 bp, Bos taurus
  unsure (14): unsure at all n locations; Clone ID: 27-BOVMS1-016-Q1-E1-G3
aaaaaatcatcatnaaacagtttggcgacaacaagccttaatttttcactactagtttttctccgactccctatgcacccaaccactaagtttaaccatatggctcctccctctaatacgtaataggggggcaacatcatcgatcataaataaaatcaaacgcgatcgaaactatttatcactatgctgatctcactacaactattcctacgtacaacctt

SEQ ID NO: 6178 - DNA, 173 bp, Bos taurus
  Clone ID: 27-BOVMS1-018-Q1-E1-G3
atgcgacgtcataactcttctacaatgtcaccaaaattcaattcactagccgtcgttttataacatcgtgactgggaaaaacctgccgttatccaacttaatcaccttgcagcacatcaccctttctccaacaggcgtaataacaaaaaggcccccaccaatgatccttccca

SEQ ID NO: 6179 - DNA, 275 bp, Bos taurus
  Clone ID: 27-BOVMS1-019-Q1-E1-G3
tgcacaattctaaaggacaaacatgaacattactattaatatctctgatcctatttattggatcatcaaacctactaggcctattaccccattcattcacaccagcaacacaactatcactaaacctaggcatagccatccccctgtgagcaggagccgtaattacaggattccgcagtaaaactaaagcatcacttgcccatttcctaccatatggaacacccaccccactaatcccaatactagtaactattgccactatcaacctttttaat

SEQ ID NO: 6180 - DNA, 432 bp, Bos taurus
  unsure (387): unsure at all n locations; Clone ID: 27-BOVMS1-021-Q1-E1-G11
ctgggagaagtcagcaccctgaatgctcagctttcagacttaaatttcagctctctgagaccagttgtaccaaacaacttcaaacccagtcttaatacacaggtggatctgctagccttggaaaatacagaaacacccctgtttgcccaaaggaccagccaaaacctcgcctcaagtcatacatacgagagttttctggaacattcaaattcagtattactgcagccagttagcctacagaccgttccagcaacaccatcaaaccagagactgccacctctgcccagcaatcatccagcgatgacaaagaacgatctccagccacccaattactgtgaagtaatggagtttgattccttagctcctgctgtcaccacagaagctgtntatgaagagattgatgttcatccccacaaaggagctcaaagtcac

SEQ ID NO: 6181 - DNA, 443 bp, Bos taurus
  Clone ID: 27-BOVMS1-021-Q1-E1-G3
gggagctaagattctgcaagccaccccatgcacactcagaaattaaaaaaaaaaaaaggtcactgtcaccaggggttcatcaaacatagctgtatgaactccattctcagtgaattctgttgggacttttatttttctttaagaaatttttattcctcccaaggattctgaagcatgtatatgatgaggtttagtatatttgctcacttggctcttaagaacaggcaaatccaggcagtttattttgttcatatcctgaaaattttgttaagaaagataatgtcagaagttggtaaaccgttttgtcaaccacctgtcagtgactgaagagggatttgattttctgaatgtccatttgttgcagtctacgtcctttaatgacactcttgtaacaagtataaagacttactctgcacgtgataaattctattgagtgcctcaag

SEQ ID NO: 6182 - DNA, 430 bp, Bos taurus
  Clone ID: 27-BOVMS1-022-Q1-E1-G3
agtcggttaattagataataagccactctaaaacacctaaatgaaccaatctacaatctttacaacttttttttttttttactgtgtttttagatgaatgtactatgagaaattcaacattaatagttttggattttcttatcacaaataataaaatgaaggacctcaaccacaagtttagtaaccagtttgaatctatttatctttatttgaatgtcttttagaatatgtaaaaagtaataaataaatgtaccctccaggagacatgtataataaaaacttctataattgtacatatgcctttgatgtaatttcccctccagattatcaactatgtgtttgacaagtgaacaataaatatgtaatcagttgaaatttgggattataaacaaacatatcataataggaactgtttcacaaacacaaaatg

SEQ ID NO: 6183 - DNA, 397 bp, Bos taurus
  Clone ID: 27-BOVMS1-023-Q1-E1-G3
gcgtccgcaagtttgagagtggcagtccataaaggcaaaattgtgattgctggaggtgtcactgaagacggtctttcagcttcagttgaagcttttgacctcaacaccaataagtgggaagtaatgactgaatttccccaagaaagaagttccatcagtttggtcagcttggctggatccctgtatgctattggtggttttgccatgattcagctggaatctaaagaatttgcacccactgaagtcaatgacatatggaagtatgaagacgataaaaaagaatgggctgggatgctgaaggaaatacgttatgcttcaggagctagttgcctagcaacacggttaaatctcttcaaactgtctaagctataaataagaaggtgaaaaacataataga

SEQ ID NO: 6184 - DNA, 434 bp, Bos taurus
  unsure (420): unsure at all n locations; Clone ID: 27-LIB188-001-Q1-E1-G3
accggctggggcatggcaggcggctctggcttcccacccttctgttcagagatgggggtggtgggcagtatttcatctttgggttccacaatgctcacgtgatcaggcagaggcttcttagggccaatcttaccagtcgggtcccaaggcagcatgatctttaccttgatgcccagcacaccctgtctgagcagcacatggcgcacggcggtgtccacatagtagttaacagggtccccactgtggatcatgaggccatccacaaacttcatggatttagccctctgtcctcgaagtttcccagacaccacgacctcgcagcctttggccccactctccatgatgaaccgcagcacaccatagcaggccctccgcacagcaaagcctcctatgagtttgtaacgcatagactctgcctgngcaatggcacacag

SEQ ID NO: 6185 - DNA, 300 bp, Bos taurus
  Clone ID: 27-LIB188-002-Q1-E1-G3
tgggcccggcatactctgaatctgatagacacaggcattggcatgaccaaagctgatcttgtaaataatttgggaaccattgccaactctggcactaaagcgtttatggaggctcttcaggctggtgcagacatctccatgattgggcaatttggtgtgggcttctactctgcctacctagtggcagagaaagtggttgtgatcacaaagcataacgatgatgaacagtatgcttgggagtcttctgctggaagttccttcactgtccgtgctgaccatggtgagcctattggccgcggt

SEQ ID NO: 6186 - DNA, 410 bp, Bos taurus
  Clone ID: 27-LIB188-003-Q1-E1-G3
gccgccggatacaaagaaaacccaccaaaatggagttcaaatttgatcaaaacataacccccctaaaattatacaatacaggcagaaggaaagaaaagtcaccctaaatctaaatctgaccactcagggcttaagcagagagagggggaaaatctacatgcatcactaaactgaaacactgtttgggaactctgggacggtgtccatctcctctacttcccagacagctgctcgtagagcttgggcacataatcatcccattcggcctggtaacacgtgccggccactggggccccaagctcgtacaaatcaatgttttgaaaataatgatctcaaactttctaagttaaattttaaaaaacctgatcgtttgccatatggggtgggtttgctcttagaaccgcatgctg

SEQ ID NO: 6187 - DNA, 416 bp, Bos taurus
  unsure (38): unsure at all n locations; Clone ID: 27-LIB188-004-Q1-E1-G3
gccggccgaacaaacttctcgacccttacaaggccaanaaaggaggaaattgcaaaaccccttggggaatccaagggcaaccggtccaaaggtaaggttcttgcccccggccttgaggatccaaccccggccgcggttgctcactcgcaaagcacacaccttcattttgggcacctcctggacacgaccatcatcggttatagtccccacgaccacagctgttttgccctcccggccaggaagcttcatcttccggatcatccgggaaagagagagcggtggcctgttggtgcggctcatgaacaatctcttgaggacaacctgattgaaggtggagttggttcgtctggccaggacctgcccgggcggccgctcgaaccatctgtctgacctgtgcaaaaaatgtgacactacag

SEQ ID NO: 6188 - DNA, 424 bp, Bos taurus
  Clone ID: 27-LIB188-005-Q1-E1-G3
acccacgccatccatagaatagagctttagatctccttgaaaatatctagcatacggacgagaaattggcaagccataaccaaatccagccaatggggcagctcgggtaggctccaggctaggtctcggagcagttgaatacatgtagttaaaaaggcgatctatttttcggagtggaaccccaccacctaggtcacttatcttaatggataagtcttctttactcagagtaaccagggttttaacagctgggtagccctcttttctatcttcatatagttcaactgttgctctcattgagttcttgaacaactcaaagagcatgtgaaagaggtgtgagggcacataaactacctgaataggtttgtttggagctttggcattgaattcttcaacttccagctctggagctaccagataatac

SEQ ID NO: 6189 - DNA, 396 bp, Bos taurus
  Clone ID: 27-LIB188-006-Q1-E1-G3
ctccgtagcgaatgggccgggatactgagtgacctggggcctccggaggaagaaccggtcctggaatagcgcgtccatgacgctggactcccgggtgaagctgtcctccatggcgtcaagcacctggctctgctcccggtcaatcgccatcagggaatctatgctgtcaccgttgatgcataagtataagggggagctctggtttatgaactcctcaagctggtggccaaccagtcccgatcggcttctgcacacccgcgcgtacaacttcatgcaggtctgcttgaggcacggcttacattcctcccacatggctgtcatggtctcattgcagaccccctgggacgccgtcagcttgttttcagaatccctgttgtcattcacggcgtcttcctt

SEQ ID NO: 6190 - DNA, 415 bp, Bos taurus
  unsure (93),(379): unsure at all n locations; Clone ID: 27-LIB188-007-Q1-E1-G11
acatgttcatggatggtctcgggctgctggttgtccttggccttcatcagctcctggaatctagaaagcgcaagaggcccattcagaaggtanagatgggaacctcgagtcaaaacgacgtcgacatgagctggattcctcaggaaactctgaaccagatcaataaagcttcaccaagaaggttgcccaggaaacgggcacagaagagatcagtgggatctgatgagtaaatgttcctttgtgcaacaattcggtctttacttaacccgccctaatgtttttcggcctgatgggaattagtgcagagaagccatatcaccatagaaggcggctactacttatgtgtggactgagcaatccgagtctgtggcgattatantgctgaaaatgcactgcatttatttttctaaagtaa

SEQ ID NO: 6191 - DNA, 362 bp, Bos taurus
  Clone ID: 27-LIB188-008-Q1-E1-G3
acagcgccgagtctaccttcgaggggatcctcacaaacgcaatagcagagtctttgaacagcaagtccctctggccgggtggatagccaaagagctggaagctccgagacatgatttttccagaattctcctgcgccttgctgagaagcttccagattaagtcttccgtgccatccagacttcgggctacgagagcatgagaagggatctgggccatgtggcactccatgaacgcatccactggcgcccgactgttgttcaggcagagaagctcatactggtccgtgtcagccttctctggcaagttcgcaaacactgtcgtctctttaataaaaggcacgtctccagccccgtcctgcaca

SEQ ID NO: 6192 - DNA, 223 bp, Bos taurus
  Clone ID: 27-LIB188-009-Q1-E1-G3
actagaaatatttctggaactagtaaattccacgtggacctggagcaggagctggctgacctccatggaaaagatgctgcactcttgttctcctcgtgctttgtggccaatgactcgaccctcttcactctggctaagatgatgccaggctgtgagatttactctgacgctgggaaccatgcctccatgatccaagggattcgaaacagtggagtgccaaagt

SEQ ID NO: 6193 - DNA, 314 bp, Bos taurus
  Clone ID: 27-LIB188-010-Q1-E1-G3
acatttgcgaatacagcttcgatgtcatttgcatctgtgtcagagcagagtcatgcaatagcatggctgacaggactctggatttgttttacacctaagagatcctagacctcaaattaccagtcttgcctagcacactgtgcctaagcctgcagatcaagtcttgtttgaaaaccaaattgtctggcctattacaggttaacaaggtattttctgactaagcattccggtatttcggccactgatttcctactgatgttcaagcagaaaaactcaaacagctcactgacatacatccccagcaccttctcaaa

SEQ ID NO: 6194 - DNA, 418 bp, Bos taurus
  Clone ID: 27-LIB188-011-Q1-E1-G11
atgcggccgtacgccatggaggccggatacgttggtgaaaagggccgacggatccgggaattgactgctgtggttcagaagagatttggcttccctgaaggcagtgtagagctttatgctgaaaaggtagccacaagaggactgtgtgccattgcccaggcagagtctctgcgttacaaactcctaggaggccttgctgtgcggagggcctgctatggtgtgctgcggttcatcatggagagtggggccaaaggctgcgaggtcgtggtgtctgggaaacttcgaggacagagggctaaatccatgaagtttgtggatggcctcatgatccacagtggggaccctgttaactactatgtggacaccgccgtgcgccatgtgctgctcagacagggtgtgctgggcatcaaggtaaaga

SEQ ID NO: 6195 - DNA, 415 bp, Bos taurus
  unsure (367): unsure at all n locations; Clone ID: 27-LIB188-011-Q1-E1-G3
acgattactccaagcccatccaggggcagcagaagaaccctttgagcagcactggaggaagcacacgctctcctacgttgacatcaagactgcctgcgcctcggtgcatggtgccaaccgtctgggtgcaaactcgctcctggacctggttgtcttcggccgggcgtgcgccctgagcatcgcagagtcctgcagacccggagataaagttccctcgattaaaccaaatgctggggaagaatctgtcatgaatcttgacaaattgagatttgccaatggaagcataagaacatcgggactgcgactcaacatgcagaagtcgatgcagagccatgccgcggtgttccgtgtggggagtgtgctgcangaaggctgtgagaagatcagcagcctctacggagacctgcggcatctg

SEQ ID NO: 6196 - DNA, 427 bp, Bos taurus
  Clone ID: 27-LIB188-013-Q1-E1-G11
acaccgggacagcaaggcagggatgatctttgacagatagttacatatgaggcaaaatctggtattttcagtaaacttctcaatcactctcctcagggcgttctgggcatcctgagtcatggcatcagcctcatccaagatcaccagtttaaagcctttcttaaatattgtccttgtgctagcaaagctcaggattggtccccgaacgatatctattcctcggtcatctgaagcattcagctccaagaccatggagccaaattccttatctttgtacccgatagagcacggcatcatcaccaactgggacgacatggaaaagatctggcaccactctttctacaatgagcttcgtgttgcccctgaagagcatccaacccttctcaccgaggcgcccctgaaccccaaggccaaccgggagaaaatg

SEQ ID NO: 6197 - DNA, 425 bp, Bos taurus
  Clone ID: 27-LIB188-013-Q1-E1-G3
acattttactttcttcctttcagtatcctaataaaaaaaaacccatgtttctgcttacttaaaaaaaaaaaaaaaacaacaaacagaaaacatcacttttgtgatgggaaaggaggcaacaggattcaacataagcaaagaaaactacacctggagcaaagaaagagatcgaagaggaaccgactcgggtggaggccagaccacctgcactgcacagactgcttttgtcggagccagtggtgacggctcccacctgtttacagacctttttttttttctccttcagactttaaaaataaaaaattttaaaaaggaatttaaagaaaaaaagaaaaaaaaaaaaagacttctgtcgtaaagaaacctattttcagaacgcagatccgctgcttcagagctctgggatggaacagtgttgctttccc

SEQ ID NO: 6198 - DNA, 424 bp, Bos taurus
  Clone ID: 27-LIB188-015-Q1-E1-G11
acacccgcggcaaccactgggctgtcggacacttaatgggaaaaaagagtgtggcagagtccccacaacttcatgaggaggagagcctgaaggagcagctgagggagtatgcccagtgggaagaagcgacaaggaacttgctaagcctcctacaagcaaagggggcccgaggccaccagatgcctccatgggagcccctgagcattcaccagcctgcctgggattccgaggacgtcagcaacttcaaagacacaggtcctcagcatgaaggaaggaacccccagctgaactgacaatgacgatggccgcctccctcaaagaagcaaaacaaaatccttaagaaactgcgttctatgggcatcagttctactggatcatcaacaaatttcctttgtgcaaaatacttaactattcttgtatcact

SEQ ID NO: 6199 - DNA, 369 bp, Bos taurus
  Clone ID: 27-LIB188-015-Q1-E1-G3
ccatagccgccggataccgcgtggacagcgccctgcccatccagcaccaggactggactggaggaaaggagttcaagtgcaaggtcaacatcaaaggcctctcggcctccatcgtgaggatcatctccaggagcaaagggccggcccgggagccgcaggtgtatgtcctggacccacccaaggaagagctcagcaaaagcacggtcagcgtcacctgcatggtcatcggcttctacccagaagatgtagacgtggagtggcagagagaccggcagactgagtcggaggacaagtactggcgaaactttttgcagtcatgcttacatcgactcttggggccaaagacacttggtcaccgtctcctcgggc

SEQ ID NO: 6200 - DNA, 398 bp, Bos taurus
  unsure (78): unsure at all n locations; Clone ID: 27-LIB188-016-Q1-E1-G3
ccatagccgccggatacaattcccattcttcagaagtcattttggaaaacagcagatttgcggaaggagtaacaatanatttcaagtcctactgcaaaaaatggggtaaatggaaaagggaaaaatgggagaaaatgctctaatatttccattggggatgaggttcagtttgaaattagcataactgcaaataaatgtccaaataagaactctgaaaccattaaaattaagcctctgggcttcactgaggaagtggagattatccttcagttcatctgtgaatgtgagtgccagggtgaaggcatcccaggaagccccaagtgccacgacggcaacgggaccttcgagtgtggggcctgcaggtgcaacgagggacgtgtcgggagacactgtgaatg

SEQ ID NO: 6201 - DNA, 474 bp, Bos taurus
  Clone ID: 27-LIB188-017-Q1-E1-G11
ccgagtctcatgcgccggaggccatggacgccggatacagcgctaaagcacaacctggttgtttccaagagttaggggggcaacattggaaatggaaaccaaccctcctgggccccgggttcccccggtgggcttcttggttggggcttgggcttaagccccaaccccaacaaaaccaaaggtgtttttaaaaagtttatgggcgttgaaccatcggtgatgagggtggattttaggcccatgctctgcagcaattttacctgcatctccggccctgccacagccatgtctctgatggtgctgggccccatggcctctgtcatctgcttgaacttcttcacctccacctcagccagctgctgggccttgctcacttccagctccagctgggcccgggcatagagcagctccagctctcgtacagcatcacctacgctgccttcgccatcatcgctgctttgctcatgctcaacc

SEQ ID NO: 6202 - DNA, 344 bp, Bos taurus
  unsure (174),(227): unsure at all n locations; Clone ID: 27-LIB188-017-Q1-E1-G3
gccggatacatgaacaataaacatagatgagaaaaatcagttgcactgaaaaacttcacccaattgttgaaaaaaaagggtgtggacactgaaagggcaggggtggcaattccaaaccagcttccctcaaagggctcgtggtccaagcccaaaaccagagggtgctctgggcangaccgtgcactgcagactctgggcatgcagacaagaaagaccagtcacaacanggactgctgctgggcacgagtttattagcttctggcctctcgctcctgcttgatgaagttgatcagcccattggtggaagaatcgtgagaagtcactgggctgctcccgtcaagctc

SEQ ID NO: 6203 - DNA, 454 bp, Bos taurus
  unsure (235): unsure at all n locations; Clone ID: 27-LIB188-018-Q1-E1-G3
cggataccacaatcatctgcacgtcttcaaactggactggttccaatgcatcagcctacgtgagaagctcccaattgtccaaagaatccaaaattagacactttaacaagaaaactcctcatacatcctccgctttctcagcgtgcttcccatgaggattcttctgtagctgtcccggtcaatgcccacagtttcacgttcgtcttggccttgacagtggccgctcgaggagtcncgtaaatcagagcaagctccccgaagctccctccttccccaacactggttgcccattcattgttgacatagacgtccatctctccttggtcaatcacgtagaagttatccccttcgtcaacctgctgaataacaatctccccaagcaataaagaaaacgggaaaaaggggtcaaaaatggtaattcccccggtaacaacaagatgtgaaacaagtacac

SEQ ID NO: 6204 - DNA, 402 bp, Bos taurus
  Clone ID: 27-LIB188-019-Q1-E1-G11
gggacacaaaaacattacataaattaaaaggatgaataaatttacaggtgtgaatgcaaactgtttccaactcaaggcaagtaaccagaacagtgctctggtgggaaatcttcagtaagaaaggaaagcaggtcctacggcttggaccttcccaaccccgtgtaagaccggccaagacagaaatgacaactgtttcaaggactcttgccagcctctagagaaatcctggaataggcagctctgacacattaataccctgcacagactgagagactcagtctcccagattcttatcaagccattggatttctcttccataaacattctcacctcagctcgaggtgagagccgcatataactaagggtttaaatcaaagatatgcacagggtattaaacatata

SEQ ID NO: 6205 - DNA, 413 bp, Bos taurus
  unsure (109): unsure at all n locations; Clone ID: 27-LIB188-019-Q1-E1-G3
gccatgggcgcgggatacatgttcatggctggtctcgggctgctggttgtcgttggccttcatcagctcctggaatctagaaagcgcaagaggcccattcagaaggtanagatgggaacctcgagtcaaaacgacgtcgacatgagctggattcctcaggaaactctgaaccagatcaataaagcttcaccaagaaggttgcccaggaaacgggcacagaagagatcagtgggatctgatgagtaaatgttcctttgtgcaacaattcggtctttacttaacccgccctaatgtttttcggcctgatgggaattagtgcagagaagccatatcaccatagaaggcggctactacttatgtgtggactgagcaatccgagtctgtggcgatcatattgctgaaaatgcactgca

SEQ ID NO: 6206 - DNA, 322 bp, Bos taurus
  Clone ID: 27-LIB188-021-Q1-E1-G3
acttgtccaatgacacaggctgcccatttctctgccactccacggcgatgtactctgggtagaagctggtgactatgcaggtgacgctgaccgtgcttttgctgagctcttcctgaggtggggccatgacatacacctgcggctcccgggcccgccctttggtcctggagatggtcctcacgatgggggccgggatgccttcattgtggaccttgcacttgaactcctttcctccagtccactcctggtgctggatgcgcatggcgctgaccacgctgtaagtgctgttgaactgatcctctctcggattcgtcgtggctgt

SEQ ID NO: 6207 - DNA, 366 bp, Bos taurus
  unsure (46),(255),(273),(288),(347): unsure at all n locations; Clone ID: 27-LIB188-022-Q1-E1-G3
accagagaggccccaggcagcttcagagaaccaggtgactgccggngggcctgctgtcttacacacaagccctgaggaaaccttgaacagatgctgctctcaacggcctcagtgttgactggctcatcccattctcccactctgaccaaagacatcattatagcatcaagaaggttacacggaaaaaccctcactccgtgttaagtgcacggttgccaaaagtacaaaagaacttcctcctgatactgcgctgcntggacctgcaaacaacanaataactgagattanaagatggagaccttaagaaacctgaagaaccttcatacactgaatctcatcaacaacanaattagcaaaatcagccct

SEQ ID NO: 6208 - DNA, 407 bp, Bos taurus
  Clone ID: 27-LIB188-023-Q1-E1-G3
catggcagggcgatactgtccctgagggtcgtgaggagactggtgttctcaaacctggcatggtggtcacctttgctccagtcaatgtaacaactgaagtgaagtctgtagaaatgcaccatgaagcattgagtgaagcccttcctggggacaatgtgggctttaatgtcaaaaacgtgtctgtcaaagatgtccgtcgtggcaatgtggctggtgacagcaaaaatgatccacccatggaagctgctggcttcacagctcaggtgattattttgaaccatccaggccaaatcagtgctggatatgcacctgtgctggattgtcacacagctcacattgcttgcaagtttgctgagctgaaggagaagattgatcgtcgttctgggaaaaagctggaagatgggcct

SEQ ID NO: 6209 - DNA, 447 bp, Bos taurus
  unsure (424): unsure at all n locations; Clone ID: 27-LIB188-024-Q1-E1-G3
ccatgaccgccggatacaccgccgaatctaccttcgaggggatcctcaaaaacccaagagcagagtctttgaacagcaggtccctctggccgggtggagagccaaagagctggaagctccgagacttgttttttccaaatttctcctgcgccttgctgagaagcttccagatcaagtcttccttgccatccacacttcgggccacgacagcatgagaagggacctgggccaggtggcactccttgaacgcatccactggcgcccgactgttgttcaggcagagaagctcatactggtccctgtcagccttctctggcaagttcccaacactgtcgtccctttaacaaaaccacgtctccagccccggtctggaaaaaacttgaaggcaccagaataaccgaagtatggttcccgggaagagcangcacactggttctccccctcccc

SEQ ID NO: 6210 - DNA, 436 bp, Bos taurus
  Clone ID: 27-LIB188-025-Q1-E1-G11
gcaatgggcccgggatacgtggaaacctcggccaagacacgggccaacgtggacaaggtgttctttgacctcatgagagagatcaggacaaagaagatgtcagaaaacaaagataagaatggcaagaaaagcagcaagaacaagaaaagttttaaagaaagatgttgcttactgtgaaggcccaggtgctggaccaagtgggtcgccactgaggaccgagggcgggttccttgagacaagacttccgttgacctctcagcctgttcctgtgctccccaacctccttcacacacacttctgtaaatggggaaaaatatctgtgactcgttggctggcagaagaaataagtccttgaccctgccgtgggatggctcctttgtcaggaggttgcagagattgatctctcttttcctccctaaagttaaccatgaatgta

SEQ ID NO: 6211 - DNA, 403 bp, Bos taurus
  Clone ID: 27-LIB188-025-Q1-E1-G3
gatacaagaatagttaagtattttgcacataggaaatttgttgatgatccagtagaactgatgcccatagaacgcagtttcttaaggattttgttttgcttctttgagggaggcggccatcgtcattgtcagttcagctgggggttccttccttcatgctgaggacctgtgtctttgaagttgctgacgtcctcggaatcccaggcaggctggtgaatgctcaggggctcccatggaggcatctggtggcctcgggccccctttgcttgtaggaggcttagcaagttccttgtcgcttcttcccactgggcatactccctcagctgctccttcaggctctcctcctcatgaagttgtggggactctgccacactcttttttcccattaagtgtccgacagccc

SEQ ID NO: 6212 - DNA, 407 bp, Bos taurus
  Clone ID: 27-LIB188-026-Q1-E1-G3
atggccgcggcatacaataaacagtacgaacataaacaacgccaatgagcatccacatctccacaacaaataacacttcaaaatgaaacataaggaagaagaagagaaactgaaacgacagatcgaactcacgaagaagctctaccgatttcacggtcagaaataacgcagaaatcaaaattccaatctaaatgggcctgaagagcacttgaaatgagctgtacacagatagactgtcattcgacctcgcaatcatcaatgtattcacattgtaattgacaggtcacgggactcggtatgcctatttgtcagggcattactcacactgtgccttcgacacgacaaatgagactgctaaagcgacgcctattcactctcaacatcaatgtatcctgctcatacgacat

SEQ ID NO: 6213 - DNA, 303 bp, Bos taurus
  Clone ID: 27-LIB188-027-Q1-E1-G3
actactgacatcctccctgatcacaccctgctcccccagcgtccccttctactatttatcataagttatgccccgccagaccacacgggacgctgcctttggctggcaccagcatgctcgggcacacacacctttcaagtgcacgcacgtgctatgtggccatggcctcctccctgagggaaggctggggccgtggcccgtgcattgctgagcactgcagccctgtgccctggacacacatgagcgcgtgggggtccaactgctgtggactgtgcttgcgcacccaaatagtgcacggccatg

SEQ ID NO: 6214 - DNA, 429 bp, Bos taurus
  unsure (10): unsure at all n locations; Clone ID: 27-LIB188-028-Q1-E1-G11
cgcatggccnctaccgccataggcccgggatacttggaacagaccctacgtaagcggctctatgaggaatatggtgtgcaaggctgggccattgttcagttcctgggagatgctgtcttcatacctgctggagccccacaccaggtgcacaacctatatagttgcatcaaagtcgcagaagacttcgtgtctccagaacacgtaaagcactgttttcgcctgacgcaggaattcaggcatctctctaacactcacacaaaccatgaggataaactgcaggtgaagaacatcatttatcacgcagtgaaagatgctgttggcaccctcaaggctcatgagtccaagctggcaagatcgtaggcgtggagaaatttcaaactcccctgtgaagcaggtctttcactcacaacacatacagggaacgacagg

SEQ ID NO: 6215 - DNA, 442 bp, Bos taurus
  Clone ID: 27-LIB2809-001-Q1-E1-G3
ggccgccggatactcttgggcagatgggcaaagggatccttggccttcggctcggcagccagcgcctgctcacattcatccagctcctcctcaggagcgggggcagctgccttcttctcctctttgccctccttccgctctgcctggggcttcagcttctcttctcgagaacctttctccttccgtggggtgtcctttttaggctggctctctgcaaactttttagcatcaaactgggccattttctcacagagtttcacctctcccaagacagcccggaactggggctggttaatgcaggtgaggaaccagcggttggtattagggaaggcctggcggaaagaaggctccagaacctgtttgtaaagccacaacagggtgcagacaactgtgatgtcagccaaccgtcacgcgttcgcccaccagaaaagttctcgtcttc

SEQ ID NO: 6216 - DNA, 430 bp, Bos taurus
  Clone ID: 27-LIB2809-002-Q1-E1-G11
tggccgcggcatacaatgaggaaagctgtctgggaaagggagaaccatagccttggctcagagccttgaggcacagcctgaagacttcctacttaacatctaggaaggctgctttagtgtttttctaggccacgggtctgtctggaatggagagccaatggcctcctatagataccaatgtgtcatctagaaaggatatgctggattcagtttgccacatctcactaggccgactttgtaaccttgtttgtcacctgtctacactgcttaagcatttgatattgaatgaataatgtagagttgatgaaaactttaaaattaaacatgttttcagtcacatgttatttctttgaaactgaggactctgaattttcaacttattgaatctctaataaacactgtaactccaatattttggccacctcatgcg

SEQ ID NO: 6217 - DNA, 387 bp, Bos taurus
  Clone ID: 27-LIB2809-002-Q1-E1-G3
acagcagaaaggcctgaatgggcatatctctctggggatagggcactgctttctggggaacaggcaggactttggactgagaaagggacagcacggactgaggaggaaacatgacagttggaggaagaggctggtgaggctggtgcatccaagactggagcagaggcagaggaaggtgcagattttcaacatcagtgagagtcaggctctggctttcagtaaagggctcaactggatatttagggaagggcatttctttgtgcttaggagccatagcctccttcactttggagactcccattacttcaggctgaaggaaaggcggcaccaccacaggggtttgagtaagaggagggatgttttgtgggacgctgttacggatgggcc

SEQ ID NO: 6218 - DNA, 279 bp, Bos taurus
  Clone ID: 27-LIB2809-004-Q1-E1-G3
catgaccgccggatacaccaaagcaacctgaatgagcatatctctctggcgatacgacacagctttctggggaacacgcaggactttgccctgagaacaggacatcacagactgccgatgatacatcgtcgtaggacgaatacgcttcatgggctggtaggaccaaaagcctactagatgcagacgcatcttcacatttacaacatcagtaatagtctcgctctcgatttcattatcagactcaactgtatatttatggcatggcatttcgttgtgctt

SEQ ID NO: 6219 - DNA, 427 bp, Bos taurus
  Clone ID: 27-LIB2809-005-Q1-E1-G3
cggatacctcactatggatcatgactgctgacttaaggcttcttttttgactctgggtgtgaatatttgcagttacctatacacccttctattagagtaggacatcattccctcataccccctttgcattactgcatgggctgctgatgacacaaaactttcactgggactgctgatgagcacaatggcagttggcaatgggtttttcctccctggtcttgttaggcaagcactcccagctccaaattctcatggtatattaaactataaacactgcactgtgctgtgaacttgtccatcaaagggcgacccacattcccactccttttgcgttggctccagtgtatcaaattccaagtaatcatggccttgcccttatcttccctctacaaaccccttgccctgccttgggaccttctagggattt

SEQ ID NO: 6220 - DNA, 192 bp, Bos taurus
  Clone ID: 27-LIB2809-007-Q1-E1-G11
gggacacagcagaaaggcatgaatgggcatatctctctggggatagggcactgctttctggggaacaggcaggactttggactgagaaagggacagcacggactgaggatgaaacatgacagttggaggaagatgctggtgaggctggtgcatccaagacttgagcataggcagaggaatgtgcagattttc

SEQ ID NO: 6221 - DNA, 316 bp, Bos taurus
  Clone ID: 27-LIB2809-007-Q1-E1-G3
tcccgggggccgtgcacccgaattaaattggtgaacaatcctaaggtttaatctgacatcaaggatcatcagtggatgggagtcaccgtataaagccaaggtccatgcggcataatcgtgacatgtccccaacaaaattaggtttcacaccatgtcactagcaaacgggaatcttcagacattctcggaatgtcctacatcctggatcacagactaaagatcgatgattaaatagacggatgagactggaatcctggtgatggcaggttcataagtcctcaaaaagatggtgctcgccatcacggtgtaacagctc

SEQ ID NO: 6222 - DNA, 431 bp, Bos taurus
  unsure (385),(401): unsure at all n locations; Clone ID: 27-LIB2809-008-Q1-E1-G11
tgggcccgggatacaactaactttggagttgatattaatagaaattattccaaaattattcttaggtcacaaataactactatcccacataaaaagggaaaaatcccacccaattaaggaaaaggtatcctgtgtatgtttccatggcaatgagtttatgcattctcagattttgtccggctagttatccaccctttatctgatgcatttattccatctctcagagagaaccatatagattcctgacggcatccaggacacgtggctcgtggtggacacacttcatggtggatactgctactataaaaatactcagaacttaagagaattccaagatgctttataaaaagcattagtcatgcctcaaaactgccctttgaggtangtcagtattattatcncattttaacagaaggaaaactgaggcacat

SEQ ID NO: 6223 - DNA, 245 bp, Bos taurus
  Clone ID: 27-LIB2809-010-Q1-E1-G3
cttcttgaaatcggtgtctagcacaaggactttgttctcattcaaggcatcgatcttgaacaccgcagggatcttggttttttctgcaatgatcttcttctgagcacactcaccgttctcccatttctgcagcaggatctccaggtcgccctcaggggtgggcttcagctcctccacatacactctcaggggggcactctgggcgtccagcagggagatgtcgctggccgccatggccaaggagt

SEQ ID NO: 6224 - DNA, 429 bp, Bos taurus
  unsure (131),(338),(345),(408): unsure at all n locations; Clone ID: 27-LIB2809-011-Q1-E1-G11
catgccccgtacgccatagcggccggatacaccagaaaggcctgaatgggcatatccccccggggaaaaggcactgctttccggggaaacaagcaggactttggactgagaaagggacagcacggactgangaagaaacatgacagttggaggaagaggctggtgaggctggtgcatccaagactggagcagaggcagaggaaggtgcagattttcaacatcagtgagagtcaggctctggctttcagtaaagggctcaactggatatttagggaagggcatttctttgtgcttaggagccatagcctccttcactttggagactcccattacttcangctgaangaaaggcggcaccaccacaggggttttaattaaaaggagggatgttttgtgggaggctgttanggatgggcccagggaagggat

SEQ ID NO: 6225 - DNA, 370 bp, Bos taurus
  Clone ID: 27-LIB2809-013-Q1-E1-G11
gggaaaaccccccggggaatagggaattgctttctggggaacaggcaggactttggactgagaaagggacagcacggactgaggaggaaacatgacatttggaggaagaggctgttaaggctggtgcatccaagactggaccagaggcagaggaaggtgcagattttcaacatcagtgaaagtcaggctctggctttcagtaaagggctcaactggatatttagggaagggcatttctttgtgcttaagagccatagcctccttcactttggagactcccattacttcaggctgaaggaaaggcggcaccaccacaaggggtttgcgtaagaggacggatgttttgtgggaggctgttacggatgggccc

SEQ ID NO: 6226 - DNA, 368 bp, Bos taurus
  Clone ID: 27-LIB2809-013-Q1-E1-G3
cgtatgtgtatgatacataaggttatgtattaattgtagccgcgttctaacgacaatatgtacaagcctaattgtgtagcatctggcttactgaagcagaccctatcatctctctcgtaaactgccgtcagagtcggtttggttggacgaaccttctgagtttctggtaacgccgtcccgcacccggaaatggtcagcgaaccaatcagcagggtcatcgctagccagatcctctacgccggacgcatcgtggccggcatcaccggcgccacaggtgcggttgctggcgcctatatcgccgacatcaccgatggggaagatcgggctcgccacttcgggctcatgagcgcttgtttcggcgtgggtat

SEQ ID NO: 6227 - DNA, 116 bp, Bos taurus
  Clone ID: 27-LIB2809-015-Q1-E1-G3
agctgaagccatgaagtgcctcctgcttgccctggccctcacttgtggcgcccaggccctcattgtcacccagaccatgaagggcctggatatccagaaggtggcggggacttggt

SEQ ID NO: 6228 - DNA, 418 bp, Bos taurus
  Clone ID: 27-LIB2809-016-Q1-E1-G11
gccatggacccgggatacctggtaagattgtggaaagcctttcaagcagtgaggaatctattacacgcatcaataagaaaattgagaagtttcagagtgaggaacagcagcaaacagaggatgaactccaggataaaatccacccctttgcccagacacagtctctagtctatcccttccctgggcccatccataacagcctcccacaaaacatccctcctcttactcaaacccctgtggtggtgccgcctttccttcagcctgaagtaatgggagtctccaaagtgaaggaggctatggctcctaagcacaaagaaatgcccttccctaaatatccagttgagccctttactgaaagccagagcctgactctcactgatgttgaaaatctgcaccttcctctgcctctgctccagtc

SEQ ID NO: 6229 - DNA, 426 bp, Bos taurus
  Clone ID: 27-LIB2809-017-Q1-E1-G11
gccatgggcacgggataccgcttatacaagctctgcccctgctccttcccctcactgacatagcccctcttccctgaagctatgaacatgtgagatacttgtagacacgcaagcacctggcaagtttgctttcaagagcctgctaatgaatgaggaaagtcagtccaggccaggtgtcagagcccccaccatgagaaaaagaggaatacaaaggactgagagtattaaacaaggcaaagctcttctttttctccaaaactagtcaggcctggagactacgtgatttgtttgaagacagaaccagcagagctgcagggtgactggaagccatcgccagagggaagaacacaagcttcaaggccagatgcccagctgagctctcagaacagcccagccaggaggacaggcaggaagaacaggggccag

SEQ ID NO: 6230 - DNA, 463 bp, Bos taurus
  Clone ID: 27-LIB2809-018-Q1-E1-G3
catgctgcgtaccgccatggaggcgggatagctggtgagattgtggaaagcctttcaagcagtgaggaatctattacacgcatcaataagaaaattgagaagtttcagagtgaggaacagcagcaaacagaggatgaactccaggataaaatccacccctttgcccagacacagtctctagtctatcccttccctgggcccatccctaacagcctcccacaaaacatccctcctcttactcaaacccctgtggtggtgccgcctttccttcagcctgaagtaatgggagtctccaaagtgaaggaggctatggctcctaagcacaaagaaatgcccttccctaaatatccagttgagccctttactgaaagccagagcctgactctcactgatgttgaaaatctgcaccttcctctgcctctgctccagtccttggatgcacagcctcaccagcctcttcctc

SEQ ID NO: 6231 - DNA, 431 bp, Bos taurus
  Clone ID: 27-LIB2809-019-Q1-E1-G3
gggctacagcaaaaaggactgaatgggcatatctctctggggatagggcactgctttctggggaacaggcaggactttggactgagaaagggacagcacggactgaggaggaaacatgacagttggaggaagaggctggtgaggctggtgcatccaagactggagcagaggcagaggaaggtgcagattttcaacatcagtgagagtcaggctctggctttcagtaaagggctcaactggatatttagggaagggcatttctttgtgcttaggagccatggcctccttcactttggagactcccattacttcaggctgaaggaaaggcggcaccaccacaggggtttgagtaagaagagggatgttttgtgggaagctgttatggaatgccccagggaagggatagactagagactgtgtctgggcaaagg

SEQ ID NO: 6232 - DNA, 399 bp, Bos taurus
  unsure (369): unsure at all n locations; Clone ID: 27-LIB2809-020-Q1-E1-G11
ctccttcccctcactgacatagcccctcttccctgaagctatgaacatgtgagatacttgtagacacgcaagcacctggcaagtttgctttcaagagcctgctaatgaatgaggaaagtcagtccaggccaggtgtcagagcccccaccatgagaaaaagaggaatacaaaggactgagagtattaaacaaggcaaagctcttctttttctccaaaactagtcaggcctggagactacgtgatttgtttgaagacagaaccagcagagctgcagggtgactggaagccatcgccagagggaagaacacaagcttcaaggccagatgcccagctgagctctcagaacagcccagccaggaggacaggcangagaaccaggggccaaggccacaggaaccc

SEQ ID NO: 6233 - DNA, 413 bp, Bos taurus
  Clone ID: 27-LIB2809-020-Q1-E1-G3
ggacacaactaactttgaagttgatattaatagaaattattccaaaattattcttaggtcacaaataactactatcccacataaaaagggaaaaatcccacccaattaaggaaaaggtatcctgtgtatgtttccatggcaatgagtttatgcattctcagattttgtccggctagttatccaccctttatctgatgcatttattccatctctcagagagaaccatatagattcctgacggcatccacgacacgtggctcgtggtggacacacttcatggtggatactgctactataaaaatactcagaacttaagagaattccaagatgctttataaaaagcattagtcatgcctcaaaactgccctttgaggtaggtcagtattattatcccattttaacagaaggaaaac

SEQ ID NO: 6234 - DNA, 304 bp, Bos taurus
  Clone ID: 27-LIB2809-021-Q1-E1-G3
tgtctggctatagctctctctggatatggcactgtcttctgcggatctcgcatcaccttgctctgctacatggatagcacgggctgacgacgtaacatgtcagttggaggaatacgctggttacgctggtgcatccaagactggagcagaagcataggaacgtgcagattttcaacatcagtgctagtcacgctctggctttcactaaagggctcaactggatatttagggaacggcatttctttgtgcttatgacccatagcctccttcactttggagactcccattacttcaggctgaagga

SEQ ID NO: 6235 - DNA, 357 bp, Bos taurus
  unsure (262),(330): unsure at all n locations; Clone ID: 27-LIB2809-022-Q1-E1-G11
catgggccgggatacagcagaaacgactgaatgggcatatctctctggggatagggcactgctttctggggaacaggcaggactttggactgagaaagggacagcacggactgaggaggaaacatgacagttggaggaagaggctggtgatgctggtgcatccaagactgggagcagaggcagaggaacgtgcagattttcaacatcagtgagagtcacgctctggctttcagtaaagggctcaactggatatttaaggaanggcatttctttgtgcttatgagccatagcctccttcactttggagactcccattacttcaagctgaangaaaggcggcaccaccacaggggtttg

SEQ ID NO: 6236 - DNA, 426 bp, Bos taurus
  Clone ID: 27-LIB2809-022-Q1-E1-G3
gccaagagcgcgggatactagagtagaaagggcaattcattaagtatatttagaatccaagctactactactgagaaattacagtatttattcagttcagttcagtttagtagctcagtcgggtccgactctttgcgaccccatgaatcgcagcacaccaggcctccctgtctatcaccaactcccggagtttacccaaactcatgtccatcgaatcggtgatgccatccagccatctcatcctctgtcgtccccttctcctccagcccccagtccctcccagcagcagggtctttcccaatgagtcaagtcttcgcatgaggtggccaaaatattggagttacagtgtttattagagattcaataagttgaaaattcagagtcctcagtttcaaagaaataacatgtgactgaaaacatgtttaa

SEQ ID NO: 6237 - DNA, 392 bp, Bos taurus
  Clone ID: 27-LIB2809-024-Q1-E1-G11
gccaagggcccgggatacagcagaaaggcctgaatgggcatatctctcctggggatagggcactgctttctggggaacaggaaggactttggactgaaaaagggacagcacggactgaggaggaaacatgacagttggaggaagaggctggtgaggctggtgcatccaagactggagcagaggcagaggaaggtgcagattttcaacatcagtgagagtcaggctctggctttcagtaaagggctcaactggatatttagggaagggcatttctttgtgcttaggagccatagcctccttcactttggagactcccattacttcaggctgaaggaaaggcggcaccaccacaggggtttgagtaagaagagggatgttttgtgggacgctgt

SEQ ID NO: 6238 - DNA, 401 bp, Bos taurus
  unsure (349): unsure at all n locations; Clone ID: 27-LIB2809-024-Q1-E1-G3
acaaagaagcaaaacgaggtagccacggggcagaggagttccaggaacagaaagaggacagaagcagcaaagacagcgggtgttcacaacttctcacagagccactgatccagcttctcagaacagagtgctttatgggccaaccagtagttaattcctactttatccagaatcttcttgacacacataatgtcatcagtaagatcatcatccaggaacttgtcacaggagatgttacagatgttgcttgagtgagggttctggtcgtctttgcaccaaattttattatttatctggaagagtccatattctgtgctgtcattgttttgtacaagcttttttttttttnttttttttttttttttttaaaatgtaatttattggaaagaagaaagacaaaa

SEQ ID NO: 6239 - DNA, 264 bp, Bos taurus
  Clone ID: 27-LIB2809-025-Q1-E1-G11
ctgtctgctcctctacagacacaggcagggaattgacctctccacattggtggaagacttctttgtgatgaaggaggaagtcctggctcgtgattttgacttgggtttctcaggaaattcagaaagatgtagtcatgcatgccaaacagctcctgggaaattgtatcacaatcacccacaccagcaagaatgatgagttttttattactcctagcacaactatcccatcagtctttgaactcaactttcaaaacaaatggggtg

SEQ ID NO: 6240 - DNA, 134 bp, Bos taurus
  Clone ID: 27-LIB2809-029-Q1-E1-G3
tgaatgggcatatctctctggggatatggcactgctttctggggaacacgcacgactttggactgagaaagggacagcacggactgaggaggaaacatgacagttggaggaagaggctggtgaagctggtgcat

SEQ ID NO: 6241 - DNA, 380 bp, Bos taurus
  Clone ID: 27-LIB2809-030-Q1-E1-G3
gataccccagatggaaattgttcccaatagtgctgaggaacgacttcacagtatgaaagagggaatcaatgcccaaaagaaggaacctatgataggattgatccaggaatgggctaattctaacctgagcttttcagacaattctaccaactggatgcctatccaactggtgcctggtattacgttccactaggcacacaatacactgatgccccatcaatctctgacatccctaatcccattggctctgagaacagtgtaaagactactatgccactgtggtgaagagtcaagtgaattctgagggagtccacagttatggtctttgatggttctgaaaattccatgctctacatgtcttttcatctatcatgtcaaac

SEQ ID NO: 6242 - DNA, 401 bp, Bos taurus
  unsure (7): unsure at all n locations; Clone ID: 27-LIB2809-032-Q1-E1-G11
catggcncgagcgccatgagggcgggatacaaagaaacaaaacgaggtagccacggggcagaggagttccaggaacagaaagaggacagaagcagcaaagacaggtgttcacaacttctcacagagccactgatccagcttctcagaacagagtgctttatgggccaaccagtagttaattcctactttatccagaatcttcttgacacacataatgtcatcagtaagatcatcatccaggaacttgtcacaggagatgttacagatgttgcttgagtgagggttctggtcgtctttgcaccaaattttattatttatctggaagagtccatattctgtgctgtcattgttttgttcgagcggccgcccgggcaggtttttttttttagtgccttaaaatg

SEQ ID NO: 6243 - DNA, 465 bp, Bos taurus
  Clone ID: 27-LIB2809-032-Q1-E1-G3
gcatcctccctaccgccaagggcgcgggatacagcagaaaggcctgaatgggcatatctctctggggatagggcactgctttctggggaacaggcaggactttggactgagaaagggacagcacggactgaggaggaaacatgacagttggaggaagaggctggtgaggctggtgcatccaagactggagcagaggcagaggaaggtgcagattttcaacatcagtgagagtcaggctctggctttcagtaaagggctcaactggatatttagggaagggcatttctttgtgcttaggagccatagcctccttcactttggagactcccattacttcaggctgaaggaaatgcggcaccaccacacgggtttgagtaacacgagggatgttttgtgggacgctgttatggatgggcccagcgaagggatagactatagactgtgtctgggcaaaggggtggattt

SEQ ID NO: 6244 - DNA, 167 bp, Bos taurus
  unsure (46): unsure at all n locations; Clone ID: 27-LIB3057-001-Q1-K1-G3
tgcggaccccggccgcctgcagccatggcacccggccagctcgctntatttagtgtctctgacaaaaatggccttgtggagtttgccaggaacttagcttctgtcggctgaatctgatcgcctctggagggactgcaaaaagcctcaaagatgctggtttggcagtc

SEQ ID NO: 6245 - DNA, 234 bp, Bos taurus
  Clone ID: 27-LIB3057-002-Q1-K1-G11
ctagttctagatacgcgagcaaccgtattcccttagcaaaggtttcattaccatggtggctcagtaaatatcatacctcctccctttctacccctgaagatcaataacaagcccaacagacccaccatgaagtccttatcaacttgattcttgccatgctgcgcttctttaatgaccctttttattacctagtcaccgaagtgccacgtattaaaagaaccccaaatgctatcc

SEQ ID NO: 6246 - DNA, 381 bp, Bos taurus
  Clone ID: 27-LIB3057-002-Q1-K1-G3
ggcggctgggaccctgtacacatatcctgaaaactggagagccttcaaggccctcattgccgcgcagtacagcggggctcaggtccgcgtgctctccgcaccaccccacttccattttggccaaaccaaccgcacccccgaatttctccgtaaatttcctgctggcaaggttccagcctttgagggtgacgatggattctgtgtgttcgagagcaatgccattgcctactatgtgagcaacgaggagttgcggggaagtactcccgaggcagcagcacaagttgtgcagtgggtgagctttgctgatagcgacatagtgccaccggccagcacctgggttgttccctaccttatgcattatgcaccacaacaagcatgcca

SEQ ID NO: 6247 - DNA, 367 bp, Bos taurus
  unsure (316): unsure at all n locations; Clone ID: 27-LIB3057-003-Q1-K1-G3
cgagagcttcctggtgaagtgtgtttcttgaaatcatcaccaccatggacagcaaaggttcgtcgcagaaagggtcccgcctgctcctgctgctggtggtgtcaaatctactcttgtgccagggtgtggtctccacccccgtctgtcccaatgggcctggcaactgccaggtatcccttcgagacctgtttgaccgggcagtcatggtgtcccactacatccatgacctctcctcggaaatgttcaacgaatttgataaacggtatgcccagggcaaagggttcattaccatggccctcaacagctgccatacctnctcccttcctacccctgaagataaagaacaagcgccaaccagactccacca

SEQ ID NO: 6248 - DNA, 368 bp, Bos taurus
  Clone ID: 27-LIB3057-004-Q1-K1-G11
ccgggttggaccaagccgtccgcctttgccctgggcttaccgttaataaccatggccctaaacagctgccatacctccggctttcctacccctgaagataaagaccaagcccaacagacccaccatgaagtccttatgagcttgattcttgggttgctgcgctcctggaatgaccctctgtatcacctagtcaccgaggtacggggtatgaaaggagccccagatgctatcctatcgagggccatagagattgaggaagaaaacaaacgacttctggaaggcatggagatgatatttggccaggtaattcctggagccaaagagactgagccctaccctgtgtggtcaggactcccgtccctgcaaac

SEQ ID NO: 6249 - DNA, 353 bp, Bos taurus
  Clone ID: 27-LIB3057-005-Q1-K1-G3
tgcacctgcgagcaaaaaaaaaaaaaaaaatatagagcagaggcagcagggagctccaggaccgacgggatggggtcagcctgcatcaaagtcaccaagtacttcctcttcctcttcaacttgctcttctttgtcctgggcgcggtgatcctgggcttcgggatgtggatcctggtcgacatgaacagtttcatctccatcttacagacctcctccacctagttcaaggtggcggcctacgtcttcatcagcgtgggggccctcaccatgctcatgggcttactgggctgcctgtgtgccgtcatagaggtccgctgcctgctgatgatgtactttgccttcctcctgctgat

SEQ ID NO: 6250 - DNA, 412 bp, Bos taurus
  Clone ID: 27-LIB3057-006-Q1-K1-G11
ctagagtttgcagtagctataatccaagcctatgtattcactctagaattgttaggtaggattagaatggtgaatgtaattagagctgttgtagtgctaatgcttattagtgcaagtgtagctcctccgattaggtgaattaataggtgtcctgcagtgatgttagctgttaaccgcacggcgagggctataggttgaataaaaaggctgatagtttcaataattactagtattgggattagtggagtgggtgttccttgtggtaagaaatgggcaagtgatgctttagttttattgcggaatcctgtaattacggctcctgctcacagggggatggctatgcctaggtttattgatagttgtgttgttggtgtgaatgaatggggtaataggcctaataggtttgttgatc

SEQ ID NO: 6251 - DNA, 300 bp, Bos taurus
  Clone ID: 27-LIB3057-006-Q1-K1-G3
gttctagatcgcgagcggccgtccttttttttttttttttttttttttttttttgtttggttttttttttttttttttttttttttttttttttttttttttttttttttttttttttttttttttttttttttttttatttttattcctaacaaaatgtttgttattaaaattcatataacaattacaattccaataatgtataaaataccattaataacaatgttattaaggattaatcctaatatactgaatgcttaactattaagttttattaataatatgagatatatcaacata

SEQ ID NO: 6252 - DNA, 372 bp, Bos taurus
  Clone ID: 27-LIB3057-007-Q1-K1-G3
ccttccaatccctaccggccgcccttttttttttttatcacctttttcttctttattcttacgaggttctttaacttttttcaaatttaattcttttttaatttttctactttttttttttacatacatattatccacataataactcatataatccaaataacgtaaagacacatatcccccataacctgccaactcataagtcctcacatatccatagcttttgatgaacactatgatcatccatatgtgccaatgagtccactcgttactgctcctctctcaagctccagttactacattcccatgtctcctcacaatgtatctgtgtccaaaaaacgccactctttatcacctttttgaatattctat

SEQ ID NO: 6253 - DNA, 374 bp, Bos taurus
  Clone ID: 27-LIB3057-009-Q1-K1-G3
tagatcgcgagcggctgaccttttttttttttatttttttttttttttttttttttttgttttttttttgggttttttatttttttttatttttttttttttattttttttttggacattgtttaaaaaattggttttatttaaaatgaaacccattaaatccaaattttctttaaaaatttttaaaactaaaaaaattttaccagggaatggatcattaaaaaccttttaaaaaatggattgaaaaaaagggggtttaacaatttttgttgtaaatgattctgaaatttaagaacttaaggtaaagggaaattttggttaaatcccttgccaagccatggaaccggttttaaaaagcggttaaacgggcattt

SEQ ID NO: 6254 - DNA, 441 bp, Bos taurus
  Clone ID: 27-LIB3057-010-Q1-K1-G3
agagctcgcccgccaagcgcctgacgctcagcgagatctaccagttcctgcaggcgcgcgtccccttcttccgcggcgcctaccagggctggaagaactccgtgcgccacaacctctcgctcaacgagtgcttcatcaagctgcccaagggcctcgggcggccgggcaagggccactactggaccatcgacccggccagcgagttcatgttcgaggagggctcgttccgccgccggccgcgcggcttcaggcggaagtgccaggcgctcaagcccatgtaccaccgcgtggtgagcggcctgggcttcggggcctcgctgctgccgcagggcttcgacttccaagcgcccccgtcggcgccgctcggctgccacgggcagggcggctacggcggcctcgacatgatgtcggcgggctacgacgcgggcgccggcgccccgg

SEQ ID NO: 6255 - DNA, 393 bp, Bos taurus
  Clone ID: 27-LIB3057-011-Q1-K1-G3
agatcgcgagcggccgcccttttttttttttttttttttttttgacatcgctacagaggctgtttgtatttaagatgaaacccattagagccaagcatgcattacaaagctataaagctcagagaagtttgccagggaatggatcattaagaaccatctcagaaatggaaaggatgaatgtgggcttagcagttgttgttgtagatgattctgcaattcaggagcttaaggtaagtgtcaatcttgcttgaatccctgcgcaggcagtggagcaggttataaaaagcggaataacgtgcatcttcatccttagtttgcagggaacggagtcctgaccacacagggtagggctcagtctctttggctccaggaattacctggccaaatatcatc

SEQ ID NO: 6256 - DNA, 427 bp, Bos taurus
  unsure (333): unsure at all n locations; Clone ID: 27-LIB3057-014-Q1-K1-G11
ccggtttaagaagaaccgtgcccttttcttctccccgccatgccgtgtgctcgtccactgatatgagtgtcctccgaaaagggggagtcctctggcaaaaatgtcactttgcctgctgtgttcaaggctcccattcgacccgatattgttaactttgttcacaccaacttgcgcaaaaacaacagacagccctatgctgtcagtgaattagcaggtcatcaaaccagtgctgagtcttggggtaccggcagagctgtggctcgaattcccagggttcgaggtggcgggactcaccgttccggtcagggcgcttttggaaacatgtgtcgtggnggccgcatgtttgcgccaactaagacctggcgacgttggcaccgcagagtgaatacgacgcagaagcgatacgccatctgctctgcactggctg

SEQ ID NO: 6257 - DNA, 374 bp, Bos taurus
  Clone ID: 27-LIB3057-014-Q1-K1-G3
gtttcttgaaatcatcaccaccatggacagcaaaggttcgtcgcagaaagggtcccgcgtgctcctgctgctggtggtgtcaaatctactcttgtgccagggtgtggtctccacccccgtctgtcccaatgggcctggcaactgccaggtatcccttcgagacctgtttgaccgggcagtcatggtgtcccactacatccatgacctctcctcggaaatgttcaacgaatttgataaacggtatgcccagggcaaagggttcattaccatggccctcaacagctgccataccttctgccttcctacccctgaagataaagaacaagccctacagacccaccatgaagtccttatgagcttgattctttggttgc

SEQ ID NO: 6258 - DNA, 360 bp, Bos taurus
  Clone ID: 27-LIB3057-019-Q1-K1-G3
cggagggacagagatactccatccagaacacccaggttgccttctgcttctctgaaaccatcccggcccccacgggcaagaatgaggcccagcagaaatcagacttggagctgcttcgcatctcactgctcctcatccagtcgtggcttgggcccctgcagttcctcagcagagtcttcaccaacagcttggtgtttggcacctcggaccgtgtctatgagaagctgaaggacctggaggaaggcatcctggccctgatgcgggagctggaagatggcaccccccgggctgggcagatcctcaagcagacctatgacaaatttgacacaaacatgcgcaagtgacgaacgcgcctgctca

SEQ ID NO: 6259 - DNA, 186 bp, Bos taurus
  Clone ID: 27-LIB3057-020-Q1-K1-G3
gccatttcctcctccggaggatcttcctgactcagggatagaacccccatctgcttcagttggcaggtggatttgttaccactgagccaccagggaagcccctgtattactaaaggcctgtttactgcagtttcttttcctgagtacatcatgtccaccttacaacaaaaaattacgaggcatact

SEQ ID NO: 6260 - DNA, 404 bp, Bos taurus
  Clone ID: 27-LIB3057-021-Q1-K1-G11
tcggttctagatcgcgagcggccgccctttttttttttttttggtttataaaatgtaattttattttatgttactctgctgttacatagggcataacattttcacaaggcttttttgggactacagtcaatgattagcaacatacaatagtggtccaactctctaaataacaatcactagacaaactggacaccctctcacatgtgcacaaatctgcatggaaaagtactaatgttttagactggactgtgtgcttttttccccctttctagtgtattaagaaatgacatgcactttaatttgccaaaagcaacggttgtattctggcagcaacatgctacttctattacatagtaaagtgaataccagaactacaaaggcaggaggtgtaagtgagtttttat

SEQ ID NO: 6261 - DNA, 398 bp, Bos taurus
  Clone ID: 27-LIB3057-021-Q1-K1-G3
gaagaatccagtgaaaaacctgagaatcatgttgaagcttaatccatatgcaaagaccatgcgcaggaacaccattcttcgacaggccaggaatcacaaaatccgcatggataaggcagcagcagcactagaagccaaatcagatcagaaaggggttcagggcaagaagcctgtggtgggaaacaaggaaaagaaggctgttggcgataagaagctgaagaagcctgtggtgggaaaaaaggctgcagggaccaagaaaccagcagctgaaaagaagcccacagaaaagaaacccacctcagaggaaaagaaggctgctgcgtaaacttaaatttgtttattccataaatgccgaatcatttgggacagctgattttgaataaagaaaggtttgaaca

SEQ ID NO: 6262 - DNA, 375 bp, Bos taurus
  Clone ID: 27-LIB3057-022-Q1-K1-G11
taccttcttcctttctacccctgaagataaagaacaagcccaacggacccaccatgaagtccttatgagcttgattcttgggttgctgcgctcctggaatgaccctctctatcacctagtcaccgaggtgccgtgtatgaaaggagccccagatgctatcctatcgagggccatagagattgaggaagaaaacaaacgacttctggaaggcatggagatgatatttggccaggttattcctggagccaaagagactgagccctaccctgtgtggtcaggacatccgttccttcaaactaaagatgaagatgcacgttattacgctttttataacctgctccactgcctgcgcatggattcaagcaagattgacac

SEQ ID NO: 6263 - DNA, 408 bp, Bos taurus
  Clone ID: 27-LIB3057-022-Q1-K1-G3
gttctagatcgcgagcggccgcccttttttttttttttttttttttttttttttttttgtttttggttttttttttttttttttttttttttttttttttttttttttttttttttttttttttttttttttttttttttttttttttttttttttttttttttttaaaaaattaaaaggtttttttttttaaaaaaaaaaatttttaaaaatagaaaaaattgggcaaaaattttttttggaaaatttttaccaaatttttaaagggtaaaaagggaaaaaaaaaactttttgggaaaaaatttttcgaaaaaaaaaacctttcccatttaacaataaatagcctttttttgggggcttttttaaaaaagtttttttaaaaaattttaaaaaggggttttttttttt

SEQ ID NO: 6264 - DNA, 319 bp, Bos taurus
  Clone ID: 27-LIB3057-023-Q1-K1-G3
cggactcatggggttcaccagacgactcatggtcctgtggacagctcaccagctatgagggctgcgggcccctggaccttcctgctcctggctttcgccctgctctgcctgccctggactcatgtggtgggcgccttcccagccatgtccttgtccggcctgtttgccatctctgtgctccgggctcagcacctgcatcagctggctgctgacaccttcaaagagtttgagcgcacctacatcctggagggacagagatactccatccagaacacccaggttgccttctgcttctctgaaaccatcccggcccccacgg

SEQ ID NO: 6265 - DNA, 246 bp, Bos taurus
  Clone ID: 27-LIB3057-024-Q1-K1-G11
gagctaaggccttagtgtccccttccttacccaggttgctcacaaaatggattcccagggggagctcgcataggaactgcggctttaccaatccacccttcttcaggatggtctaaaagatctactggatgagaaaaaattcatcgattgcaccctaaaagcaggtgacaaaagtcttccttgccacagattgattttgtcagcctgtattccctacttccgtgagtattgtacatctgaaattga

SEQ ID NO: 6266 - DNA, 394 bp, Bos taurus
  Clone ID: 27-LIB3057-025-Q1-K1-G3
tggggaacagagtcacagctctcacccagatggagtccgcctgtgtgaccatccatgaggctgtgaagacggtgatcgactcgcagaagcattaccggctccgggaggcacaggaccgggcccgcgcagaagacctcaacagtcgagtctcttactggtccattggcgagaccatcgccctgtttgtggtcagcttcagccaggtgctactgctaaaaagcttcttcacagagaaacggcccattagcaggacggtccactcctagttggggtgctctgctcccaagccccttgcaccctgggacagagcagcccccttgggcctcaggctcctgcgggctggtgggtgtaccccagggtggaagccctgtcacctcacattctaatcagatgc

SEQ ID NO: 6267 - DNA, 385 bp, Bos taurus
  Clone ID: 27-LIB3058-002-Q1-K1-G11
gaacaatgtaggcaagggaagtcggcaaaacggatccgtaacttcgggaaaaggattggctctgagggttgggctcgggggtcccggccccgaacccgtcggctgctggcggaatgctcgagctgctcgcgcggcgagagcgggccgtcgcgtgccggccgggggacggaccgggaacggccccctcgggggccttccccgggcgtcgaacaaccgactcagaactggtacggacaaggggaatccgactgtttaattaaaacaaagcattgcgacggtcctcgaggatgctgacgcaatgtgattcctgccccgttttctggttatcaatgagatgatttatttgattcaaaatacacaacctaaatggcaaatggaactcaaa

SEQ ID NO: 6268 - DNA, 378 bp, Bos taurus
  Clone ID: 27-LIB3058-002-Q1-K1-G3
tccacgcgtacgaccacgcgtgcggccggtagcgaaccagaactcgtggccactcctcctgttcctggccatctccgaattcccatctgagattccaaggtccgcgccgtgcaatcgaggctctccccgctcaccatatatcggaggctccgccctcgcgcctcgaatccttcgcgagaggcgctgttgtttgccgtgattcgagccgggtggaggcgtctcgcttcttgatcttgagaggtgatcctaggtgattgttgggagcgaataaagcatgataccttctgtgaggatctctcctggctctgcagccttctctggctccagcctacgcttaaaattacattcaatttcattcatctctagtctcaaaccctt

SEQ ID NO: 6269 - DNA, 434 bp, Bos taurus
  Clone ID: 27-LIB3058-003-Q1-K1-G3
agaagatcactcaaatcgaacacgtcttgccaaacttcttagattccagtcttctcaccatccaagtgacatgactagtctagaccagtatgtggaaagaatgaaggagaagcaggacaaaatctacttcatggctggggccagcaggaaagaggccgaatcttctccctttgttgagcgacttctgaaaaagggctatgaagtgatttatctcacagaacctgtggacgaatactgcattcaggctcttcccgagttcgacgggaagaggttccagaatgttgccaaagaaggagtgaagtttgatgaaagtgagaaaagtaaggagagtcgtgaagcagttgagaaagaatttgagcctctgctaaactggatgaaagataaagccctcaaggacaagatcgagaaagctgtggtgtctcagcgcctgacag

SEQ ID NO: 6270 - DNA, 403 bp, Bos taurus
  Clone ID: 27-LIB3058-004-Q1-K1-G11
cggacgcgtgggaggggatccactgcaggatttcacactaatgaggttcttggatcgatttgtatatcgaaatccaaagccacataaaggcaaagaaaacacagacagtgttgtgatgcagccaaaaagaaaacattttatgaaggacattcgtagtcttgctgttaacagtaaggagttccttgcaaaagaagaaagccagataccagtagatgaagtgtttttctacaggtattataaaaaagttaccaatgttaaagtgaaacaaaaacggaacgaagatgaagaaagtatagaagatgtggacgatgaggaatttgaaaagatgattgacacatttgaagatgataattgtttcacctctggaaaggatgaccttgatttcgctagcaacatgaagaag

SEQ ID NO: 6271 - DNA, 449 bp, Bos taurus
  Clone ID: 27-LIB3058-004-Q1-K1-G3
tgccttgtgagtttgttttcaggttgttggccataggatggtctttggttaatagctcaaaaaagttccgcaggcattgcctgcccaccctgttgtgcccaggccacggtctgtaccctgtgcctctgtccttcccaggtgcggtgggggcaggagagtttgtgagcccctgtgagagtggcgacaacctgggtgagccctctgccctggaagagcagagagggcctctgcccctcaacaagaccttgtttctgggctatgccttcctgctcaccatggccacgaccagcgacaagttggctagccgctccaaattgccagatggtcctacaggaagcagcgaggaagaggaggaatatttagaaattcctcctttcaacaagcagtacacagaatgccagcttcgagcatgagctggctacattctcgaagacttcaatgaagcccag

SEQ ID NO: 6272 - DNA, 391 bp, Bos taurus
  Clone ID: 27-LIB3058-006-Q1-K1-G3
gtataaatcactctacttgaatacttccgtcctcccagtaccgcttgctggatgcttagtgccttggacttctatcgcttctgccgttgcatcaacttctcgtcagaccctggtcagctggtcagcgagggtgtgtggaaggagagcgtgggtccgtgtgacccagcagtggactgtgtcgtaaggaaactggaagggtattcttttcaagtcatttagcagatttgtaagatgagcagggtgagaagttaagctgacatcagtggttaaagcagagaactgtttcaggacaaatgaggagggaggctgtcaccaagtcgggcagttaccaggctgagcgtggcgtgcgattggtgccgagagactagaggctgcataacagatgtgtttt

SEQ ID NO: 6273 - DNA, 376 bp, Bos taurus
  Clone ID: 27-LIB3058-009-Q1-K1-G3
atcgcgagcggccgcccttttttttttttttttttttttttttttttttttcattaaaggggtattactttatttgaatactcaagaacagtgcatactttccttgaaacccgtggtcacagctttaactgttgggtgtggccacaaatggaggtcactcagtcacaaccagctcaatgacgcagtgtgtgtgtcaagcaatttggagattttgtttctgaaattttcttttttttttcttatcctctcatcattgaggctatgtattaatagacattatagtaaacccacgcgaaatattcagaattagaaggggattaaagagccacgtttgggcgttacgttgactattcctaattttcatcctaaggggggt

SEQ ID NO: 6274 - DNA, 390 bp, Bos taurus
  Clone ID: 27-LIB3058-010-Q1-K1-G11
cagaattatggttctattttctcaataaatcggtatcttttatttatcattatttttaaagcaaaccagtgaaggaaaggacaaaaaaacctttggttcacttacgtatttatgaatggaaaaaatttataatgcaaattcactgattaaaaaaataatgataaataaaagatcccgatttattgcaaaattatggttctattttctcatatataaacttgaaaaaaatttaaccctattgtaacctattccaatagcaatggctgatttttgcagaatttaaaatcacagatgggtatttacaagtcaggctactgaattccttttctaaaatagctttttcaaagctgtgataatatgtgaaagtgcacatgctgtaggtgagattct

SEQ ID NO: 6275 - DNA, 232 bp, Bos taurus
  Clone ID: 27-LIB3058-010-Q1-K1-G3
gtgagcggccgcccttttttttttcgtttctttttgtggcgtggttattttttaggattgacaggatctatttcattgatgagtcttacaagtctgttaagttttgcaatagcccggatagtaactttaggcgtttctatgaagtgtcatgctgattagcatgggcgttactgaacagaggtcatctgagggtgccccatgaaccccatgtcgctcatcctggtttaaaccc

SEQ ID NO: 6276 - DNA, 318 bp, Bos taurus
  Clone ID: 27-LIB3058-011-Q1-K1-G3
agatcgcgagcggccgccctttttttttttttttttttttttttttttttgaaaaccactaacaattgccttcccagtctatgagtcaccacctttgtcacccaaggcaggcctgtgctgccctccacgtgtcaggaggcgagatcatggcagggtctgatggtaaccacctccagggcatccgagacaggctggtccgtctgaaggaccacacggagcggggagaccaagcactggaatcccttgggctatttctcaagctccccctaccggcaccggtcactttttggagctgatcttcatggccagtgtggtggt

SEQ ID NO: 6277 - DNA, 250 bp, Bos taurus
  Clone ID: 27-LIB3058-013-Q1-K1-G11
gatgaaccaacagaacagcctgtgaggaggaacaaaatggcctccagcatctttgggacacctgaggaaaatcccccttcctgggccaagtcggcaggtgccaagtctagtgggggcagggaagacgctgagtcatctggaccccagagaaggaattcttctgaagcgaactctggagacttcttagatctgaagggagaaggtgatgttcatgaaaatgtggacacagacttgcaggcaagcctggggc

SEQ ID NO: 6278 - DNA, 367 bp, Bos taurus
  Clone ID: 27-LIB3058-015-Q1-K1-G11
gagcgactcgaggacgcgccgccgacgccgctgcttcaggccctgcctgggctgcgtctggaacctgcagccggagcttcagcgccacaggtccgcgcgctgcgagcccaggtttctttacctccagaaagaaaagaattgacaccttgcgtcctggaagttcatttaagaaactgaaattagggacttctttcaaatttggacatggctaatcgaggagcaacaagacccaacgggccaaatactggaaataaaatatgccagttcaaactagtacttctgggagagtctgctgttggcaaatcaagccttgtgcttcgttttgtgaaaggccagtttcatgaatttcaagagagtaccattgggg

SEQ ID NO: 6279 - DNA, 384 bp, Bos taurus
  Clone ID: 27-LIB3058-016-Q1-K1-G3
ctcaaaaacctatttgtttttgttacatgtgatttttctatttctctagcccaaagtgcattacagaagatacacctatagaaccattaccttctgctcaatgtgccaggcctcatctactcctgtacgttcagtgactttctttagatgcaaatgtcaattacaacggagtggggaaatgctgtcattacccaagcctcagaaaaacacacgagaacaataacacagccacctgatggaaggattgttgtggtttttgactaaggtgtatgttagtttcatcaaaaactgaaaacattagactgattactcagaaataaaagtccggtttactgtgaatatagcaatataggactggacacagtacaagtgaaactgaggaca

SEQ ID NO: 6280 - DNA, 476 bp, Bos taurus
  Clone ID: 27-LIB3058-018-Q1-K1-G3
ccgggtcgacccaagccttcgggggccccttggcctggattccagttggactccaaaaggactttcttctttcagaaaacccctgggaattgaaacagttggtggtaaattaagcgtgacgtcaacaagggaaaacatggcctatactgtggaatgcctgcgggatgatgttgatattctaatggagttcctgctcaatgtcaccacagcaccagaatttcgacgctgggaggtagctgcccttcagcctcagctaaggattgacaaagctgtggctcttcagaatccacaggctcacgtcattgaaaatttgcatgctgccgcttacagaaatgccttggctaattccttatattgtcctgattataggattggaaaagtgacaccagttgagttacatgactatgtacagaatcattttacaagtgcaagaatggctttgattggacttggtgtgagtcatcctgtcctaaagc

SEQ ID NO: 6281 - DNA, 432 bp, Bos taurus
  Clone ID: 27-LIB3058-019-Q1-K1-G11
ccggatcgacccatgcgtccgtacaagggggccttgcccattgctgggggtacagagaggtcaagcccagtaggactgcgatacaggctgtagtgagcaggtagagatggtgggggcagcgcttgggatgatgctggacatcagagttggcgtcgtgggtgagcagttacacttggcctttgggtcgtgggaatcaagaaagtcgacttattctcttgaagatgctgacacaggaaaggaagaggctgctgttcatgggagtggggcctgctttgtcccaggccttaaggccctttccttgctttgtaaaccttgtccatgcacgcctgtgagcccctgcaactggcacctgacccaggaaacactgctaggcaaagcctctgctgccagccaaactactctcagcacagtgatcactgctatttgctaaac

SEQ ID NO: 6282 - DNA, 319 bp, Bos taurus
  Clone ID: 27-LIB3058-020-Q1-K1-G3
cggacgcgtgggggcgcgctgtccctgctcgggccgacgcccgcaccgcccccggccccggctcgctgctcggtcctggcgggaggcctcgggcccttccggccgctctgggcgctgctggccttcgcgctacccgccctcctgctgctcggcgcctacggcagcatcttcctcgtggcgcgccgggccgccctgcggcccccacgacccgcacgcgggtcccggccgcgctccgactctctggatagtcgcctctccatcttgccgcccctccggcctcgcccgccctggggcaaagcagccctggctccggcgctgg

SEQ ID NO: 6283 - DNA, 469 bp, Bos taurus
  Clone ID: 27-LIB3058-021-Q1-K1-G3
cggacgcgtgggtgaggtgggaccagcatgactcaagggaaggggaaagtgcagtgaaacgctgagcttcagaagagcgaccctaaaggacagtttggtcccggaattaaaaagagaagacctggttcgatcaagttgtacggacgatctgagcagtccacccattctctattgtgggaagcggtggggaccgcctgagaagaccgtgtctgcaccgcgaagaagcagaaccacctctctgggttaggggtggggaacagaaagggagtgtggaaaggagaacatgtgagatttgactgaagcaaagagaaaaaagcagacccctgaatgtgctaatccttgttagtaacagtctttcccaagtttctgctgttaccagcatgtgatcagaaagactaggaactatttctgactgtcaatgaattgtataattctgtgcagttctgtgacttccaaaccaggaataaac

SEQ ID NO: 6284 - DNA, 375 bp, Bos taurus
  Clone ID: 27-LIB3058-023-Q1-K1-G11
cggacgcgtgggcaggccccaaatccaggagccgaggccccaggcttcagacctctgccaggatgacctggagttcaaacccccctcgtggccccagccctctgacagccagcagtacttctctgcctcagcccccctcagcccctcagcccggccccgcagcccgtggggcaagctcgatccctatgactcctccgaggatgacaaggagtacgtgggctttgcgaccctccccaatcaggtccaccggaagtctgtgaagaaaggctttgactttacccttatggtggcaggagagtcgggcctggggaagtccacgctggtcaacagcctcttcctcacggatctgtaccgggaccggaagctcctcagtgc

SEQ ID NO: 6285 - DNA, 281 bp, Bos taurus
  Clone ID: 27-LIB3058-028-Q1-K1-G3
cgtttagccatggtcaaccccaccgtgttcttcgacatcgctgtcgacggcgagccggtggggcgcgtctcttgtgagctgtttgcagacaaagttccaaagacagcagaaaactttcgtgctctgagcactggagagaaaggatttggttataaaggttcctgctttcacagaataattccgggatttatgtgccagggtggtgacttcacacgccataatggtactggtggcaagtccatctatggcgagaaatttgatgatgagaatttcattttgaa

SEQ ID NO: 6286 - DNA, 440 bp, Bos taurus
  Clone ID: 27-LIB3058-029-Q1-K1-G11
gttactagatcgcgagcggccgcccttttttatagattttttgctttatattaagtgaggacatatgatgaaattaaaggatgacatccctgacttcaggacatgaatctgagtaagaattggaaagagctgatggacaagaaagcctgtattgctgcaggtcacgggatggcaaagagtctaatacgactgagcaactgaactgaactgaaatatatatgtttggggaatcatgatttgtattacagaaataccaagtttgaactgtcataccacccagcaatgccactgctgggcatacacactgaggaaaccagaattgatagagatatctgtaccccaatgttcacccgcacactgtttgtaattaccaggacatggaagcaacctaaatgtccattagcagatgaatggataagaaagctggggtcatataccca

SEQ ID NO: 6287 - DNA, 191 bp, Bos taurus
  Clone ID: 27-LIB3058-030-Q1-K1-G3
caacactttcactgcactttaatcagtgaggttgagcatcttttcatgtggttattgggcatttggatgtctttttggggaaatgtctatttaaatcctttgcccatttttaaacagagttgttgggttgtattgctgttgggttgtatgggctctttacacgtttagcatatagatcccttacatatatg

SEQ ID NO: 6288 - DNA, 333 bp, Bos taurus
  Clone ID: 27-LIB3058-033-Q1-K1-G11
tgccctctcatcctggctgggtgtggggttaccccgtctagctgcgcaatgctgatgctgcatgtggtgctgggtcacctgaagggccggcccgcttcggacccggagccgcaagccaccccgtgttggagcggcgcgcggctggcgttcgcagaggatgtcgtggtggtgcacgggcggcgcacggccattgtccggtcgggccgcggcggcttcaaggacaccacccccgacgagcttctctccgccgtcatgaccgcggttctccaggacgtcaagctgagcccggcccagctgggagatatctgcgtgggaaacgtgcttcaacctggg

SEQ ID NO: 6289 - DNA, 430 bp, Bos taurus
  Clone ID: 27-LIB3058-034-Q1-K1-G11
gatgaaaatgagcaccatttatctttaattcgttcagtttaggggctggagcaaaggatgagttacatgttgttgaagcagaggcgatgaattatgaaggcagtccaattaaagtaacactggcaactttgaaaatgtctgtacagccaacggtttctcttgggggctttgaaattacaccacctgtggtcttacggttgaagtgtggttcagggcctgtgcatatcagtggacagcacttagtagccgtggaggaagatgcagagtcagaagaggaggaggaggaggaggtgaaactcctgagtatatctggaaagcgttctgcccctggaagtggtagcaaggttccccagaaaaaagtgaagcttgctgctgatgaagatgaagatgatgatgacgatgacgatgatgatgatgatgaagatgatga

SEQ ID NO: 6290 - DNA, 152 bp, Bos taurus
  Clone ID: 27-LIB3058-034-Q1-K1-G3
cggacgcgtgggcggcaggtgattcagcttataccttgcgctgctgccagccctgctccagcagctgggccaggagaacccccagctcttacagcaaatcagccggcatcaggagcagttcatccagatgttgaatgagccccccggggagc

SEQ ID NO: 6291 - DNA, 424 bp, Bos taurus
  unsure (238),(411): unsure at all n locations; Clone ID: 27-LIB3058-035-Q1-K1-G3
gccgattgtggggtggagagctcttcttcgcctttccgacctgaccctttcagcgctccgctccgcgccagcctacctcgctctccggcgccatgaccaccaccaccaccttcaagggcgttgaccctaacagcaggaacagctcccgggttttgcggcctcctggcggtggatccaatttttcattaggttttgatgaaccaacagaacagcctgtgaggaggaacaaaatggcctncagcatctttgggacacctgaggaaaatcccccttcctgggccaagtcggcaggtgccaagtctagtgggggcagggaagacgctgagtcatctggaccccagagaaggaattcttctgaagcgaactctggagacttcttagatctgaagggagaaggtgatgttcatgaanatgtggacacaga

SEQ ID NO: 6292 - DNA, 432 bp, Bos taurus
  unsure (399): unsure at all n locations; Clone ID: 27-LIB3058-036-Q1-K1-G11
gggccgacccactcgtccgcgggcgcgtggggtctaagcaagctgcttacatgtttctcctagatgacaactttgcctcaattgtgactggagtagaggaaggtcgtctgatctttgataacttgaagaaatccattgcttataccctcaccagtaacattcctgagattacccccttcctgatatttattattgcaaacattccactccctctggggaccgtcaccatcctctgcatcgacttgggaacggacatggtccctgctatctccttggcttatgagcaggctgagagcgacatcatgaagaggcagcccagaaacccccagacggacaaactcgtgaacgagcggctgatcagcatggcctatggacagattggtatgatccaggccctgnggggcttcttcacttactttgctatcatggctg

SEQ ID NO: 6293 - DNA, 429 bp, Bos taurus
  Clone ID: 27-LIB3058-036-Q1-K1-G3
cggacgcgtgggctgtgaaattatggggtttgaattaatgtgatgaccagcaggtggcgctgggttccactcatggtgatggatgcttgggcaaatgttggtgccttttgtgtcacaatgttaagatgctaatgttttaatcgaaataagcactgatcttaaaatatgaagatgttagcttttctcgtaggaaattttctgtcataaaaccggcatcaagaatcactgaagagctgacaacgatggtccttccaagtcaagattttatcctgattggaaagggaggccatctccggttgagagaatagattggttggaagcttaacttacctgctgtcagcttttagggtaattcgactgtgaaagcatcaattttctggacagaaaagggaaaggtattaaactggttttaaaaacaaatagtttaat

SEQ ID NO: 6294 - DNA, 280 bp, Bos taurus
  unsure (115): unsure at all n locations; Clone ID: 27-LIB3058-037-Q1-K1-G11
cacgaggtgtcgtgaaaaccaccgttaattctaagccaaaatgggaaaggagaagacccggatcaacatcgatgtcattgggcacgtagattcatggaagtctaccacgactggncatctgatctataaatgtggcgggatcgacaagagaacaattgaaaagttcgagaagaggctgccgagatgggaaagggctccttcaaatatgcctgggtcttggacaaacttaaaacttaacgtgagcgtgggatcaccattgatatctccctgtggaaatttg

(The sequence listing continues in the following parts.)
